United States Patent Application Publication US 2005/0153317 A1 - sequence listing, part 4

SEQ ID NO: 13848 - DNA, 600 bp, Chicken  19866894218497_9
gctcacaggggacatcgctctgcctycaaagctggagagactgggctacagagagaggccgtgtygtctctcaggagtacattttgtctttctgcacaaatggmagtggctggggaaaaagatttacaacagaagtcaggaggagagcttggagagtccttgaaggcctgaagagaccctgctcccaagagattcactgcggagacctttttggtaaatgtttgcctggccagtccttaaactttgagcaaatttccccygcacacactcaagaaacccactccagtgtctgactgactragctcaccattttttctaataccagccttctgtggctgaaatgtaagcccattaattctcagatcgtgctcccccaagcacttgagcatgcagcaaagctgcaaggactgagctgcaagcagccactgctgctgtctgcatgttgcttcttttcatcccagcccctgcccgtttgtctcccccatgaatgagatgacaggcttaagtggaggcaggcattaattatagggtttgttctgaacctagcacagcacagagataacataatcaagtcttttcagcgctactacggcataaatg

SEQ ID NO: 13849 - DNA, 600 bp, Chicken  19866894218500_1
gttcctgtttctgcttttgttttgcttaccactgttggttacaaacagctttcgaaaggtccagtgcctgttttagagatcccacatttccctgcacccaaacagaaggaagagctgaagcagttactcagtgaacaatgaacagattaaaggaatcgatcaccaaaacgtgaaggacaaatttctcttaatcataaagacttgtcaactgagagtagccaagtagaattcagttatcaatcataaagctacacataactcagcatcaactcttaaaagaatttacagacttaaacccasttttctgttttaaaaaatgtctctcaaactacagaaatrttgtggctgagattacagttatttgaagctgatagactatgtggatatgtttcacacagtgtaagtgcagaaaatgaccaggtacagtcagacaatgagaaaattcaagaaaatccagatgctccatctaaaatacaggtatatactgcagagagcctgcagaactggaatcagtggtttcctgatccaagtgcagggcgtaggactctgacttgtagagttacgtgtcccttagagaccagcagcagtagagaattgcat

SEQ ID NO: 13850 - DNA, 600 bp, Chicken  19866894218500_2
tacaaacagctttcgaaaggtccagtgcctgttttagagatcccacatttccctgcacccaaacagaaggaagagctgaagcagttactcagtgaacaatgaacagattaaaggaatcgatcaccaaaacgtgaaggacaaatttctcttaatcataaagacttgtcaactgagagtagccaagtagaattcagttatcaatcataaagctacacataactcagcatcaactcttaaaagaatttacagacttaaacccasttttctgttttaaaaaatgtctctcaaactacagaaatrttgtggctgagattacagttatttgaagctgatagactatgtggatatgtttcacacagtgtaagtgcagaaaatgaccaggtacagtcagacaatgagaaaattcaagaaaatccagatgctccatctaaaatacaggtatatactgcagagagcctgcagaactggaatcagtggtttcctgatccaagtgcagggcgtaggactctgacttgtagagttacgtgtcccttagagaccagcagcagtagagaattgcattgaaagtattttcaattgcactgaaagtatttttgcact

SEQ ID NO: 13851 - DNA, 419 bp, Chicken  19866894218510_1
  misc_feature (1)..(62): n is any nucleotide
nnnnnnnnnnnnnnnnnnnnnnnnnnnnnnnnnnnnnnnnnnnnnnnnnnnnnnnnnnnnnnctcctaatgaagtttctggtgaaaggagcgcgacacaaagccaccgcggcatgaatcattcatgggaaatataaaagataaaagccgtcggacaatgggcagcgccccgcatggagcgcgcaacgcgtttcccttccccgcgtccccacgtccccgtgtctgtcctgcgccgacccgcgccgtccccggccccgcacccaaaggcgctcggctcccccctccccggcacgttgggagsgctgcggcggcggccgggcccggcccggagccgctcggtggcaccgcgtgggccggcagcgtgagagggacgcgctccccttcggcaggcagccccgtgccgggctgcggggcgcggtg

SEQ ID NO: 13852 - DNA, 600 bp, Chicken  19866894218518_1
gctggcagagtctgcagagaagcaaggggaccattaaaaacaaagagtcgctttcaattccctttgaagtccaatttgctgcagtaaaactgcaggagaattaaccagctgggctgcttaattttgcagaaatcaaggaaagagaaaacatcagccctgccctgctggagcaggcaatgacagcctggtgctgtgctggcgctgcggttctgctggatccaacctgctgctccagagccacaggacagcagcaaggaaagcctccttcctgctgaggctgcagactgagagatctctgcmtgctgtgagggctgagcctctgacactgggctggggagaagcacatctccatgctgggcactgtggtctgcctaaaggcaactgcccaaggagcccaggtgaactatctaaggaggagcaaacagattgagaagagcagattcccttgacctgacccactagttcctctcaaaatcaattgcagctgggtctgtaaatgtttaagagatcaatttccatgtacccctgcaccctctggacccttctcagttgcaaaggcatcctgagggaaggagcctatggaggttgttgatgcatgaa

SEQ ID NO: 13853 - DNA, 600 bp, Chicken  19866894218527_1
tgcattgtgtcaatacactattcaagaattttttgtttaaatttaaaatattagtgaagttcactttgtttcaaaatgaaaataaacattccccaggatagcaaaaatacaactgaagatacaaagttggtatctttgtctgcattttgctcttactaaaaatgaatgactggatagtgcagaaaatgagcataaaaatagtatactcaagaagcaacagcacaggtacatttctcaggtaattctattctcttttccaatctcagtggctaagccaataaaaagcacttatattcgggmttctttcttgtaattgaatgcaaaatttagttctaccttattatatatggcaacagatattctctgttatgttatctagaaggaaactactcttgattttgacaatttacatcatcttgttctctgcaaatatgatctaatagtcttcgttacctgcaatttatagagaagacttagtgcttgtgtggtattcttcagatgaaaacaaagcaagttttctccacaattcacatttcttatgttgtgttggacagacagcagcaccaagaaatactgtgaggactgcagccgatgaagtac

SEQ ID NO: 13854 - DNA, 600 bp, Chicken  19866894218530_1
attgattcttctaattcatggacagtagaagctttaagctctgctagcatagcccagacgtgaccaaagcatcactcagccacaaagacacacagacaatacccaacggatgtagattaactgaaatgagtttttattaactcacctggaaacataagtcagaagtaaaacacacagagctcacccttcattgggtatttcactgtgtcagtcaggcttacacttccctggccccccaggtttctcagggtgaggtccccagatctgcaggtgcctcttcccaaacacagctgcatctawaaagggaatggagtcttctatgaactcaggggcactcaggattcaggcactcatgcttctctctcatctctggtttccaaatataatgcaaaactgtattttaaaattcacatgtagcaatgacttgtcacacttctgaaatccactcagcaaatagttatggagaactgaaaagaggggtgcaagagcagaataaacacacacacagcatgctaataccaccaaatgcttaggtaagattagagccctcagaagtgctccaaaatgcctctgtcccatgagtctcataagaagacagat

SEQ ID NO: 13855 - DNA, 600 bp, Chicken  19866894218530_2
tatgaactcaggggcactcaggattcaggcactcatgcttctctctcatctctggtttccaaatataatgcaaaactgtattttaaaattcacatgtagcaatgacttgtcacacttctgaaatccactcagcaaatagttatggagaactgaaaagaggggtgcaagagcagaataaacacacacacagcatgctaataccaccaaatgcttaggtaagattagagccctcagaagtgctccaaaatgcctctgtcccatgagtctcataagaagacagatgtcataagaaataaatayactgaaagacacgtaggtgcttattctctcccttgatagccaacagctgtgtgcctctacaggctctaacggttgccatcctccttttccctcttatttctcttgtttagctcttccatgaaaaaaaaaaacagatcaaaagaaaatgttcaaacattaaatatatggatttccagtgtgctttgattggaaaatgcagtgtagctaaaccagcacatggactacactcggattcctgagccattcaatgttcttacgtgccctgcaggtaatgagctttactcctacttgctggatttt

SEQ ID NO: 13856 - DNA, 600 bp, Chicken  19866894218537_1
gtcaagtgcggcaggacaaagaaacacttcgggttgctgtcacgccgggactgcggggaaaaacctccaagccgtcctgtaggatcttctgggaactccacagaggaggtaattttgccgaccccctgtccaaagccttcccacgtccctctaggaagcagtgagggaaaacttcagatttcttttggaggtgtgagggacggcccttctagaaagctagtgtgccagaaagcccagcggaagtgcctttccactaatgcacgccgcatgggaaataagcaggaggagttggaagccacratgtgcttggaaaacaatgatctggctgctatcagggaaacgcggtgggacgaatctcacaactggcgtgctgtggctgagggccgctggctcttcagaagggataggcagggtaggagaggaggggggtgttgccctctatgttagggagtggacagattgcgaagagctgcgtctgagtaacagccatgaccaggccgggagctgtcacggagttatctccagatctgggaccgtgacaggggcagcaggcccgaaacataagggagagagggtgaaaaagaaaagcgttgaaggctt

SEQ ID NO: 13857 - DNA, 600 bp, Chicken  19866894218538_1
attttttctctatttgtatgtttcaatataatttactgaaaaaggatcttgggaggaaaaacgtattaatttttgaaaatgaagtagttaaaattgtttcttggtctttgctgtttaaatgatgattttgaaagattacacttgtatgtcagtattgtgtattattgtatggactaatgttgcctgtaataaagagaactttacacgaagctcttttctgcatgtagcctctcaggactgaggtcttgtaaaaacagcccatggtttatttgcctgttagcaaaagcttgagcacctgtygctaaaatctaggttagtgtctgtgtctcggccgcttkttcgccgttttctttatcactgttacctccttggactcaccacggcactgaaccaacaaaaccagcccccgtgcttgcagagcgagaggagcgccgtgctgtgggatgcaggcaggcaccgccctcccggcaggaagcaggtgggagcagcccggccaccctctgctccagcacgggagcccgcacagccctgtttatcctgagctcctgtttgtttcgttttggcttcttscagatcctacagcagcttcacttttgtgct

SEQ ID NO: 13858 - DNA, 600 bp, Chicken  19866894218538_2
aaaaaggatcttgggaggaaaaacgtattaatttttgaaaatgaagtagttaaaattgtttcttggtctttgctgtttaaatgatgattttgaaagattacacttgtatgtcagtattgtgtattattgtatggactaatgttgcctgtaataaagagaactttacacgaagctcttttctgcatgtagcctctcaggactgaggtcttgtaaaaacagcccatggtttatttgcctgttagcaaaagcttgagcacctgtygctaaaatctaggttagtgtctgtgtctcggccgcttkttcgccgttttctttatcactgttacctccttggactcaccacggcactgaaccaacaaaaccagcccccgtgcttgcagagcgagaggagcgccgtgctgtgggatgcaggcaggcaccgccctcccggcaggaagcaggtgggagcagcccggccaccctctgctccagcacgggagcccgcacagccctgtttatcctgagctcctgtttgtttcgttttggcttcttscagatcctacagcagcttcacttttgtgctgattcagttctttgtttcagcaagctcctttcagtcac

SEQ ID NO: 13859 - DNA, 421 bp, Chicken  19866894218538_3
tgcctgttagcaaaagcttgagcacctgtygctaaaatctaggttagtgtctgtgtctcggccgcttkttcgccgttttctttatcactgttacctccttggactcaccacggcactgaaccaacaaaaccagcccccgtgcttgcagagcgagaggagcgccgtgctgtgggatgcaggcaggcaccgccctcccggcaggaagcaggtgggagcagcccggccaccctctgctccagcacgggagcccgcacagccctgtttatcctgagctcctgtttgtttcgttttggcttcttscagatcctacagcagcttcacttttgtgctgattcagttctttgtttcagcaagctcctttcagtcactcactagaaattgctaaattagtttgcctttttttcccctctttcccctctcc

SEQ ID NO: 13860 - DNA, 599 bp, Chicken  19866894218540_1
  misc_feature (1)..(22): n is any nucleotide
nnnnnnnnnnnnnnnnnnnnnnccccccccccccccggccccagcagctcctcctgacgccgagccgtgcctcggaaaggctgtgctccccccaggcagccttttgcaagctggtgctttgtaatctggcggtgcacaaaccgggcagctctccagccctcggagctgttttgcatttaggctttgctggcttttagctaccgcatccagggcagaggcaggagccctgctccccatccccagcggctctgcccctgctgcctcaccccccaagctttgcgggttgctcagcatccctgyggcgtcggggatgycatgacccatagcagctctgctcctccggcccacggcccactgcatccccgaggtcagactgtgggtcctggaggaaaacctcactccttacccatattgcctgggtgataaccgtggggcagctcccattgctccatctcagccctgtggggcggaggacggtggatggggtgggagccacgttcagcctcagcactgccacgtgtctgttgatgcctttgggatggatgctgagggtgagcgtccccatcccagcaccgcccggctctctccaagaggatcag

SEQ ID NO: 13861 - DNA, 599 bp, Chicken  19866894218540_2
  misc_feature (1)..(8): n is any nucleotide
nnnnnnnnccccccccccccccggccccagcagctcctcctgacgccgagccgtgcctcggaaaggctgtgctccccccaggcagccttttgcaagctggtgctttgtaatctggcggtgcacaaaccgggcagctctccagccctcggagctgttttgcatttaggctttgctggcttttagctaccgcatccagggcagaggcaggagccctgctccccatccccagcggctctgcccctgctgcctcaccccccaagctttgcgggttgctcagcatccctgyggcgtcggggatgycatgacccatagcagctctgctcctccggcccacggcccactgcatccccgaggtcagactgtgggtcctggaggaaaacctcactccttacccatattgcctgggtgataaccgtggggcagctcccattgctccatctcagccctgtggggcggaggacggtggatggggtgggagccacgttcagcctcagcactgccacgtgtctgttgatgcctttgggatggatgctgagggtgagcgtccccatcccagcaccgcccggctctctccaagaggatcagagcccggtgctttc

SEQ ID NO: 13862 - DNA, 599 bp, Chicken  19866894218541_1
  misc_feature (1)..(159): n is any nucleotide
nnnnnnnnnnnnnnnnnnnnnnnnnnnnnnnnnnnnnnnnnnnnnnnnnnnnnnnnnnnnnnnnnnnnnnnnnnnnnnnnnnnnnnnnnnnnnnnnnnnnnnnnnnnnnnnnnnnnnnnnnnnnnnnnnnnnnnnnnnnnnnnnnnnnnnnnnnnnnnntgccccagctggccctagtgggagcaggggctgggctggtgacctccaaaggtggcttctaatctcgttttctccctttggttctgagataggaagccagtaagcaggacagcaggcctgacgccctcctcctaggaaagrgcytggagggcagcatacgttcccgtatggatccacataaagcaagctgacatccatagctggtctggcgctgacagcctgcttaagcatccactctgcagcytcagcccaaccttcccagctgaatacttcgggttctgattgccccatctctctgggaggaagacagwagttaaatgctgctggttttatgtggagcgtgaatactgtgaatacagtgcttttataatccttcaataacaacttgcttaactgcagagggggctgtacaaaatgaaggccacggtggcatttttcct

SEQ ID NO: 13863 - DNA, 599 bp, Chicken  19866894218541_2
  misc_feature (1)..(156): n is any nucleotide
nnnnnnnnnnnnnnnnnnnnnnnnnnnnnnnnnnnnnnnnnnnnnnnnnnnnnnnnnnnnnnnnnnnnnnnnnnnnnnnnnnnnnnnnnnnnnnnnnnnnnnnnnnnnnnnnnnnnnnnnnnnnnnnnnnnnnnnnnnnnnnnnnnnnnnnnnnnntgccccagctggccctagtgggagcaggggctgggctggtgacctccaaaggtggcttctaatctcgttttctccctttggttctgagataggaagccagtaagcaggacagcaggcctgacgccctcctcctaggaaagrgcytggagggcagcatacgttcccgtatggatccacataaagcaagctgacatccatagctggtctggcgctgacagcctgcttaagcatccactctgcagcytcagcccaaccttcccagctgaatacttcgggttctgattgccccatctctctgggaggaagacagwagttaaatgctgctggttttatgtggagcgtgaatactgtgaatacagtgcttttataatccttcaataacaacttgcttaactgcagagggggctgtacaaaatgaaggccacggtggcatttttccttaa

SEQ ID NO: 13864 - DNA, 599 bp, Chicken  19866894218541_3
  misc_feature (1)..(56): n is any nucleotide
nnnnnnnnnnnnnnnnnnnnnnnnnnnnnnnnnnnnnnnnnnnnnnnnnnnnnnnntgccccagctggccctagtgggagcaggggctgggctggtgacctccaaaggtggcttctaatctcgttttctccctttggttctgagataggaagccagtaagcaggacagcaggcctgacgccctcctcctaggaaagrgcytggagggcagcatacgttcccgtatggatccacataaagcaagctgacatccatagctggtctggcgctgacagcctgcttaagcatccactctgcagcytcagcccaaccttcccagctgaatacttcgggttctgattgccccatctctctgggaggaagacagwagttaaatgctgctggttttatgtggagcgtgaatactgtgaatacagtgcttttataatccttcaataacaacttgcttaactgcagagggggctgtacaaaatgaaggccacggtggcatttttccttaaacrcattatttctgtaagcactgcactgtgcaagagctcacttttgttcagacactttacaaagacagagacctgaacggagagcacgagcttatgggac

SEQ ID NO: 13865 - DNA, 600 bp, Chicken  19866894218541_4
gccctagtgggagcaggggctgggctggtgacctccaaaggtggcttctaatctcgttttctccctttggttctgagataggaagccagtaagcaggacagcaggcctgacgccctcctcctaggaaagrgcytggagggcagcatacgttcccgtatggatccacataaagcaagctgacatccatagctggtctggcgctgacagcctgcttaagcatccactctgcagcytcagcccaaccttcccagctgaatacttcgggttctgattgccccatctctctgggaggaagacagwagttaaatgctgctggttttatgtggagcgtgaatactgtgaatacagtgcttttataatccttcaataacaacttgcttaactgcagagggggctgtacaaaatgaaggccacggtggcatttttccttaaacrcattatttctgtaagcactgcactgtgcaagagctcacttttgttcagacactttacaaagacagagacctgaacggagagcacgagcttatgggacaagggtccacaccccctgccggctggtgacaggaccagccattaggcactgccatctcttatcccatg

SEQ ID NO: 13866 - DNA, 600 bp, Chicken  19866894218541_5
gagggcagcatacgttcccgtatggatccacataaagcaagctgacatccatagctggtctggcgctgacagcctgcttaagcatccactctgcagcytcagcccaaccttcccagctgaatacttcgggttctgattgccccatctctctgggaggaagacagwagttaaatgctgctggttttatgtggagcgtgaatactgtgaatacagtgcttttataatccttcaataacaacttgcttaactgcagagggggctgtacaaaatgaaggccacggtggcatttttccttaaacrcattatttctgtaagcactgcactgtgcaagagctcacttttgttcagacactttacaaagacagagacctgaacggagagcacgagcttatgggacaagggtccacaccccctgccggctggtgacaggaccagccattaggcactgccatctcttatcccatgctargagcagacaggagcagcgatgggccccacgtacaccctcagagagacatctgccataaccaagatgtgcagagccacgtgcactgtttgttttgctcaggacccccatgagggagtgagccagcatcccag

SEQ ID NO: 13867 - DNA, 510 bp, Chicken  19866894218541_6
aaatgctgctggttttatgtggagcgtgaatactgtgaatacagtgcttttataatccttcaataacaacttgcttaactgcagagggggctgtacaaaatgaaggccacggtggcatttttccttaaacrcattatttctgtaagcactgcactgtgcaagagctcacttttgttcagacactttacaaagacagagacctgaacggagagcacgagcttatgggacaagggtccacaccccctgccggctggtgacaggaccagccattaggcactgccatctcttatcccatgctargagcagacaggagcagcgatgggccccacgtacaccctcagagagacatctgccataaccaagatgtgcagagccacgtgcactgtttgttttgctcaggacccccatgagggagtgagccagcatcccagatatgcggggcagcatgagaaaggaaaggagtatcattatttttaagctaagataaatcctggctccttcctctggttc

SEQ ID NO: 13868 - DNA, 600 bp, Chicken  19866894218544_1
tgtaaaattgtagaaccagcttttagaaacctttaatgctccatctcccagaggtgaaatgccagcctccattcgggtctctttcagttgcccttgccacttcaaaatgtgtctggaaacagctctgcagatggcctcgtatgttttacaggaaatattacttaaacattggaaaggatcgaatttctcctgttaagaattacaaatctggatttcattttctctctttccccccacccccccaaaccatgggaaaaaaatgtgactgttacatatgacactaaggaagtatttcggatwttttttttattttttttaatatgccacttgtattggaaaataaaggataaatcttggaaatgtaacctggttaaataagccttattcttcatataaaatagtagctaatcgaaaagatttcccaaaagcatcaaagctttttatatactatggtctggaaaacatattgcgtaggatttctatttttgttctttttcatgcgaatgtagaagaataataaacttttctttcagctttgcagagagagtttcctaatgtttgaagcatttcttacatattgaccttggtttatgtattctg

SEQ ID NO: 13869 - DNA, 579 bp, Chicken  19866894218544_2
gaaattaaaatcagcgttcccacaactagtctacttaatattcatatgcaggaaaagatccataaactcttttttcttctttttttattaacaaaggaaacaaactccccctgacagtccacttctcccagccgtgcagcgactgcctttgttttgggttggaacgaaatactctcatgaagccttgcatgcgggagccgctgctggggcagggacacatacagtagggaatttcagtgcccctttcaagatgatccacctctaccttcatgggctgggactggtgcccaagcaatgcayggatggtggagatcctgcagagcccctggagccatggccaacactgtgttgcttcccattgctctaagagcagctttgccaaaagcactgacttatttttgtagggacagctgtggtgggtaccccacttgaccaatttggggccatccaaccctaaagacttagcttgtgtttacccaaatctatcaccacaattctccattaaaatatatcctgtccttgctttccttttgtcactattacgcaggaaattaaaaaaaacaagaggactgcagtgat

SEQ ID NO: 13870 - DNA, 600 bp, Chicken  19866894218547_1
actgaagctcctgtctgtccagccatctgaaaaacttctgggccttcagttaaaggcaagttagacggaatagatatctttacaaatcagaaaccccttgatgttggaaaactactagcttttggtgctggatacacaggacctgagtaacagagaattaaaggaggagaagttaaacaattaacagcatacatatataagctagtaacaacttatgtatagccagcgtgaaaaaatatgtcacacacagtgcaagaatatcctgcacaaattaaaaggacaactcgtgacatgccttarggagtgcctgaagaacgtattgaggaagatctggcaccctcctccgtactttgtctaacaaagactctgaagaaaatcaccatattaatatgaatgagaagggtactgagacaacttggagacaacaggactgctactgactgacaccagataacacacgaattaacatgtaattaacaaatgtaaaccttttgataagattgtgaacctggagtacccagccaatggggaaacaggggargggggagaaacaaggtacaaaagctgtcatacccatgcccataagcacgctctcctgct

SEQ ID NO: 13871 - DNA, 583 bp, Chicken  19866894218547_2
cacacacagtgcaagaatatcctgcacaaattaaaaggacaactcgtgacatgccttarggagtgcctgaagaacgtattgaggaagatctggcaccctcctccgtactttgtctaacaaagactctgaagaaaatcaccatattaatatgaatgagaagggtactgagacaacttggagacaacaggactgctactgactgacaccagataacacacgaattaacatgtaattaacaaatgtaaaccttttgataagattgtgaacctggagtacccagccaatggggaaacaggggargggggagaaacaaggtacaaaagctgtcatacccatgcccataagcacgctctcctgcttgtgggatgcctgccattgcaatcgcaaataaaatctgctttatcagagataccgtcctgacaaaattatttggatatttccaacactgattgcatcacaggcaggtaatctgtagttttaaacagtttgctgtgaagcagcagatacaaaactgcaggtccccttcacaccaacataacgggcagagtgatgctatcaacataatagagcatccactggaaaa

SEQ ID NO: 13872 - DNA, 600 bp, Chicken  19866894218550_1
ggcacccacagctctctggacagcagtgccaggtgctggtgtttccatgcataatgttggctgtggtaattgtggcagaccagggggaagtgttaccatgctctttaaagaaatgacatgaaaaagccccaatatttttatgttctattccctctgcttttgtttctcaaggaaatcttagggttttgaaaacacaatgcaaataaacaaataaataaataaaaattgaacagtttcctttgaaacaaaagctggatctcctccacgttgtctgagacaacttccaaaagtttggggggraaaaaaaatgcagtatgagcagttctaatgagaacatcacaattatcctcagcccgccacgtgggatttctctttacagtggctcgattcattggggaaattaagttgtttaaaagtaacgggttttaatagaaacattgtgctgactgctctctttgcacgttggctgggaccagcggcaggcgctcccgggggttgggacctgatgggacgcgctccttgccccgtgcccatggagcccttcagcaccacgggccagcaacaagaagaggtggttttaaagaacgacgtaaagtcttg

SEQ ID NO: 13873 - DNA, 600 bp, Chicken  19866894218551_1
gaatcatgttagaagtcaaatgtcttacatctcatgagttctcttcaggttaagtaaataaattgaatcagaaatagaactgaaagcttgaccttgaagtcgccttttcatttctacagctctcaaaggtaccacagcatcaggcctttttgggctgtgagttgttgggttttttgttattgttgttttgttttttggcttgaatagaagtctgaatcaggaaaacctggatattcagcagagactctggaatctccacttatcctagaatagcttcagttggaggagatcttaaagatyacctagttccaatttcctgccaaaaaaagggttgccaaccactagatcaggctcacaagcatcccatccaacctggccttgagcatctccaaggatggggcatccatcctggcctgtgccagggcctcaccaccctctgagtaaacagtttgttcctaacatctaacctaaatcttctctcttttagtttgaagtcattccccccttgtcctatcactatcaaaccatgtaaaaagcctgttcccctcctgcttgtaagctcccttcaagtactggaaggcagcaatgaggcctccccat

SEQ ID NO: 13874 - DNA, 600 bp, Chicken  19866894218553_1
acatacatacactttgtcaaggtacaagatgcgttccacagatgtaagacagtaaagaattagtcagcggagcattatctgctgcaatataaatcttaatttgctctacaaatccttgcagtgaatgtttgaaaaaaaaaattaggatattgtcagtgtcatgtagtatttcaggcaacactgtacacaaaaccaaagcagcagctatttatttatttatttatttatttatttattagaaaaataaagaagtgcttgaatgatttagcttctgcatgggaagcagacaagaaagagcaytgctatggtacaagaacctacttctctcagtagtgttgtctgccaataaactactgcacacactgtagctttgtgttactgacacctgcatacaggattctacatgagcatcaattctacgtgagaacatgtgaacatgcatagccatgagtccaagtggaccacataagagatcyccctttaaatatggcatgtgtgttaytagcttgttcctaagaaaataccttgccatctcccttcctatcccaagcagtccttatggttggctgctactttgtctaactacctctttagaaattg

SEQ ID NO: 13875 - DNA, 600 bp, Chicken  19866894218553_2
aacactgtacacaaaaccaaagcagcagctatttatttatttatttatttatttatttattagaaaaataaagaagtgcttgaatgatttagcttctgcatgggaagcagacaagaaagagcaytgctatggtacaagaacctacttctctcagtagtgttgtctgccaataaactactgcacacactgtagctttgtgttactgacacctgcatacaggattctacatgagcatcaattctacgtgagaacatgtgaacatgcatagccatgagtccaagtggaccacataagagatcyccctttaaatatggcatgtgtgttaytagcttgttcctaagaaaataccttgccatctcccttcctatcccaagcagtccttatggttggctgctactttgtctaactacctctttagaaattgtagactgttgacagtttttcctagtttgtggctgtaaagtgaagacaactgaagaatactgtaattattttattttattgcagaattatagaatggctttggttgaaatgccaccaacatccacctacaatgcagtgcaacagtataataaaatagatggcattactttcggagca

SEQ ID NO: 13876 - DNA, 600 bp, Chicken  19866894218553_3
agctatttatttatttatttatttatttatttattagaaaaataaagaagtgcttgaatgatttagcttctgcatgggaagcagacaagaaagagcaytgctatggtacaagaacctacttctctcagtagtgttgtctgccaataaactactgcacacactgtagctttgtgttactgacacctgcatacaggattctacatgagcatcaattctacgtgagaacatgtgaacatgcatagccatgagtccaagtggaccacataagagatcyccctttaaatatggcatgtgtgttaytagcttgttcctaagaaaataccttgccatctcccttcctatcccaagcagtccttatggttggctgctactttgtctaactacctctttagaaattgtagactgttgacagtttttcctagtttgtggctgtaaagtgaagacaactgaagaatactgtaattattttattttattgcagaattatagaatggctttggttgaaatgccaccaacatccacctacaatgcagtgcaacagtataataaaatagatggcattactttcggagcagtacttgtattaagtttttatggggg

SEQ ID NO: 13877 - DNA, 600 bp, Chicken  19866894218553_4
taccttgccatctcccttcctatcccaagcagtccttatggttggctgctactttgtctaactacctctttagaaattgtagactgttgacagtttttcctagtttgtggctgtaaagtgaagacaactgaagaatactgtaattattttattttattgcagaattatagaatggctttggttgaaatgccaccaacatccacctacaatgcagtgcaacagtataataaaatagatggcattactttcggagcagtacttgtattaagtttttatggggggagctcttctcaactgacygaaaaccrtcaaaataacattaaatctrtgaaattttgcatcacagacctgaggactgtatggtagaacatctagcaaaagactttgggagtatttaccgagcattacaccgtgcttttcatctcagagaaaaaaaaaattaccctctttaaagagaaaatgagatgttttgaggatgaaaaaagaagtggatttttttgtttggatgtttgtgttttaatcacaaattttactgtatcaaggctgcttttctgtgactgagaaatctgtagaatttgatatcacaggaagaatactggt

SEQ ID NO: 13878 - DNA, 600 bp, Chicken  19866894218553_5
catctcccttcctatcccaagcagtccttatggttggctgctactttgtctaactacctctttagaaattgtagactgttgacagtttttcctagtttgtggctgtaaagtgaagacaactgaagaatactgtaattattttattttattgcagaattatagaatggctttggttgaaatgccaccaacatccacctacaatgcagtgcaacagtataataaaatagatggcattactttcggagcagtacttgtattaagtttttatggggggagctcttctcaactgacygaaaaccrtcaaaataacattaaatctrtgaaattttgcatcacagacctgaggactgtatggtagaacatctagcaaaagactttgggagtatttaccgagcattacaccgtgcttttcatctcagagaaaaaaaaaattaccctctttaaagagaaaatgagatgttttgaggatgaaaaaagaagtggatttttttgtttggatgtttgtgttttaatcacaaattttactgtatcaaggctgcttttctgtgactgagaaatctgtagaatttgatatcacaggaagaatactggttttaatat

SEQ ID NO: 13879 - DNA, 600 bp, Chicken  19866894218553_6
gcagtccttatggttggctgctactttgtctaactacctctttagaaattgtagactgttgacagtttttcctagtttgtggctgtaaagtgaagacaactgaagaatactgtaattattttattttattgcagaattatagaatggctttggttgaaatgccaccaacatccacctacaatgcagtgcaacagtataataaaatagatggcattactttcggagcagtacttgtattaagtttttatggggggagctcttctcaactgacygaaaaccrtcaaaataacattaaatctrtgaaattttgcatcacagacctgaggactgtatggtagaacatctagcaaaagactttgggagtatttaccgagcattacaccgtgcttttcatctcagagaaaaaaaaaattaccctctttaaagagaaaatgagatgttttgaggatgaaaaaagaagtggatttttttgtttggatgtttgtgttttaatcacaaattttactgtatcaaggctgcttttctgtgactgagaaatctgtagaatttgatatcacaggaagaatactggttttaatatactgtcttaaaaaaaaggtt

SEQ ID NO: 13880 - DNA, 599 bp, Chicken  19866894218557_1
  misc_feature (1)..(111): n is any nucleotide
nnnnnnnnnnnnnnnnnnnnnnnnnnnnnnnnnnnnnnnnnnnnnnnnnnnnnnnnnnnnnnnnnnnnnnnnnnnnnnnnnnnnnnnnnnnnnnnnnnnnnnnnnnnnnnntaatccgtttaatattgatgtactgaggcagcctttgcaggcactttgtaggggagtctctctctgatggtcaccaccatgttctgctaaggagagccaggactggcaggcacaaagcttctgcagcactctgggagttactcacctgggaggaagccacaaagcacgaaagagaacagcacgaagacrcctgccatggccatggtgaggtactgcccggctctgcaggcggctgccggtgctctgctcctgagatggtccccccgaggctgcctgcaaatatatacaaacgtggcgtccgaactgttggactggaacacrgagcagccagctgaatctgtcagyggcacaatgaggctggtaatatttattgaggtcctgacctccaggtaatggtctgcgtctcccaggcaattgattttggctggacacttggttaatagcttgagacaagtgtcacatgctctcagtggtcaaaaccaaacaaa

SEQ ID NO: 13881 - DNA, 600 bp, Chicken  19866894218557_2
actgaggcagcctttgcaggcactttgtaggggagtctctctctgatggtcaccaccatgttctgctaaggagagccaggactggcaggcacaaagcttctgcagcactctgggagttactcacctgggaggaagccacaaagcacgaaagagaacagcacgaagacrcctgccatggccatggtgaggtactgcccggctctgcaggcggctgccggtgctctgctcctgagatggtccccccgaggctgcctgcaaatatatacaaacgtggcgtccgaactgttggactggaacacrgagcagccagctgaatctgtcagyggcacaatgaggctggtaatatttattgaggtcctgacctccaggtaatggtctgcgtctcccaggcaattgattttggctggacacttggttaatagcttgagacaagtgtcacatgctctcagtggtcaaaaccaaacaaacagacttttggaccaaaaaaaaaaaaaacctcttaaggactctggtagaaccctaaatagcacagaaygctgaggggagtaagggacaggtccttcattcgtctctgcatccacatctcccagcaggaagcag

SEQ ID NO: 13882 - DNA, 600 bp, Chicken  19866894218557_3
ttgtaggggagtctctctctgatggtcaccaccatgttctgctaaggagagccaggactggcaggcacaaagcttctgcagcactctgggagttactcacctgggaggaagccacaaagcacgaaagagaacagcacgaagacrcctgccatggccatggtgaggtactgcccggctctgcaggcggctgccggtgctctgctcctgagatggtccccccgaggctgcctgcaaatatatacaaacgtggcgtccgaactgttggactggaacacrgagcagccagctgaatctgtcagyggcacaatgaggctggtaatatttattgaggtcctgacctccaggtaatggtctgcgtctcccaggcaattgattttggctggacacttggttaatagcttgagacaagtgtcacatgctctcagtggtcaaaaccaaacaaacagacttttggaccaaaaaaaaaaaaaacctcttaaggactctggtagaaccctaaatagcacagaaygctgaggggagtaagggacaggtccttcattcgtctctgcatccacatctcccagcaggaagcagctaaggctcagcaccatcgtgcct

SEQ ID NO: 13883 - DNA, 600 bp, Chicken  19866894218557_4
ggtccccccgaggctgcctgcaaatatatacaaacgtggcgtccgaactgttggactggaacacrgagcagccagctgaatctgtcagyggcacaatgaggctggtaatatttattgaggtcctgacctccaggtaatggtctgcgtctcccaggcaattgattttggctggacacttggttaatagcttgagacaagtgtcacatgctctcagtggtcaaaaccaaacaaacagacttttggaccaaaaaaaaaaaaaacctcttaaggactctggtagaaccctaaatagcacagaaygctgaggggagtaagggacaggtccttcattcgtctctgcatccacatctcccagcaggaagcagctaaggctcagcaccatcgtgcctgcagctctgctttccatgcagttctgcattcttggatattcacctctaggtaaaagcacaggccagggaggctttgtcaccagcagaactgaccaaccactgccaggtgaagctggcagcaccgtatctaacctatgaagttaatggtatttagcactagcttgataaaaggaagggtttcttggcggtttcactgcttaagtatagaaga

SEQ ID NO: 13884 - DNA, 599 bp, Chicken  19866894218562_1
  misc_feature (1)..(126): n is any nucleotide
nnnnnnnnnnnnnnnnnnnnnnnnnnnnnnnnnnnnnnnnnnnnnnnnnnnnnnnnnnnnnnnnnnnnnnnnnnnnnnnnnnnnnnnnnnnnnnnnnnnnnnnnnnnnnnnnnnnnnnnnnnnnnnacttcagtttacaaggtaaactgctggtgacttcagcaatttgttgttgacaccttttggagttctgtaagtatctctactgcaaaatagttggatttctttactggtttccttcttcccatctgctgagaataagctagtttattttttccccattcctgacatgtaacattygctttatgtcaagtagctgaaatgaaactacgtaaagcagagggaagccttctgatgccaccatggcttgggagatgaaacaacaccttctctgcaaacacaagaagtttgtgctttaaraatggtatgaaattttctaattaatcttagatatgtaaaaagcactctacgttcccataccagctgtggcartgctttgaagaaattgcctgcttgttcatgtgatcggagacaaaaagggtttgaagatggaccagattgtcacatgctttacatcttgaaagcagagctctcwaagt

SEQ ID NO: 13885 - DNA, 599 bp, Chicken  19866894218562_2
  misc_feature (1)..(6): n is any nucleotide
nnnnnnacttcagtttacaaggtaaactgctggtgacttcagcaatttgttgttgacaccttttggagttctgtaagtatctctactgcaaaatagttggatttctttactggtttccttcttcccatctgctgagaataagctagtttattttttccccattcctgacatgtaacattygctttatgtcaagtagctgaaatgaaactacgtaaagcagagggaagccttctgatgccaccatggcttgggagatgaaacaacaccttctctgcaaacacaagaagtttgtgctttaaraatggtatgaaattttctaattaatcttagatatgtaaaaagcactctacgttcccataccagctgtggcartgctttgaagaaattgcctgcttgttcatgtgatcggagacaaaaagggtttgaagatggaccagattgtcacatgctttacatcttgaaagcagagctctcwaagtgaggcagaagtatacagaagtatatttttcccctttttccccccaccatcctgttgtaatttatattcaccatgacttcattggtgaactctgggtatgaatgatccagtgtcattaagt

SEQ ID NO: 13886 - DNA, 600 bp, Chicken  19866894218562_3
gtaagtatctctactgcaaaatagttggatttctttactggtttccttcttcccatctgctgagaataagctagtttattttttccccattcctgacatgtaacattygctttatgtcaagtagctgaaatgaaactacgtaaagcagagggaagccttctgatgccaccatggcttgggagatgaaacaacaccttctctgcaaacacaagaagtttgtgctttaaraatggtatgaaattttctaattaatcttagatatgtaaaaagcactctacgttcccataccagctgtggcartgctttgaagaaattgcctgcttgttcatgtgatcggagacaaaaagggtttgaagatggaccagattgtcacatgctttacatcttgaaagcagagctctcwaagtgaggcagaagtatacagaagtatatttttcccctttttccccccaccatcctgttgtaatttatattcaccatgacttcattggtgaactctgggtatgaatgatccagtgtcattaagtatgatcggactttgcttgtggggtctttttgagtgttcagctgttggcttcgtagctttcttcttgctttcag

SEQ ID NO: 13887 - DNA, 600 bp, Chicken  19866894218562_4
cattygctttatgtcaagtagctgaaatgaaactacgtaaagcagagggaagccttctgatgccaccatggcttgggagatgaaacaacaccttctctgcaaacacaagaagtttgtgctttaaraatggtatgaaattttctaattaatcttagatatgtaaaaagcactctacgttcccataccagctgtggcartgctttgaagaaattgcctgcttgttcatgtgatcggagacaaaaagggtttgaagatggaccagattgtcacatgctttacatcttgaaagcagagctctcwaagtgaggcagaagtatacagaagtatatttttcccctttttccccccaccatcctgttgtaatttatattcaccatgacttcattggtgaactctgggtatgaatgatccagtgtcattaagtatgatcggactttgcttgtggggtctttttgagtgttcagctgttggcttcgtagctttcttcttgctttcagtctattcatagctattggaaaagaagagtcttgttttgttatctgcccctttggagttctataaaacaaatgcccaggtctcttttttagcttgttgtcctgg

SEQ ID NO: 13888 - DNA, 600 bp, Chicken  19866894218570_1
catgaaattttgcctttgaagtcacttcatcaataaattcttcctctgttgggattaatcttccacctgccaggccatgaacagccacctttgtgtgtctgcagcaagttgccaaagagggagcagaaaggagcgggtgagcttggcagagctaaatggttcaaaggagaaccaagaaatcctacccatacctttaaacataaagcaacacaaggcactctttcctccaaaacccattcccacatggggttttctctaacctggttagatttcaaaaatgcctacaaaccataatcctaygtggccagatgcctacaaaggaatttgcttctgaataaatccatggtgagagcaaacacccaggttcctgacacttaaaggaacctgaatacatcttttctataaacagaaacgtgccaaaaacagaagcttggttatccctgggaatgtctttttcactcctccatgtagaaggtgatctacagttcacagacatctctgatattcattgtggtttagactggcagttattggtttggcaaatcttttcccacgatgttgaattctttcctacaaagatgaaaccatctggatatgaat

SEQ ID NO: 13889 - DNA, 600 bp, Chicken  19866894218571_1
cacataatgggatcaccagattagattgtttagatgttcaaaaaagttagagtttgcacacagggtcccagatgatgtatcacacagagaggatgtatctaggaatagatgcatatgttcatctgagacaaacaaaaacaaaaaacaaataacacaaatgcgtcgacccaaacccttgtcactggtgtagtgatgattatcatctaaccttaaactgctcggagagatttttctggatggaaagttgtgactgtcataaaatcctgagcacttggcatctgtttcagtcagcttcctgcwtgcttttggctgtaaattggatcatttacactaatgatgatggcatgctgtcacggctcagtagggaaaattatttaatattcatgctcatatcttgggttctgacacagaatccattatgcagaaaagccagggatattttacagggtgatggcaggagatgatgacacataaggttcaaaaggaagggttcaaaagtgtgaacattatcactcatgcagctctttttcaaacttaggttctcaaaagtagccatccagctcaaagcctgagcatctcaaagcaatacaaattgtcaga

SEQ ID NO: 13890 - DNA, 517 bp, Chicken  19866894218573_1
tgcttcccctcgcctcgcccaacctcgcttcccgtcgcctcgccccgcatcgctttgcctcgccccgcctctccccgcatcgccttaccccgccccgcctcgccttgcctcaccccgcctcgcctgccacgcctcatctcaccctgcctcgccgcacctcgccccacttcgacccgccactcccgcctcgcaacgcatagccccactccgcctcgccccgcctcgccttgcctcgtctagccccgccccacctcgcctcgcctcgccccgcttagccctgctttgcatcccctcacctcrccttgcctcgcccagcctgatcctgccacgcctctccccaccctgccttgccccacctcgcccctccccgcctagcctcgccccgcctcgccccgccttgcctcgcctcaccttgcctaacattgccaggcccggccaggccccgcctcgcttcccctcggcccgccccgccccgcctcgcctgacacgcctcgcctcgccccgcctcgcctcaccg

SEQ ID NO: 13891 - DNA, 600 bp, Chicken  19866894218581_1
cgtaaacaagttaggcgcgctctgagcgttcccgtgccagcggtggggccgggccggggcctccagcactgccgcgccaaagccgttaacggtcgcaacggtcgccggcggcgcgcgcacggccacacgaacgcgctctcctgaggggcggccccgcccgggctgcctgcccgggggagcccgccggcctgcggcgagcggcggtcacttacttgtccaaactgaaacactatctgagctgcgcagggagcgggctcacacaaaccgcgcttttcctgacagggcgatttcctgttcgcrggccgctgccgggaaagccgccgcgctccccccggcccggccgctcccgcccgagtcgagggggatggcagcgcaggcgcagccgggcctaccccgctccgctttgaaggccacgcggacggtgccggcagctggttcgcatttggggaccccgagtgcttttaaaagcaccgtgcccggtcaggagttcagcgatgtggctgcctcagaaaggacgtagtagctgtctttgatttaaaagtgaatgaaacagagggggcttcggctcctattttaatttgtgttgaagggaatgatgct

SEQ ID NO: 13892 - DNA, 600 bp, Chicken  19866894218582_1
caattacttgctggtatttcctcactgctccctgcagttaaaaagtggcaatgctgacacataagcagcgctctgggatgtggcactgggcaagcctggctggggctattgctaccataacatccgatggccttgggaggagggactcctactccagagggcctgggcaggttgtgccttgagcaaagcacacagcggtgagagctgaaaggcagacgattctccattctgcacctttcacgtgtggactcagcccagaactcagatcaggcatcggacatatggaaagatggattcagygaagcactcagggggagctggactcacacacacatttaagatagggttctgccagtttaaagtactgataacgaccaccatagaagcaaaagttccagcagttaatcggcaaaagtatcctggaagagtctgggacaagagatcttcatgcaatgagtgttctggggtgagcaaacagttctaacaaagcacttaattgacaaatagctgcatttgcagggctttagaaaacaaattcttacactgttcactctcctgctagggataagcatgggtctgccttcagatgtgccctctgaa

SEQ ID NO: 13893 - DNA, 600 bp, Chicken  19866894218585_1
cactccacagagaagctctcacaaatcaaatgcagaaccttgagcaatgaagaccaactatgtgcaggtctactggctgcaagtgtcaaaatagagtaaatagggataaatatttacattactattttttccaagtgaaatttgtacttaatgtcttcttcctgaagaattcagaacacagcaaaagggaaactgtttttattaaaaataaagcatataagtgatggaaataaaaaaaacatcaccaaacacaccagagcaacaccacttactgtagatatcagtataggccttggttaytcaaacagcaccttcagtctccagacatatcctaggtactccaggggaatcagcatggctcatagtaataccagaagcaaagatctgctttaaatacatggatttaaatagcacggttgcctgttaaagacttggtataaaactaggataactctgtgggggaaaatattgagatgacagaaaaaataaaactaagttctatgagaaagtcacagggctccttcaaaggcatgcacaggcttagatttacacatctgaatccaactgtagaataaaagatgggagcaataaacaaaaact

SEQ ID NO: 13894 - DNA, 600 bp, Chicken  19866894218595_1
ttattcaggtagatcagttttattaataaagacttaacattaagcaattttcagcctccaagagctataaatgctagtatattctttcaatattaccagttggatttattcatctaacccatgtacaccatccaaaatacctaccaccaacgctgctaagaaatcagtttttctcctctcaatccatcccatactgaaaaataaaatgttgcaatctagtactcccacagtctaaaacaccaatcaccaaagaaaaagaaaatacaaggtaaaaaccagcattaccagttaaagtggtcrgtataaatgcataggwtgtgggctggtgggatgtgggccaatagcatttaaacatagattacattttaaatatgaaaagcttaacatctgctcttcaggaagctatgacgagagtcatcaatttaaatgtgaatctctaacagtaggtgtctaaaccagcacgggctcccttgatataagcagagatcttcttctctagtcctgaagtaggatttgattcactgccaatctactgactgtagggagatcccagcaacttagggtaggtgaagaaagtcccactttggtattctacactgg

SEQ ID NO: 13895 - DNA, 600 bp, Chicken  19866894218595_2
gttttattaataaagacttaacattaagcaattttcagcctccaagagctataaatgctagtatattctttcaatattaccagttggatttattcatctaacccatgtacaccatccaaaatacctaccaccaacgctgctaagaaatcagtttttctcctctcaatccatcccatactgaaaaataaaatgttgcaatctagtactcccacagtctaaaacaccaatcaccaaagaaaaagaaaatacaaggtaaaaaccagcattaccagttaaagtggtcrgtataaatgcataggwtgtgggctggtgggatgtgggccaatagcatttaaacatagattacattttaaatatgaaaagcttaacatctgctcttcaggaagctatgacgagagtcatcaatttaaatgtgaatctctaacagtaggtgtctaaaccagcacgggctcccttgatataagcagagatcttcttctctagtcctgaagtaggatttgattcactgccaatctactgactgtagggagatcccagcaacttagggtaggtgaagaaagtcccactttggtattctacactggtaaccaaacagattca

SEQ ID NO: 13896 - DNA, 600 bp, Chicken  19866894218601_1
tgtccaagcaagacttggtgaataacagcaaggtggtggtgtttggatgatggtagtgttttactctagctcctgcagaaaatcttctccactagaaaagaaatagtggcagtatttattgctttttctttttagatttactttgaagctgtacacaggtgttttaaacactttcattcgagacattcactaggagccagccctgctatttcctgaacatatcttccacaaccagcaaaatctcatgccctgcagcctgtgctgtgctgccacaggagctgtgcccacctcccaggctgycagtttgctgcttctgtgcttctccatcatcctgttgcagcaccttatggcatcaggtttgagcagcatcctggtacactgttttgctgtcacactgtgaacaatctcawttttttttcctatacaataacctttactgagaccttgcactacaactattatcaagaggaattatttgcaagagataggccagatcccaccttctatcttaaagtcccaaacctgatagtgcaggtatttcccaagtactgatggtgccttctgtcattcaaggtatacttgggaactgtattttcagtt

SEQ ID NO: 13897 - DNA, 600 bp, Chicken  19866894218601_2
agtatttattgctttttctttttagatttactttgaagctgtacacaggtgttttaaacactttcattcgagacattcactaggagccagccctgctatttcctgaacatatcttccacaaccagcaaaatctcatgccctgcagcctgtgctgtgctgccacaggagctgtgcccacctcccaggctgycagtttgctgcttctgtgcttctccatcatcctgttgcagcaccttatggcatcaggtttgagcagcatcctggtacactgttttgctgtcacactgtgaacaatctcawttttttttcctatacaataacctttactgagaccttgcactacaactattatcaagaggaattatttgcaagagataggccagatcccaccttctatcttaaagtcccaaacctgatagtgcaggtatttcccaagtactgatggtgccttctgtcattcaaggtatacttgggaactgtattttcagtttctcagatatacagttagttcttagatctgcatgttgtgatgatctcaagcctgctagtgcaattttgctatgtaccacgccccccatatgagataggcttttccttaag

SEQ ID NO: 13898 - DNA, 600 bp, Chicken  19866894218602_1
tttttcgtgtgcaggcatatattttaaataaagaatatttctcaacaatttgcacttcaaggccctgggctggctctcagatctgggtactgagatttaagccagtaatcccatatagaagcccctaaaaagaaatgtcccagtttgtataaattaagcacacatccttctgaagtttatttgagaatcagggcactgcccaggaagttctcaggttgcttcaggcacatctggctacattggattcaggtgcaatttaaaactgcagcagtgctaacttcagaatgtctgctgtgagtkgggattgagggggaaaaaaggggcttataaacccagctgagatgattgtcaaagatactgaagatgttgagcacttctacaagtcaaggcctttgaagatgatataattctggctcactgcaaaaggggactctgaactggtctggcaaattctgcttctagtgaaaggaaagcaaattagcaatctgtacatcctgaggttggcttggcacaagacacaatgaagttttgctttctctgagccattttataaaggtgaaagcttccctatgagaacacataaaatgggtcagaaaacga

SEQ ID NO: 13899 - DNA, 600 bp, Chicken  19866894218603_1
gttcttccacatcatgctggtttttaaaacgtgctgcataatagaaaggtctctgtttttgttttttttaagcaaatatgagtctaaaactcccacagtcagtgtgtagaaacaaatgcagccatgtggtaatcccatccacagcaactttaaacagtctccctgaagtgaagccctgcccgcccatggcaccaaatccaactccttcccgttgagattatgcacttctacagtaattaaagggtacatatatcttcattcactggcaacctcttcatctgcacgctctgtaaagctccrtgcttcatgccattcaataaacttgtgatattagagtaggaaaaaaaggcggcataaaattttgtaaatctacaggcaattccagaatgcagatgtttctattatggctcagtaccagcagctcattcatgttttctttatcacttactaatgcatgcacagtagctgtggatgtggcagcagactagtaaaacctgaaacataaacattcatgacaaaaggtttcaattgtattctcactattccgttccagtagctgcatagttttccaygatttattctttgtaatgtgtcaaacat

SEQ ID NO: 13900 - DNA, 600 bp, Chicken  19866894218603_2
cttcatctgcacgctctgtaaagctccrtgcttcatgccattcaataaacttgtgatattagagtaggaaaaaaaggcggcataaaattttgtaaatctacaggcaattccagaatgcagatgtttctattatggctcagtaccagcagctcattcatgttttctttatcacttactaatgcatgcacagtagctgtggatgtggcagcagactagtaaaacctgaaacataaacattcatgacaaaaggtttcaattgtattctcactattccgttccagtagctgcatagttttccaygatttattctttgtaatgtgtcaaacatgtttttacctccacagatttctgcagaccgttagcgttcagcattagtcccgtttaatccatgttaaacagattgacaggaaagtccctaaataaatccatgctctcaccctcttcaggctgcaggaagcaatccctgggcttgaggagctgaagctaatccatttgtcacttttcaattgctttctatcgggaagagcagggagaagtttcagcaattaataccatgggttttgttctgtttcacgtgcaaaaattaaataatgacagccc

SEQ ID NO: 13901 - DNA, 600 bp, Chicken  19866894218603_3
atttgctcgatatttcccatggatttacgtttatttatttatttaattattacacgtatttatgtacaacattgtacagcactgaagccacagcatccttgcagtggcactttatctaaaaattaggaaaaacatcttctcacagagagtggtgctgcagtggcatagctgcccagggtggttgtggagtcaccgtccctgaaggtgttcaagaaccgcgtggatgtggcactgaggaacgtgggcagtgggcacggtggggacgggctgatggttggatgagatgttcttaaaagtctktgccaaccttaatgattgtatgattctatgactctatgaattgcatgaacaagttcagcacgcagcactaaggacaaaagaaacaaasatcccgctaatgggaagattctgaggaacacctgagcttggaagaactgcataaatacaaatactcagcattcacatcttggccaaagatttttccaaatacgccttgaaaagttttatggaaagaacaggtaagaccatgcttttggaagccaagtataactgtgctagtacaaagctatctgatagcctgccagagcagagacaagagtc

SEQ ID NO: 13902 - DNA, 600 bp, Chicken  19866894218603_4
cacagcatccttgcagtggcactttatctaaaaattaggaaaaacatcttctcacagagagtggtgctgcagtggcatagctgcccagggtggttgtggagtcaccgtccctgaaggtgttcaagaaccgcgtggatgtggcactgaggaacgtgggcagtgggcacggtggggacgggctgatggttggatgagatgttcttaaaagtctktgccaaccttaatgattgtatgattctatgactctatgaattgcatgaacaagttcagcacgcagcactaaggacaaaagaaacaaasatcccgctaatgggaagattctgaggaacacctgagcttggaagaactgcataaatacaaatactcagcattcacatcttggccaaagatttttccaaatacgccttgaaaagttttatggaaagaacaggtaagaccatgcttttggaagccaagtataactgtgctagtacaaagctatctgatagcctgccagagcagagacaagagtcccaggtttatatgccatcagtcacaccaacagtcagctctagaaataatgctgaaaatcaaattctaaagtatgtctgcgaatttcta

SEQ ID NO: 13903 - DNA, 599 bp, Chicken  19866894218604_1
  misc_feature (1)..(38): n is any nucleotide
nnnnnnnnnnnnnnnnnnnnnnnnnnnnnnnnnnnnnnacttgctgctataaacagacacattctccagttccctgtttttcttttttttttttccaaacagctgctactaaactcttcagctccaactcagagaacatccccttccctgcaactgtacaggggttcataaacaacactcagctgcatccttggcccacaggtatggattctgagtgagaaacaatgatgtgacaaaacatgaaagcattctagctcctggacacctgtgctgcaggagatggctctatctatctccccrggtccacastgcttgctgctgggattcatacaatagcagactgctatattcwgtataaatagagcaaataatcctccctggtagcagtcagtggtaatctgaaagcagcactggcagtggtttccggtgctaaggtaattccacagcagggagttccacagctctgtggaatgaggaattctttccgtctaatcatcccattgcttgtgcagtttgagacagcaaagtctgtaagtcacatttactctacagcatgagagaaggcaggacgttgtggccttgtacaccattagcttagg

SEQ ID NO: 13904 - DNA, 599 bp, Chicken  19866894218604_2
  misc_feature (1)..(29): n is any nucleotide
nnnnnnnnnnnnnnnnnnnnnnnnnnnnnacttgctgctataaacagacacattctccagttccctgtttttcttttttttttttccaaacagctgctactaaactcttcagctccaactcagagaacatccccttccctgcaactgtacaggggttcataaacaacactcagctgcatccttggcccacaggtatggattctgagtgagaaacaatgatgtgacaaaacatgaaagcattctagctcctggacacctgtgctgcaggagatggctctatctatctccccrggtccacastgcttgctgctgggattcatacaatagcagactgctatattcwgtataaatagagcaaataatcctccctggtagcagtcagtggtaatctgaaagcagcactggcagtggtttccggtgctaaggtaattccacagcagggagttccacagctctgtggaatgaggaattctttccgtctaatcatcccattgcttgtgcagtttgagacagcaaagtctgtaagtcacatttactctacagcatgagagaaggcaggacgttgtggccttgtacaccattagcttagggagcaggag

SEQ ID NO: 13905 - DNA, 600 bp, Chicken  19866894218604_3
acagacacattctccagttccctgtttttcttttttttttttccaaacagctgctactaaactcttcagctccaactcagagaacatccccttccctgcaactgtacaggggttcataaacaacactcagctgcatccttggcccacaggtatggattctgagtgagaaacaatgatgtgacaaaacatgaaagcattctagctcctggacacctgtgctgcaggagatggctctatctatctccccrggtccacastgcttgctgctgggattcatacaatagcagactgctatattcwgtataaatagagcaaataatcctccctggtagcagtcagtggtaatctgaaagcagcactggcagtggtttccggtgctaaggtaattccacagcagggagttccacagctctgtggaatgaggaattctttccgtctaatcatcccattgcttgtgcagtttgagacagcaaagtctgtaagtcacatttactctacagcatgagagaaggcaggacgttgtggccttgtacaccattagcttagggagcaggagagcagaggggctgctgtatggctgtaccattgactccgtagcgg

SEQ ID NO: 13906 - DNA, 600 bp, Chicken  19866894218608_1
aggttggattctgacacacacttctggctcagtgttttatccttctgtgctgatttgcctgcagcagtttttgttgttgttaaccataaagctggtgtgacaattctgtaagtctacgtgaagaatcagtcattatttttttgcaactgacaactttccattaaggtgagggagaaaaattctttccaaaaggccaacctcgcatccaagagagctcctagttttaagtcaccagttttaagaatgcatttctcaaaagttgtaactgttgcctaaagaaggtgggagaagtacacatcrtttgttttgtgcaggagaaaggagtattgacatttccrttctctgttgctggaaagcagagagcgagtcttggttggatggctcggtgtggaggtcagagggcggtgagctgtgggtaccaaccagggtcagtcacgccctgagctctgcagcgttttctctgtgctgtgtgaaggttcctggttacacctggggtgaacgtggctctcaaaacacctctacagtcaggctagtgagtttcatctgttgcatacctgtttgatgttattcctgcccacagtgttgcgcagcttagaagga

SEQ ID NO: 13907 - DNA, 600 bp, Chicken  19866894218608_2
atccttctgtgctgatttgcctgcagcagtttttgttgttgttaaccataaagctggtgtgacaattctgtaagtctacgtgaagaatcagtcattatttttttgcaactgacaactttccattaaggtgagggagaaaaattctttccaaaaggccaacctcgcatccaagagagctcctagttttaagtcaccagttttaagaatgcatttctcaaaagttgtaactgttgcctaaagaaggtgggagaagtacacatcrtttgttttgtgcaggagaaaggagtattgacatttccrttctctgttgctggaaagcagagagcgagtcttggttggatggctcggtgtggaggtcagagggcggtgagctgtgggtaccaaccagggtcagtcacgccctgagctctgcagcgttttctctgtgctgtgtgaaggttcctggttacacctggggtgaacgtggctctcaaaacacctctacagtcaggctagtgagtttcatctgttgcatacctgtttgatgttattcctgcccacagtgttgcgcagcttagaaggagaaggactgaccgcactgctagcattgcaacactcgta

SEQ ID NO: 13908 - DNA, 600 bp, Chicken  19866894218609_1
aatgccataaaatgataatattgagataatgccttctctaaaaatagatccctaaaaataaaaccacagcttccttttagcagtgattacaagtattctagcataaacaaacctctgccttttgtatggaacttgacttccttttttgtgtatgtgtgaaaacttcaatatttgggacctttgttctgcagtgatatctgggcgttctggctatgggtggcctcttgttgacttccattgaaaacagcagatgaggcaaaacaaacttgaggccagtttcgtttctcttttgattataayacttgaaagtattcttccttctctttccctgcaaaacctagccttttatgccttttgttgttagaggccaattgatgttttggaagttaacttcattgtagtgtctcttctaatagttcaggagggaagctttgtagtttgctgtttrttttttccttttaaaaacagttgtgctgactccaagtcgtgtaagttttgaccaagccttttctcttactttctgtgctagccacactagagcttcgctttcayttatttttttcttgctgaaattttgggtcgatggtccttattgctgcc

SEQ ID NO: 13909 - DNA, 600 bp, Chicken  19866894218609_2
tgtatgtgtgaaaacttcaatatttgggacctttgttctgcagtgatatctgggcgttctggctatgggtggcctcttgttgacttccattgaaaacagcagatgaggcaaaacaaacttgaggccagtttcgtttctcttttgattataayacttgaaagtattcttccttctctttccctgcaaaacctagccttttatgccttttgttgttagaggccaattgatgttttggaagttaacttcattgtagtgtctcttctaatagttcaggagggaagctttgtagtttgctgtttrttttttccttttaaaaacagttgtgctgactccaagtcgtgtaagttttgaccaagccttttctcttactttctgtgctagccacactagagcttcgctttcayttatttttttcttgctgaaattttgggtcgatggtccttattgctgccttcagtaaagagtagctattgaaatactgtgccaagagtgagaatggagaactagttatcacacacatctggaatagctttcaagtaatgacctttgaagcctctaaatcagcttctgatattgaaactgaatctgtgcagttcctgc

SEQ ID NO: 13910 - DNA, 600 bp, Chicken  19866894218609_3
gaggcaaaacaaacttgaggccagtttcgtttctcttttgattataayacttgaaagtattcttccttctctttccctgcaaaacctagccttttatgccttttgttgttagaggccaattgatgttttggaagttaacttcattgtagtgtctcttctaatagttcaggagggaagctttgtagtttgctgtttrttttttccttttaaaaacagttgtgctgactccaagtcgtgtaagttttgaccaagccttttctcttactttctgtgctagccacactagagcttcgctttcayttatttttttcttgctgaaattttgggtcgatggtccttattgctgccttcagtaaagagtagctattgaaatactgtgccaagagtgagaatggagaactagttatcacacacatctggaatagctttcaagtaatgacctttgaagcctctaaatcagcttctgatattgaaactgaatctgtgcagttcctgcatttatgtggggaagaataaacagattccagctaaaagctgtgtagagtgtttcagacatcaccttttaaggtgagttcaatgcaggcgaatcccaaggcattt

SEQ ID NO: 13911 - DNA, 600 bp, Chicken  19866894218611_1
gatactctcatagacttatttctatcttctctcatcttggatgttacctgccacattgcttcttttgttcaacaattcccgtgtctacactaaaagtcaccatttaaaaatcatggcacttccaggacattcccaaccacattgtgcttgttggcatgaaattcagtagaaactcatgatatgcaataaaatctatacatttttgtgacatggaacacaaacaccctatacaaaggttcacttcacctatgcaacatcaaacacaaactatctgtcacactgactccagtactatgcaargacataaggtccacacacatgcactaccacacagcactcaggtaaggcttcctaccctatgccgtattggggcagctgccccagggtcagtttcaagaaaactcatgtaaataaagatcacagacagtgagtcacaactgagtctcgagtcctcatgttagcacactggtcaaattatttaaaaaaataaatgtatttgtagtgaataaatttgttctcagcataatttcagattttctttaattgttacctgatatttgactgctgcttggwgtactgctagttttaccagttcctgct

SEQ ID NO: 13912 - DNA, 600 bp, Chicken  19866894218611_2
gtcacactgactccagtactatgcaargacataaggtccacacacatgcactaccacacagcactcaggtaaggcttcctaccctatgccgtattggggcagctgccccagggtcagtttcaagaaaactcatgtaaataaagatcacagacagtgagtcacaactgagtctcgagtcctcatgttagcacactggtcaaattatttaaaaaaataaatgtatttgtagtgaataaatttgttctcagcataatttcagattttctttaattgttacctgatatttgactgctgcttggwgtactgctagttttaccagttcctgctgctcctaaaggcttcatatcatgaacggaaagcttgggtggaggaaggcttgggcaagactctgtttcaaggaatttcacaaacagttctgaaaaagactacaaaaagctactagttattgaattttacgtgcttttcaaaagataacacatacacttccaccatagtcccattattggttttaggaaatagtttcaagaaacctatgctgctactgacatcacaaatacttgctgcctgctttatttcagtgggcaaaataaataagtaaat

SEQ ID NO: 13913 - DNA, 600 bp, Chicken  19866894218612_1
tgcttacaggatagccaaaatgaacagaatctgtcttaaaataatgaggccaagtcatttcccttttgtcacgtcaggtgatgcttctctacacattggcctgctttgttcatgggaccattctggattccgcagttgatcaacgtaactaaagttgttacagtccaacctacgccatttctgaagacacacgtggttctgggaacaggcagcattgctctgaatgcagggcattcaaatggtggctgcttccctttctgtgggtggggaatgccagaagagctgccctgtccccacttyatggagctgggayaggcttttggacagaagccaggttatattcattgcaatggactctaagtgggcagtgtaatacatctgggaaaaggcacgttaagttaattaaaagctagcattaatagcaccatatttctaacaatttctttgcttgaaacagctattattgagcattaaggtaaaatcagctctataaaagtaaacagagtttagtaatgcgactgacctataaagtgacaatctgacattaatttttagggatcatatattcacatatgctgtcattgtagagcgagtaacatg

SEQ ID NO: 13914 - DNA, 600 bp, Chicken  19866894218612_2
gccaaaatgaacagaatctgtcttaaaataatgaggccaagtcatttcccttttgtcacgtcaggtgatgcttctctacacattggcctgctttgttcatgggaccattctggattccgcagttgatcaacgtaactaaagttgttacagtccaacctacgccatttctgaagacacacgtggttctgggaacaggcagcattgctctgaatgcagggcattcaaatggtggctgcttccctttctgtgggtggggaatgccagaagagctgccctgtccccacttyatggagctgggayaggcttttggacagaagccaggttatattcattgcaatggactctaagtgggcagtgtaatacatctgggaaaaggcacgttaagttaattaaaagctagcattaatagcaccatatttctaacaatttctttgcttgaaacagctattattgagcattaaggtaaaatcagctctataaaagtaaacagagtttagtaatgcgactgacctataaagtgacaatctgacattaatttttagggatcatatattcacatatgctgtcattgtagagcgagtaacatgactggaggtaggc

SEQ ID NO: 13915 - DNA, 600 bp, Chicken  19866894218613_1
atactttcagggaaagaagagtatacttttttcaaaaagcataatgaatgtctagcaaggaattatttagtttaaattactgctagataatcactgtggtttatttttcagttatgattttatttaaattgaatgtgggtgaggctctgactatccaaggttcagtgagtttcagtgatttggctggttttccagagttcaccaaagcttcaataaaatatatatttgttatgaaggtgtatttttaaactattaaagaggaagcatgttatgatttgaagacattggacgttcaatcartctcagtgcatatgaaatgtgtttattgaccttgataatatgcatagacaggaaagataggataagaatgtttcggacaagaaatactgamacctgtcagaaccagctacattcytttcaatcataaagtacttgaagacagtctttggtgtggcatgcacaaatgtagaacttgtgctgtgaattcctacttctttgcatatgttcacagttaggttttcaaactgctgtttgatttgaagttttcagtgatccctatagaagaatttctttagtttacctaaatatacttaagtctta

SEQ ID NO: 13916 - DNA, 600 bp, Chicken  19866894218613_2
cactgtggtttatttttcagttatgattttatttaaattgaatgtgggtgaggctctgactatccaaggttcagtgagtttcagtgatttggctggttttccagagttcaccaaagcttcaataaaatatatatttgttatgaaggtgtatttttaaactattaaagaggaagcatgttatgatttgaagacattggacgttcaatcartctcagtgcatatgaaatgtgtttattgaccttgataatatgcatagacaggaaagataggataagaatgtttcggacaagaaatactgamacctgtcagaaccagctacattcytttcaatcataaagtacttgaagacagtctttggtgtggcatgcacaaatgtagaacttgtgctgtgaattcctacttctttgcatatgttcacagttaggttttcaaactgctgtttgatttgaagttttcagtgatccctatagaagaatttctttagtttacctaaatatacttaagtcttaaatctactggctattttctgtacaccaaattagctgagagtcagggtgtagttaaatggtctgaaaagatgaacaacagaatatgttggaa

SEQ ID NO: 13917 - DNA, 600 bp, Chicken  19866894218613_3
gattttatttaaattgaatgtgggtgaggctctgactatccaaggttcagtgagtttcagtgatttggctggttttccagagttcaccaaagcttcaataaaatatatatttgttatgaaggtgtatttttaaactattaaagaggaagcatgttatgatttgaagacattggacgttcaatcartctcagtgcatatgaaatgtgtttattgaccttgataatatgcatagacaggaaagataggataagaatgtttcggacaagaaatactgamacctgtcagaaccagctacattcytttcaatcataaagtacttgaagacagtctttggtgtggcatgcacaaatgtagaacttgtgctgtgaattcctacttctttgcatatgttcacagttaggttttcaaactgctgtttgatttgaagttttcagtgatccctatagaagaatttctttagtttacctaaatatacttaagtcttaaatctactggctattttctgtacaccaaattagctgagagtcagggtgtagttaaatggtctgaaaagatgaacaacagaatatgttggaaatgagctaagctattgagctcaaa

SEQ ID NO: 13918 - DNA, 556 bp, Chicken  19866894218614_1
acctgtcatctgaatgcttttgagatgtatttattgcactcttccctcctctcttaattggggtgagagaagaggtcatctacaggcaggagacaagtcagcacagccatgtggtttgtacaatgtcataattccatgaacaaggactaaaaaccttaacatcctgatactgagttcatgtgtgacccaaaagtctgccacttccacgttgcaaggtaatgacaaaataaaacaactgggaaagagaagagcctgtgcagtatctgtatacagctataagctgtacctcttacttgtttwaagagatttaagaatactaagggaccttttaaccacttaatacacaggatgtttttttaatttgttttgctttgttttaaatacaaaacagacccactcattcttacttctgttttatcataggaaaaattacagttaagcactggttggctaggaaaccagcctctaatgtgttgtcttccagttcagacacatagagcagatttacatgtatcctgtatagcctgaaagaattaattggaagaaaatctaattt

SEQ ID NO: 13919 - DNA, 600 bp, Chicken  19866894218620_1
tgtttgtccacgcaatggcacagagcagctaaccctggtacagtacacaccatgagttcctgcagcttcagttctcttgcactcagtgactgcgctcttctaaaagaagaagaggaaataagtacagaacattttgtccatcaagccagcccaggtcagatataaatacaaaaagaacaagcaaggaagcctcttccgtaaagggaggctattttcaatttaggcagggctctgtccagactgacaacttctgaataaacttgcagtgtctatattacttcccttttcttcctgacttaycaaactcgagggcagacgtagtctgcaggattaataatctcacgtcctacacactcctccttcttcctgagtttcttgcaagtatggataccaactcttttaccttcacacggaggggggaacccaccatccttgagtgcaactccctgtcctgccaaaatgcacccatggcttctgctgatcagctctgtgctccaggtacagtcaggcacagcttttgtatgcagcctctcctaagaggaacacaaagccaggaccggcacacactgaggtgtcacgagcagacctgtgcagggcagg

SEQ ID NO: 13920 - DNA, 600 bp, Chicken  19866894218626_1
taaggagactgctcttcagttgtggaaataatgcctccatacttggagcaacaaggctttgagaaaaggtttcctttcctcagggcatgctgcctgcaactggttaaagagatggagagccactcctcagcgcctacactccagccttaaaggacattttgaagcattttggtttgctgcacaagtcagtcccacagagtactatacaacacataggaactctgagcagtggcagctctgacctctttgctgtgtgcctcacatgctgtgtttgtctgctcatctgaggctcatttctcstctgcatttgacgtatatacatgtctgttgcagtgtctcaaatgtcctccacttgaatttctttggaattaatctcttgatttactcctggtatgtagattttaaaaacgcaaacagtgattatagcatcagggggcacatatccccaagtcccagtttatctactacgagcagcttctcatccaaaggtattgtgtggattaatgaaagactttttattgcaggaactaaatgttctgacatgccagaaatgttcaagcactattatgctccattcaaagcacctctctttagagacaa

SEQ ID NO: 13921 - DNA, 599 bp, Chicken  19866894218634_1
  misc_feature (1)..(50): n is any nucleotide
nnnnnnnnnnnnnnnnnnnnnnnnnnnnnnnnnnnnnnnnnnnnnnnnnnccctatcatgagcagttgagaggaaaaggtttgagttagcagagcaaagtcagcaattttaagtgaaaatttatcaagttaactcaagagagatattagtttccatacaactaaatgaagctcacccaaagtaaaatcaagtaacataacatcctataatacagataatcagtctctgtagtttcactggtccttttaagtgaattactggcttgcttatttcttacagttaataaaatgcacaatacayttaygttcaaaatatttatatgtacaagtatctttagacaacttccatcaactcaatctaatagttgccagcgaaactgtaaattcttgtgaggtttttggtggtatttttgtttgtttgtttkttttcaagtagaaaacacttttacttaactttaaagccaatatttagacattatgtacttattggtttgacacatacatattccagatttgtgatgtcaattacaggtattcttgaataattcagaaatattaagygctgaactgaagctattccagcactatctccattacatg

SEQ ID NO: 13922 - DNA, 599 bp, Chicken  19866894218634_2
  misc_feature (1)..(46): n is any nucleotide
nnnnnnnnnnnnnnnnnnnnnnnnnnnnnnnnnnnnnnnnnnnnnnccctatcatgagcagttgagaggaaaaggtttgagttagcagagcaaagtcagcaattttaagtgaaaatttatcaagttaactcaagagagatattagtttccatacaactaaatgaagctcacccaaagtaaaatcaagtaacataacatcctataatacagataatcagtctctgtagtttcactggtccttttaagtgaattactggcttgcttatttcttacagttaataaaatgcacaatacayttaygttcaaaatatttatatgtacaagtatctttagacaacttccatcaactcaatctaatagttgccagcgaaactgtaaattcttgtgaggtttttggtggtatttttgtttgtttgtttkttttcaagtagaaaacacttttacttaactttaaagccaatatttagacattatgtacttattggtttgacacatacatattccagatttgtgatgtcaattacaggtattcttgaataattcagaaatattaagygctgaactgaagctattccagcactatctccattacatgagga

SEQ ID NO: 13923 - DNA, 600 bp, Chicken  19866894218634_3
caagttaactcaagagagatattagtttccatacaactaaatgaagctcacccaaagtaaaatcaagtaacataacatcctataatacagataatcagtctctgtagtttcactggtccttttaagtgaattactggcttgcttatttcttacagttaataaaatgcacaatacayttaygttcaaaatatttatatgtacaagtatctttagacaacttccatcaactcaatctaatagttgccagcgaaactgtaaattcttgtgaggtttttggtggtatttttgtttgtttgtttkttttcaagtagaaaacacttttacttaactttaaagccaatatttagacattatgtacttattggtttgacacatacatattccagatttgtgatgtcaattacaggtattcttgaataattcagaaatattaagygctgaactgaagctattccagcactatctccattacatgaggaagcatatagcataaatactatacatcaatatatagcatagagcacatacagtgcrtgccattccctgcccttacaaagcttggttacatgttttaactctacttgtcttatgttctacaca

SEQ ID NO: 13924 - DNA, 514 bp, Chicken  19866894218634_4
gcttgcttatttcttacagttaataaaatgcacaatacayttaygttcaaaatatttatatgtacaagtatctttagacaacttccatcaactcaatctaatagttgccagcgaaactgtaaattcttgtgaggtttttggtggtatttttgtttgtttgtttkttttcaagtagaaaacacttttacttaactttaaagccaatatttagacattatgtacttattggtttgacacatacatattccagatttgtgatgtcaattacaggtattcttgaataattcagaaatattaagygctgaactgaagctattccagcactatctccattacatgaggaagcatatagcataaatactatacatcaatatatagcatagagcacatacagtgcrtgccattccctgcccttacaaagcttggttacatgttttaactctacttgtcttatgttctacacactccaatttccttagtgacaggtattgacatgttaaagcaccctgaataa

SEQ ID NO: 13925 - DNA, 416 bp, Chicken  19866894218634_5
taatagttgccagcgaaactgtaaattcttgtgaggtttttggtggtatttttgtttgtttgtttkttttcaagtagaaaacacttttacttaactttaaagccaatatttagacattatgtacttattggtttgacacatacatattccagatttgtgatgtcaattacaggtattcttgaataattcagaaatattaagygctgaactgaagctattccagcactatctccattacatgaggaagcatatagcataaatactatacatcaatatatagcatagagcacatacagtgcrtgccattccctgcccttacaaagcttggttacatgttttaactctacttgtcttatgttctacacactccaatttccttagtgacaggtattgacatgttaaagcaccctgaataa

SEQ ID NO: 13926 - DNA, 600 bp, Chicken  19866894218637_1
agaaatgaatatttttcaggaagcatttagcttttgctccatcaaactccaagcatggaaatgctggaagccctttacattttccaaggcataaggtagaagctctgcatagcatggagcatgttgccacttggatgtggacgcaataaggaggacattcattgccaaaggcttctgggtgaaaaattgcaattctccacactgttgtcagtcatggacagtgaagtccatttagtcaagttcttatttttttcctttttatggctgtctctaagccctcactggaaatttccattagckttgtcagatgcagagctgctctctgacaggctttcccagcagagcaagcctctgtccagctcatgttattaacgagcttgaagaagatgaagggcacagacttgcatgctttgctgagagctgaataaggatgctgagtggagcctgctaagtaccaaatggagacaacttcagtaacacagcccctcctcctkcactgggctacatagctcatgtacagtcccctgaagaacctagaatcaaactctaggagttaatgacaaaaggattcacatgtaacgagaaagaaatgaaacacta

SEQ ID NO: 13927 - DNA, 600 bp, Chicken  19866894218637_2
ctccacactgttgtcagtcatggacagtgaagtccatttagtcaagttcttatttttttcctttttatggctgtctctaagccctcactggaaatttccattagckttgtcagatgcagagctgctctctgacaggctttcccagcagagcaagcctctgtccagctcatgttattaacgagcttgaagaagatgaagggcacagacttgcatgctttgctgagagctgaataaggatgctgagtggagcctgctaagtaccaaatggagacaacttcagtaacacagcccctcctcctkcactgggctacatagctcatgtacagtcccctgaagaacctagaatcaaactctaggagttaatgacaaaaggattcacatgtaacgagaaagaaatgaaacactacttatcatactgtcttgaacagtatttgaagagtaaactgacagagcagcagtcagcacagaccgacaggcatttcggtaatggcccagctggtatatccaaaatcaggggtttaagagaaggaagattaggacaaaggctcttcaattctactgtaacaataaagctcagcatcaagatggcaaaacaaagaa

SEQ ID NO: 13928 - DNA, 600 bp, Chicken  19866894218641_1
ggacctcattgtataagcacagctgacaaatctgcatgtgaatgcggttttgttcagtgtgggtatttttttttttccagtcttctttatgttgtttaatgatggtgaatgtcccataacctcgggggcttttccattttggcgttaaaaggaacttctttgcagatatttttgcttttatgaagtagccgtgttttacagatgtggccattgtaaattccagctggtacctatgattattctctttctactcatatttgtaattcttctgtgtgcagtaaatgtgcacttatgtacatrtaaagatagacacttcttaattgtttgtggtgcaccctgcaagctaagtrgcttccaagcaggcatctgtatggcctcccctgaggggwtcctagtaacacccagttctgttgtttaattgggtcaaaatcaattttggtggtgaaaactatcatataaaagcaagttgctgtagaaaaagcagtaataaaacactgatcatagttttttttacatcaggagacagagtagatgaaactaaaattattaaagatgcatcttcataacaatgctgttcagtctccactgggaattggttcc

SEQ ID NO: 13929 - DNA, 600 bp, Chicken  19866894218641_2
tgttcagtgtgggtatttttttttttccagtcttctttatgttgtttaatgatggtgaatgtcccataacctcgggggcttttccattttggcgttaaaaggaacttctttgcagatatttttgcttttatgaagtagccgtgttttacagatgtggccattgtaaattccagctggtacctatgattattctctttctactcatatttgtaattcttctgtgtgcagtaaatgtgcacttatgtacatrtaaagatagacacttcttaattgtttgtggtgcaccctgcaagctaagtrgcttccaagcaggcatctgtatggcctcccctgaggggwtcctagtaacacccagttctgttgtttaattgggtcaaaatcaattttggtggtgaaaactatcatataaaagcaagttgctgtagaaaaagcagtaataaaacactgatcatagttttttttacatcaggagacagagtagatgaaactaaaattattaaagatgcatcttcataacaatgctgttcagtctccactgggaattggttcctgtactccctgtgtgacttgcccctgtgcttcacaggctgtttctttgaa

SEQ ID NO: 13930 - DNA, 600 bp, Chicken  19866894218641_3
tgttgtttaatgatggtgaatgtcccataacctcgggggcttttccattttggcgttaaaaggaacttctttgcagatatttttgcttttatgaagtagccgtgttttacagatgtggccattgtaaattccagctggtacctatgattattctctttctactcatatttgtaattcttctgtgtgcagtaaatgtgcacttatgtacatrtaaagatagacacttcttaattgtttgtggtgcaccctgcaagctaagtrgcttccaagcaggcatctgtatggcctcccctgaggggwtcctagtaacacccagttctgttgtttaattgggtcaaaatcaattttggtggtgaaaactatcatataaaagcaagttgctgtagaaaaagcagtaataaaacactgatcatagttttttttacatcaggagacagagtagatgaaactaaaattattaaagatgcatcttcataacaatgctgttcagtctccactgggaattggttcctgtactccctgtgtgacttgcccctgtgcttcacaggctgtttctttgaacagcattaatagcggctctggtaatggccatattacagc

SEQ ID NO: 13931 - DNA, 599 bp, Chicken  19866894218643_1
  misc_feature (1)..(174): n is any nucleotide
nnnnnnnnnnnnnnnnnnnnnnnnnnnnnnnnnnnnnnnnnnnnnnnnnnnnnnnnnnnnnnnnnnnnnnnnnnnnnnnnnnnnnnnnnnnnnnnnnnnnnnnnnnnnnnnnnnnnnnnnnnnnnnnnnnnnnnnnnnnnnnnnnnnnnnnnnnnnnnnnnnnnnnnnnnnnnnaatgctgaatgatctgtaggtgaattcatgttttgtgttccttctgtggtcagaatctgtcccttggacaatctctggaatatgcaacttctttttttttccaataggagtgggctgagagcagartgggttctgttaccttgtaggtctgaggacaggccctggggatcactgcagccccagcaggaaccagggcgcagttttcttattaagaacaatatctgcttccaaggatgttaaccaagttcatctacacaaatgagctggtgaataatcttacaatttacttggattgtttcattgtttaaattactccaagtgagtggataatcataagaagcgaagcttttaatgagaataatgggggtaaagccacaaactacagttaaaatgaaactgctgcttgtgaatagaattgcacggtc

SEQ ID NO: 13932 - DNA, 600 bp, Chicken  19866894218643_2
tgttaaccaagttcatctacacaaatgagctggtgaataatcttacaatttacttggattgtttcattgtttaaattactccaagtgagtggataatcataagaagcgaagcttttaatgagaataatgggggtaaagccacaaactacagttaaaatgaaactgctgcttgtgaatagaattgcacggtccagttgagtgcaaaagcaagggactggattcagcagcctgggcagctgtacctctccatcccctgctactgaaaaggcttttgtggtgtaaggtgacatgctggtgagraggatccaaccctccacttsgaaaattgaactccacgctgtgatcygtggctgtgtgtaaatcagacaagagatgtgtaccctattttgttgaggaattgaccagaaagagatgctgagttcaattctccttactacatttggtaggggaaggtatttcaacagcaaccatggggagagaggggttccccttataggcactgcagccatgaatcacatgctcaactgctgcaaccaacgtagtgctgagacctgaacagttcagtgtggaaccaagaggagaacccctttctaagccaca

SEQ ID NO: 13933 - DNA, 600 bp, Chicken  19866894218643_3
acaaatgagctggtgaataatcttacaatttacttggattgtttcattgtttaaattactccaagtgagtggataatcataagaagcgaagcttttaatgagaataatgggggtaaagccacaaactacagttaaaatgaaactgctgcttgtgaatagaattgcacggtccagttgagtgcaaaagcaagggactggattcagcagcctgggcagctgtacctctccatcccctgctactgaaaaggcttttgtggtgtaaggtgacatgctggtgagraggatccaaccctccacttsgaaaattgaactccacgctgtgatcygtggctgtgtgtaaatcagacaagagatgtgtaccctattttgttgaggaattgaccagaaagagatgctgagttcaattctccttactacatttggtaggggaaggtatttcaacagcaaccatggggagagaggggttccccttataggcactgcagccatgaatcacatgctcaactgctgcaaccaacgtagtgctgagacctgaacagttcagtgtggaaccaagaggagaacccctttctaagccacacatttggcatttctcagcct

SEQ ID NO: 13934 - DNA, 600 bp, Chicken  19866894218643_4
aatttacttggattgtttcattgtttaaattactccaagtgagtggataatcataagaagcgaagcttttaatgagaataatgggggtaaagccacaaactacagttaaaatgaaactgctgcttgtgaatagaattgcacggtccagttgagtgcaaaagcaagggactggattcagcagcctgggcagctgtacctctccatcccctgctactgaaaaggcttttgtggtgtaaggtgacatgctggtgagraggatccaaccctccacttsgaaaattgaactccacgctgtgatcygtggctgtgtgtaaatcagacaagagatgtgtaccctattttgttgaggaattgaccagaaagagatgctgagttcaattctccttactacatttggtaggggaaggtatttcaacagcaaccatggggagagaggggttccccttataggcactgcagccatgaatcacatgctcaactgctgcaaccaacgtagtgctgagacctgaacagttcagtgtggaaccaagaggagaacccctttctaagccacacatttggcatttctcagccttgcagttcccctatggagaaagggct

SEQ ID NO: 13935 - DNA, 588 bp, Chicken  19866894218657_1
ctggtatagaatggtgaatggttcacttcgactgtgtatgtattttgttttagatgctcattattgagataggtaatatatatatatatatataggtcaaagtaatataagccacaaaactttctggtaagatatagtcaggtttttaagcatgtacataaaatatgtggttcccctaaagacaaaatgtttctaacacacaaaaagaagtcagcctacttcattgaataaatgcacacctgcaattttcctacatctctttgggttctgttcttctctctgaaattgtgtgctcacctrtctgctggagtcctgagacctgaaagtaataacccctttttctttacacccaggccaaggattgtagatttgcaatgacttccttgtcctctctcttagctgcagaacatgtcttcaatggagaaacccactctacaccatcttctttagtctcaatttgaatgggatttcaccatttgaatacaggattgccctgagccatcctgctcagccctatttgcaactgtaaaccacaatgttttctaatatcacaaatactttttggtgctttatcccctgaaagaattg

SEQ ID NO: 13936 - DNA, 600 bp, Chicken  19866894218661_1
tgtccaaacggacgtgtgctcattgccaggctttgttttaaggcagaagtgacctccgtgcaggcagtgttggtggggcgcaaagctcgaggcgtgcggtggcagcagcctgcaggccacgcgtgcagccagctcctgtgcctgtaaatgtgtgcatgcaccttgtttgctttcagaagcctttaagagctgtgactttgcaattctctgtccccagactgtagtgctgatgatagaaatttggactctgcttcccaagcgatgttaggagcagccaggcgactttttcacgatgggtcwccagaaacaaaactcctctgactattgttgatttcccccccccccccccttatcatccccgccttaaaacttggcaggaaatggtttgtccctggatgagatcagcaaccctcatcctctttgaggtcctcagctgaaaggtgcaggacaggccgagctcctcgctgggtttctgctgctcacatgaggtctgcactgccaggggggtgcctgggcatgggacagtcacgttcatggctctgtatctggccatagcagttcccataggtgtgcccaggatgatgctgcccagccaaactc

SEQ ID NO: 13937 - DNA, 600 bp, Chicken  19866894218669_1
tggtgaccatgttccttgtgctgagatttctcctggggcctctggagaggtctctgaggttgacgtggagggaatccaagatgcaacccaacagcagccaatcctcctggcccacctagcagatctgtgtcatgctccaaagtctctattttgcaaaattatttgtgttttcagccacagccgctcaacaaatgaaataatcatgggattatttgccaagttggcataaatttgggcagaaagagctgctgctgctagccaggggcagagagttggctgtccatgctgcccaacagccayaagaaatgtgtctggtgtacgtgcttgtgactaatggaccagtgaatagggctttaacataaatacattaaatagttgggcctctggtcacgtgcagggggctctgtgcagagatgtgtcacctcccattgagcccgtgcagtgtttgaagacaccaggacagcacgtggctcactgtgcagcaaaaccatcagggagtccagaaaagccaggagttggactcgatgatccttatggggtctcttccactttggggtcccaagtcctccctaatttgaagagagagaatgaattattaaa

SEQ ID NO: 13938 - DNA, 599 bp, Chicken  19866894218671_1
  misc_feature (1)..(29): n is any nucleotide
nnnnnnnnnnnnnnnnnnnnnnnnnnnnnttttaaagatctgtattatgggttcccttggggaaggacttttaaaataatttttgatttacttttcctttgctctctgcttcagtactgtgctgaggaaaaactcagatttaaatacccattccaagtacctgaaatgatctcgttttattgttttcttgcttgtttgaactcttacattctgcttggcttatttaataagttaacttttactatcacaacccatcagcaacttgatgcttttcagcaattgtaagtacttgtcattctmtccaagcacattccactctccagcaccagcattttctttctgctgtaaggctatgattccctcttcatctgcagccatttgtcgtgtgttgtctggatttacttctgacacacaggcaaatccaacagtttcactggcagagcctcagtaagcctaaacaatgaacaacgttgtgcaacagcctgtgtctattactaagttyttgttaaaatactgcgtcctgaactctataatcttagagcattattatacccactcacatgtcgttatcttctaatgaacaaatgccaagttaacaa

SEQ ID NO: 13939 - DNA, 600 bp, Chicken  19866894218671_2
cttacattctgcttggcttatttaataagttaacttttactatcacaacccatcagcaacttgatgcttttcagcaattgtaagtacttgtcattctmtccaagcacattccactctccagcaccagcattttctttctgctgtaaggctatgattccctcttcatctgcagccatttgtcgtgtgttgtctggatttacttctgacacacaggcaaatccaacagtttcactggcagagcctcagtaagcctaaacaatgaacaacgttgtgcaacagcctgtgtctattactaagttyttgttaaaatactgcgtcctgaactctataatcttagagcattattatacccactcacatgtcgttatcttctaatgaacaaatgccaagttaacaactgtagagattgtaagaggaagaaggaatagttatgctcctctgtcaccttgggaacagggaactgataattacagttcaccaaaggcattgtccattcctttgtaatgataaccttttatcaatagtccatgtctttatcaaactactgtactgtagttagatattgataattgctactgtaatttcctttcccaggtatag

SEQ ID NO: 13940 - DNA, 600 bp, Chicken  19866894218675_1
agagatgctctcaaatagtttgatgtccttcttacactgtaactctcaaactgcacccggcgcttgagatgaggctgcagcagtgcagaacagagcagaacaatctcctcctttgcctggatggcagtgcaggaccccagggtactgccggccctttggctgccagggcacactgctgactcatggtcaacttgccaattaccagaaccctcagatcccttcctttagtgtcatttgcatttcttatgcttgtggtaaatgatttccattcatttcagttcttctgaggagtgaatctgytttgtttatattttcagtgcataaacgtgtgtctgaatgtgggccacagcagtctctctcagcatctgtttaataaaatggcatttccacattgcactgccggaagtttgcttgaagattgtaaacaggccttccagagagatctagaaaaattaagggctgggctatcaccaattacatgaaatgtaacatgagcaactgtcagattgtgcacgtgggatggagcaactatggccatgtatactcactrggggaggaggggctggagggcaactcagcactgaggaacccactgcccca

SEQ ID NO: 13941 - DNA, 600 bp, Chicken  19866894218675_2
tgtggtaaatgatttccattcatttcagttcttctgaggagtgaatctgytttgtttatattttcagtgcataaacgtgtgtctgaatgtgggccacagcagtctctctcagcatctgtttaataaaatggcatttccacattgcactgccggaagtttgcttgaagattgtaaacaggccttccagagagatctagaaaaattaagggctgggctatcaccaattacatgaaatgtaacatgagcaactgtcagattgtgcacgtgggatggagcaactatggccatgtatactcactrggggaggaggggctggagggcaactcagcactgaggaacccactgccccaagcagctgctgccacggtggcacaagctctgctgctaacaagggtcctgtgcaatgtctgaggtcctgttgtgctggggcttgcagatggcaatgtagcggtcatagggcatcacagtgagaagggaaatttctgctgagatgaataagagaaaaaaaaatcactctgcagcacatccagcacagggagatgtcccttggtgtcccagagggcgttggccatggctttgggggaagtggtggagatacag

SEQ ID NO: 13942 - DNA, 600 bp, Chicken  19866894218679_1
ggctgggaggccagcaggtaacagaaagccaaaaattaaaaataaaatcccacaacctgttggagctcaggaaaagctggaggctgaaatggggcgggaggctgagcagcggcggtcgggctccgcaggacctgggtctgtaatccccgtctctgtttcatctcccggccccgccgtgccgtagcgccgggcgggcactagaggacagccgagctccacggaacggccgcgaggagcccgcagcatcgccgctgccccgcgcaccactgcggccccaaacccacccgggggctcacaccyctcccasacccaaaggtggatgggtcgggggctgcctgcaaacacaccaccaagtgagcgatggaaaagggggwgytggggggagatttggagcttctgcacgtggttggggttgagagatccgcgtgctttattcaaatccagaactgggagcattacttgaggaagctgctgagaaggttcccactcatggctctgccccggagctgctgccgttgcatagcaaatatgggaaatgcttcatttctccttcgtttcaggtcagacagggtggggtggggaccttggggctgcagagct

SEQ ID NO: 13943 - DNA, 600 bp, Chicken  19866894218679_2
aggccagcaggtaacagaaagccaaaaattaaaaataaaatcccacaacctgttggagctcaggaaaagctggaggctgaaatggggcgggaggctgagcagcggcggtcgggctccgcaggacctgggtctgtaatccccgtctctgtttcatctcccggccccgccgtgccgtagcgccgggcgggcactagaggacagccgagctccacggaacggccgcgaggagcccgcagcatcgccgctgccccgcgcaccactgcggccccaaacccacccgggggctcacaccyctcccasacccaaaggtggatgggtcgggggctgcctgcaaacacaccaccaagtgagcgatggaaaagggggwgytggggggagatttggagcttctgcacgtggttggggttgagagatccgcgtgctttattcaaatccagaactgggagcattacttgaggaagctgctgagaaggttcccactcatggctctgccccggagctgctgccgttgcatagcaaatatgggaaatgcttcatttctccttcgtttcaggtcagacagggtggggtggggaccttggggctgcagagctgcagcag

SEQ ID NO: 13944 - DNA, 600 bp, Chicken  19866894218679_3
agctggaggctgaaatggggcgggaggctgagcagcggcggtcgggctccgcaggacctgggtctgtaatccccgtctctgtttcatctcccggccccgccgtgccgtagcgccgggcgggcactagaggacagccgagctccacggaacggccgcgaggagcccgcagcatcgccgctgccccgcgcaccactgcggccccaaacccacccgggggctcacaccyctcccasacccaaaggtggatgggtcgggggctgcctgcaaacacaccaccaagtgagcgatggaaaagggggwgytggggggagatttggagcttctgcacgtggttggggttgagagatccgcgtgctttattcaaatccagaactgggagcattacttgaggaagctgctgagaaggttcccactcatggctctgccccggagctgctgccgttgcatagcaaatatgggaaatgcttcatttctccttcgtttcaggtcagacagggtggggtggggaccttggggctgcagagctgcagcaggccctggtgctgggagctgctgcctgctttgaaatcgaggaagaagaaaaggagatgggaaatccca

SEQ ID NO: 13945 - DNA, 600 bp, Chicken  19866894218679_4
ctggaggctgaaatggggcgggaggctgagcagcggcggtcgggctccgcaggacctgggtctgtaatccccgtctctgtttcatctcccggccccgccgtgccgtagcgccgggcgggcactagaggacagccgagctccacggaacggccgcgaggagcccgcagcatcgccgctgccccgcgcaccactgcggccccaaacccacccgggggctcacaccyctcccasacccaaaggtggatgggtcgggggctgcctgcaaacacaccaccaagtgagcgatggaaaagggggwgytggggggagatttggagcttctgcacgtggttggggttgagagatccgcgtgctttattcaaatccagaactgggagcattacttgaggaagctgctgagaaggttcccactcatggctctgccccggagctgctgccgttgcatagcaaatatgggaaatgcttcatttctccttcgtttcaggtcagacagggtggggtggggaccttggggctgcagagctgcagcaggccctggtgctgggagctgctgcctgctttgaaatcgaggaagaagaaaaggagatgggaaatcccagg

SEQ ID NO: 13946 - DNA, 600 bp, Chicken  19866894218687_1
ctgttaaatccaggctgatgatgagatttctaggaaaacttctctaatagcaactgtagcaatgcagcgatacctgtgttctattgcttttcagtcaggaagttgattaactccatctccacgctacttgctctgtgctctcttcagaacaaggtatctttggttttcatgctatgctgcttgagtctactatcagctcaagaatacttttaatacatccatacagtctctagaagtgacaaatgtaactgcctttaaaaataggtgctagaaatcctaacaacagatagttgtggtgargaatatactcttatgaggaaagagatttcctgaaatagtcatttacatgctctcatacaaatgagaatttccatatcagaactgggaattctttttttcagaaacctgactttcaaaatttccagcaacacagtattccacagagtgcttgctatatatgcaacagtgacacgctacctgacaatgcatttcatttccctcaatactagaatttgctacctttcagtgtcagattacccactcatttctgaaccgtgataaaggttaaggggaaaaatcttcctaagctattattaccaa

SEQ ID NO: 13947 - DNA, 600 bp, Chicken  19866894218691_1
aggagctgggttaaaatgccactgtgtttgccaataaaatccaacaaggaaatccccactgaaacatccctcaccgggcagatcaattgagttctttattccctgaaaacctataggtgtgcagtatgagcaacagacggtacctggggcaggagggcacaggttgggggttgctttactctgcactgggaaaacactgcccttttgctctgagggctaaggaagtcctgtctatgtaggccaaagtgataagatgcaacttgcaagatatttccagaagatacgttccacagagatgtytgctcagtctgtgtcctgccaactccagccctcttaggcagaccctgggagtggtgcggtgggtcagaaaagggtgaagcttatcaggacacatagaggaacatgggcccctcagcacgcaacagagatgcagctggactccaaaaacaaaagaacatcttcagaagccagggtctggaaacctgtgagcccagaatgaacaaactgccacttttcctgtagctgttctgacttttctctttgccctgcctactttcattttctcctctttttcagttgcctttcagtatagtccacttc

SEQ ID NO: 13948 - DNA, 563 bp, Chicken  19866894218691_2
gcttatcaggacacatagaggaacatgggcccctcagcacgcaacagagatgcagctggactccaaaaacaaaagaacatcttcagaagccagggtctggaaacctgtgagcccagaatgaacaaactgccacttttcctgtagctgttctgacttttctctttgccctgcctactttcattttctcctctttttcagttgcctttcagtatagtccacttctgccttacaccctcttctttttactgttccctcttccttgaagagggaagtatctctgatttcttgaccaagccactrcaagcaaagatgctatttttactctyttaattgcacacattaaaagcataatgtcacagtgttaaatcygaacaggacctcactccaaaaatgcaattacagctgcccccaaatcactcctttgtttctcaaatgtaagacagaccacattcctgatggcaagcaataacacagacagtcctgccttgccagtctcttccttcagacaatgacacttcgtaataaagcagccctggcccatccttgtctttggatgggatcac

SEQ ID NO: 13949 - DNA, 537 bp, Chicken  19866894218691_3
gggcccctcagcacgcaacagagatgcagctggactccaaaaacaaaagaacatcttcagaagccagggtctggaaacctgtgagcccagaatgaacaaactgccacttttcctgtagctgttctgacttttctctttgccctgcctactttcattttctcctctttttcagttgcctttcagtatagtccacttctgccttacaccctcttctttttactgttccctcttccttgaagagggaagtatctctgatttcttgaccaagccactrcaagcaaagatgctatttttactctyttaattgcacacattaaaagcataatgtcacagtgttaaatcygaacaggacctcactccaaaaatgcaattacagctgcccccaaatcactcctttgtttctcaaatgtaagacagaccacattcctgatggcaagcaataacacagacagtcctgccttgccagtctcttccttcagacaatgacacttcgtaataaagcagccctggcccatccttgtctttggatgggatcac

SEQ ID NO: 13950 - DNA, 494 bp, Chicken  19866894218691_4
caaaagaacatcttcagaagccagggtctggaaacctgtgagcccagaatgaacaaactgccacttttcctgtagctgttctgacttttctctttgccctgcctactttcattttctcctctttttcagttgcctttcagtatagtccacttctgccttacaccctcttctttttactgttccctcttccttgaagagggaagtatctctgatttcttgaccaagccactrcaagcaaagatgctatttttactctyttaattgcacacattaaaagcataatgtcacagtgttaaatcygaacaggacctcactccaaaaatgcaattacagctgcccccaaatcactcctttgtttctcaaatgtaagacagaccacattcctgatggcaagcaataacacagacagtcctgccttgccagtctcttccttcagacaatgacacttcgtaataaagcagccctggcccatccttgtctttggatgggatcac

SEQ ID NO: 13951 - DNA, 600 bp, Chicken  19866894218692_1
aagagcaccctttctgaatagtttactacgtcatctctctgaaatcaaagaagcagtaaggttgttatcaatttatgctttggctaacaataatgtactagaatacttatattttatggaagcaaacattttctcatgttttaagagcagagagctcagccatgtactgcagcttcggtccttcattttcaaaatctgtggctctataatctgcttctttcagttagctcctgattacagcattaacatcctgatgctcaacaatctgggggataagagtgctaaagaaaacagctaccycactttatttccaccttggatatgatccttcttctttcctaaaggagccctgcaggggctctatttggtgctttcagccttatttccaaaccattgcagattttgaattgtcatcacaacaaatttccttcgattcccattgatgtaactccgtgtttttcatgtttacagcttctgaaacaagatctttaggccctagaattgcataccacgaacaatcctgtctagctaagtttgacaactacttagaaagcatttttccagccagctgacctttctaagtttgtcatagctggcaaa

SEQ ID NO: 13952 - DNA, 600 bp, Chicken  19866894218696_1
tgctggggcagctggaacgggaggcaggatggatgcagagtgcatgtgggatggataggggatggatgcaagatggatgtgggataaatgtggggtggatgcagggtggatgaaagatgaatgtgaaatagatgtggggtggatgcaggatgtgtgtggaatggatatgggatgggtgtggaatacatgtgggatggatgcggaatggatatgggatggatgcaagatggtcgtgggatggatgcagggtggatgtagggcagatatgggatggatgtgggattgatgcgggatggatgygggatggatgtgggatggatgtgggatggatgcaaggtggatgcagagtgggtatgggatgggtatgggatggatacagggtggatgtgggatgcatatgggatggccgtagcatggatgcaggagggatgctcacccacagcagggctggtgcaggcagcatgctgagggctgcaggcccacggccatctttcagccactctccagcagagagcggggagggctggcgggacaaaaggcgacattattcggagcggaataagcatgaatggagtattgagaaatgccatgttagggact

SEQ ID NO: 13953 - DNA, 600 bp, Chicken  19866894218701_1
gcagcaaaccatgattgaatgttcagccacattttagttttgcatttacctcatttttttcactcagttcttctcaagtactgctttgtcatagcccaacttctgaaacaaaccattcttcaattgctcactgaatggtatgtagtacatgaccaagcatgacttttaggagcagacactcttgatttattgtgcatttgtattacagtaccttgtataatctgaccttcttagctgctattgcaatgtataatagaaaaagaaatattgagacgtgaaatatatataactgcaattcastagaattaatacctagaatagttttaaactctcactgtagattgtatcctctacaatacagaatagggaggagttttgtgtgtggttatttcacaatttggtctgaaatttgccgtgatttgaaggaatttaaataaatgaaagttatgaagcagcaacaaagacctgtatccccttatttattgttaaataaaccaaaactgatatttgctcaaaactgtggttaatatgtatgacttttctctcataaaagaaagtctgtatgtcagtgttagccttgtaataatttttatagcttta

SEQ ID NO: 13954 - DNA, 600 bp, Chicken  19866894218702_1
tgtctgtgtttcaccccagctgggaaaggagagagggccaaggcccgagctgggagacccagcccagcacaaagagagcaagtgagagtgatttcctccaccacacgtgttaaatcaatccccaccaggcgacatgtgctgctcgcaggggcagaggcgctgaggtcattgcagggagcagccagcccagctgcagcttccagccgagccacagcccttcataaccgctggctttgagctgccctgtttccaccttgtctgcttccatactgtgcatgcacatcctgcctgcttccatgscctgtatgtgtgcgtgcaccccctgcctgcccttgctgcagagccctgctctctttgtgcccagtcctactgcagcacagacagcacaggtgggtccatcagtgagcagacccaggggtaatcagcactcgttaactccacgccctctctgcaaacagcaagcactgagagtggctgagttcctccagcatttcttggtgcagaccccatgccaaggaagtgcccagcacccagggtgatatctccaagtcaggatagggagtgatgggtgtgactgagccccacctttggtaccatcac

SEQ ID NO: 13955 - DNA, 524 bp, Chicken  19866894218717_1
catacctacaaggctatttccttaagtagcagtgaaattacatataattctccccctccttaagactcatctttttttgggtgcccaaagagggtgacagcagttaggacctggtgctgctcctgctggccagcatctctctgtcccccacgtgcttccttttctggaccttttagaaatacacagaagcatgcatatttatacacacgtaatttgtgttctgttagccatagggataacagctcaactgtggcaattgctgtaaaatcaagtccaaactgactgtgaaggcagcatatwcattgatctctttctgtctctttaaagctatgatgtgtttgatgagtttttgttgctaagaaatgctgttaacttagagagggcttagtgcagtagctaaatctcacagccatgcttttaactcctgatatatatttgcttatttacacgttctacctccgtatcagatgtaaatatggtatccagaacaagattaaaagcagaacaaagctgtcactatgcca

SEQ ID NO: 13956 - DNA, 600 bp, Chicken  19866894218718_1
agaagaagcagtcatctataggtaccagacattcagtttgaatgttacagcatttaattgtgtttgtttatgttcttcaagtcactaattgcaggctagattgtcaaattattttctgattacctttgcgtgctaaagtgaatgagtcaacaagtgaattaatactacttgactgcaacagctatcattcaatttaattattgaaaaactaacctaatgatggccaatttatgtctttaacatttgaaatttgacattttggtgccatttttgaaagtgtcattattctgtcgtaagaaraaattaatccagtatgctgccctagtagatagctcaaccaggcaaagactgagtttgctcccatcatccagatgggtttgtatttgcaggattcggggttccttgataatgaaatttctactgcacttccacttgtttttccagtttgatcttgcagcagcaacatttgctatatgtattctatatgtatatatacacatatatttgtgtatctattttctctatatactaagctggacagtagtggcacaggggtgggtaccacagcagcattagccattagcagaaacaggacaccat

SEQ ID NO: 13957 - DNA, 599 bp, Chicken  19866894218720_1
  misc_feature (1)..(62): n is any nucleotide
nnnnnnnnnnnnnnnnnnnnnnnnnnnnnnnnnnnnnnnnnnnnnnnnnnnnnnnnnnnnnntcattaaggagatgcaggcagatacggggatcatagaagcctcatttccttaacaaactaagttagcatttcagatgatgtctggttctcattgctcacagtctagacaaagcaggcccatacagaacaggcagcatgtaagagctcaaatttatttttatctttactccattttcacagaaaagaaattgtagcttcacaataaaaagaattttaagtgggttggaggacagagaayrgttgcagaagcagcagcttttccatttctgtttccagatttattccagcataggacaatattgaccacatcaggagtgtctacatttaaatttccataagacagaaatccagttcacacagcactgatttccaaatccattttgatttctgaaagagatccctaagctgtcttttgggtctgagaaatcagcctgctaaaccaggtgaaaaaaatcagagaaaggggagactttgagacacactctgatgtcgtgactgaaggactccatcatcagaaataaaggaacaaagatgaat

SEQ ID NO: 13958 - DNA, 599 bp, Chicken  19866894218720_2
  misc_feature (1)..(61): n is any nucleotide
nnnnnnnnnnnnnnnnnnnnnnnnnnnnnnnnnnnnnnnnnnnnnnnnnnnnnnnnnnnnntcattaaggagatgcaggcagatacggggatcatagaagcctcatttccttaacaaactaagttagcatttcagatgatgtctggttctcattgctcacagtctagacaaagcaggcccatacagaacaggcagcatgtaagagctcaaatttatttttatctttactccattttcacagaaaagaaattgtagcttcacaataaaaagaattttaagtgggttggaggacagagaayrgttgcagaagcagcagcttttccatttctgtttccagatttattccagcataggacaatattgaccacatcaggagtgtctacatttaaatttccataagacagaaatccagttcacacagcactgatttccaaatccattttgatttctgaaagagatccctaagctgtcttttgggtctgagaaatcagcctgctaaaccaggtgaaaaaaatcagagaaaggggagactttgagacacactctgatgtcgtgactgaaggactccatcatcagaaataaaggaacaaagatgaata

SEQ ID NO: 13959 - DNA, 600 bp, Chicken  19866894218723_1
tttgttctggtgtaggttgcataagtcaagcactttcctcactcatacagactctctgtatcctacgagggcttccactcaccagatagactatactggcaaatccttcttgacgtggatttggctctaatttttaaccgaggcacgctttctggtacgtacatctatgaaagtgtaagaatgatttttctcattgatctcgaatgtattactgacaagttaaaaatgataaatgccatcttataccaggaaggtacataatccaggcagacgctacggtgactacactggcttcaaagstaattaaatataccccagtgcagctttcccccatagacaaacacagaagtgccagctccatcaagcattgcctcactcacctccctgacctatctttaaaactagaaaaaaagccgatcgtctcctctccatttcaattttgtgctctccagcctgaagatcttttcaagtcccagctcctggcacagtgccttccagtcactggtcagattcagcagtgccagctgctagcagaaaatcctactattcaggagatgaccttaagtgctccgaatgctgctttctcattctgcttaaatc

SEQ ID NO: 13960 - DNA, 600 bp, Chicken  19866894218727_1
atcaagcactgcccgctctttgggtcaaaaagccaccaaaatgggaacagagaactagctcattatttccagtcttctcagcagtctgctctgagcgtgcctactgccttctctgtgacgtaaatggtattgtttgtgcaacaatatgtgtataatcatctgcaaagcactacggattgtgtctacagaacatactcagtaaacgttaacagctgttcttcagtgcagcaaccctgtatagaatgccaaggatagagacatttgctacagcggccttacttaaatcacatacgaaaacawcagtggtaaaattaatacagaaaattttaaaaatcgtgtttaatagtttgctacttctgaagtagcatcattttcagaggggctttgttgaaaagaagcattaraaaactgagaatcgttactaaataattcaacgaacgcacccaaggcccacgacgtgcgattcgagtacgggccgctgttttgctcaaggctcgcagagccacctccgcgcccggccgtcccggggcgctgcctccgagcagcccggcccgcccgcatccgccgccgccatgtcgcggccgtgagggcggggcgcag

SEQ ID NO: 13961 - DNA, 600 bp, Chicken  19866894218727_2
tgccttctctgtgacgtaaatggtattgtttgtgcaacaatatgtgtataatcatctgcaaagcactacggattgtgtctacagaacatactcagtaaacgttaacagctgttcttcagtgcagcaaccctgtatagaatgccaaggatagagacatttgctacagcggccttacttaaatcacatacgaaaacawcagtggtaaaattaatacagaaaattttaaaaatcgtgtttaatagtttgctacttctgaagtagcatcattttcagaggggctttgttgaaaagaagcattaraaaactgagaatcgttactaaataattcaacgaacgcacccaaggcccacgacgtgcgattcgagtacgggccgctgttttgctcaaggctcgcagagccacctccgcgcccggccgtcccggggcgctgcctccgagcagcccggcccgcccgcatccgccgccgccatgtcgcggccgtgagggcggggcgcagcagctcccgttgcggcgagggaaggccgccgtcagagctcacgcccgtttcgctgcgctgaatgtgtggtttggggcggttttgtgtttgctgggagcaagaca

SEQ ID NO: 13962 - DNA, 599 bp, Chicken  19866894218729_1
  misc_feature (1)..(203): n is any nucleotide
nnnnnnnnnnnnnnnnnnnnnnnnnnnnnnnnnnnnnnnnnnnnnnnnnnnnnnnnnnnnnnnnnnnnnnnnnnnnnnnnnnnnnnnnnnnnnnnnnnnnnnnnnnnnnnnnnnnnnnnnnnnnnnnnnnnnnnnnnnnnnnnnnnnnnnnnnnnnnnnnnnnnnnnnnnnnnnnnnnnnnnnnnnnnnnnnnnnnnnnnnnntgagaggagtagaggattttgaagaatgcatcaacaagcaattttcagctcactgtattgctaaaaaatatctgcagcttgaacaactgattatgtrtttgtgcatatatgtaacaatcatatagaccaaacagctcaacttccagttacttgtaaataacttctctctggtattaatgatattctcacagatgcctcagggtctttttatctccaaggttatcagtatgctcgaagaaccttagtcctctgaatctatactgcattggaaaccaaatgtttaaagttgtattaatgactgctcttgaaattcttttaaatatttgtctctaggttatatccagtattgccaggaaatggaagagtgacccagaaagacttggttgttggaggata

SEQ ID NO: 13963 - DNA, 600 bp, Chicken  19866894218741_1
tttcattaagcctgtgtttaaagcaatttatgcagtttaaaagtaaattccaacttttctaatttgagacaaatggggaaaatgtaccattcctgggccacatctggttaagacaaactgtttccttcatgtccatgcgaagggctgaaaatgtgtctcattgtcgtgaaacttctggaggaagttgctgagatgcggaataggttaatcttatttccattctgaagcagtgaaactccataaaataaaacatctgctctgtaagtgaactggtgagagcccactgtgtaattccatccyatgtagcccaaaccagtgcgctgctggagctacgtttgcacacagacaatgcaccggcaaacctgggtgtgcccaggaaggctgtgcatcagatgtcaagtttagtacrtcttagaaagcaaacaaaaagcaactccttgaagagcagatctgggtacaaaactctgtcccacacttctgtggatgaggcagcccatggctgaccgggccgctgcacctgtgacctgcttttctgcagagatctccaaagaaataatgcacaagtaatcagcacacgttcgcttttcatttatctctctc

SEQ ID NO: 13964 - DNA, 600 bp, Chicken  19866894218741_2
aagacaaactgtttccttcatgtccatgcgaagggctgaaaatgtgtctcattgtcgtgaaacttctggaggaagttgctgagatgcggaataggttaatcttatttccattctgaagcagtgaaactccataaaataaaacatctgctctgtaagtgaactggtgagagcccactgtgtaattccatccyatgtagcccaaaccagtgcgctgctggagctacgtttgcacacagacaatgcaccggcaaacctgggtgtgcccaggaaggctgtgcatcagatgtcaagtttagtacrtcttagaaagcaaacaaaaagcaactccttgaagagcagatctgggtacaaaactctgtcccacacttctgtggatgaggcagcccatggctgaccgggccgctgcacctgtgacctgcttttctgcagagatctccaaagaaataatgcacaagtaatcagcacacgttcgcttttcatttatctctctcatcagggaatcagatacagatagtatcaggagcaacgagaggtacattctgatattattttcagttttttgtctagacagagaagagcaaccgcttgtatctctgcgga

SEQ ID NO: 13965 - DNA, 600 bp, Chicken  19866894218743_1
ttactggtctctctaatttagtaataagttatattttatagcatctttgggatatcactgattgcacatgattcttttaactaaagatcttttaactaaagactaaaggatcaacctctcctcaaactggtctattcaaatactgaagagtttccaatattgagaaaaatgtggggattttccctttcacctaagaaaactaaggacacaatctccaagtgtgaaatttgaaagagaaaatttgaaaaacaatagaggaaaacaatcatcctatgcagctctttcattttaagcatcagygatcagtggaagctgatgagaacatttaccgtgcatttacaaaatagtgccattctaaatttgagagagatgtgcctcacttgagaggagcttttttagcaagaggaccacgtggactgaaaaaaaaaagcatgaccttttgcaccacaaaattagattgtaagggagatgaatgtctcctgacagatggacaaagacaaagtaatgaagcagggatttgattgacagcatgttgactgacaaaaatattatccatgtcatgctgtagggtgctctgctgtgatgtcttaaagtggaaaa

SEQ ID NO: 13966 - DNA, 600 bp, Chicken  19866894218745_1
taaggttagcaacagaaagattgtttgacagaagaaagttgggtactgttagttgagtcatagaggaacagatgcattttctttgtgtttgtgctcttgtgtaggtgttagaaacgctggaatttcccattctttcagcagtaaaaaactatctaatgtggtgtgtctgagtggggggattccaagtaggattggccattctcatattttctgaaaacatttgaaatgcaccacgtattttgtgtcttgttttaccttacctgagaatattaaagcttgagcaaaacaaagttaatattwgtgcttccatagttacttgagaggcaggcaggtatagcatgtaaatggagtaagtttgtttcccattgcttgtacttctcaatgaagaagtttaagtagtgggaagctgggaattgctaaatataaaagatagatttgaaaagaggaatgatttgggtcatgatgtataagcagtgttatttctgtagtgcagaatgtacaagtgaagttaattcatgcaaactaacattagtaaaatacatgaagtaatagaatataaagtggtagttggagaaaatacagaactgggaaaataacagt

SEQ ID NO: 13967 - DNA, 600 bp, Chicken  19866894218749_1
catgtatatatcaatttttcacagtctgtcagaccagtgtgatttcttgtagcagccacgtgcacgtgcttcatctgcgtatacgcatattgagcagcttggctggatttctgcaaaaagagatagcacacacacctgtattatataggtactgagtcatgttgaaaagaacgcatggaaatagcaagatagtttcatggcatggtatttttcttatgctgatgttctgaaagattgctactcctttttgagcacggagatgatgtatcaaagcctaggtgagtcaagtcaaaacataaraagggtatgcttttcagaaaagtttgtatckgtgtgtgtgagagagaaaaagaaatagcagattagatttcaggagcccwgggggtgagggactctatgcctgcaaagaagaaatatagtctaccagarttctgaatctcttacgtgggtaagcttgccattaaaaccaggggaaatgtggatattctctctggaaatcaggctgcatcctggaacatttgcatgtagaattggaccattaagtccactcactccaatttgaagcactttatagcccttggtcaaacatatgacagtaac

SEQ ID NO: 13968 - DNA, 600 bp, Chicken  19866894218749_2
gaccagtgtgatttcttgtagcagccacgtgcacgtgcttcatctgcgtatacgcatattgagcagcttggctggatttctgcaaaaagagatagcacacacacctgtattatataggtactgagtcatgttgaaaagaacgcatggaaatagcaagatagtttcatggcatggtatttttcttatgctgatgttctgaaagattgctactcctttttgagcacggagatgatgtatcaaagcctaggtgagtcaagtcaaaacataaraagggtatgcttttcagaaaagtttgtatckgtgtgtgtgagagagaaaaagaaatagcagattagatttcaggagcccwgggggtgagggactctatgcctgcaaagaagaaatatagtctaccagarttctgaatctcttacgtgggtaagcttgccattaaaaccaggggaaatgtggatattctctctggaaatcaggctgcatcctggaacatttgcatgtagaattggaccattaagtccactcactccaatttgaagcactttatagcccttggtcaaacatatgacagtaactctttaagatcttagtctttattaattgtat

SEQ ID NO: 13969 - DNA, 600 bp, Chicken  19866894218749_3
atacgcatattgagcagcttggctggatttctgcaaaaagagatagcacacacacctgtattatataggtactgagtcatgttgaaaagaacgcatggaaatagcaagatagtttcatggcatggtatttttcttatgctgatgttctgaaagattgctactcctttttgagcacggagatgatgtatcaaagcctaggtgagtcaagtcaaaacataaraagggtatgcttttcagaaaagtttgtatckgtgtgtgtgagagagaaaaagaaatagcagattagatttcaggagcccwgggggtgagggactctatgcctgcaaagaagaaatatagtctaccagarttctgaatctcttacgtgggtaagcttgccattaaaaccaggggaaatgtggatattctctctggaaatcaggctgcatcctggaacatttgcatgtagaattggaccattaagtccactcactccaatttgaagcactttatagcccttggtcaaacatatgacagtaactctttaagatcttagtctttattaattgtatgacagttttaggaatattgtagcccaagtaggagagaactaggcccgag

SEQ ID NO: 13970 - DNA, 600 bp, Chicken  19866894218749_4
acacacctgtattatataggtactgagtcatgttgaaaagaacgcatggaaatagcaagatagtttcatggcatggtatttttcttatgctgatgttctgaaagattgctactcctttttgagcacggagatgatgtatcaaagcctaggtgagtcaagtcaaaacataaraagggtatgcttttcagaaaagtttgtatckgtgtgtgtgagagagaaaaagaaatagcagattagatttcaggagcccwgggggtgagggactctatgcctgcaaagaagaaatatagtctaccagarttctgaatctcttacgtgggtaagcttgccattaaaaccaggggaaatgtggatattctctctggaaatcaggctgcatcctggaacatttgcatgtagaattggaccattaagtccactcactccaatttgaagcactttatagcccttggtcaaacatatgacagtaactctttaagatcttagtctttattaattgtatgacagttttaggaatattgtagcccaagtaggagagaactaggcccgagagacttaattaatgaaatgctttgttgcttggtgaaaataaatgaatta

SEQ ID NO: 13971 - DNA, 599 bp, Chicken  19866894218752_1
  misc_feature (1)..(133): n is any nucleotide
nnnnnnnnnnnnnnnnnnnnnnnnnnnnnnnnnnnnnnnnnnnnnnnnnnnnnnnnnnnnnnnnnnnnnnnnnnnnnnnnnnnnnnnnnnnnnnnnnnnnnnnnnnnnnnnnnnnnnnnnnnnnnnnnnnnnnaagtataataccaccagtacttatttaataaagataggatagagctctgtgaagaaagaaggcctaaatactgtgatgtaggtggtatgtagcaggaaagcacagcaaaataaagatccttttttctcaagggacagcatggcaatacataactctaggatagatarataaagctgaaaattcttaaaagagggagcaatatattccttggtaaaaacttgaattattcaaactaactgtatgtctgcccatctaatttgtggctgtattgtttacattgtactaaattaaatgaggcaagcttaaggctctgaaatggaagcctgcatacgtttaacttcatgagtaatattcatattttaagtcaaagctcagagcctaatggtatcattatgaygaggaacagaagaatgataaaacagcctgcaygaagkggctgattgtggataggtacaataccacagtc

SEQ ID NO: 13972 - DNA, 600 bp, Chicken  19866894218752_2
aagcacagcaaaataaagatccttttttctcaagggacagcatggcaatacataactctaggatagatarataaagctgaaaattcttaaaagagggagcaatatattccttggtaaaaacttgaattattcaaactaactgtatgtctgcccatctaatttgtggctgtattgtttacattgtactaaattaaatgaggcaagcttaaggctctgaaatggaagcctgcatacgtttaacttcatgagtaatattcatattttaagtcaaagctcagagcctaatggtatcattatgaygaggaacagaagaatgataaaacagcctgcaygaagkggctgattgtggataggtacaataccacagtcaatgttaaagaaaatttgtataaaatgaaagtaggaattataactgtaaattaacagacaaataaagctagatggatccttacctaactggtaacacaaggacttttaatataatgttactgaagacaagattattaataatctctgtttctcaataaaacagagaatattaaaaacaacaaaaggtaygtaaacactgtaactatgaacacgcagtccatatcactacag

SEQ ID NO: 13973 - DNA, 600 bp, Chicken  19866894218752_3
agggacagcatggcaatacataactctaggatagatarataaagctgaaaattcttaaaagagggagcaatatattccttggtaaaaacttgaattattcaaactaactgtatgtctgcccatctaatttgtggctgtattgtttacattgtactaaattaaatgaggcaagcttaaggctctgaaatggaagcctgcatacgtttaacttcatgagtaatattcatattttaagtcaaagctcagagcctaatggtatcattatgaygaggaacagaagaatgataaaacagcctgcaygaagkggctgattgtggataggtacaataccacagtcaatgttaaagaaaatttgtataaaatgaaagtaggaattataactgtaaattaacagacaaataaagctagatggatccttacctaactggtaacacaaggacttttaatataatgttactgaagacaagattattaataatctctgtttctcaataaaacagagaatattaaaaacaacaaaaggtaygtaaacactgtaactatgaacacgcagtccatatcactacagactgaagaagatgagtgtctttttccctgtgt

SEQ ID NO: 13974 - DNA, 600 bp, Chicken  19866894218752_4
cagcatggcaatacataactctaggatagatarataaagctgaaaattcttaaaagagggagcaatatattccttggtaaaaacttgaattattcaaactaactgtatgtctgcccatctaatttgtggctgtattgtttacattgtactaaattaaatgaggcaagcttaaggctctgaaatggaagcctgcatacgtttaacttcatgagtaatattcatattttaagtcaaagctcagagcctaatggtatcattatgaygaggaacagaagaatgataaaacagcctgcaygaagkggctgattgtggataggtacaataccacagtcaatgttaaagaaaatttgtataaaatgaaagtaggaattataactgtaaattaacagacaaataaagctagatggatccttacctaactggtaacacaaggacttttaatataatgttactgaagacaagattattaataatctctgtttctcaataaaacagagaatattaaaaacaacaaaaggtaygtaaacactgtaactatgaacacgcagtccatatcactacagactgaagaagatgagtgtctttttccctgtgtatcgc

SEQ ID NO: 13975 - DNA, 600 bp, Chicken  19866894218752_5
tattttaagtcaaagctcagagcctaatggtatcattatgaygaggaacagaagaatgataaaacagcctgcaygaagkggctgattgtggataggtacaataccacagtcaatgttaaagaaaatttgtataaaatgaaagtaggaattataactgtaaattaacagacaaataaagctagatggatccttacctaactggtaacacaaggacttttaatataatgttactgaagacaagattattaataatctctgtttctcaataaaacagagaatattaaaaacaacaaaaggtaygtaaacactgtaactatgaacacgcagtccatatcactacagactgaagaagatgagtgtctttttccctgtgtatcgctagcagactacatgtaaggggtggaactcaaattccctccagtccttgaattcaactgtcgtcctttttttgccttccagatctgttagactcccttccttacatattcatttctctcatctcactgagtttccctacaagactttgaagttcaccggtagcctgtatgtaacagcagtagaggtgttatatatagtttcctctgctgtttgccatgctct

SEQ ID NO: 13976 - DNA, 599 bp, Chicken  19866894218753_1
  misc_feature (1)..(110): n is any nucleotide
nnnnnnnnnnnnnnnnnnnnnnnnnnnnnnnnnnnnnnnnnnnnnnnnnnnnnnnnnnnnnnnnnnnnnnnnnnnnnnnnnnnnnnnnnnnnnnnnnnnnnnnnnnnnnngcagtgcacatcactttacctactgagggctgcatcttgaactttttctttaatggggaaacggtcaccttcaacctcgtgttggttcagtaggtcctgacaaacttgcatacggtgttctatctgttcctatgtgaacattcatggaacccacctggtgcaaactttgcaatattccagcgttgccacyaccgaggcttgaagccaatatttagctcactatacagtcccctggtcataatctgctgatttgcttgagtgagctgattgagatgctcttagtttcatgatgtgacagctgcgcacagctgtctggaacatggcttgtctttcactgtgccgttgccactgctgaaatgcatcacccaccgcctcactgtgcgtacatccactgtttggtctccataaatgttcagcgagcatcagtaaatgctaatgggtacaatttctttcacatggaggactttatttccacacctttgcttcatc

SEQ ID NO: 13977 - DNA, 600 bp, Chicken  19866894218753_2
gaggcttgaagccaatatttagctcactatacagtcccctggtcataatctgctgatttgcttgagtgagctgattgagatgctcttagtttcatgatgtgacagctgcgcacagctgtctggaacatggcttgtctttcactgtgccgttgccactgctgaaatgcatcacccaccgcctcactgtgcgtacatccactgtttggtctccataaatgttcagcgagcatcagtaaatgctaatgggtacaatttctttcacatggaggactttatttccacacctttgcttcatcatcrcttccatgtcagatgccattttgtcagackgcccctctgctgccatctgtcacacaacaacaacatgtaatggaatattggtgggaagggtcagattctactgctgtgccatcaacattcacctctgatgttgtgggccaccatcataaaatagtaggcattacttctgtgtatgcatgaagatctaatggatgatgacttggagaggctagtgtccattggaacaatagtaagagatccaggtagaaacaaaaagaataccatatattttgtgaaaagaaaccactgtactcaagtggc

SEQ ID NO: 13978 - DNA, 600 bp, Chicken  19866894218753_3
acagtcccctggtcataatctgctgatttgcttgagtgagctgattgagatgctcttagtttcatgatgtgacagctgcgcacagctgtctggaacatggcttgtctttcactgtgccgttgccactgctgaaatgcatcacccaccgcctcactgtgcgtacatccactgtttggtctccataaatgttcagcgagcatcagtaaatgctaatgggtacaatttctttcacatggaggactttatttccacacctttgcttcatcatcrcttccatgtcagatgccattttgtcagackgcccctctgctgccatctgtcacacaacaacaacatgtaatggaatattggtgggaagggtcagattctactgctgtgccatcaacattcacctctgatgttgtgggccaccatcataaaatagtaggcattacttctgtgtatgcatgaagatctaatggatgatgacttggagaggctagtgtccattggaacaatagtaagagatccaggtagaaacaaaaagaataccatatattttgtgaaaagaaaccactgtactcaagtggctgaacatcaaccaatgtaggattaactgat

SEQ ID NO: 13979 - DNA, 588 bp, Chicken  19866894218761_1
aaaaaacagcacacacgcaaataaatgagaaccattttctagacatttaacttggatgatacaatgtgaacctggcagagcaggacctggtgcaactacagcctgtgattcaccaccaaacggcagcagaaactttgcagcgtggtgctgcagctgctgcaggggatggcagcgctcctctgggagcaggatcctccccagtatgttctctaccactggctgactgcgatcttcaaaaagattttgttttctcatcctactttccagataccgcataactgatttcggaaaaaaaaaagkaaaaaaaaaagaaaaaaaaaaacgttttagttctcctgtcttatcaactggaagagaaggaagaagacattcagttttggcagttttccatacttgccattccctcacacagtagcagccaaaagcgtggcaacagaaaaatctgcatctatgcattacctggtggtggaatttgttccttacaagaggttcacagaggttgctttcaacccatgaacaccatcttcagtactttattctaggtagaattacagtttaaatatcttctaccaacattgatagcattta

SEQ ID NO: 13980 - DNA, 588 bp, Chicken  19866894218761_2; identical to SEQ ID NO: 13979

SEQ ID NO: 13981 - DNA, 576 bp, Chicken  19866894218761_3
acacgcaaataaatgagaaccattttctagacatttaacttggatgatacaatgtgaacctggcagagcaggacctggtgcaactacagcctgtgattcaccaccaaacggcagcagaaactttgcagcgtggtgctgcagctgctgcaggggatggcagcgctcctctgggagcaggatcctccccagtatgttctctaccactggctgactgcgatcttcaaaaagattttgttttctcatcctactttccagataccgcataactgatttcggaaaaaaaaaagaaaaaaaaaaagkaaaaaaaaaacgttttagttctcctgtcttatcaactggaagagaaggaagaagacattcagttttggcagttttccatacttgccattccctcacacagtagcagccaaaagcgtggcaacagaaaaatctgcatctatgcattacctggtggtggaatttgttccttacaagaggttcacagaggttgctttcaacccatgaacaccatcttcagtactttattctaggtagaattacagtttaaatatcttctaccaacattgatagcattta

SEQ ID NO: 13982 - DNA, 599 bp, Chicken  19866894218764_1
  misc_feature (1)..(176): n is any nucleotide
nnnnnnnnnnnnnnnnnnnnnnnnnnnnnnnnnnnnnnnnnnnnnnnnnnnnnnnnnnnnnnnnnnnnnnnnnnnnnnnnnnnnnnnnnnnnnnnnnnnnnnnnnnnnnnnnnnnnnnnnnnnnnnnnnnnnnnnnnnnnnnnnnnnnnnnnnnnnnnnnnnnnnnnnnnnnnnnnaagtcagagcaaaggctgttattgcctgttatttgtgttccacaggccctgcagcagcctttagggccatactaagaaatacaaacaggcacgggaaggagacagcctttagcaagcttgggaygagtaagtgatagcgcacaaaaaccagccagatcgctggctaagagattagatgttctgtccttgccccaaccttgacgagtgctcagatacccgcagaaatgtgaagtgaaaggctcaagtaacatccgaaagagagctgcagcgagctctgcaaatacaccacgtcctgacccagcagtccctaaggtcacwgccgctccagcagacgcctcctctctgcaactgtgccagggagttctgaggaggcaggagatcccagcagctcctgtgctaagctgaccctggggctcagagcca

SEQ ID NO: 13983 - DNA, 600 bp, Chicken  19866894218764_2
ttattgcctgttatttgtgttccacaggccctgcagcagcctttagggccatactaagaaatacaaacaggcacgggaaggagacagcctttagcaagcttgggaygagtaagtgatagcgcacaaaaaccagccagatcgctggctaagagattagatgttctgtccttgccccaaccttgacgagtgctcagatacccgcagaaatgtgaagtgaaaggctcaagtaacatccgaaagagagctgcagcgagctctgcaaatacaccacgtcctgacccagcagtccctaaggtcacwgccgctccagcagacgcctcctctctgcaactgtgccagggagttctgaggaggcaggagatcccagcagctcctgtgctaagctgaccctggggctcagagccagatgaaaggttgggaagagatcagggtcaaatgtaatcacaggagaggacgaaaaaagaagcgccctggcagattaagaggccgctttcccatctggctagcccggccctggagttccctgcctttacagtagggcagtagagcagtcctgtgctgaagctctcagctgctgaacagtgcattacagtggcagca

SEQ ID NO: 13984 - DNA, 600 bp, Chicken  19866894218764_3
tgtaatcacaggagaggacgaaaaaagaagcgccctggcagattaagaggccgctttcccatctggctagcccggccctggagttccctgcctttacagtagggcagtagagcagtcctgtgctgaagctctcagctgctgaacagtgcattacagtggcagcataaatcttgccaccctcaccagcgtctgggtttgcagcacgacggatagacaaggtgtttggaagcgaaagccacctacctggcgtggtctacacactccaccactttgccaaaagtgccttcgccaaggctgccsacaatttcatctaggagagaaaacaggagcagatgtgaacttgaggggagtggcgagagctgagctcctgcaattcacagcaataaagcgtcaaagcaaaaacgtctctcgctgctacgctctttaaaactcaagtggctattgtctgcctcaggtaatttactggtcagtccatttataagcaataaacactaggagacccctccagtacaataagagagatctcgtctaacacggggatagaaagtagaggtaaagttttacgaaaggtggctgtacatcgctcttgaagccaatcgc

SEQ ID NO: 13985 - DNA, 600 bp, Chicken  19866894218766_1
tgttcaagatgagtctttgcaaaaagaaaaggggatacacaaggggtgggattctggttacagctggacatcacacttcagtctcctacagcaggtgagtcccagtgagccacatgggcaggctccatcactgccagcagacttccaagagttatagctctcctgtggcagtcagtgtgtcttagcatgagacttacactgctgtgtaggtctcctgtgggatattggcttgccagtcttgatttagctcctccagcacaggcagcttcaggcacctgacagccctcagacaccctgccrgacccccagctgccagacaaggagggctcttgtaggcccttgtcacgtctgccagccctgtgctgacatctcagagactgtgataactcaagtgacgcaagacaactgtgtgcatgcatgagaatcctgctctgagctttgtatggagaagtctaaatcgaaatgtcgtcaccaaactgaaccccaagcaaattgtgcttcctatgttagcagagatcctggtaacaaaagaacagaatagaagggtaacacagacaggcaggtctattttcttcaaaaatcccacaagtacataccaag

SEQ ID NO: 13986 - DNA, 600 bp, Chicken  19866894218767_1
gtccatctggtcccaggtccagcctccagccctggtgctggccaggggagcagaaccaaacaagcactgtgatgcttcattggctcttaaccccagcaggctttgtccccacagctctgtgtgccagggtgagcgcttggagtggtatttctcatggtggatttcttttcttccttgaaactcagccctcgcaaacctcactgcagcttccacatccctatccctggatgcttgcagtcatgctgctcgtcctgctccccattcagctcctttttcaagctaagagtcctcatttgcttyaccccacctcatttgagcatctttgtactcctggtcctcgctcgttggcgctccgtgtattctgcccttcctaccctattgcttcacttctgggctgtcccggggaagcttctctgtgagctgagccctccctgcagagcacagaggctgtggctccacacagggggctgaattatttcaatccatccaccctctcctgcagcagtgtgagctcagctcgcggaagaacatcattttgaagggctgatcttgaggcgaggtgcccccagccccattcctgtgtccacagtgagcccctca

SEQ ID NO: 13987 - DNA, 600 bp, Chicken  19866894218767_2
tctttgtactcctggtcctcgctcgttggcgctccgtgtattctgcccttcctaccctattgcttcacttctgggctgtcccggggaagcttctctgtgagctgagccctccctgcagagcacagaggctgtggctccacacagggggctgaattatttcaatccatccaccctctcctgcagcagtgtgagctcagctcgcggaagaacatcattttgaagggctgatcttgaggcgaggtgcccccagccccattcctgtgtccacagtgagcccctcacagctgctgagggtgcaaytggggcccaattttccaatgctgtaatggggaactggagccctatgcttgctgagatcagcagcgccgtttcagctcccctgtcacgcacccgatcgctcagggctttggttgccctaccaaggtactgagctccaaaattaggtccctgcaccaaaaataactaaattaaaacctataaatttttctcttaacaagcagaaaatcccagggctggaggccgggggacagcgtgtgcctgattcttatttaaaaaagaaaactctgtttgcttgctttagcacccgcgttgtcctccggg

SEQ ID NO: 13988 - DNA, 599 bp, Chicken  19866894218776_1
  misc_feature (1)..(205): n is any nucleotide
nnnnnnnnnnnnnnnnnnnnnnnnnnnnnnnnnnnnnnnnnnnnnnnnnnnnnnnnnnnnnnnnnnnnnnnnnnnnnnnnnnnnnnnnnnnnnnnnnnnnnnnnnnnnnnnnnnnnnnnnnnnnnnnnnnnnnnnnnnnnnnnnnnnnnnnnnnnnnnnnnnnnnnnnnnnnnnnnnnnnnnnnnnnnnnnnnnnnnnnnnnnnntctcggagatggtggtcactggtcagaataaggaacaaccagcaaatcctttctatttttgctgcttcttaacagtttgaaaaagcagttaagayaggtccttaaattattttaagcaaaaaattgcttccctccttgcatcctcactttctaaagactatactatgaattccttcccatcctcaaacatacattcctcaatttagttccctcccatttatgctttcctctcatgcttttagggctctaccccgtttctttctcaacaccacaccttcatgaaagagaaggaagtcagtttgggttgctacagtattgctttacatacataccataagcccagagctggtatgtgatgactacattgtgcgttgagaggacaaatgtggtacaa

SEQ ID NO: 13989 - DNA, 600 bp, Chicken  19866894218785_1
acgcccatgctaaaaacaggttccctacagcaggaaagtgtccaggtggatcttgaatatctccagagaaggtgagaatttctcacagtaatgataacagaatggttatatcttatggtatcataatactgtctgtttttatcagtgaaggtacatggaaatgaagatatttcactttccttcatttcctcttcccaccttatcagtcagcaccattaggaaggtaaaacaagtgctgcaaactgcctccatcatcagtctaaattttggaatctcttgcctcttgtaaggcacagtccyttacattgatcagtcatgtactgggatttctatgctctcagtagaccctcaagtgctctaattctgcttcaccctgaagcagtctcagggaggaccgtgtcagtcaaagaggagacaaaaagaagtacaatccacaactctcttctctacattgctgctccaggagtaatcaaggatgagaagaatggaagaagaggaatatggaaagaagctaaagcatgtgaggttgcataacactgcgcagagtagtatttgatgttatcaactttagtaatgctggtaaaatctgcattacaaaag

SEQ ID NO: 13990 - DNA, 600 bp, Chicken  19866894218786_1
tccaagagctgctctctgcctcaaaaatatattctcacaagttctgagtgtttattgacttagaggggaaggatttggtcctgaaatgattctaggatgggtgttttctatcctcgtggcaaagctctgtagtgcttttgataggctccttggtgttagaaatttcctgcagtgtgcgtattccatggcctggcacttttggaaaacaatgtatttattcagaaaacactgtttttcagactcttgtcaagtactttgacctttcttcctctcacagtttgttgttgttgttgttgtttktttttttccatctcctttgcttctttcaaagtcgaagatactttaaagccatgtaacaaccaagtagcacagcagaaatagcagtcaaaggagttcagaccttcgggaatgtaaaggcatcttctggataaataaacctcaaataagagataacacaagtaaaggctgtagaagcagctgaaatatagtacttcagagaactgcacaaaggagacgctgaggagtgggggagaggtgaaaatagccaatagccatctttattcataacagttctgcatctaatgtgatcttcccacagac

SEQ ID NO: 13991 - DNA, 600 bp, Chicken  19866894218788_1
atggagttagttgcctggttctggagagccatacaatctgatgcctgctcctcttaagcatcttcttctagttgtgagggttactgtagcctgaattctctgactgtcattcttgggtgtgtttctgtagacaccacagaggaaaactattgggtagactttgtcaaatgtttgagacagttccaggcagaccacagaaagtgttttttattggtctgctacaaatctgaattcggtctaacttctggaaccagagcagtaactacttctgctggaactccctcgacgtgagctttatcytctgctagactgcctgctattaattgtcttactggtaatcttataaaccgtgtcctattaaaaagtaatagatcaatttactcctataacacatggcaaatacattaagaagttagattatcttaatattttttcttctcccagagcccagatgtaaggaagggctcgctcacttaatctagacttcaggtgtttgagggcttgcagtgtactttccatcagtaaacttgtatttgtcttgtgtgctttatatagcgtacatggagattaaactgtatataattgaaagctttgtgtaag

SEQ ID NO: 13992 - DNA, 600 bp, Chicken  19866894218788_10
agtgattgatggtggacatatttctgacatagcacacaggaaaatgtatgtgtaaaatgtattatggcttttgaggctgcaagttgtctgtaatggcacttactggacagtagttatgtataaatcttgtattgtaaattattaaacacaatgaactctatgcaatctgcagaacacaagcatagtgccatggataacagtgtatatctttagtatagataggaatttggagtacctagtgtagtgtaattataaaaggtcagatgtaatccccatgtttggttccacaattgrcaygtrcagttatctaagtagcaaggttgtaatgttgttttgagtcacagaactcatatcaagccatggaacaggcactattgcttaacatggagacaattagtatctcactgtttttaacctagttagactgattgttaactaagttaactcagctaagtattttaacttggtagctaaacctcagtakttaggaaggtaggttgctagctttgcgtaactggctccaaatagctgagcaaaggctctgtcagcaattcagaaatatttgctcttgccaattaagatttrcaatagctgatttta

SEQ ID NO: 13993 - DNA, 600 bp, Chicken  19866894218788_11
gtgccatggataacagtgtatatctttagtatagataggaatttggagtacctagtgtagtgtaattataaaaggtcagatgtaatccccatgtttggttccacaattgrcaygtrcagttatctaagtagcaaggttgtaatgttgttttgagtcacagaactcatatcaagccatggaacaggcactattgcttaacatggagacaattagtatctcactgtttttaacctagttagactgattgttaactaagttaactcagctaagtattttaacttggtagctaaacctcagtakttaggaaggtaggttgctagctttgcgtaactggctccaaatagctgagcaaaggctctgtcagcaattcagaaatatttgctcttgccaattaagatttrcaatagctgattttaatgaagcccttggtatttagatctactgttttccattgaccattgctgccatacrttagtagttcccttacatcccaaccctggtgacatctggctgttgctggtagctcttttctccagggaaatgaacaaagtcatctgtagtgacatcctggaataagagatttgttacacctgagtctgc

SEQ ID NO: 13994 - DNA, 600 bp, Chicken  19866894218788_12
cacaattgrcaygtrcagttatctaagtagcaaggttgtaatgttgttttgagtcacagaactcatatcaagccatggaacaggcactattgcttaacatggagacaattagtatctcactgtttttaacctagttagactgattgttaactaagttaactcagctaagtattttaacttggtagctaaacctcagtakttaggaaggtaggttgctagctttgcgtaactggctccaaatagctgagcaaaggctctgtcagcaattcagaaatatttgctcttgccaattaagatttrcaatagctgattttaatgaagcccttggtatttagatctactgttttccattgaccattgctgccatacrttagtagttcccttacatcccaaccctggtgacatctggctgttgctggtagctcttttctccagggaaatgaacaaagtcatctgtagtgacatcctggaataagagatttgttacacctgagtctgctaagcacaaaacagaaaagcttcttgctgattgtgagttcaaagctgttatgtaattaccagcaaaggtgtatttgacagaaagtttgtacctggacgttt

SEQ ID NO: 13995 - DNA, 600 bp, Chicken  19866894218788_13
agccatggaacaggcactattgcttaacatggagacaattagtatctcactgtttttaacctagttagactgattgttaactaagttaactcagctaagtattttaacttggtagctaaacctcagtakttaggaaggtaggttgctagctttgcgtaactggctccaaatagctgagcaaaggctctgtcagcaattcagaaatatttgctcttgccaattaagatttrcaatagctgattttaatgaagcccttggtatttagatctactgttttccattgaccattgctgccatacrttagtagttcccttacatcccaaccctggtgacatctggctgttgctggtagctcttttctccagggaaatgaacaaagtcatctgtagtgacatcctggaataagagatttgttacacctgagtctgctaagcacaaaacagaaaagcttcttgctgattgtgagttcaaagctgttatgtaattaccagcaaaggtgtatttgacagaaagtttgtacctggacgtttattctgtactctgcaccatttcttttcactcatctcactggtgtttttgtttgcaggaccacaacataac

SEQ ID NO: 13996 - DNA, 600 bp, Chicken  19866894218788_2
tagtcctgaaaacctttttgtcttggagttacccacatctgttgacgaggttaccaaatggagataacgactgatgtttgctactgacatctgtagtcaactattatttagaactcaggtaatgatatggaatacatcccccctccatacacgttctaaatcaggagcagattagttcatgccatcttcattggtggcttaaagaagggtggttgatgttgcactgatttttcatgagctgcacctgcatttctgcttttgcagctcttctgtttgaagtagcaacttctagcaggcacrtagcaccaaggtgctcatgcttcaactgcctttgcttcctgcraaaygtttgagtcytcacgagcttaaatgtctatagcttgcaatgtttacgtcaccaatagagcattcaataggaggaacctagactctgctagacttkgctctgaacctaatgtaacctgaaaattttgtcctttatttagtttcatgtgttggtacatttgtttatcrtcacctaattgtgcacaaactagaaatcagattctgattctagtgaatctaggcagctgattcactgtgtagccatgagcaattgta

SEQ ID NO: 13997 - DNA, 600 bp, Chicken  19866894218788_3
gacgaggttaccaaatggagataacgactgatgtttgctactgacatctgtagtcaactattatttagaactcaggtaatgatatggaatacatcccccctccatacacgttctaaatcaggagcagattagttcatgccatcttcattggtggcttaaagaagggtggttgatgttgcactgatttttcatgagctgcacctgcatttctgcttttgcagctcttctgtttgaagtagcaacttctagcaggcacrtagcaccaaggtgctcatgcttcaactgcctttgcttcctgcraaaygtttgagtcytcacgagcttaaatgtctatagcttgcaatgtttacgtcaccaatagagcattcaataggaggaacctagactctgctagacttkgctctgaacctaatgtaacctgaaaattttgtcctttatttagtttcatgtgttggtacatttgtttatcrtcacctaattgtgcacaaactagaaatcagattctgattctagtgaatctaggcagctgattcactgtgtagccatgagcaattgtataggttcattgacttgtgtttctcagagtatgatgttaatctt

SEQ ID NO: 13998 - DNA, 600 bp, Chicken  19866894218788_4
aggttaccaaatggagataacgactgatgtttgctactgacatctgtagtcaactattatttagaactcaggtaatgatatggaatacatcccccctccatacacgttctaaatcaggagcagattagttcatgccatcttcattggtggcttaaagaagggtggttgatgttgcactgatttttcatgagctgcacctgcatttctgcttttgcagctcttctgtttgaagtagcaacttctagcaggcacrtagcaccaaggtgctcatgcttcaactgcctttgcttcctgcraaaygtttgagtcytcacgagcttaaatgtctatagcttgcaatgtttacgtcaccaatagagcattcaataggaggaacctagactctgctagacttkgctctgaacctaatgtaacctgaaaattttgtcctttatttagtttcatgtgttggtacatttgtttatcrtcacctaattgtgcacaaactagaaatcagattctgattctagtgaatctaggcagctgattcactgtgtagccatgagcaattgtataggttcattgacttgtgtttctcagagtatgatgttaatcttgctt

SEQ ID NO: 13999 - DNA, 600 bp, Chicken  19866894218788_5
atggagataacgactgatgtttgctactgacatctgtagtcaactattatttagaactcaggtaatgatatggaatacatcccccctccatacacgttctaaatcaggagcagattagttcatgccatcttcattggtggcttaaagaagggtggttgatgttgcactgatttttcatgagctgcacctgcatttctgcttttgcagctcttctgtttgaagtagcaacttctagcaggcacrtagcaccaaggtgctcatgcttcaactgcctttgcttcctgcraaaygtttgagtcytcacgagcttaaatgtctatagcttgcaatgtttacgtcaccaatagagcattcaataggaggaacctagactctgctagacttkgctctgaacctaatgtaacctgaaaattttgtcctttatttagtttcatgtgttggtacatttgtttatcrtcacctaattgtgcacaaactagaaatcagattctgattctagtgaatctaggcagctgattcactgtgtagccatgagcaattgtataggttcattgacttgtgtttctcagagtatgatgttaatcttgcttacaatgcagt

SEQ ID NO: 14000 - DNA, 600 bp, Chicken  19866894218788_6
ctccatacacgttctaaatcaggagcagattagttcatgccatcttcattggtggcttaaagaagggtggttgatgttgcactgatttttcatgagctgcacctgcatttctgcttttgcagctcttctgtttgaagtagcaacttctagcaggcacrtagcaccaaggtgctcatgcttcaactgcctttgcttcctgcraaaygtttgagtcytcacgagcttaaatgtctatagcttgcaatgtttacgtcaccaatagagcattcaataggaggaacctagactctgctagacttkgctctgaacctaatgtaacctgaaaattttgtcctttatttagtttcatgtgttggtacatttgtttatcrtcacctaattgtgcacaaactagaaatcagattctgattctagtgaatctaggcagctgattcactgtgtagccatgagcaattgtataggttcattgacttgtgtttctcagagtatgatgttaatcttgcttacaatgcagtccagaacaactctattgaaacagcagtgtaggattaaatcaaccatgccatatatgtttcactccgcttaattgaaatagtcact

SEQ ID NO: 14001 - DNA, 600 bp, Chicken  19866894218788_7
tgatgttgcactgatttttcatgagctgcacctgcatttctgcttttgcagctcttctgtttgaagtagcaacttctagcaggcacrtagcaccaaggtgctcatgcttcaactgcctttgcttcctgcraaaygtttgagtcytcacgagcttaaatgtctatagcttgcaatgtttacgtcaccaatagagcattcaataggaggaacctagactctgctagacttkgctctgaacctaatgtaacctgaaaattttgtcctttatttagtttcatgtgttggtacatttgtttatcrtcacctaattgtgcacaaactagaaatcagattctgattctagtgaatctaggcagctgattcactgtgtagccatgagcaattgtataggttcattgacttgtgtttctcagagtatgatgttaatcttgcttacaatgcagtccagaacaactctattgaaacagcagtgtaggattaaatcaaccatgccatatatgtttcactccgcttaattgaaatagtcactgtagaagtggctaaggacactgaaggtagtatagctctgtgagtatggagaatcattactgcctagtctta

SEQ ID NO: 14002 - DNA, 600 bp, Chicken  19866894218788_8
atacacagtgattgatggtggacatatttctgacatagcacacaggaaaatgtatgtgtaaaatgtattatggcttttgaggctgcaagttgtctgtaatggcacttactggacagtagttatgtataaatcttgtattgtaaattattaaacacaatgaactctatgcaatctgcagaacacaagcatagtgccatggataacagtgtatatctttagtatagataggaatttggagtacctagtgtagtgtaattataaaaggtcagatgtaatccccatgtttggttccacaattgrcaygtrcagttatctaagtagcaaggttgtaatgttgttttgagtcacagaactcatatcaagccatggaacaggcactattgcttaacatggagacaattagtatctcactgtttttaacctagttagactgattgttaactaagttaactcagctaagtattttaacttggtagctaaacctcagtakttaggaaggtaggttgctagctttgcgtaactggctccaaatagctgagcaaaggctctgtcagcaattcagaaatatttgctcttgccaattaagatttrcaatagctg

SEQ ID NO: 14003 - DNA, 600 bp, Chicken  19866894218788_9
cacagtgattgatggtggacatatttctgacatagcacacaggaaaatgtatgtgtaaaatgtattatggcttttgaggctgcaagttgtctgtaatggcacttactggacagtagttatgtataaatcttgtattgtaaattattaaacacaatgaactctatgcaatctgcagaacacaagcatagtgccatggataacagtgtatatctttagtatagataggaatttggagtacctagtgtagtgtaattataaaaggtcagatgtaatccccatgtttggttccacaattgrcaygtrcagttatctaagtagcaaggttgtaatgttgttttgagtcacagaactcatatcaagccatggaacaggcactattgcttaacatggagacaattagtatctcactgtttttaacctagttagactgattgttaactaagttaactcagctaagtattttaacttggtagctaaacctcagtakttaggaaggtaggttgctagctttgcgtaactggctccaaatagctgagcaaaggctctgtcagcaattcagaaatatttgctcttgccaattaagatttrcaatagctgatt

SEQ ID NO: 14004 - DNA, 600 bp, Chicken  19866894218793_1
gttattctcttggtcatggatatttccaagatgagattttatatttcgctcccatagcttctggttgtcagaaaacccatgctttcctttattgaaggaatttggtcctgctgaggttggcgtatccctgtgaaaagcaaaacagcatcagttgagaacgtcactttaaatgacagtaatttgtgcaacggggcactgaaaaaaatcgatttcaagcccaagctgctgccaggaactaccacacattcctttatcttagttatgtgaggagtcctagctaccagtgactggcagtcggtraaaaaaactcatctgtctgtggtacgtcgaggtgagatggggcagcagcaggaatggaaatggaaggaacagctgctaactgtgaagaatttgtggtacaggcaaaaaagttgaggatccaaatctactgttggagaaaaaattcactgagcagcagtaagcctgcattagcagtaagtcaagtcaggagactgactttaaaagcaatctataacgatgaacatctttaaaatacgtacactcaagattaatctctcgcttaagtgaagccttccctctatttaagattgaccctaatgt

SEQ ID NO: 14005 - DNA, 600 bp, Chicken  19866894218808_1
ctaccatgggatccctcataacaaaacaagtgcttgtattctgtaactgtgcatctttaaacatatatttggggaggatattcacaaagcagcacaatagtcatattgtgttggaaatgaatggtcttcagatgagcgctgtgcgaggcgtggacctccagggctgtgccttgcagctcttgagagtgactctgtgtgctgggacgtgagctgggagcgtgcccggccgtgctggggacagggggacatctctgagtgagcggggctggctggggtaggacgggattcatccaatagcaycagcagcatgcagtcctgcagggacatggcttagtggtgtgggggcagcgggttgatggctggacttgatcatagcagtctcttccaactttagtgattccatcgtggaatagaacgtatgagatggtgctgtcatacattcctgttctgcacatgggtgcgctgtcagcaccctgcacttctatctggaagcacgtagggagtcatgcaggaggggaggtgcagagtgtaccaggagtgcagcctgtcctgctgcccaggtagaagagaggggcaggtagggtagtggagaagtgccct

SEQ ID NO: 14006 - DNA, 600 bp, Chicken  19866894218820_1
attctttgtatataaatatcagttccagaagatatgcttcattttttatggcctagaactgatatgactgatatagctgctatttagcaaacaaaagctcaccatatctttgacaaaaataacaaatattaatatttattgcaatatcattgtcaattttaaatgattacatagcgctgatataatgatgaaagactgctttggagcttttcccaaaaagaaagtttttgaggcaatcataggaaacagttccagtgatatcagcaggctgcttccatgtggcacacttccagacggtgwatatcagagccagtggttggtggaaaagaataggcattttgttctcaaaagagactgataagttttttccactagtcaagtgatctacacttgcaaattgctgagatgcactggtcaatttgttcattcatccgttcaaagaaaaaaaaagaagctgataaatccagtttagctcaagagtcaaaaagcctgttcttaaatcctgccttctctaatcatcccaaataattccaaagaggtggtgagaaacttaattttgcttctttataagcacggaatgtatgcttttatcttgtatga

SEQ ID NO: 14007 - DNA, 474 bp, Chicken  19866894218820_2
caagagtcaaaaagcctgttcttaaatcctgccttctctaatcatcccaaataattccaaagaggtggtgagaaacttaattttgcttctttataagcacggaatgtatgcttttatcttgtatgattatagttaaaaagtaacctggaaaaagcctacataaatgagaatcagaaaataattttcatactttcagttaaggatttctgttaataatttcagttaaggaaagtttcactgacattgtaatcaaatttcgatgggcatcttgctgataaagatttgcttactctgacattmctgactgatgttactatgaaaacttttaaaatgtaatgggaaatatatcccaagaaataatttcacactgttgtttaagatcaatatttacactctgaagaaaaataaagtaaaataacaaaaaaacaaatcgacgtagattccttgaagaattttgctaccttgtggtaggag

SEQ ID NO: 14008 - DNA, 600 bp, Chicken  19866894218825_1
tgtcagcagtgctctgaatttgaccctttctctctagtgttctgtcaacagttatgaaggtagaaggagggcgagcagattgtcatgggaccgatataaagaaagcaggcctgaagaaatattctaagtcatacgtcttgaaagatgcatggaagaaaatgggacttaaaatcttggctcttaaaatgaaaatacatatatatttgccaagaagaacctcactgcattttgattgttttatatttagttttccaatttgatgttggcgcgatcacaaaacgtaaacttgccatatgtatrycttgagtggttttgggttctgtaagtctagtgaaagttaatggattatataatgcaatctttagttaccatctcttcttgaggctcttttccttctgtttttgcaggatgtaaaagatactcctcactatcgaattctaattaacaatgcaagtggatttggcaaatctactgcttacgttcctgaggaagagataaaaactactgtgggattacaggtatatttatttttatttagttgcaacttgtttgttaccgtctgtgaataaaagttggctgaccttcagcttaatagaaact

SEQ ID NO: 14009 - DNA, 600 bp, Chicken  19866894218825_2
gtcagcagtgctctgaatttgaccctttctctctagtgttctgtcaacagttatgaaggtagaaggagggcgagcagattgtcatgggaccgatataaagaaagcaggcctgaagaaatattctaagtcatacgtcttgaaagatgcatggaagaaaatgggacttaaaatcttggctcttaaaatgaaaatacatatatatttgccaagaagaacctcactgcattttgattgttttatatttagttttccaatttgatgttggcgcgatcacaaaacgtaaacttgccatatgtatrycttgagtggttttgggttctgtaagtctagtgaaagttaatggattatataatgcaatctttagttaccatctcttcttgaggctcttttccttctgtttttgcaggatgtaaaagatactcctcactatcgaattctaattaacaatgcaagtggatttggcaaatctactgcttacgttcctgaggaagagataaaaactactgtgggattacaggtatatttatttttatttagttgcaacttgtttgttaccgtctgtgaataaaagttggctgaccttcagcttaatagaaacta

SEQ ID NO: 14010 - DNA, 599 bp, Chicken  19866894218832_1
  misc_feature (1)..(228): n is any nucleotide
nnnnnnnnnnnnnnnnnnnnnnnnnnnnnnnnnnnnnnnnnnnnnnnnnnnnnnnnnnnnnnnnnnnnnnnnnnnnnnnnnnnnnnnnnnnnnnnnnnnnnnnnnnnnnnnnnnnnnnnnnnnnnnnnnnnnnnnnnnnnnnnnnnnnnnnnnnnnnnnnnnnnnnnnnnnnnnnnnnnnnnnnnnnnnnnnnnnnnnnnnnnnnnnnnnnnnnnnnnnnnnnnnnnnctacaggtgctcttttttcttgtggctcccaccccaaatctgcagacccctctaattttaacctcttctgcrctgctaggcgctcygcagccttatgcatggtggaaatccatgctgtgcttggcatgggcatcctttgagggatgcattttggggttttggtgggtgttcaaagtatctyyccccaggcaggaagacacagctcgtcatagctgggtaggcaggtgggtaactcctaacccctaatacaaggctggaagttgcccctgttgatgcgttctgtagaatgytaattagggttcaagctgtgtggttaattagggtgtaatctgtgtcgataaccatgatctggttgaatttaaacagcaatt

SEQ ID NO: 14011 - DNA, 599 bp, Chicken  19866894218832_2
  misc_feature (1)..(214): n is any nucleotide
nnnnnnnnnnnnnnnnnnnnnnnnnnnnnnnnnnnnnnnnnnnnnnnnnnnnnnnnnnnnnnnnnnnnnnnnnnnnnnnnnnnnnnnnnnnnnnnnnnnnnnnnnnnnnnnnnnnnnnnnnnnnnnnnnnnnnnnnnnnnnnnnnnnnnnnnnnnnnnnnnnnnnnnnnnnnnnnnnnnnnnnnnnnnnnnnnnnnnnnnnnnnnnnnnnnnnnctacaggtgctcttttttcttgtggctcccaccccaaatctgcagacccctctaattttaacctcttctgcrctgctaggcgctcygcagccttatgcatggtggaaatccatgctgtgcttggcatgggcatcctttgagggatgcattttggggttttggtgggtgttcaaagtatctyyccccaggcaggaagacacagctcgtcatagctgggtaggcaggtgggtaactcctaacccctaatacaaggctggaagttgcccctgttgatgcgttctgtagaatgytaattagggttcaagctgtgtggttaattagggtgtaatctgtgtcgataaccatgatctggttgaatttaaacagcaatttagagtgcattggc

SEQ ID NO: 14012 - DNA, 599 bp, Chicken  19866894218832_3
  misc_feature (1)..(119): n is any nucleotide
nnnnnnnnnnnnnnnnnnnnnnnnnnnnnnnnnnnnnnnnnnnnnnnnnnnnnnnnnnnnnnnnnnnnnnnnnnnnnnnnnnnnnnnnnnnnnnnnnnnnnnnnnnnnnnnnnnnnnnnctacaggtgctcttttttcttgtggctcccaccccaaatctgcagacccctctaattttaacctcttctgcrctgctaggcgctcygcagccttatgcatggtggaaatccatgctgtgcttggcatgggcatcctttgagggatgcattttggggttttggtgggtgttcaaagtatctyyccccaggcaggaagacacagctcgtcatagctgggtaggcaggtgggtaactcctaacccctaatacaaggctggaagttgcccctgttgatgcgttctgtagaatgytaattagggttcaagctgtgtggttaattagggtgtaatctgtgtcgataaccatgatctggttgaatttaaacagcaatttagagtgcattggcagacttgtggtctgacccatggcagagaagggtggtcatcacctggagactgactgtggctgcccaaaaarggcagtgtagattcagataaaacc

SEQ ID NO: 14013 - DNA, 599 bp, Chicken  19866894218832_4
  misc_feature (1)..(118): n is any nucleotide
nnnnnnnnnnnnnnnnnnnnnnnnnnnnnnnnnnnnnnnnnnnnnnnnnnnnnnnnnnnnnnnnnnnnnnnnnnnnnnnnnnnnnnnnnnnnnnnnnnnnnnnnnnnnnnnnnnnnnnctacaggtgctcttttttcttgtggctcccaccccaaatctgcagacccctctaattttaacctcttctgcrctgctaggcgctcygcagccttatgcatggtggaaatccatgctgtgcttggcatgggcatcctttgagggatgcattttggggttttggtgggtgttcaaagtatctyyccccaggcaggaagacacagctcgtcatagctgggtaggcaggtgggtaactcctaacccctaatacaaggctggaagttgcccctgttgatgcgttctgtagaatgytaattagggttcaagctgtgtggttaattagggtgtaatctgtgtcgataaccatgatctggttgaatttaaacagcaatttagagtgcattggcagacttgtggtctgacccatggcagagaagggtggtcatcacctggagactgactgtggctgcccaaaaarggcagtgtagattcagataaaaccc

SEQ ID NO: 14014 - DNA, 599 bp, Chicken  19866894218832_5
  misc_feature (1)..(10): n is any nucleotide
nnnnnnnnnnctacaggtgctcttttttcttgtggctcccaccccaaatctgcagacccctctaattttaacctcttctgcrctgctaggcgctcygcagccttatgcatggtggaaatccatgctgtgcttggcatgggcatcctttgagggatgcattttggggttttggtgggtgttcaaagtatctyyccccaggcaggaagacacagctcgtcatagctgggtaggcaggtgggtaactcctaacccctaatacaaggctggaagttgcccctgttgatgcgttctgtagaatgytaattagggttcaagctgtgtggttaattagggtgtaatctgtgtcgataaccatgatctggttgaatttaaacagcaatttagagtgcattggcagacttgtggtctgacccatggcagagaagggtggtcatcacctggagactgactgtggctgcccaaaaarggcagtgtagattcagataaaacccaaaatcagagaggcttggtggttacaagggaaacatgctgggaaacatggtggtgtagatgcaactggatgcacaggagcccctgcaagacagactactgtgagctgg

SEQ ID NO: 14015 - DNA, 600 bp, Chicken  19866894218832_6
ttttggtgggtgttcaaagtatctyyccccaggcaggaagacacagctcgtcatagctgggtaggcaggtgggtaactcctaacccctaatacaaggctggaagttgcccctgttgatgcgttctgtagaatgytaattagggttcaagctgtgtggttaattagggtgtaatctgtgtcgataaccatgatctggttgaatttaaacagcaatttagagtgcattggcagacttgtggtctgacccatggcagagaagggtggtcatcacctggagactgactgtggctgcccaaaaarggcagtgtagattcagataaaacccaaaatcagagaggcttggtggttacaagggaaacatgctgggaaacatggtggtgtagatgcaactggatgcacaggagcccctgcaagacagactactgtgagctgggggtctctgatggctctcaggctgtggagaggctttggtggtggtggtcccggtgggaagggaggttcaacactcgttgtccttgcttagaaatgggagttcaaggttcagaagtttgtgacttgtctgagagcgctgggagcacggatggtggtggagatctccaa

SEQ ID NO: 14016 - DNA, 579 bp, Chicken  19866894218842_1
gttgcccaaggaggctgtggatgccccatccctgcaggcattcaaggccaggctggatgtggctctgggcagcctgggctgctggttggtgacctgcacacagcaggggggggttggaactgcatgagcattgtggtccttttcaacccaggccattctgtgattctgtgattcttgaggaaggaaatacagcacagctttgtggtcgttccctgtgctctgtaccatcctggacttctctgctgggaagggccaggaaaattccctttattttcttcagggaactttgagtacatgaaytgaagagcccaacctatatctctcttcaaagttaataccccacaaagctcactagtgactgattactaactctccagccttctccatgttctcatgtctcttatgagtcagaccctgacagagtcttgtgatggacatcttgagagtcatcttggtggtggaagacgtgaggtagaaagcatatggagcagggaggtaatgttggagagtttgtttgagaatcatagagtcatcagggttggaaaagaccatgaagatcatcaagcccaaccatcacat

SEQ ID NO: 14017 - DNA, 600 bp, Chicken  19866894218844_1
tcaacttcaaaaaaagcaaccaccatattctgaaaaatgtctcccaccgaagcaaagaaagcagcttgcaaatacatcttggctggggtggagggttctacttctccttttcaatctgtggctgaaagggaacaaaagttggcaaattccttcagcccagtgacctctagtggcagtgcgcctggtgggagtcagtgcattacactgctttgttttgtccaacaccggggccggcatcccatcagttcagctgtcataactcaccacgcctcagtcagtctgctatcgtttaagacaacrgccactcaaccattcctattcccttatcttgcccgacttgaggtcctgaaacacagagaggacaatctggacttcccttgggaagcaaagccttcagccttggcagaatactgataaagaaactccagtagcccaggactggcatgctcgggttgaaggcagctctttaaaaatgtcacagcgaggtacattttgctgtgaagtgaaagtgggtgttcacagtgctggcgtgtggttcttcatgtcagtgtgtacacagccctgtgggccaccagcgctgggcgttctggctcttcctct

SEQ ID NO: 14018 - DNA, 600 bp, Chicken  19866894218845_1
gtgttgaaagagcacagctttccttctggcaaacctgggaggaaggagcctcctttggaagcatcttcctctctgttacatgccagaaattcctataggaacttccctgtagggactctggcaaccatttatcattccttctcagttttgactaaaaatgaagcaaaccaaccctgagcaaggcagacccacaccgcgttgtttgcaccaaatgcagcatccacgccaccactaaatcttccctattacacagtacctgtagtgcattatttttttcgctagattcaacacgttcagcgycctgattccgtctggtcagtcgctgctaattgcaggaagaaagtctggggcacaggaggggaaacttgacctgctcagcatcaatcagaacatcagcagggcctctccgataccagcttggctgcgtggagcacgcgggccatgctgacagcccagcagtgaygctgccccgtgggcaggccctttccctcggagggacaggtgtggggaatataacaattacattaactctgtgccatcgacggtatcctcctcatggcagggctgttccctgctgtcctgcgggttagatttactgct

SEQ ID NO: 14019 - DNA, 600 bp, Chicken  19866894218845_2
caaaccaaccctgagcaaggcagacccacaccgcgttgtttgcaccaaatgcagcatccacgccaccactaaatcttccctattacacagtacctgtagtgcattatttttttcgctagattcaacacgttcagcgycctgattccgtctggtcagtcgctgctaattgcaggaagaaagtctggggcacaggaggggaaacttgacctgctcagcatcaatcagaacatcagcagggcctctccgataccagcttggctgcgtggagcacgcgggccatgctgacagcccagcagtgaygctgccccgtgggcaggccctttccctcggagggacaggtgtggggaatataacaattacattaactctgtgccatcgacggtatcctcctcatggcagggctgttccctgctgtcctgcgggttagatttactgctccttttaagtgtcctgggacaaaagggagctggaggttgttcttggggttggttggttgtttttttttgttttcccctattatttttttccatactctagtacaaggcatccagagcgttcctaccagagcagaagatcaaaagcccaaatgttacaattagt

SEQ ID NO: 14020 - DNA, 600 bp, Chicken  19866894218847_1
taatggtttaccacttttacattcaactcttatgtacaaacccatttgtgaacttaatttgctccctttaaaattagagatttgtgtataatgaaaaatactcaaccaattttcctgaacagaagcagacctattaggtctgttttcaaaatataatttagtggaaggttttgatctaacctcagaatgcttttgaaaatgcagggaaaaaagtttcaaatttgaagaggttatttaatgcttctccttgggtggcaggagcaagcacccttgtatcatactacaggtatctgtctaacyagtttttgaaaatgtggagcctctgcaccttctccacwatgtggagagtattttccaagtcatccaacttaaatatcctatartgcattttaggattgctagtgcatttcatagaggatgtgaataggcttcattcctttccttgttattacagcattctgtgcacttgaggattattgccccttctcctgccagttacttctctaatggaacaaacaaggcttgtttttctctattatgacttgtagactatattttctagctctgatattttgtattttcatacttctaccagttgat

SEQ ID NO: 14021 - DNA, 600 bp, Chicken  19866894218847_2
aacccatttgtgaacttaatttgctccctttaaaattagagatttgtgtataatgaaaaatactcaaccaattttcctgaacagaagcagacctattaggtctgttttcaaaatataatttagtggaaggttttgatctaacctcagaatgcttttgaaaatgcagggaaaaaagtttcaaatttgaagaggttatttaatgcttctccttgggtggcaggagcaagcacccttgtatcatactacaggtatctgtctaacyagtttttgaaaatgtggagcctctgcaccttctccacwatgtggagagtattttccaagtcatccaacttaaatatcctatartgcattttaggattgctagtgcatttcatagaggatgtgaataggcttcattcctttccttgttattacagcattctgtgcacttgaggattattgccccttctcctgccagttacttctctaatggaacaaacaaggcttgtttttctctattatgacttgtagactatattttctagctctgatattttgtattttcatacttctaccagttgatccagatgattttctgtaatgttaaaatgctttggcaac

SEQ ID NO: 14022 - DNA, 600 bp, Chicken  19866894218847_3
gtgtataatgaaaaatactcaaccaattttcctgaacagaagcagacctattaggtctgttttcaaaatataatttagtggaaggttttgatctaacctcagaatgcttttgaaaatgcagggaaaaaagtttcaaatttgaagaggttatttaatgcttctccttgggtggcaggagcaagcacccttgtatcatactacaggtatctgtctaacyagtttttgaaaatgtggagcctctgcaccttctccacwatgtggagagtattttccaagtcatccaacttaaatatcctatartgcattttaggattgctagtgcatttcatagaggatgtgaataggcttcattcctttccttgttattacagcattctgtgcacttgaggattattgccccttctcctgccagttacttctctaatggaacaaacaaggcttgtttttctctattatgacttgtagactatattttctagctctgatattttgtattttcatacttctaccagttgatccagatgattttctgtaatgttaaaatgctttggcaacactatgttttttgttaagttcaatttgacatttcagaagaccttg

SEQ ID NO: 14023 - DNA, 600 bp, Chicken  19866894218851_1
tgagccttgagaatttctgcacaatgcagatataggaatatcatggaagagatagtgattagaaaagatttctaacaatatatatttatgatattgtatatctgagaagttctgagccaaggaaagataagcttgttgaacataatgcattagaaatctatgcagacttatgaatcttatctgggtttgcttacaaacataaaatctatcatctgagactgatttaagtaagaaaaaataccctttttcttagtttcctgaaaaactttcaggtactatctacttaaactattcattatyactgtatagaacattagtcatgtaatttctaggatctataccaagcagaatatgagattattttacacttagtattccatacatcaccttacttgcaagccccatcccaaacactcaagaggcccaaacattcttattctgtagctgattatgtgctttgggaaattatgccaaagattgtcccaggtatggagtagactctttccatctaaaggtactccttagcacatagaaaatgaaattataacagtattattgttttcaattccaagctgaggtcactaggaagcctttactygg

SEQ ID NO: 14024 - DNA, 497 bp, Chicken  19866894218851_2
tyactgtatagaacattagtcatgtaatttctaggatctataccaagcagaatatgagattattttacacttagtattccatacatcaccttacttgcaagccccatcccaaacactcaagaggcccaaacattcttattctgtagctgattatgtgctttgggaaattatgccaaagattgtcccaggtatggagtagactctttccatctaaaggtactccttagcacatagaaaatgaaattataacagtattattgttttcaattccaagctgaggtcactaggaagcctttactyggcacagaccagcattgcctgcctaatgcaaccattcccttacctgaatttaaagataatgtcatctcartagtggagaaacctttatcttctgattctcaatcagggttacagacattcacgttggggaagagacgcagagggtctccttctaccttacagtcagcatgccaggtaatgtcagtgatattgtgccc

SEQ ID NO: 14025 - DNA, 427 bp, Chicken  19866894218851_3
ttagtattccatacatcaccttacttgcaagccccatcccaaacactcaagaggcccaaacattcttattctgtagctgattatgtgctttgggaaattatgccaaagattgtcccaggtatggagtagactctttccatctaaaggtactccttagcacatagaaaatgaaattataacagtattattgttttcaattccaagctgaggtcactaggaagcctttactyggcacagaccagcattgcctgcctaatgcaaccattcccttacctgaatttaaagataatgtcatctcartagtggagaaacctttatcttctgattctcaatcagggttacagacattcacgttggggaagagacgcagagggtctccttctaccttacagtcagcatgccaggtaatgtcagtgatattgtgccc

SEQ ID NO: 14026 - DNA, 600 bp, Chicken  19866894218852_1
tatggagaccaaatggtggatgtgagcacaggcaggcagaaggtgttgcatttcaacagtgcctccatagcagtggatcacctctgctggtacagatttgtataaacacagcatgaaggctctcatttgttgctggcaaaaaagcaaagctaatcatgctgactatgttgaaaaaatactgttttgtagctgagaatttgctctatccaagtgtcatcttgttctttgcagttgttgttgtttccgtggaaataaataggaggcattactttcagagtgacctaagtagatgatctttargatcctttccaacccagggcattctatgtycagtcattttcaggaaaacagagcccacaccacactctctggttgttcccatccctttactttcatgcctttcatttctcagttggacatcttytcaaggcactggtcactttgagtagttggctcatgctatacctggacatgtaccatgccactaactcaatatcctgattgttttttcagttactcaatcaaattttatttaggacagttttatactgagcaaaagtagtaggatttagctagctttttcatgctggcttagccaca

SEQ ID NO: 14027 - DNA, 600 bp, Chicken  19866894218852_2
ggcaggcagaaggtgttgcatttcaacagtgcctccatagcagtggatcacctctgctggtacagatttgtataaacacagcatgaaggctctcatttgttgctggcaaaaaagcaaagctaatcatgctgactatgttgaaaaaatactgttttgtagctgagaatttgctctatccaagtgtcatcttgttctttgcagttgttgttgtttccgtggaaataaataggaggcattactttcagagtgacctaagtagatgatctttargatcctttccaacccagggcattctatgtycagtcattttcaggaaaacagagcccacaccacactctctggttgttcccatccctttactttcatgcctttcatttctcagttggacatcttytcaaggcactggtcactttgagtagttggctcatgctatacctggacatgtaccatgccactaactcaatatcctgattgttttttcagttactcaatcaaattttatttaggacagttttatactgagcaaaagtagtaggatttagctagctttttcatgctggcttagccacaatttgaattgaaggtgcaaattaggtcatt

SEQ ID NO: 14028 - DNA, 600 bp, Chicken  19866894218852_3
atttgttgctggcaaaaaagcaaagctaatcatgctgactatgttgaaaaaatactgttttgtagctgagaatttgctctatccaagtgtcatcttgttctttgcagttgttgttgtttccgtggaaataaataggaggcattactttcagagtgacctaagtagatgatctttargatcctttccaacccagggcattctatgtycagtcattttcaggaaaacagagcccacaccacactctctggttgttcccatccctttactttcatgcctttcatttctcagttggacatcttytcaaggcactggtcactttgagtagttggctcatgctatacctggacatgtaccatgccactaactcaatatcctgattgttttttcagttactcaatcaaattttatttaggacagttttatactgagcaaaagtagtaggatttagctagctttttcatgctggcttagccacaatttgaattgaaggtgcaaattaggtcatttaattctaggtgcgtactcgtgagctcaaaatgcattaggcttccacattcagtcagttgaatgtagccgctgtttataactgactgtaactct

SEQ ID NO: 14029 - DNA, 600 bp, Chicken  19866894218861_1
aaagaagaaagaagatgattatggtatgttagtcaggctcaaagacctgcttctgtctctttctgctactggcacttgtatttcatagtatattgtgtgtccatgtcactgagaacttgtccccgagagacaagttctctcagggacaagactgatagtagacataatattgtctgttctcctacagtctgtgttaaatcaatattgcccagagaagttgtggatgtcccattctggagatgttcaaggccgggtttgatggggctttgggcagcctactgtagtgggaaatgtccctgytcatggcaggcagttgaaactgggtgacctttaagtcctcttcaaaccattctatggttgtatgatatccaagctttagtcattggcctaaaccatcctaggcacttgaaggcaggccttcatttaacttttcagttcctatgcttatgtttcatagcattgtggatttggaatagctttaccctatgcaaacacataaatcttgcacgttgctagtcattggattagagtttagttttccattttttttttttttgttagtagctactcttaagtagagcatcagtgtattgccatgta

SEQ ID NO: 14030 - DNA, 600 bp, Chicken  19866894218862_1
taaagctgatttaaattagtcatagggaatcaactgagagctgtcaggcgaggctgtgcacgtcagctgggagctcttgaaggatattaatgaacttccactttctgaatacactgcgttttaaaggaccgacaccagtactggagtttgcattaacatctctgaatgcatttgtgctgacatctgccctttctggccaagacaagtgctctgctttctccgctgcagactgagcacttctagggaacagcctcatttgcacctcatctcaaacctcctcctgcccttcccagacagctyttggcactgctcacagccgtgcccgcggccatccagagcctatgtgtgcccagcaaagccctgtcccagctgatgggggacagcaggaccccatgctggtggcctgggggacatccccacgtgcaacccctcaccacggggctggaagcacgacgctagatggcaccgcgaggaaaggaaaggcaacagcagccacattaccgagccaccaagaagaggacgcagctgacggccaggtaggcgagcagcatgaagagccacacaccgggggaaaaggggtccaggaaggagaaatagcca

SEQ ID NO: 14031 - DNA, 600 bp, Chicken  19866894218863_1
aatctttttgtttttgtttttgcagtaaaaacaatatctaaaacatcccacctctagttttttcaaacattttttgtctgctcttcatttcatgcacattttatttcagcacttgacaatgtaacccagtagggaaattaaacttccttgtttagtcaccaaatacatgaggagagctggcctcttggttcagtctgtttcagcaggttactgacaaagaagttggagaattgaacggtagagataaaaatcagtacaaatatttaacataaaatctggtttatgttataggcaaatgaygtyttttccaattaagtcaagaaagcctttaattaggtaaacaattattcatcagaagtggggggaggagttgcggggaggattataatggattgtccttttcatgagagtaagctcttattcagaagagatactttatttcaggagttaggattgctcacagaagcaatggcttctgttcctctgtatctgtttcactggtcacttttcctggtctcaagcaaacattagatttggccttcagcttccaataatctagttttcattattgatgtcttacacagttctgcattctcacaa

SEQ ID NO: 14032 - DNA, 600 bp, Chicken  19866894218863_2
ctttttgtttttgtttttgcagtaaaaacaatatctaaaacatcccacctctagttttttcaaacattttttgtctgctcttcatttcatgcacattttatttcagcacttgacaatgtaacccagtagggaaattaaacttccttgtttagtcaccaaatacatgaggagagctggcctcttggttcagtctgtttcagcaggttactgacaaagaagttggagaattgaacggtagagataaaaatcagtacaaatatttaacataaaatctggtttatgttataggcaaatgaygtyttttccaattaagtcaagaaagcctttaattaggtaaacaattattcatcagaagtggggggaggagttgcggggaggattataatggattgtccttttcatgagagtaagctcttattcagaagagatactttatttcaggagttaggattgctcacagaagcaatggcttctgttcctctgtatctgtttcactggtcacttttcctggtctcaagcaaacattagatttggccttcagcttccaataatctagttttcattattgatgtcttacacagttctgcattctcacaagtt

SEQ ID NO: 14033 - DNA, 579 bp, Chicken  19866894218866_1
ccacacactttctttatgcctaactaaaatcctccctgtgagcaacaaagctctgctcaggcaaaatctccttctctaggaagagttaacttagccatataagtgaggagaaattatattataacataatgtgactaaagccctttttaagcaataattataatatggaataagttttgaaataatgtatcacttgtgcagaatgaaaaggacaaaaaactatttaatggctttatttagttagagaagcacttgaaaggcagccagagatggtacacagcacctctgcatgcttatccscgggagctgatgaagggggagtggtgaggacattgtttggctgttgtgctgtggcactacccacttgtggatcactcagacagagagaggcattttccyagtttttgcaggcaagtggcagctgctggggaaagaaaagtctttcatctaggccacagtaatactgttgcaccattcagatcagatacactcaaggtaatgcagcatatagagcacgctttgaactagctgtgcatatggttgcagaagttgatctcaagcaagtgtatcctcagggaa

SEQ ID NO: 14034 - DNA, 480 bp, Chicken  19866894218866_2
taagtgaggagaaattatattataacataatgtgactaaagccctttttaagcaataattataatatggaataagttttgaaataatgtatcacttgtgcagaatgaaaaggacaaaaaactatttaatggctttatttagttagagaagcacttgaaaggcagccagagatggtacacagcacctctgcatgcttatccscgggagctgatgaagggggagtggtgaggacattgtttggctgttgtgctgtggcactacccacttgtggatcactcagacagagagaggcattttccyagtttttgcaggcaagtggcagctgctggggaaagaaaagtctttcatctaggccacagtaatactgttgcaccattcagatcagatacactcaaggtaatgcagcatatagagcacgctttgaactagctgtgcatatggttgcagaagttgatctcaagcaagtgtatcctcagggaa

SEQ ID NO: 14035 - DNA, 599 bp, Chicken  19866894218871_1
  misc_feature (1)..(26): n is any nucleotide
nnnnnnnnnnnnnnnnnnnnnnnnnnttttccctcattaatcattccttttgtttgcagtcagatgtctggcacaacagcacggagctacaagccttgagaaaccacgctgctttcccacttggacgtggaagaagcgtttcaggcaaatcaatgcgaatcctacagctggatttgtgcttgtccatgcctcagggaggctggaggagacccaggccccccacatcttcctcgcagcccgaactcctgccctggaagcaacggagcactttatgcccaccctgctcactaagcccagggygccagggcagccctgagaaggtgtgagcaggcagtctgcaggtcctgctcctcctggcacaactcccttggggcactgcacacatctctgcagcctcagcacctggccttagcctctctatgttacctgcagcacagcacgctgtcaggaaataggaaattccagagtaaggaaaagagaaaaaactcttcaggctatgctacctctgtcacgcgttcctcgcataactttgaatgcagcttttgtatctcaaagcttcctctcctaagctgatagtcagcaataataccacttttttt

SEQ ID NO: 14036 - DNA, 599 bp, Chicken  19866894218872_1
  misc_feature (1)..(112): n is any nucleotide
nnnnnnnnnnnnnnnnnnnnnnnnnnnnnnnnnnnnnnnnnnnnnnnnnnnnnnnnnnnnnnnnnnnnnnnnnnnnnnnnnnnnnnnnnnnnnnnnnnnnnnnnnnnnnnnnatattttgcggtttagaagagagttctccttgttgtcacccaggagacagctctgcacccccaacaagtgtctctgacaaggtgctgagcaagcagcacccaagatggtagctatgaaacattcctttgcaaacaaaattaggggagaaaaaccaaaatatttcatttcccagcctgcaatgtgccarccttgctcttttttttatcattgagagttaataagagggaactcttttrcgtcattagccatgagaaaacagcwattcccctgragttgctgctacaaggagggcatctgtagttgttttactagcacatggatgtcaccctgccctcctgcactgccctatctttgtgcctctgtaattttgggagaacttatttatgatagaggggaacaatgtgtgtctagcaggggtatctggcgccagctaacaacaataaaaattcatagaggatgataaagtagtgactcaagcagcagttt

SEQ ID NO: 14037 - DNA, 599 bp, Chicken  19866894218872_2
  misc_feature (1)..(63): n is any nucleotide
nnnnnnnnnnnnnnnnnnnnnnnnnnnnnnnnnnnnnnnnnnnnnnnnnnnnnnnnnnnnnnnatattttgcggtttagaagagagttctccttgttgtcacccaggagacagctctgcacccccaacaagtgtctctgacaaggtgctgagcaagcagcacccaagatggtagctatgaaacattcctttgcaaacaaaattaggggagaaaaaccaaaatatttcatttcccagcctgcaatgtgccarccttgctcttttttttatcattgagagttaataagagggaactcttttrcgtcattagccatgagaaaacagcwattcccctgragttgctgctacaaggagggcatctgtagttgttttactagcacatggatgtcaccctgccctcctgcactgccctatctttgtgcctctgtaattttgggagaacttatttatgatagaggggaacaatgtgtgtctagcaggggtatctggcgccagctaacaacaataaaaattcatagaggatgataaagtagtgactcaagcagcagtttttagaggtctccctacattaactgattacagaagtccacactgcctctc

SEQ ID NO: 14038 - DNA, 599 bp, Chicken  19866894218872_3
  misc_feature (1)..(38): n is any nucleotide
nnnnnnnnnnnnnnnnnnnnnnnnnnnnnnnnnnnnnnatattttgcggtttagaagagagttctccttgttgtcacccaggagacagctctgcacccccaacaagtgtctctgacaaggtgctgagcaagcagcacccaagatggtagctatgaaacattcctttgcaaacaaaattaggggagaaaaaccaaaatatttcatttcccagcctgcaatgtgccarccttgctcttttttttatcattgagagttaataagagggaactcttttrcgtcattagccatgagaaaacagcwattcccctgragttgctgctacaaggagggcatctgtagttgttttactagcacatggatgtcaccctgccctcctgcactgccctatctttgtgcctctgtaattttgggagaacttatttatgatagaggggaacaatgtgtgtctagcaggggtatctggcgccagctaacaacaataaaaattcatagaggatgataaagtagtgactcaagcagcagtttttagaggtctccctacattaactgattacagaagtccacactgcctctcyttccccatgtaatcgctgccaggg

SEQ ID NO: 14039 - DNA, 599 bp, Chicken  19866894218872_4
  misc_feature (1)..(28): n is any nucleotide
nnnnnnnnnnnnnnnnnnnnnnnnnnnnatattttgcggtttagaagagagttctccttgttgtcacccaggagacagctctgcacccccaacaagtgtctctgacaaggtgctgagcaagcagcacccaagatggtagctatgaaacattcctttgcaaacaaaattaggggagaaaaaccaaaatatttcatttcccagcctgcaatgtgccarccttgctcttttttttatcattgagagttaataagagggaactcttttrcgtcattagccatgagaaaacagcwattcccctgragttgctgctacaaggagggcatctgtagttgttttactagcacatggatgtcaccctgccctcctgcactgccctatctttgtgcctctgtaattttgggagaacttatttatgatagaggggaacaatgtgtgtctagcaggggtatctggcgccagctaacaacaataaaaattcatagaggatgataaagtagtgactcaagcagcagtttttagaggtctccctacattaactgattacagaagtccacactgcctctcyttccccatgtaatcgctgccagggttcctttcag

SEQ ID NO: 14040 - DNA, 600 bp, Chicken  19866894218872_5
cgtcattagccatgagaaaacagcwattcccctgragttgctgctacaaggagggcatctgtagttgttttactagcacatggatgtcaccctgccctcctgcactgccctatctttgtgcctctgtaattttgggagaacttatttatgatagaggggaacaatgtgtgtctagcaggggtatctggcgccagctaacaacaataaaaattcatagaggatgataaagtagtgactcaagcagcagtttttagaggtctccctacattaactgattacagaagtccacactgcctctcyttccccatgtaatcgctgccagggttcctttcagtccaccaagtctcaagcatttagaaaatgctttttattatggtaaaaagaccaaagcccctgcactgggtacatcctttggtaagcatgcacaagtactatggaagtaaygattttgaaccacaatgttctgtggaaaggactccctttctggctcagatctccatgaaattacaggaaatcaggcacttcatgttctctggttcctggaaacactcgaggctgctccctcacttccctgtatttactgttttacaggatgtctgc

SEQ ID NO: 14041 - DNA, 600 bp, Chicken  19866894218872_6
tttatgatagaggggaacaatgtgtgtctagcaggggtatctggcgccagctaacaacaataaaaattcatagaggatgataaagtagtgactcaagcagcagtttttagaggtctccctacattaactgattacagaagtccacactgcctctcyttccccatgtaatcgctgccagggttcctttcagtccaccaagtctcaagcatttagaaaatgctttttattatggtaaaaagaccaaagcccctgcactgggtacatcctttggtaagcatgcacaagtactatggaagtaaygattttgaaccacaatgttctgtggaaaggactccctttctggctcagatctccatgaaattacaggaaatcaggcacttcatgttctctggttcctggaaacactcgaggctgctccctcacttccctgtatttactgttttacaggatgtctgcatgcctgacagcaagctgcttagcagcacagaggtttaatgtcctcaatggtaaagagtccagcagacgaactgtctttaagtgatgcttagccacagcagaggagaaaatcctttctgtccagactgctccaactcacagcct

SEQ ID NO: 14042 - DNA, 599 bp, Chicken  19866894218877_1
  misc_feature (1)..(147): n is any nucleotide
nnnnnnnnnnnnnnnnnnnnnnnnnnnnnnnnnnnnnnnnnnnnnnnnnnnnnnnnnnnnnnnnnnnnnnnnnnnnnnnnnnnnnnnnnnnnnnnnnnnnnnnnnnnnnnnnnnnnnnnnnnnnnnnnnnnnnnnnnnnnnnnnnnngctcttggctgagttttctctggagaaagaattttgataataagtgggattagctctttgccaattagcagacaattagaggaaagacatttacccagtgggcagaagtcttttatgatagactcatcctcatcaaacctgtttatggcagargaagataaacagtgcttgctcacagcttcttagctctagggatgtgagcatcactggctgcagccaccgtaccaacttcacagcatctgcatgaaacacaatgagacagtgcttaacatgtgagcacagaatggaggaccccagggtatgctcatggatcccagggtgtatatagatagtttccaaagggtccacgaaagaaatcaggatcactgtatggagtgtaggtggagaaaaytgagaaatctcccacacttgggagttttttggggagcagcaaatcagaaggagcaaggagg

SEQ ID NO: 14043 - DNA, 600 bp, Chicken  19866894218877_2
tacccagtgggcagaagtcttttatgatagactcatcctcatcaaacctgtttatggcagargaagataaacagtgcttgctcacagcttcttagctctagggatgtgagcatcactggctgcagccaccgtaccaacttcacagcatctgcatgaaacacaatgagacagtgcttaacatgtgagcacagaatggaggaccccagggtatgctcatggatcccagggtgtatatagatagtttccaaagggtccacgaaagaaatcaggatcactgtatggagtgtaggtggagaaaaytgagaaatctcccacacttgggagttttttggggagcagcaaatcagaaggagcaaggaggcattggctttatctgtaaagatgatcatcattcgtagatcaatgatggtgttagaagtgttagaaggaacactttttgagagtgtgccttgggcaggtgaatggccataagctttggtgtggcagatgctgtaaagaagcatctttacaccccagaagagctgagttggtattgcggcttaatccagcaggcagctgagtaccacagagctgtttgttcagaactgagaagaaaacatc

SEQ ID NO: 14044 - DNA, 600 bp, Chicken  19866894218888_1
tcggtacctgtctgagattgagatgctgttaagtattttcgttgatataaccttgctatagatggtgttcttgagctgtaagacaagaagagggctgaattgtcacgtgacccaaaacctggggctataggacaagcatcagagaaaaccagaaaagcaaatcccattgttttgccaaaccaagagccaaacaaagaacagaaacatgcagaataatgacttctctagtaatttcaaaaatccaaggagttgacatgaagaagagctacatttcagacctttatcatcataggctttggrttcyttttgttctcygtctcctaacaaaataatgcaccaaaagatgattagactaattaatccaggatctaataaaacctaattggtcatctgctttttgcaagaagccctctgattcatgaaggtgcttgtttgcctgagaaatgcagttgctgctttttcctgttaggattggctgcaagtaaataatggcattaacgtcctcagattgatttcctgccttactcattcagttgaggaaggaatcaggctcctctctccatggtaacttcaaggtcagaatatcttcccggtgtttgc

SEQ ID NO: 14045 - DNA, 600 bp, Chicken  19866894218888_2
tacctgtctgagattgagatgctgttaagtattttcgttgatataaccttgctatagatggtgttcttgagctgtaagacaagaagagggctgaattgtcacgtgacccaaaacctggggctataggacaagcatcagagaaaaccagaaaagcaaatcccattgttttgccaaaccaagagccaaacaaagaacagaaacatgcagaataatgacttctctagtaatttcaaaaatccaaggagttgacatgaagaagagctacatttcagacctttatcatcataggctttggrttcyttttgttctcygtctcctaacaaaataatgcaccaaaagatgattagactaattaatccaggatctaataaaacctaattggtcatctgctttttgcaagaagccctctgattcatgaaggtgcttgtttgcctgagaaatgcagttgctgctttttcctgttaggattggctgcaagtaaataatggcattaacgtcctcagattgatttcctgccttactcattcagttgaggaaggaatcaggctcctctctccatggtaacttcaaggtcagaatatcttcccggtgtttgctgag

SEQ ID NO: 14046 - DNA, 600 bp, Chicken  19866894218888_3
gattgagatgctgttaagtattttcgttgatataaccttgctatagatggtgttcttgagctgtaagacaagaagagggctgaattgtcacgtgacccaaaacctggggctataggacaagcatcagagaaaaccagaaaagcaaatcccattgttttgccaaaccaagagccaaacaaagaacagaaacatgcagaataatgacttctctagtaatttcaaaaatccaaggagttgacatgaagaagagctacatttcagacctttatcatcataggctttggrttcyttttgttctcygtctcctaacaaaataatgcaccaaaagatgattagactaattaatccaggatctaataaaacctaattggtcatctgctttttgcaagaagccctctgattcatgaaggtgcttgtttgcctgagaaatgcagttgctgctttttcctgttaggattggctgcaagtaaataatggcattaacgtcctcagattgatttcctgccttactcattcagttgaggaaggaatcaggctcctctctccatggtaacttcaaggtcagaatatcttcccggtgtttgctgagatccggagtct

SEQ ID NO: 14047 - DNA, 600 bp, Chicken  19866894218890_1
atccagtccaaccgtccacctagcgccagtattgcccacacccctcagtgccacatgtccactcttcctgaacacccgcagggacagtgaccacttccccatgcagcctctgccaatgcatcaccactctctctgggaagaaattgtcactcatatccaacctgaacctcccctggtgcaacttgaggccgtacaacttgctgggagcaaaggggaggagcagatgacctggcttggtgttaagatgcttttgctgaaggagacttatctccttccagataactggcggaggatgctgcragagctctatcacatccacggagttactgcctgccttatatcactgcgagttctcaacacatctgggctgagagtgcttccagtaacatgaaagcacgctgtttgggttggcacactgacacggtggtatatgccaattagtaatggctcttggaaaggggctgctcgcaaactcgccccaaactattccccagagaaattattcaattaagtacaactaaaattaatgtccgtgggttttgttctaataaaacaaaataagcagctggaaaaggggaaacttctcagtgtgtgctttta

SEQ ID NO: 14048 - DNA, 600 bp, Chicken  19866894218891_1
gttccaattccctgctgtgggctggcagctccccaccagctcaggctgcccagggccccatccaacccagccttgagcacctccagggatggggcaccacagctctatgggcggctgcgccagggcctctctgccctctgagggaaggatttcttcctaacatctaagctaaatctcccctcttttagttaaaagccattagcccttgtcctgtcacaactctccgtgacatacagcatcaaaaactttaagggctgcatttgtaattggaggtgaaaaattttcataatccattcttcyatagcagtagttttaaaacctggacactgactatgcataagctaggatcaagaaatgagcagcctgtaagtacaaacaaggtattttcttcctggtctgcgtaagtctgcactgccctagctgagctttcctaaatctgagagagagytcatagcagtggaaatgaaaggcagctggcaaactcttctggacacgggaccatgaccactcttcagctttgagttacaatccaaaacggtgacaccaactaaaatgatgctggctgttaaatttagagactgacttttcatccccactatg

SEQ ID NO: 14049 - DNA, 600 bp, Chicken  19866894218891_2
atttcttcctaacatctaagctaaatctcccctcttttagttaaaagccattagcccttgtcctgtcacaactctccgtgacatacagcatcaaaaactttaagggctgcatttgtaattggaggtgaaaaattttcataatccattcttcyatagcagtagttttaaaacctggacactgactatgcataagctaggatcaagaaatgagcagcctgtaagtacaaacaaggtattttcttcctggtctgcgtaagtctgcactgccctagctgagctttcctaaatctgagagagagytcatagcagtggaaatgaaaggcagctggcaaactcttctggacacgggaccatgaccactcttcagctttgagttacaatccaaaacggtgacaccaactaaaatgatgctggctgttaaatttagagactgacttttcatccccactatgtgcattttcacactgtagcaagactgactcaatgaggctttcttcattttcttcttgagtaatgcaccatggcatttatgacttagtcttttcatttccttgtgtttgtagaggtggtagcaattactactgcccagatacatggaaa

SEQ ID NO: 14050 - DNA, 600 bp, Chicken  19866894218891_3
cacattcctacagtgcagaggtcattactcctccttgtgctgttctgcttattcaactgtaaccaggaaatgcctttcaagtcctcattcccatcaaccactcaccttatgggctgtagggctcattttgaagctctccaatttatctgaagcttgcagcttaaggtctgttcctttagttggaccttcaccaagcagtggctgccttgggaaaactggggaagtattttagagccctgtccagccagctcagctggcttgaatttgcagttttggttaccaaaaactctgataagtccktacgaggtttttagaatctcttttgtgtcggcacgtctgagagctaggattatccaaccatcagagttgcccttggtgtgctttacctcacagcatggatgctggatgactcacttatcagcacactcctatttctaacaataacagagattctaatccacggtgaaaaaacactcaaggaatcccagctgtcacagygycccagatggacatttgctcttgtaaaaaagatgtaactgtaaggatgagcctgcctcccagaataagatccttccacaaccaggtgtcctggtaccagag

SEQ ID NO: 14051 - DNA, 600 bp, Chicken  19866894218891_4
tggctgccttgggaaaactggggaagtattttagagccctgtccagccagctcagctggcttgaatttgcagttttggttaccaaaaactctgataagtccktacgaggtttttagaatctcttttgtgtcggcacgtctgagagctaggattatccaaccatcagagttgcccttggtgtgctttacctcacagcatggatgctggatgactcacttatcagcacactcctatttctaacaataacagagattctaatccacggtgaaaaaacactcaaggaatcccagctgtcacagygycccagatggacatttgctcttgtaaaaaagatgtaactgtaaggatgagcctgcctcccagaataagatccttccacaaccaggtgtcctggtaccagagtgctgtgactgaagcttcccacaccacatcagcaatttgtaagcctcaggaaaggcaagatcatctagcaaaggtaacttctgaacccaatttacaacaggaattggatagcaactattacttaatggaaarccatcacccctatttcacctctttcacacaaaagtcaaatgtccaagacaatcagcaaggcacaat

SEQ ID NO: 14052 - DNA, 600 bp, Chicken  19866894218891_5
gctgccttgggaaaactggggaagtattttagagccctgtccagccagctcagctggcttgaatttgcagttttggttaccaaaaactctgataagtccktacgaggtttttagaatctcttttgtgtcggcacgtctgagagctaggattatccaaccatcagagttgcccttggtgtgctttacctcacagcatggatgctggatgactcacttatcagcacactcctatttctaacaataacagagattctaatccacggtgaaaaaacactcaaggaatcccagctgtcacagygycccagatggacatttgctcttgtaaaaaagatgtaactgtaaggatgagcctgcctcccagaataagatccttccacaaccaggtgtcctggtaccagagtgctgtgactgaagcttcccacaccacatcagcaatttgtaagcctcaggaaaggcaagatcatctagcaaaggtaacttctgaacccaatttacaacaggaattggatagcaactattacttaatggaaarccatcacccctatttcacctctttcacacaaaagtcaaatgtccaagacaatcagcaaggcacaattc

SEQ ID NO: 14053 - DNA, 600 bp, Chicken  19866894218891_6
ttctaacaataacagagattctaatccacggtgaaaaaacactcaaggaatcccagctgtcacagygycccagatggacatttgctcttgtaaaaaagatgtaactgtaaggatgagcctgcctcccagaataagatccttccacaaccaggtgtcctggtaccagagtgctgtgactgaagcttcccacaccacatcagcaatttgtaagcctcaggaaaggcaagatcatctagcaaaggtaacttctgaacccaatttacaacaggaattggatagcaactattacttaatggaaarccatcacccctatttcacctctttcacacaaaagtcaaatgtccaagacaatcagcaaggcacaattcaaaacagaaacaggttggtgctgaactcctaaggacaattaaggacgatgctattatatcgtcaaatccacggtatactagaagagcagaaacggagatccaaggaacattttaagtttactgttgacaaaaattgaaatactgaggtgttatgggtggtggcacagcttctgatctgactggtgctaaaactaagacatgctacatatgtttgtaatgtactgcattgagt

SEQ ID NO: 14054 - DNA, 600 bp, Chicken  19866894218893_1
catccccaggaacattgactccaccacctccctgagcagactctgccaatgcatcaccactcatagggagaataattttttcaaaacatccaacctgaacccccctggcacaacttaaagacattacctcttgcccttattacatattgtgagcattaagataattagcattaaaaaaacccaagttgtatacataactataggtagctaatacagaaaaaatgcagaaaatatgacacaatatttatttcaaaggtactagaaaaaaaagtcacatataaaattacagtataaatggtwaaaaaaaaaaaaaagattttgaaagcctatgattcagacaggtgagatcatagacagaatacattgctttaaaaaaggatcactatatagatagctaagagacattggatcttcactgcaaaagacttagcagttaatataactgtaaaacatgaagaatgtatttcctgtaagagtaacattcagtcacacctggtgaaatctttaatttagattaggtgaaaagcagccattcaattgaattagagagctcattaaagacctgatcttttctcctattgtttgaattactgatgatct

SEQ ID NO: 14055 - DNA, 600 bp, Chicken  19866894218893_2
atccccaggaacattgactccaccacctccctgagcagactctgccaatgcatcaccactcatagggagaataattttttcaaaacatccaacctgaacccccctggcacaacttaaagacattacctcttgcccttattacatattgtgagcattaagataattagcattaaaaaaacccaagttgtatacataactataggtagctaatacagaaaaaatgcagaaaatatgacacaatatttatttcaaaggtactagaaaaaaaagtcacatataaaattacagtataaatggtwwaaaaaaaaaaaaagattttgaaagcctatgattcagacaggtgagatcatagacagaatacattgctttaaaaaaggatcactatatagatagctaagagacattggatcttcactgcaaaagacttagcagttaatataactgtaaaacatgaagaatgtatttcctgtaagagtaacattcagtcacacctggtgaaatctttaatttagattaggtgaaaagcagccattcaattgaattagagagctcattaaagacctgatcttttctcctattgtttgaattactgatgatcta

SEQ ID NO: 14056 - DNA, 600 bp, Chicken  19866894218893_3
ttgctttaaaaaaggatcactatatagatagctaagagacattggatcttcactgcaaaagacttagcagttaatataactgtaaaacatgaagaatgtatttcctgtaagagtaacattcagtcacacctggtgaaatctttaatttagattaggtgaaaagcagccattcaattgaattagagagctcattaaagacctgatcttttctcctattgtttgaattactgatgatctaatgatcagcatttaaactcaagttcttcagaaacaatcagaaatgcctctacagatttccartaacttcaaaattttcatttgatgttgtgaggtgaactttgcattcctaactcctagactaaccaagctgatgtaggaagttcagtggtaggcagataggtatgaactggatgaacgctgtgtgaawttgcttcatgaaaaaggtacgcaataaaatttggcatatgttgttgaagtgattatgaggtctgtgtgaaagcagtagtaggtaaattttggctggcacagcatacagatacactagagaaaaaacacagccaacaatgtgatcacaggacaggaaccagctgcctggatttt

SEQ ID NO: 14057 - DNA, 594 bp, Chicken  19866894218893_4
acctggtgaaatctttaatttagattaggtgaaaagcagccattcaattgaattagagagctcattaaagacctgatcttttctcctattgtttgaattactgatgatctaatgatcagcatttaaactcaagttcttcagaaacaatcagaaatgcctctacagatttccartaacttcaaaattttcatttgatgttgtgaggtgaactttgcattcctaactcctagactaaccaagctgatgtaggaagttcagtggtaggcagataggtatgaactggatgaacgctgtgtgaawttgcttcatgaaaaaggtacgcaataaaatttggcatatgttgttgaagtgattatgaggtctgtgtgaaagcagtagtaggtaaattttggctggcacagcatacagatacactagagaaaaaacacagccaacaatgtgatcacaggacaggaaccagctgcctggattttgcctcccgaaaaacaaacaagaaaaagcatggggagagctcctctgtgacttaagtatcagggataatacaaagcagggtttaatggccagtcaaacatgatctgtccacatgaaagtctt

SEQ ID NO: 14058 - DNA, 600 bp, Chicken  19866894218894_1
ctcaaaaacctgtgagctatttttgctgtcagaagggagctgtgacagtgtataaatgcttcactggctcagtcttctggtgcaggtctccacagtgctggctgatgggaccgagcgcatgaaccctacctgcactagtgagtgtggatggacccactctgttccactgaccatgtgcacaggccacttttgccttactgtgtgcctgtactgtttctgctttagtgacaagtcaggcagctcagcttaagtttatcatcatgggcacttgaatctagtgcgtccatcagctggggggaraggagtgttacagctgctctttgctctctggggaaggctgagctgcctcacctccaaaaaagagatgactacaagcagcccccaaggcagtaatttttcctttactctttctccctcgtttaaatttgctatttcacttgcagggattgctgcttctttttattttattmttttctttgtgtttttcttttttttttaattttgccaatgtttgacataccagtgatcctttccttctacttcctttgctttcttcctctttctccagtatatttccatttcttcatgtaactgattcct

SEQ ID NO: 14059 - DNA, 600 bp, Chicken  19866894218894_2
ccatgtgcacaggccacttttgccttactgtgtgcctgtactgtttctgctttagtgacaagtcaggcagctcagcttaagtttatcatcatgggcacttgaatctagtgcgtccatcagctggggggaraggagtgttacagctgctctttgctctctggggaaggctgagctgcctcacctccaaaaaagagatgactacaagcagcccccaaggcagtaatttttcctttactctttctccctcgtttaaatttgctatttcacttgcagggattgctgcttctttttattttattmttttctttgtgtttttcttttttttttaattttgccaatgtttgacataccagtgatcctttccttctacttcctttgctttcttcctctttctccagtatatttccatttcttcatgtaactgattcctatttcatcattcctcttattcatctaagtataaaattactgtaggttttccttatatgaagagcatgaaagctacactctctggctttcttttggctttctttagaagttataagttttcaggaattagctaccctgtctgtaaatccctgggcatctttgtaaatggat

SEQ ID NO: 14060 - DNA, 600 bp, Chicken  19866894218894_3
ttgccaatgtttgacataccagtgatcctttccttctacttcctttgctttcttcctctttctccagtatatttccatttcttcatgtaactgattcctatttcatcattcctcttattcatctaagtataaaattactgtaggttttccttatatgaagagcatgaaagctacactctctggctttcttttggctttctttagaagttataagttttcaggaattagctaccctgtctgtaaatccctgggcatctttgtaaatggattgctgattggagccttctgtggagccctggrtatgtgcttggtcacacagtagtatgtaagtgatgcacacatttggggggcaagaggcagtcatggctggaggtgagattgaggaaattgagggaagtgggctctgcagtaagagctttggctgcccactggaagaagcagtagagcctaagggctttcttgcaaggcagaaagsaagataagcatagacagggtgaatcaagtaaagatatatttcagttatacatccaaatacatacagatgcttaacctaaactaagaagaggttagttctgcagccactccaatcaccaagtccac

SEQ ID NO: 14061 - DNA, 600 bp, Chicken  19866894218894_4
cttcatgtaactgattcctatttcatcattcctcttattcatctaagtataaaattactgtaggttttccttatatgaagagcatgaaagctacactctctggctttcttttggctttctttagaagttataagttttcaggaattagctaccctgtctgtaaatccctgggcatctttgtaaatggattgctgattggagccttctgtggagccctggrtatgtgcttggtcacacagtagtatgtaagtgatgcacacatttggggggcaagaggcagtcatggctggaggtgagatrgaggaaattgagggaagtgggctctgcagtaagagctttggctgcccactggaagaagcagtagagcctaagggctttcttgcaaggcagaaagsaagataagcatagacagggtgaatcaagtaaagatatatttcagttatacatccaaatacatacagatgcttaacctaaactaagaagaggttagttctgcagccactccaatcaccaagtccacattttcaaggccatattttaaataaatagttaatatgttttttgtagggggatagtcgttgagaagttttaacttaaggc

SEQ ID NO: 14062 - DNA, 600 bp, Chicken  19866894218894_5
ttcatgtaactgattcctatttcatcattcctcttattcatctaagtataaaattactgtaggttttccttatatgaagagcatgaaagctacactctctggctttcttttggctttctttagaagttataagttttcaggaattagctaccctgtctgtaaatccctgggcatctttgtaaatggattgctgattggagccttctgtggagccctggrtatgtgcttggtcacacagtagtatgtaagtgatgcacacatttggggggcaagaggcagtcatggctggaggtgagattraggaaattgagggaagtgggctctgcagtaagagctttggctgcccactggaagaagcagtagagcctaagggctttcttgcaaggcagaaagsaagataagcatagacagggtgaatcaagtaaagatatatttcagttatacatccaaatacatacagatgcttaacctaaactaagaagaggttagttctgcagccactccaatcaccaagtccacattttcaaggccatattttaaataaatagttaatatgttttttgtagggggatagtcgttgagaagttttaacttaaggca

SEQ ID NO: 14063 - DNA, 600 bp, Chicken  19866894218894_6
tcatgtaactgattcctatttcatcattcctcttattcatctaagtataaaattactgtaggttttccttatatgaagagcatgaaagctacactctctggctttcttttggctttctttagaagttataagttttcaggaattagctaccctgtctgtaaatccctgggcatctttgtaaatggattgctgattggagccttctgtggagccctggrtatgtgcttggtcacacagtagtatgtaagtgatgcacacatttggggggcaagaggcagtcatggctggaggtgagattgrggaaattgagggaagtgggctctgcagtaagagctttggctgcccactggaagaagcagtagagcctaagggctttcttgcaaggcagaaagsaagataagcatagacagggtgaatcaagtaaagatatatttcagttatacatccaaatacatacagatgcttaacctaaactaagaagaggttagttctgcagccactccaatcaccaagtccacattttcaaggccatattttaaataaatagttaatatgttttttgtagggggatagtcgttgagaagttttaacttaaggcaa

SEQ ID NO: 14064 - DNA, 600 bp, Chicken  19866894218894_7
ctctctggctttcttttggctttctttagaagttataagttttcaggaattagctaccctgtctgtaaatccctgggcatctttgtaaatggattgctgattggagccttctgtggagccctggrtatgtgcttggtcacacagtagtatgtaagtgatgcacacatttggggggcaagaggcagtcatggctggaggtgagattgaggaaattgagggaagtgggctctgcagtaagagctttggctgcccactggaagaagcagtagagcctaagggctttcttgcaaggcagaaagsaagataagcatagacagggtgaatcaagtaaagatatatttcagttatacatccaaatacatacagatgcttaacctaaactaagaagaggttagttctgcagccactccaatcaccaagtccacattttcaaggccatattttaaataaatagttaatatgttttttgtagggggatagtcgttgagaagttttaacttaaggcaaattccttcataaggagttttttgggatggggagaactgagaatttattagcaactctatgatttttcatctacaaaatgcttttcattacttt

SEQ ID NO: 14065 - DNA, 600 bp, Chicken  19866894218895_1
tttcccggtccactttcttccttaatgctgaaatgtaggacccaaaggattacacaccttggctgcaagcagtttttattacaaacaaaaacaaatgcagcacatctgtcattaagatttgaatgtctaaaacaggctgaaggtaggaaaaccataatcagtccttcaggaccacagaacaattttgtagctgtcaaaaccagaattaagtcttccgataaaccaacagaaattgacacagtgaaagcagattgctgccaatgtagaaaatacatcgttcagtctgctggcagctgagtrtatctataaagcatactcagaactaccaatgggacatttgaaagactgtcaaaatatcagccatcctaatgtctggttttgctctggggacccaaagaaaaccccaagcccacctcttgcccttcatgtttccttgtgccacactgcctgcactgaatgtgacagraatataaaagcagcccttctccttgtactctgcattggtccaaaaactgggctggtttatgaaaaggtgcactaaacaggaccaacattttgctatagagaagtactgatgctactgatccctttttccaaact

SEQ ID NO: 14066 - DNA, 600 bp, Chicken  19866894218895_2
caggaccacagaacaattttgtagctgtcaaaaccagaattaagtcttccgataaaccaacagaaattgacacagtgaaagcagattgctgccaatgtagaaaatacatcgttcagtctgctggcagctgagtrtatctataaagcatactcagaactaccaatgggacatttgaaagactgtcaaaatatcagccatcctaatgtctggttttgctctggggacccaaagaaaaccccaagcccacctcttgcccttcatgtttccttgtgccacactgcctgcactgaatgtgacagraatataaaagcagcccttctccttgtactctgcattggtccaaaaactgggctggtttatgaaaaggtgcactaaacaggaccaacattttgctatagagaagtactgatgctactgatccctttttccaaacttgtaagtaattgaatgactctgagatgtgctcagagataagctgaaacagaatcaaagttcctgaccggtgtcgagatcctttggatgtgaatgagatgtgatttgttgtttgagggctaggcctaccagcaaccgggttgaattcacaatctcaacccaaagtga

SEQ ID NO: 14067 - DNA, 599 bp, Chicken  19866894218901_1
  misc_feature (1)..(72): n is any nucleotide
nnnnnnnnnnnnnnnnnnnnnnnnnnnnnnnnnnnnnnnnnnnnnnnnnnnnnnnnnnnnnnnnnnnnnnnnattgttttcagcagcaaggatgttggcttataagcaaagagtagagacaacgtattggccttcttttcacctgtatggatctattcctctttaaatctggtctgaaagcattgtgagatggagaaggactgacaaagtgcagaggttaggccttagcactgtgagatgacagcagtccctctagagtgatttgacaatgcttactgctttagcatagataactgaacrgaatgaggggctttctttccttcgaggagctgctatgtagaaagcacaacgaataacgttacacagagcagtgagtataaaataatcaacttcacgacctaacctaaccactaacygaatagcttgttttagttacctggaatgttttcagagcatgataaggaacaatatcyaaatttcacatatctagtcttwtagaccaaaatcttcactgtgtcttgagtctgaagaggtaaacaatcctttcagctatgatgcaggagaagacctcaaatgaactggttcatttttattttgtc

SEQ ID NO: 14068 - DNA, 600 bp, Chicken  19866894218901_2
agacaacgtattggccttcttttcacctgtatggatctattcctctttaaatctggtctgaaagcattgtgagatggagaaggactgacaaagtgcagaggttaggccttagcactgtgagatgacagcagtccctctagagtgatttgacaatgcttactgctttagcatagataactgaacrgaatgaggggctttctttccttcgaggagctgctatgtagaaagcacaacgaataacgttacacagagcagtgagtataaaataatcaacttcacgacctaacctaaccactaacygaatagcttgttttagttacctggaatgttttcagagcatgataaggaacaatatcyaaatttcacatatctagtcttwtagaccaaaatcttcactgtgtcttgagtctgaagaggtaaacaatcctttcagctatgatgcaggagaagacctcaaatgaactggttcatttttattttgtctgatgcagtttatgcttttttattttcttttttcttcttcttttttttccttctgttttagaagcatacatttgcacattcatagtctttgaatgttattttaacaatttggaccac

SEQ ID NO: 14069 - DNA, 600 bp, Chicken  19866894218901_3
ctgaaagcattgtgagatggagaaggactgacaaagtgcagaggttaggccttagcactgtgagatgacagcagtccctctagagtgatttgacaatgcttactgctttagcatagataactgaacrgaatgaggggctttctttccttcgaggagctgctatgtagaaagcacaacgaataacgttacacagagcagtgagtataaaataatcaacttcacgacctaacctaaccactaacygaatagcttgttttagttacctggaatgttttcagagcatgataaggaacaatatcyaaatttcacatatctagtcttwtagaccaaaatcttcactgtgtcttgagtctgaagaggtaaacaatcctttcagctatgatgcaggagaagacctcaaatgaactggttcatttttattttgtctgatgcagtttatgcttttttattttcttttttcttcttcttttttttccttctgttttagaagcatacatttgcacattcatagtctttgaatgttattttaacaatttggaccacttgatattttcaggcccctgccttgatcattcctgatggatccctcaaggggacaga

SEQ ID NO: 14070 - DNA, 600 bp, Chicken  19866894218901_4
aaggactgacaaagtgcagaggttaggccttagcactgtgagatgacagcagtccctctagagtgatttgacaatgcttactgctttagcatagataactgaacrgaatgaggggctttctttccttcgaggagctgctatgtagaaagcacaacgaataacgttacacagagcagtgagtataaaataatcaacttcacgacctaacctaaccactaacygaatagcttgttttagttacctggaatgttttcagagcatgataaggaacaatatcyaaatttcacatatctagtcttwtagaccaaaatcttcactgtgtcttgagtctgaagaggtaaacaatcctttcagctatgatgcaggagaagacctcaaatgaactggttcatttttattttgtctgatgcagtttatgcttttttattttcttttttcttcttcttttttttccttctgttttagaagcatacatttgcacattcatagtctttgaatgttattttaacaatttggaccacttgatattttcaggcccctgccttgatcattcctgatggatccctcaaggggacagattacagttcagtgctgtatcat

SEQ ID NO: 14071 - DNA, 600 bp, Chicken  19866894218905_1
agagcaagaacagcagtagtgcaaacttcttcccattgactcactgctcctttgcatcaccttcagaacacctgtggaggttttcctgcaatgaacacagcttccccacacttccacagccctggcaggggtgctgggtcacaggaggtgtgcacaggagaaccagaggagcaagaaaagccctgttaagcacacgtgctcctccatacaggcagtccaaggctctgtaaaatttcctgagagttttgggggtcacaatgtattactgtttgcttactcactcctactcaaagcacacakagaacagcctctcctccctctaaaccccttgttcccacatgacaatgtgggctgcatatgtacaatatagagaaactgaaataccctctgaaggaccattcaagaaagagtggtccaattcatgcagcttcaccactactaaagccactgtgctttgaaaacatacttaggtgctggcagccacctctgggctttgtagtgtgtcatgagattaaagacttgaaggccaaattaagtcttccaaagtcaatgccattccagatgaagtttgttgagccggggagcagaaggaaatagcaa

SEQ ID NO: 14072 - DNA, 599 bp, Chicken  19866894218910_1
  misc_feature (1)..(184): n is any nucleotide
nnnnnnnnnnnnnnnnnnnnnnnnnnnnnnnnnnnnnnnnnnnnnnnnnnnnnnnnnnnnnnnnnnnnnnnnnnnnnnnnnnnnnnnnnnnnnnnnnnnnnnnnnnnnnnnnnnnnnnnnnnnnnnnnnnnnnnnnnnnnnnnnnnnnnnnnnnnnnnnnnnnnnnnnnnnnnnnnnnnnnnnntttgcttattgaagagtactgtataggaagacaggagttcttaagcagctggaaagcttccattccccagcacctttgcacaaatgtgtcattgttgaggggatgcttattttaargaaaaatcaggctacatgaagaatgagtatataaatattgtttcctcagcaacaagcaagggcttctgcttaaagctgctgtcattttatatacaaaagaaaaaaaaaaaagatataagagtaatcctgcgtggtatagagagagtcattacaaagtacctgagcaggccttgtaaccagtaagcactgagtggcagatactaagagctgaaagaagtgtctgcatttttgcctgagacttcttagaattctaaatggtcttctctttacatttcttgcttacccttatatgatactct

SEQ ID NO: 14073 - DNA, 590 bp, Chicken  19866894218913_1
  misc_feature (1)..(127): n is any nucleotide
nnnnnnnnnnnnnnnnnnnnnnnnnnnnnnnnnnnnnnnnnnnnnnnnnnnnnnnnnnnnnnnnnnnnnnnnnnnnnnnnnnnnnnnnnnnnnnnnnnnnnnnnnnnnnnnnnnnnnnnnnnnnnnngtggggcaaggtgtggcgaggcggggcaaggcgaggcggactggagcgtggcggggcgaggcggggcgaggcgtggcaggcgaggcgaggcggggcgtggcgtggcaagggaaagcgaggcggggccaggcggggcctggcagggccaggctaggtgaaacgagtcgaggcarggcggggccaggtggcgcgaggctaggcgtggtggggcaaggcaaggcaaggcgggtgaggcagagagaggcggggcgaggcgtggcaaagcagggyggggaggggcgtggcagcacgaggcggggcgaggcaaggcgaggcgaggcaatacaaggcgaggctagtaaaaggcgaggcaatgcggggcgaggcggggcgaggctagatggkgtagggcgaggcggggtgttgtggggtgaagcagagagaggcagggcgaggctgcaaggcggggcggggagaggcgtgg

SEQ ID NO: 14074 - DNA, 493 bp, Chicken  19866894218913_2
  misc_feature (1)..(30): n is any nucleotide
nnnnnnnnnnnnnnnnnnnnnnnnnnnnnngtggggcaaggtgtggcgaggcggggcaaggcgaggcggactggagcgtggcggggcgaggcggggcgaggcgtggcaggcgaggcgaggcggggcgtggcgtggcaagggaaagcgaggcggggccaggcggggcctggcagggccaggctaggtgaaacgagtcgaggcarggcggggccaggtggcgcgaggctaggcgtggtggggcaaggcaaggcaaggcgggtgaggcagagagaggcggggcgaggcgtggcaaagcagggyggggaggggcgtggcagcacgaggcggggcgaggcaaggcgaggcgaggcaatacaaggcgaggctagtaaaaggcgaggcaatgcggggcgaggcggggcgaggctagatggkgtagggcgaggcggggtgttgtggggtgaagcagagagaggcagggcgaggctgcaaggcggggcggggagaggcgtgg

SEQ ID NO: 14075 - DNA, 379 bp, Chicken  19866894218913_3
gtggggcaaggtgtggcgaggcggggcaaggcgaggcggactggagcgtggcggggcgaggcggggcgaggcgtggcaggcgaggcgaggcggggcgtggcgtggcaagggaaagcgaggcggggccaggcggggcctggcagggccaggctaggtgaaacgagtcgaggcarggcggggccaggtggcgcgaggctaggcgtggtggggcaaggcaaggcaaggcgggtgaggcagagagaggcggggcgaggcgtggcaaagcagggyggggaggggcgtggcagcacgaggcggggkgtagggcgaggcggggtgttgtggggtgaagcagagagaggcagggcgaggctgcaaggcggggcggggagaggcgtgg

SEQ ID NO: 14076 - DNA, 600 bp, Chicken  19866894218929_1
gaactggggtgttcaagaggtgcatgattcaggttttgtagtagaaatgtgacagtttgatctgcttgcagggaaggactagctaccagtgatagtagaaggaaggtaaacaggaatatcaccggagtagtaaagttaacaggatgtaaataatagcatcattcgctgtcaagagtgaatagaaaatcagtaaaaggtctaggtggggcatatttcattacctaggtaaatgagaacataaggtgcatttgggtaaggtgcaaaccctggtagggtttgcatacctgcttgggaatgccmttttctaggtagggtatataagttctactgatggtggaatcaaattacctttgcttatcaaatgtttggtttttgtttgcttgtcccatgctccaggttgaaatagttgtggttacaaataagcttaaaagttgctgaaacattagtataagaagagcggtgattgatttttttgtattctctcctgttccatacaaaccattcttaggttctttcagatatgggaaactggtgagatagtattgcaaattttcacagctataagtgctttaaaacaaaacaacaacaacaaaaaaaaca

SEQ ID NO: 14077 - DNA, 599 bp, Chicken  19866894218934_1
  misc_feature (1)..(140): n is any nucleotide
nnnnnnnnnnnnnnnnnnnnnnnnnnnnnnnnnnnnnnnnnnnnnnnnnnnnnnnnnnnnnnnnnnnnnnnnnnnnnnnnnnnnnnnnnnnnnnnnnnnnnnnnnnnnnnnnnnnnnnnnnnnnnnnnnnnnnnnnnnnnaatagtattggagcatttgagttaggagctggcaaggaaactgaggtgtcagctgaaaggagcatggatattttgccacctttttcactgaagctcacaaatagtgctcaaacagctgagatttcacatttattgttgagttaattctctcaggaatagmactgctgctgtgaaatctaataatgtatcttataacttattatactttccatgcatgtgcagttaaaaagtgcagttgggattcttgctacattaaatggttgtggtgctatggatttatgtaactcagtaactgctgctctgtgctgcgcaactcgggcttcctgagtggcatccttttttcctacacttgcagatcttgcaggcgtgggttacaccaaacctctcttaagtaacttcagcgccaaagcaatgtgtttctttttttcccatcttgagaaactgtctgcattctaaatt

SEQ ID NO: 14078 - DNA, 600 bp, Chicken  19866894218934_2
ttccatgcatgtgcagttaaaaagtgcagttgggattcttgctacattaaatggttgtggtgctatggatttatgtaactcagtaactgctgctctgtgctgcgcaactcgggcttcctgagtggcatccttttttcctacacttgcagatcttgcaggcgtgggttacaccaaacctctcttaagtaacttcagcgccaaagcaatgtgtttctttttttcccatcttgagaaactgtctgcattctaaattgtggactaaagtacttaatactgagtgtctaacgtactgcaggagcrtgtgagctgcagtgtgtgctgtgaggaaatgtgccacttgacagagaagcctgtcagctggcagagatagaacatttttgaccaaagtatctactgagtgcaccagctttatcgttggacacttttaaagccccaaaaggacaggttccatcactgagcactgtaacttactgcttgtatgattcagtccaagggaaatagtttggtttttttcctaatgtgacatctcaaataacttgttccgacctgggactctgttcctgttggccgcaagttctgccgggctgtttgtcttggagc

SEQ ID NO: 14079 - DNA, 600 bp, Chicken  19866894218944_1
cccgtgattccaagtgcttatccaactctgcatcttttttcactgcctcatctgagaccttaggagcatttgaaagacaaactagtacaatactcatgttatcacgactcccctacgtgacaaagaaaaaacaaacagttaagctttttagatttgtctttcactttcctgttcttgtcaccagtcatattttcacttgtttcaagtatggtattctagatctaactgggaaaaggaagctttgcagtacaacagtactttgattactgagaacctctcgctcaactaaactattcattraaattgaattttactcattctactttccatttagtctttaagttgaaaatacttcaggcacttatttacgtcagctgttaaaaaatacaactttttaaacaacatgagaactacagaaaaagatttaagacaactgctaagacatttagacagtcatttaacattagccttaacccaaatcatagaatggcctgggttgaaaaggaccacaatgatttatctagtttcaaccccccaaatcaacaaaaacaaagtcatattggaaaatgaaatgcagaatatttattctgaactactaga

SEQ ID NO: 14080 - DNA, 600 bp, Chicken  19866894218954_1
acatttaataattaccacttgactgagaactgtgaggtctctgtgaacctatacattttacagttgtaaagtcccgtgaaaagggtcctgcagcttaattatactctacgttagtctttatactggaagacagagaggggaactgaatcctattcaccttcagcacacacccgcttgtagacttcttccctatccccctcatttctctcttttctaacctacttcatttccagggtcccattttagtgagaaatccatgaagttgctaattcctatagctcttctctgaactttttcctrttctgcattcttatttctcctgtttgaacatcttttgcatcgttccctttttgagatgaagaaagcagaactagatgaaacatggggccatagcataatgatgttctgtcttgttctctcctccttctgctaatttttttttatatttaatttgttttttggccccaatctggaattgatttgatatttacatcaagttgtacacaataataaaaaatgacattttttattgtatgtgtatctatatgtatgtgtattaatatgcatcatatattaagaaaaacctacatatgcacatat

SEQ ID NO: 14081 - DNA, 600 bp, Chicken  19866894218954_2
tttttttatatttaatttgttttttggccccaatctggaattgatttgatatttacatcaagttgtacacaataataaaaaatgacattttttattgtatgtgtatctatatgtatgtgtattaatatgcatcatatattaagaaaaacctacatatgcacatatgaagtaagggctttttctgcatatgtacattcttctccacaatattccctcactctcattttcatgagtagcatagtaacatccaaaaacccttatcttcgcactcacctctttgacctcttcgccaggcacatrcatgcgtcccagcacagatacatgtaaaactcacttacaacttcttccatttaaaaaaaagctgaaaacttgtttctgtgctgtgtttgctatttcaaaccattacatgagcacaagacaccagcatcccctggcagcagaagtggccaacaacatccaaggctgcatcgacaggagcacagccaggacatcaggggcagtggttatccccttctcagtgctcactagaccacatgtaggtactgtggccagtgttgcctccctccaatacaggaaagacattgatcaattgaagcaagt

SEQ ID NO: 14082 - DNA, 599 bp, Chicken  19866894218957_1
  misc_feature (1)..(23): n is any nucleotide
nnnnnnnnnnnnnnnnnnnnnnntctggtacttctcataaccttgcttagttttcattgcagtctttttgtgtacattttgatagcttagagtagacaaaaaagcatgcatattatatactatgtattatatagttattatgaaaatttagttttctgtcttctttctcatacagattctaattttttgagctcttagtcttttaatgtattactttgaaaacttagtctattcgaaatcatcaaaagatgattacttttgtacctccaaactgtggttttttgttactttatttcatcyatttggttggctcttagagattctctttgctttgtatctgtacagtatttctcaaacttagccaaacagtttcctgctttttcaaattctgtttttaaagacctgtttctgtttggctttcacctcttcatttctttccaaaacccactggtacttacatacctcaggctgacatgttttattttacaactggtgctgatattttacatgttcagacagtgaggtaaagataacatttttaaacagttcaaaataygcagtatttacattaaaacattgttttaaacattgtttctgaa

SEQ ID NO: 14083 - DNA, 577 bp, Chicken  19866894218957_2
ttttgtacctccaaactgtggttttttgttactttatttcatcyatttggttggctcttagagattctctttgctttgtatctgtacagtatttctcaaacttagccaaacagtttcctgctttttcaaattctgtttttaaagacctgtttctgtttggctttcacctcttcatttctttccaaaacccactggtacttacatacctcaggctgacatgttttattttacaactggtgctgatattttacatgttcagacagtgaggtaaagataacatttttaaacagttcaaaataygcagtatttacattaaaacattgttttaaacattgtttctgaatgtaaccgagtcttcattttccagaaagattacatggagaaccagaaaggtgttgtagaatcgaaggatgcttcatctcataatgctggctctaagttatttccagcagtaccgcttcctgatgttcatcctcttcagcaacagcaaatacagctttctcctggcccgaaagtaagctgctgtgctcatggctctgactcttgtactccacaaatgcattgtggtgttggtgat

SEQ ID NO: 14084 - DNA, 600 bp, Chicken  19866894218964_1
aagatctttatttcattactcctgtgtaacgcgataatctctctggtccaatacctgtatatctctttgccatgcacacgggcatgaaaaacagccctataatctgttaatgggttgttgccagagccttaacccctgcaaggcaaaaactgtttaattttgctatctatcattatatggatgacatttttgtggcaaccaagtcaactaaagaaatgtgatatgccatgttgacagttgttgacagcataagaagctgtggtttagaggtagctccagaaaaggtccaagagagttcgycatggaattatttggggtggcaaattacaaatcaaactactgctccacaatgccgtaaagtggatttggacattcaaactctaaatgatatacaaaggctgttagggactttaaattgtgtcatggttttatgatttttggttattggtattccacatcataacatcatgtagcgcactgggtgttaaagagttaatgctccaggttcgggtacctgtccagaagagaactacaacattccccagaagactgtttgctgttctgttgtcacttctgctcaggggtaacagatataaggcc

SEQ ID NO: 14085 - DNA, 600 bp, Chicken  19866894218974_1
tttggttgccagtgcacctccttcagcctccctctctgtcccctggagccagatgtgggttcccatttaaacgcgctcttttataacctggtgaccgtgggaaaacgcttttgcacgctccgatatttcagagtgttcccatgaacagtgaatgcctgtgtgtgtcccagcccaggaggattttcctcccacatggcccagtggccaaccagtgatgctgtgtgattggcacagctgtgatttgttagcagggatggatggaggctcaggaagctggctcagccttgccttggctgcagrctccctgtgggttttgcacacagtgcatgggcacctccactgtccctgagcaccggggactcagggctttctctgggacgtgtagtctactcactgtgacttgtagaactgggtgtgggcagatggggagatgtccccgtctccccttcttcagctgcttcgttgtttatattcctcaccccatcacagcagccagaatcgtagaatcattgaggctggaaagagcactaaaatcatcragtccaaccatcagtgcctgcctgtgaccactctagatcatgtcactctgtgcaacaatga

SEQ ID NO: 14086 - DNA, 478 bp, Chicken  19866894218974_2
atttgttagcagggatggatggaggctcaggaagctggctcagccttgccttggctgcagrctccctgtgggttttgcacacagtgcatgggcacctccactgtccctgagcaccggggactcagggctttctctgggacgtgtagtctactcactgtgacttgtagaactgggtgtgggcagatggggagatgtccccgtctccccttcttcagctgcttcgttgtttatattcctcaccccatcacagcagccagaatcgtagaatcattgaggctggaaagagcactaaaatcatcragtccaaccatcagtgcctgcctgtgaccactctagatcatgtcactctgtgcaacaatgaggtactaaatgagttttttgaggtactaaatgagttctttgcctcagtcttcacttcagcatagcaaagtgcaaggttttgcacttgggtcccaggtacagactgggagaaaaactc

SEQ ID NO: 14087 - DNA, 600 bp, Chicken  19866894218987_1
ttcaaataaactcataaataggagagcaagatactgaggaaaccttacaggggatcagacgtagtaaaagtggggttgaaaaattccagcagcccagaaggatgaagatggtacctatcaggacatcgtgctttgaaaatactcatctgtgcagtgtcagcttcattggtcttgtaaagatatcacagagtgaggcaaataggtttgtttggggatgacccatctgcacaaggctaaatccttggaaggcttacgctaagggagcctcagttggacatctcctggggtggaaacgaaccrgttcttactgggatgtggagttgcagtatttgtggtggacttcaaccattgatgaaaggactggtggttgaaactctccagattgtgcgcytttgctatgttgcraagacagatcttgctactaaaattagaactacctgttcatttttaactcttcacttgtttttaaatgtgttctgaaagagcatcattatgaccaatgaaagcatttttccttagagagtatcttcagtatgttagttttccacttttctattgtcctgtgttgtcttcaagagagactttctatgtgtaatgtgt

SEQ ID NO: 14088 - DNA, 600 bp, Chicken  19866894218987_2
gcccagaaggatgaagatggtacctatcaggacatcgtgctttgaaaatactcatctgtgcagtgtcagcttcattggtcttgtaaagatatcacagagtgaggcaaataggtttgtttggggatgacccatctgcacaaggctaaatccttggaaggcttacgctaagggagcctcagttggacatctcctggggtggaaacgaaccrgttcttactgggatgtggagttgcagtatttgtggtggacttcaaccattgatgaaaggactggtggttgaaactctccagattgtgcgcytttgctatgttgcraagacagatcttgctactaaaattagaactacctgttcatttttaactcttcacttgtttttaaatgtgttctgaaagagcatcattatgaccaatgaaagcatttttccttagagagtatcttcagtatgttagttttccacttttctattgtcctgtgttgtcttcaagagagactttctatgtgtaatgtgttttcttgtttaagtaattactaactttgagaaataagtggaaataaaaacttattttcttcaagaatgctatttatttaagaaaatataca

SEQ ID NO: 14089 - DNA, 600 bp, Chicken  19866894218987_3
agatggtacctatcaggacatcgtgctttgaaaatactcatctgtgcagtgtcagcttcattggtcttgtaaagatatcacagagtgaggcaaataggtttgtttggggatgacccatctgcacaaggctaaatccttggaaggcttacgctaagggagcctcagttggacatctcctggggtggaaacgaaccrgttcttactgggatgtggagttgcagtatttgtggtggacttcaaccattgatgaaaggactggtggttgaaactctccagattgtgcgcytttgctatgttgcraagacagatcttgctactaaaattagaactacctgttcatttttaactcttcacttgtttttaaatgtgttctgaaagagcatcattatgaccaatgaaagcatttttccttagagagtatcttcagtatgttagttttccacttttctattgtcctgtgttgtcttcaagagagactttctatgtgtaatgtgttttcttgtttaagtaattactaactttgagaaataagtggaaataaaaacttattttcttcaagaatgctatttatttaagaaaatatacactcaatcaagatgt

SEQ ID NO: 14090 - DNA, 600 bp, Chicken  19866894218988_1
ctcacacgggaacagagtaattgctgggaggaagtgacagagcttcattatgaggcttcaagcgtttgaggaactgtatgtaacactacacaccaactgttcttgtaaataaaggctgctgctgaaccaattaggggagcaaatactagacatttgttgtgttgatgtaacagctaatggtctgcaaatgactacgtgaaggcgtacccccgcccagtaacagcttctgaaggtctaacagaatattctgaacttgattcacatcactgaaaacatttccccacatctagagaaaaattytaccctcttctaccttatgttttatgttaaaatagatcacaaatctttacccacttttgagtggtatcacgcgcagaaaatacattttcctcctctattaaacttcaactgctcggaattactgagagaatttatgtaagcacacgtacacacgaatgtgcatgcaaaggcagcctagccaacaagtctcctgttcacagtacatttacacattagctacattaaaatggtgtaagtactaaagagttattaagttccgcaaattcctggagtaaaactcttatcctgctcagacggctg

SEQ ID NO: 14091 - DNA, 600 bp, Chicken  19866894218994_1
gccataaagatggtggaggcctggaggagcatcccctgatgggaaaaggctgagagccccaagggatgttcacctggggaggagaaggctgaaaggggatccaatgaatgcttatcaacatgtaaacactgggggaaccccagaggtcccttccaacccctatggttctgtcgttatcgtgacctgtgcccccttgtccccttgcaggaccgcctgagccgctgcacgctgcactgctctgacagagccaaggatgccctggaggcgggcggtggggagacacgggcacggtcccagctygaygcctgcgtggctgcctgtggggatgagcacctacgtctggtgccyggcatggccaagaggatgcgggacgggttggcggccctacagcactaatgggtgcttttgggatgggggcgatgctattaaaggcaaggagctgcactcgtggtgctcgaggggtgctggggctttggggtgtgggggtgcaaggtgtggggtgatggctgtgcaaaatgtagggtgcaggtgtgcaaggtgtaggatagtggctgtgcaatgtatggggtgggtgtgcgcaaggtatggggtgatggctgt

SEQ ID NO: 14092 - DNA, 600 bp, Chicken  19866894218994_2
ataaagatggtggaggcctggaggagcatcccctgatgggaaaaggctgagagccccaagggatgttcacctggggaggagaaggctgaaaggggatccaatgaatgcttatcaacatgtaaacactgggggaaccccagaggtcccttccaacccctatggttctgtcgttatcgtgacctgtgcccccttgtccccttgcaggaccgcctgagccgctgcacgctgcactgctctgacagagccaaggatgccctggaggcgggcggtggggagacacgggcacggtcccagctygaygcctgcgtggctgcctgtggggatgagcacctacgtctggtgccyggcatggccaagaggatgcgggacgggttggcggccctacagcactaatgggtgcttttgggatgggggcgatgctattaaaggcaaggagctgcactcgtggtgctcgaggggtgctggggctttggggtgtgggggtgcaaggtgtggggtgatggctgtgcaaaatgtagggtgcaggtgtgcaaggtgtaggatagtggctgtgcaatgtatggggtgggtgtgcgcaaggtatggggtgatggctgtgca

SEQ ID NO: 14093 - DNA, 600 bp, Chicken  19866894218994_3
gctgagagccccaagggatgttcacctggggaggagaaggctgaaaggggatccaatgaatgcttatcaacatgtaaacactgggggaaccccagaggtcccttccaacccctatggttctgtcgttatcgtgacctgtgcccccttgtccccttgcaggaccgcctgagccgctgcacgctgcactgctctgacagagccaaggatgccctggaggcgggcggtggggagacacgggcacggtcccagctygaygcctgcgtggctgcctgtggggatgagcacctacgtctggtgccyggcatggccaagaggatgcgggacgggttggcggccctacagcactaatgggtgcttttgggatgggggcgatgctattaaaggcaaggagctgcactcgtggtgctcgaggggtgctggggctttggggtgtgggggtgcaaggtgtggggtgatggctgtgcaaaatgtagggtgcaggtgtgcaaggtgtaggatagtggctgtgcaatgtatggggtgggtgtgcgcaaggtatggggtgatggctgtgcagtgtatgggggtgggatgagccgtgcaagtgtgcagtgtatagat

SEQ ID NO: 14094 - DNA, 600 bp, Chicken  19866894219000_1
gcagctgaggcagaattcccttcctgcagcatcctatagtgtttgtcctgcagcatcccacagcagtgtttgatgaaggccattgcactgcttaccattgcactctagcaaatctgctctccttaaccttgttctcatctaaaacacagcaaacttggcataagctgaagagagtgacgttggtgatttaggattaccaagtactgtacttggtgcaatgaggcagcatgaagaagcttttgtgcatgatgctaatgctacttagtaatgctatcactaaggtcccccatcaagacctayaaggttgctagctatagcagcacaataattgcttgcaacatgaggataacaagtaagcttgtatgcagcgtgggtggcaaaaaggcacatccagagacctgagaagtagtatggagatgtacatggatatgcatcgaatggctcctttgttgacctgctgtagaaacccctgtatatttagcacatgtcactagcatgggagtcatgggtgcctggtagcctgtcatatgagagaagccatgagagcgtgaggcagcgtgctgcatgcagggccaggcctgtctgcttaaggctgatgac

SEQ ID NO: 14095 - DNA, 600 bp, Chicken  19866894219001_1
atacttaggatgcaaagttgcagaagaattaaatgtgttttatgtgagtgggatgaagggggcaggaataggctaatcctaaaatagtacacatctgtgctggaataaagccgtggctttatcctggagagaaaaataaaacaaatggagaaagtatttcacatttaccacaaagcatatgctgacttcagatcatcacacaccttagaaatggaaacctaacagaataagaaattcaagtgtgttatctatgccaactctaaaactgatatcagagctattttatagttctgttaaaaytagattatcatcttggtgatatatgcaacacagatgaggtagggtcccatgattagggaagaattagaactgccagcagctaaacttctggtaaagaagggctcccatcactgcagctcttaggaggtctgagatgttctgttcttccatgttttctcttgcagtttgatttaatttattaagattcttttaattatagtacatatgaaatagttagagtggaggaggttgttttgtgcagttgtgttttattccctctctgcctgttctcctgcttccctatgtctccaccatctattt

SEQ ID NO: 14096 - DNA, 600 bp, Chicken  19866894219003_1
agattctggcatcatatgaaaagtttggaaaagattttagtggtgataacatcagtggaatgaaatcaagctgaatattttttctcctcaaacagtatttagagcagtgacttgttttttttttagcacagctttaaactgggatgtttgatcatcttgattttatatttctctaggagacatttttaggaacccaaactgatcatgtgttttatttttttaaagataaagtcctggaactgcaccttgtactttccagttaatttcagtactgttgttttttcctagtccttacatatrgaacagttagtcttttacagacrgttggaaggcattaggaagggttttgtggtccatggtgtgtgatactaygttgagtatgtgtcccttgaatgctgaggaattttgttcatgtaagaattcatgctctacacttgttcatctctttcttcataatgctctcagagcatattcatataaatcaacaacgtggctgatccaaatctagtgacagaaagtatcactgaatggtttctcagtctgtattcacaaacaaatacctgcattaactggaacaggtggaaacatgaaaaaaataaa

SEQ ID NO: 14097 - DNA, 600 bp, Chicken  19866894219003_2
tttggaaaagattttagtggtgataacatcagtggaatgaaatcaagctgaatattttttctcctcaaacagtatttagagcagtgacttgttttttttttagcacagctttaaactgggatgtttgatcatcttgattttatatttctctaggagacatttttaggaacccaaactgatcatgtgttttatttttttaaagataaagtcctggaactgcaccttgtactttccagttaatttcagtactgttgttttttcctagtccttacatatrgaacagttagtcttttacagacrgttggaaggcattaggaagggttttgtggtccatggtgtgtgatactaygttgagtatgtgtcccttgaatgctgaggaattttgttcatgtaagaattcatgctctacacttgttcatctctttcttcataatgctctcagagcatattcatataaatcaacaacgtggctgatccaaatctagtgacagaaagtatcactgaatggtttctcagtctgtattcacaaacaaatacctgcattaactggaacaggtggaaacatgaaaaaaataaaccaaatttaaattaccaaacaat

SEQ ID NO: 14098 - DNA, 600 bp, Chicken  19866894219003_3
gaatattttttctcctcaaacagtatttagagcagtgacttgttttttttttagcacagctttaaactgggatgtttgatcatcttgattttatatttctctaggagacatttttaggaacccaaactgatcatgtgttttatttttttaaagataaagtcctggaactgcaccttgtactttccagttaatttcagtactgttgttttttcctagtccttacatatrgaacagttagtcttttacagacrgttggaaggcattaggaagggttttgtggtccatggtgtgtgatactaygttgagtatgtgtcccttgaatgctgaggaattttgttcatgtaagaattcatgctctacacttgttcatctctttcttcataatgctctcagagcatattcatataaatcaacaacgtggctgatccaaatctagtgacagaaagtatcactgaatggtttctcagtctgtattcacaaacaaatacctgcattaactggaacaggtggaaacatgaaaaaaataaaccaaatttaaattaccaaacaatgaaagcctttttcttgtttttttctgattaatctggatttttttctaag

SEQ ID NO: 14099 - DNA, 600 bp, Chicken  19866894219007_1
ccagagaaagttctgcatgaatgatggtgctctttaagtcacaaagtgaatgtgagaacagtgatgctaatgagtaaggagagatagggatgaggtttgtgagggaacatgaatagttcattaagtcacttatttaccatataaaaatcccatcgaggcactagccttttttcttacatggctgcagtatactgggaccagttcaataaagagctaaagcacaggctagtgcctacagagacatagtgcctactgtctactgggcagtgcatttccttttaaaaatgaattatttggggkkttttttggctcacatcaatgcacagtgtcccttttagtctaataaatacagatttgtattacrtaaagtgtgtacatagatttgtactacgtatattaatataactgctatcagatagagcagtattaccaactggctgtttgcctccaagagtttctttgtaggatcttctccatcataactgaataaattaatctgcagtttctgttgatcctagcctgctgtgttaccctctgcagtcatttgtcctctacttattacacagtacccagattcaccctctccagttttcacttagt

SEQ ID NO: 14100 - DNA, 600 bp, Chicken  19866894219007_2
cagagaaagttctgcatgaatgatggtgctctttaagtcacaaagtgaatgtgagaacagtgatgctaatgagtaaggagagatagggatgaggtttgtgagggaacatgaatagttcattaagtcacttatttaccatataaaaatcccatcgaggcactagccttttttcttacatggctgcagtatactgggaccagttcaataaagagctaaagcacaggctagtgcctacagagacatagtgcctactgtctactgggcagtgcatttccttttaaaaatgaattatttggggkkttttttggctcacatcaatgcacagtgtcccttttagtctaataaatacagatttgtattacrtaaagtgtgtacatagatttgtactacgtatattaatataactgctatcagatagagcagtattaccaactggctgtttgcctccaagagtttctttgtaggatcttctccatcataactgaataaattaatctgcagtttctgttgatcctagcctgctgtgttaccctctgcagtcatttgtcctctacttattacacagtacccagattcaccctctccagttttcacttagta

SEQ ID NO: 14101 - DNA, 553 bp, Chicken  19866894219007_3
tgctaatgagtaaggagagatagggatgaggtttgtgagggaacatgaatagttcattaagtcacttatttaccatataaaaatcccatcgaggcactagccttttttcttacatggctgcagtatactgggaccagttcaataaagagctaaagcacaggctagtgcctacagagacatagtgcctactgtctactgggcagtgcatttccttttaaaaatgaattatttggggkkttttttggctcacatcaatgcacagtgtcccttttagtctaataaatacagatttgtattacrtaaagtgtgtacatagatttgtactacgtatattaatataactgctatcagatagagcagtattaccaactggctgtttgcctccaagagtttctttgtaggatcttctccatcataactgaataaattaatctgcagtttctgttgatcctagcctgctgtgttaccctctgcagtcatttgtcctctacttattacacagtacccagattcaccctctccagttttcacttagtagctgctgcctccctct

SEQ ID NO: 14102 - DNA, 600 bp, Chicken  19866894219015_1
ttttcctggagttccctctcttttggagtttttccctgtgggtctagttcttcagagacaggtgagcgcttctttttgttgtagcacctttctgtttgagctagtccctttgttactgcactgatctggttgttgcaatactgtattctgatgatgatgaacaaagtacggggctagtgaacaatcccaaaagttctactcttcagctttcacaaatgaacaatctaaagaaattgaaggaatgatatgcctgaaatctctagttctgctgtgtaagatcatagcagttcattaaaagayttctctaaattttcctatctagtagtggatattgggtacayagtgagggacacctgtggattgggaatggtatgactgaattaaataggtcccagaagttcagtacctggggagatggtaaggctttgtgggaatcaacctctattcttaaagtaattacagaaatgcaacctggctaattgagttcaagctactgatgcaagacctgtgatgaagtacttaaaaagggattgtttcaaagcactcataactaccagttttccaagaggtaacagsagcaccagaatataaccaagyaat

SEQ ID NO: 14103 - DNA, 600 bp, Chicken  19866894219015_2
gtctagttcttcagagacaggtgagcgcttctttttgttgtagcacctttctgtttgagctagtccctttgttactgcactgatctggttgttgcaatactgtattctgatgatgatgaacaaagtacggggctagtgaacaatcccaaaagttctactcttcagctttcacaaatgaacaatctaaagaaattgaaggaatgatatgcctgaaatctctagttctgctgtgtaagatcatagcagttcattaaaagayttctctaaattttcctatctagtagtggatattgggtacayagtgagggacacctgtggattgggaatggtatgactgaattaaataggtcccagaagttcagtacctggggagatggtaaggctttgtgggaatcaacctctattcttaaagtaattacagaaatgcaacctggctaattgagttcaagctactgatgcaagacctgtgatgaagtacttaaaaagggattgtttcaaagcactcataactaccagttttccaagaggtaacagsagcaccagaatataaccaagyaatactaagcagctgcttcagagagcagttgcctatggtttaat

SEQ ID NO: 14104 - DNA, 600 bp, Chicken  19866894219015_3
gatcatagcagttcattaaaagayttctctaaattttcctatctagtagtggatattgggtacayagtgagggacacctgtggattgggaatggtatgactgaattaaataggtcccagaagttcagtacctggggagatggtaaggctttgtgggaatcaacctctattcttaaagtaattacagaaatgcaacctggctaattgagttcaagctactgatgcaagacctgtgatgaagtacttaaaaagggattgtttcaaagcactcataactaccagttttccaagaggtaacagsagcaccagaatataaccaagyaatactaagcagctgcttcagagagcagttgcctatggtttaataatagaataggtgctgctatgttggtgtgaacaaataaaatgtgatttttttaaaaaaaacaattcactgctaataaaaaaaaaactgtgaagatggtcagttcaaatgagatttatagaattacttcctaaaatgtatgctactgaaatgtttcagaacacagaattatgtacatgtgttttatgtcttgaaaaacagaaaaacagtactgggggggtgtgcctgaggtctcct

SEQ ID NO: 14105 - DNA, 600 bp, Chicken  19866894219015_4
gayttctctaaattttcctatctagtagtggatattgggtacayagtgagggacacctgtggattgggaatggtatgactgaattaaataggtcccagaagttcagtacctggggagatggtaaggctttgtgggaatcaacctctattcttaaagtaattacagaaatgcaacctggctaattgagttcaagctactgatgcaagacctgtgatgaagtacttaaaaagggattgtttcaaagcactcataactaccagttttccaagaggtaacagsagcaccagaatataaccaagyaatactaagcagctgcttcagagagcagttgcctatggtttaataatagaataggtgctgctatgttggtgtgaacaaataaaatgtgatttttttaaaaaaaacaattcactgctaataaaaaaaaaactgtgaagatggtcagttcaaatgagatttatagaattacttcctaaaatgtatgctactgaaatgtttcagaacacagaattatgtacatgtgttttatgtcttgaaaaacagaaaaacagtactgggggggtgtgcctgaggtctccttgaagctcttgtactgtaggt

SEQ ID NO: 14106 - DNA, 600 bp, Chicken  19866894219024_1
tctgtcaagattggttagtattccacttgctggttatgtccatgaagataaaaatctttgctagattatgactggaaaaaaagataaggaggaaaggttcgaaagttttattttgccattcttgctttggactttgcttagattaaaaattagcatgaaatttcatgatacctcaaacattttcctcctttcttctcctggaataattttcttctttggagttggaaaggcctagataaaaggtgaaacttaaaattagatagcacaatgctagaacaagggaaaaattagaaaagtctyaaacccacrtcttggtatgtgcaaaaytgggtttaaaataactcattagttgggaggttgtaaatgctaccgtacttgttcacccactgctaagagctccatctygaaggctgaagatagtaatttaagatctgtttcatctcaatttttcttcyctggcagcaccattgcacattataatcttttcacggtctttgacggtcctcagatattaatatcacctcttatttggacaacaaatttattaggttatccttaggctttgtcttgttacccacagaagatgggaacgaagccact

SEQ ID NO: 14107 - DNA, 600 bp, Chicken  19866894219024_2
attggttagtattccacttgctggttatgtccatgaagataaaaatctttgctagattatgactggaaaaaaagataaggaggaaaggttcgaaagttttattttgccattcttgctttggactttgcttagattaaaaattagcatgaaatttcatgatacctcaaacattttcctcctttcttctcctggaataattttcttctttggagttggaaaggcctagataaaaggtgaaacttaaaattagatagcacaatgctagaacaagggaaaaattagaaaagtctyaaacccacrtcttggtatgtgcaaaaytgggtttaaaataactcattagttgggaggttgtaaatgctaccgtacttgttcacccactgctaagagctccatctygaaggctgaagatagtaatttaagatctgtttcatctcaatttttcttcyctggcagcaccattgcacattataatcttttcacggtctttgacggtcctcagatattaatatcacctcttatttggacaacaaatttattaggttatccttaggctttgtcttgttacccacagaagatgggaacgaagccactatcgaatgt

SEQ ID NO: 14108 - DNA, 600 bp, Chicken  19866894219024_3
tgctggttatgtccatgaagataaaaatctttgctagattatgactggaaaaaaagataaggaggaaaggttcgaaagttttattttgccattcttgctttggactttgcttagattaaaaattagcatgaaatttcatgatacctcaaacattttcctcctttcttctcctggaataattttcttctttggagttggaaaggcctagataaaaggtgaaacttaaaattagatagcacaatgctagaacaagggaaaaattagaaaagtctyaaacccacrtcttggtatgtgcaaaaytgggtttaaaataactcattagttgggaggttgtaaatgctaccgtacttgttcacccactgctaagagctccatctygaaggctgaagatagtaatttaagatctgtttcatctcaatttttcttcyctggcagcaccattgcacattataatcttttcacggtctttgacggtcctcagatattaatatcacctcttatttggacaacaaatttattaggttatccttaggctttgtcttgttacccacagaagatgggaacgaagccactatcgaatgtctggtaaagaagcagtta

SEQ ID NO: 14109 - DNA, 600 bp, Chicken  19866894219024_4
ttttattttgccattcttgctttggactttgcttagattaaaaattagcatgaaatttcatgatacctcaaacattttcctcctttcttctcctggaataattttcttctttggagttggaaaggcctagataaaaggtgaaacttaaaattagatagcacaatgctagaacaagggaaaaattagaaaagtctyaaacccacrtcttggtatgtgcaaaaytgggtttaaaataactcattagttgggaggttgtaaatgctaccgtacttgttcacccactgctaagagctccatctygaaggctgaagatagtaatttaagatctgtttcatctcaatttttcttcyctggcagcaccattgcacattataatcttttcacggtctttgacggtcctcagatattaatatcacctcttatttggacaacaaatttattaggttatccttaggctttgtcttgttacccacagaagatgggaacgaagccactatcgaatgtctggtaaagaagcagttatacacaataagcctttttttccctgactcaacaagcacagtttgcttcataacattctcttttgacaatctaagtttc

SEQ ID NO: 14110 - DNA, 600 bp, Chicken  19866894219024_5
tgaaatttcatgatacctcaaacattttcctcctttcttctcctggaataattttcttctttggagttggaaaggcctagataaaaggtgaaacttaaaattagatagcacaatgctagaacaagggaaaaattagaaaagtctyaaacccacrtcttggtatgtgcaaaaytgggtttaaaataactcattagttgggaggttgtaaatgctaccgtacttgttcacccactgctaagagctccatctygaaggctgaagatagtaatttaagatctgtttcatctcaatttttcttcyctggcagcaccattgcacattataatcttttcacggtctttgacggtcctcagatattaatatcacctcttatttggacaacaaatttattaggttatccttaggctttgtcttgttacccacagaagatgggaacgaagccactatcgaatgtctggtaaagaagcagttatacacaataagcctttttttccctgactcaacaagcacagtttgcttcataacattctcttttgacaatctaagtttctatcagattagtacttttcaaatacctcaaaaaactgacttaagtctcta

SEQ ID NO: 14111 - DNA, 599 bp, Chicken  19866894219025_1
  misc_feature (1)..(125): n is any nucleotide
nnnnnnnnnnnnnnnnnnnnnnnnnnnnnnnnnnnnnnnnnnnnnnnnnnnnnnnnnnnnnnnnnnnnnnnnnnnnnnnnnnnnnnnnnnnnnnnnnnnnnnnnnnnnnnnnnnnnnnnnnnnnnatatatatatatatatccccccccccctaatatatatatatacactaataatatatatacacatatgtatatatagtatatctaagttgctacacaggtgctaaatttggggccgcatgcttgatgactttaaatctttccaaatccatttcttgttgatctgtaagaactacakaaggtaaatgttaagacacagctctccacatcttctcttacagagaccgccttatcttttgatgataagctaatacacatgcaagagttttctagccagcacrctacttttaccatagcttcaaagggtctggatttactctggatttactcccccatcacattaagaggccaytgtgcagatacagtaccacatttactaagtcatctttttaaagacacaagcagtacatctggcacttccctaaagaactgaccaagaacaaactgctcctgtcagaactgtatggatttttttcc

SEQ ID NO: 14112 - DNA, 599 bp, Chicken  19866894219025_2
  misc_feature (1)..(22): n is any nucleotide
nnnnnnnnnnnnnnnnnnnnnnatatatatatatatatccccccccccctaatatatatatatacactaataatatatatacacatatgtatatatagtatatctaagttgctacacaggtgctaaatttggggccgcatgcttgatgactttaaatctttccaaatccatttcttgttgatctgtaagaactacakaaggtaaatgttaagacacagctctccacatcttctcttacagagaccgccttatcttttgatgataagctaatacacatgcaagagttttctagccagcacrctacttttaccatagcttcaaagggtctggatttactctggatttactcccccatcacattaagaggccaytgtgcagatacagtaccacatttactaagtcatctttttaaagacacaagcagtacatctggcacttccctaaagaactgaccaagaacaaactgctcctgtcagaactgtatggatttttttcccccacttggaaagcactgtgggatgcaactgctggaagaagatcatcaatagccaacttacaagctgcacctcagagcacacagaccagcctggatgagttct

SEQ ID NO: 14113 - DNA, 600 bp, Chicken  19866894219025_3
aatatatatacacatatgtatatatagtatatctaagttgctacacaggtgctaaatttggggccgcatgcttgatgactttaaatctttccaaatccatttcttgttgatctgtaagaactacakaaggtaaatgttaagacacagctctccacatcttctcttacagagaccgccttatcttttgatgataagctaatacacatgcaagagttttctagccagcacrctacttttaccatagcttcaaagggtctggatttactctggatttactcccccatcacattaagaggccaytgtgcagatacagtaccacatttactaagtcatctttttaaagacacaagcagtacatctggcacttccctaaagaactgaccaagaacaaactgctcctgtcagaactgtatggatttttttcccccacttggaaagcactgtgggatgcaactgctggaagaagatcatcaatagccaacttacaagctgcacctcagagcacacagaccagcctggatgagttctaagcagttaaaatacactagttacagttcaaaacacactcaagaagctgcagrgtactacatgaagtttcca

SEQ ID NO: 14114 - DNA, 600 bp, Chicken  19866894219025_4
catcacattaagaggccaytgtgcagatacagtaccacatttactaagtcatctttttaaagacacaagcagtacatctggcacttccctaaagaactgaccaagaacaaactgctcctgtcagaactgtatggatttttttcccccacttggaaagcactgtgggatgcaactgctggaagaagatcatcaatagccaacttacaagctgcacctcagagcacacagaccagcctggatgagttctaagcagttaaaatacactagttacagttcaaaacacactcaagaagctgcagrgtactacatgaagtttccacagacagccaaaaagaaaggagacaacatggtcaccactagagctgtactgatgatccaattcaggttacaaccttccaggaagatacaatgccatgtgatctaagtgcacggttaacaagcagggggatagaaagacacgtcagtaacaaaaatgttgtctgaaaacatttcagatgctcctgtaactaaaagaatcacagaattgcttgtgctgaaaggaatctttgaaggtcagctagtccaactcccctgcagtgaacaaggacacctacagctaga

SEQ ID NO: 14115 - DNA, 599 bp, Chicken  19866894219028_1
  misc_feature (1)..(215): n is any nucleotide
nnnnnnnnnnnnnnnnnnnnnnnnnnnnnnnnnnnnnnnnnnnnnnnnnnnnnnnnnnnnnnnnnnnnnnnnnnnnnnnnnnnnnnnnnnnnnnnnnnnnnnnnnnnnnnnnnnnnnnnnnnnnnnnnnnnnnnnnnnnnnnnnnnnnnnnnnnnnnnnnnnnnnnnnnnnnnnnnnnnnnnnnnnnnnnnnnnnnnnnnnnnnnnnnnnnnnnnctgaaaaactctttcttcagcctttaacttttttccagtttttaacacctagtgtatatagaaagctcattccattctgcttgcwttgctaatctgtttacatcaatgaaaatatttttctgtgattgtataggatatgaattccartgtcactyagaaatcatatactgccttctgagttagtaaaaataattttactcattgtaggtaagtggtttgtttccagtcccagtccaatattgaattctgttaaccatgtttcagttgcattcagtgaatgatttgtttgctgycaaatggatctatgttctatctgagtccacacaatatctagggctgtttcaaagacagctgtagttagcagatattgaagctgcagcaaac

SEQ ID NO: 14116 - DNA, 599 bp, Chicken  19866894219028_2
  misc_feature (1)..(153): n is any nucleotide
nnnnnnnnnnnnnnnnnnnnnnnnnnnnnnnnnnnnnnnnnnnnnnnnnnnnnnnnnnnnnnnnnnnnnnnnnnnnnnnnnnnnnnnnnnnnnnnnnnnnnnnnnnnnnnnnnnnnnnnnnnnnnnnnnnnnnnnnnnnnnnnnnnnnnnnnnctgaaaaactctttcttcagcctttaacttttttccagtttttaacacctagtgtatatagaaagctcattccattctgcttgcwttgctaatctgtttacatcaatgaaaatatttttctgtgattgtataggatatgaattccartgtcactyagaaatcatatactgccttctgagttagtaaaaataattttactcattgtaggtaagtggtttgtttccagtcccagtccaatattgaattctgttaaccatgtttcagttgcattcagtgaatgatttgtttgctgycaaatggatctatgttctatctgagtccacacaatatctagggctgtttcaaagacagctgtagttagcagatattgaagctgcagcaaacagcacagaagttctgaattgagctgaaaggatggaaccgattatcatgtcaggaagatgcag

SEQ ID NO: 14117 - DNA, 599 bp, Chicken  19866894219028_3
  misc_feature (1)..(145): n is any nucleotide
nnnnnnnnnnnnnnnnnnnnnnnnnnnnnnnnnnnnnnnnnnnnnnnnnnnnnnnnnnnnnnnnnnnnnnnnnnnnnnnnnnnnnnnnnnnnnnnnnnnnnnnnnnnnnnnnnnnnnnnnnnnnnnnnnnnnnnnnnnnnnnnnnctgaaaaactctttcttcagcctttaacttttttccagtttttaacacctagtgtatatagaaagctcattccattctgcttgcwttgctaatctgtttacatcaatgaaaatatttttctgtgattgtataggatatgaattccartgtcactyagaaatcatatactgccttctgagttagtaaaaataattttactcattgtaggtaagtggtttgtttccagtcccagtccaatattgaattctgttaaccatgtttcagttgcattcagtgaatgatttgtttgctgycaaatggatctatgttctatctgagtccacacaatatctagggctgtttcaaagacagctgtagttagcagatattgaagctgcagcaaacagcacagaagttctgaattgagctgaaaggatggaaccgattatcatgtcaggaagatgcagaaagctcc

SEQ ID NO: 14118 - DNA, 599 bp, Chicken  19866894219028_4
  misc_feature (1)..(7): n is any nucleotide
nnnnnnnctgaaaaactctttcttcagcctttaacttttttccagtttttaacacctagtgtatatagaaagctcattccattctgcttgcwttgctaatctgtttacatcaatgaaaatatttttctgtgattgtataggatatgaattccartgtcactyagaaatcatatactgccttctgagttagtaaaaataattttactcattgtaggtaagtggtttgtttccagtcccagtccaatattgaattctgttaaccatgtttcagttgcattcagtgaatgatttgtttgctgycaaatggatctatgttctatctgagtccacacaatatctagggctgtttcaaagacagctgtagttagcagatattgaagctgcagcaaacagcacagaagttctgaattgagctgaaaggatggaaccgattatcatgtcaggaagatgcagaaagctcctaagtgggaatttttccatgacagaawttgagagaaggacatataagatatgattctgtttatggagaagcaagtaaaaaactggtttgtcagaaggcctggaattgagaatggttgttatgtgaatgaccctgggaa

SEQ ID NO: 14119 - DNA, 600 bp, Chicken  19866894219028_5
agtaaaaataattttactcattgtaggtaagtggtttgtttccagtcccagtccaatattgaattctgttaaccatgtttcagttgcattcagtgaatgatttgtttgctgycaaatggatctatgttctatctgagtccacacaatatctagggctgtttcaaagacagctgtagttagcagatattgaagctgcagcaaacagcacagaagttctgaattgagctgaaaggatggaaccgattatcatgtcaggaagatgcagaaagctcctaagtgggaatttttccatgacagaawttgagagaaggacatataagatatgattctgtttatggagaagcaagtaaaaaactggtttgtcagaaggcctggaattgagaatggttgttatgtgaatgaccctgggaaccagttgattttggacacttgctggcagaattaaacagattaccttcatgtaaaggcaggtataatcattgcttcttttccatctttttccctttcttaaggttctatttttgaacataaattttactcttatcctggagtttttctaggagctataaatgattgcaagttttctacatttcattagag

SEQ ID NO: 14120 - DNA, 600 bp, Chicken  19866894219034_1
ctgtgtgcgtgcgaatgagcgtgtgagcgtgggctccgggcggcaggggggccgcgtggcgctgactcacccgcccccgggtgtttgctttggctcggccccggcgcgtccaagcccggcacaggcgctcgcagccccgcgcggctcggcagggctggccggaccctcgcccaccaccagctcgggtttccagagtgggatttacacccggccccaggcaccgcgtggccaaggcaaacagagctgggggggggggggggggcgggacagggaaggagacagagctggtagctcccaggmraggatgaggatgtgggcactggggtgtggataaccagagccgggcaacggtaggaatgtgcagccacggtggtggcaatgacctgaccgtggagcagcactgctcactcagcggtggccttctggccccaatggctcccatagcgggaagccctgtgtggcacagtcactctcccctgcccgtctcgggtggaaaatgactcagcaccagtacaggcagcagccgcgtggccccggtgccagagggaacggggagaccagcacagctggatcccagtgatgtcaagaggaagagcccaa

SEQ ID NO: 14121 - DNA, 600 bp, Chicken  19866894219034_2
tgtgtgcgtgcgaatgagcgtgtgagcgtgggctccgggcggcaggggggccgcgtggcgctgactcacccgcccccgggtgtttgctttggctcggccccggcgcgtccaagcccggcacaggcgctcgcagccccgcgcggctcggcagggctggccggaccctcgcccaccaccagctcgggtttccagagtgggatttacacccggccccaggcaccgcgtggccaaggcaaacagagctgggggggggggggggggcgggacagggaaggagacagagctggtagctcccaggmraggatgaggatgtgggcactggggtgtggataaccagagccgggcaacggtaggaatgtgcagccacggtggtggcaatgacctgaccgtggagcagcactgctcactcagcggtggccttctggccccaatggctcccatagcgggaagccctgtgtggcacagtcactctcccctgcccgtctcgggtggaaaatgactcagcaccagtacaggcagcagccgcgtggccccggtgccagagggaacggggagaccagcacagctggatcccagtgatgtcaagaggaagagcccaag

SEQ ID NO: 14122 - DNA, 600 bp, Chicken  19866894219037_1
tgactgcctggagcggacgggggctggagccaccctttctgtctcagtgatgcctctgggagcacagtgctgtctgagtctgcgcaggctccctttccccccaccctttcctcctgcagcacaaggatgaacgctgcgttcctcagctcacccctttctccaaactgttactgggaggggtgagttcatttctctctgatatctttccctacagcacctatttctcaaataaaggccgtgtcaccgcctttgtttgctctacaccacgttcacccaaaacttctcaaggcttcagccccrtggctcggtgaagctccctgccacgcacagcccttccctcagagactttttttttacacwaaaagtggagaaatttaggttagatgtaagagggtaatgttttactcaaaggtgaggtcccagcacaggctgccrggagaagccgtggataacccccctccgggagcatcccaggacaggctggatgagaccctgagcagcctgatctggtgggggacaarcagcccacagcagggggctggaaccacatgggcctgaaggaccccttcagcttcagcttcagccattctatgattctgt

SEQ ID NO: 14123 - DNA, 600 bp, Chicken  19866894219037_2
agcacagtgctgtctgagtctgcgcaggctccctttccccccaccctttcctcctgcagcacaaggatgaacgctgcgttcctcagctcacccctttctccaaactgttactgggaggggtgagttcatttctctctgatatctttccctacagcacctatttctcaaataaaggccgtgtcaccgcctttgtttgctctacaccacgttcacccaaaacttctcaaggcttcagccccrtggctcggtgaagctccctgccacgcacagcccttccctcagagactttttttttacacwaaaagtggagaaatttaggttagatgtaagagggtaatgttttactcaaaggtgaggtcccagcacaggctgccrggagaagccgtggataacccccctccgggagcatcccaggacaggctggatgagaccctgagcagcctgatctggtgggggacaarcagcccacagcagggggctggaaccacatgggcctgaaggaccccttcagcttcagcttcagccattctatgattctgtaactctttccaggcacgggagacctcaastgcacgttgtgtgtgtgctgggagagggcca

SEQ ID NO: 14124 - DNA, 600 bp, Chicken  19866894219037_3
gcgttcctcagctcacccctttctccaaactgttactgggaggggtgagttcatttctctctgatatctttccctacagcacctatttctcaaataaaggccgtgtcaccgcctttgtttgctctacaccacgttcacccaaaacttctcaaggcttcagccccrtggctcggtgaagctccctgccacgcacagcccttccctcagagactttttttttacacwaaaagtggagaaatttaggttagatgtaagagggtaatgttttactcaaaggtgaggtcccagcacaggctgccrggagaagccgtggataacccccctccgggagcatcccaggacaggctggatgagaccctgagcagcctgatctggtgggggacaarcagcccacagcagggggctggaaccacatgggcctgaaggaccccttcagcttcagcttcagccattctatgattctgtaactctttccaggcacgggagacctcaastgcacgttgtgtgtgtgctgggagagggccaaataacagcattttacagccaggaaaataaagacaaaatcacctctccaatgtcctgctgatcacttgatagaat

SEQ ID NO: 14125 - DNA, 600 bp, Chicken  19866894219037_4
ttctcaaataaaggccgtgtcaccgcctttgtttgctctacaccacgttcacccaaaacttctcaaggcttcagccccrtggctcggtgaagctccctgccacgcacagcccttccctcagagactttttttttacacwaaaagtggagaaatttaggttagatgtaagagggtaatgttttactcaaaggtgaggtcccagcacaggctgccrggagaagccgtggataacccccctccgggagcatcccaggacaggctggatgagaccctgagcagcctgatctggtgggggacaarcagcccacagcagggggctggaaccacatgggcctgaaggaccccttcagcttcagcttcagccattctatgattctgtaactctttccaggcacgggagacctcaastgcacgttgtgtgtgtgctgggagagggccaaataacagcattttacagccaggaaaataaagacaaaatcacctctccaatgtcctgctgatcacttgatagaatcatagaatgaccagggttggagaagacctacaagatcatccagtccaaccccttctcttctgtgctgtttttcaatcaagacccta

SEQ ID NO: 14126 - DNA, 600 bp, Chicken  19866894219037_5
gcccttccctcagagactttttttttacacwaaaagtggagaaatttaggttagatgtaagagggtaatgttttactcaaaggtgaggtcccagcacaggctgccrggagaagccgtggataacccccctccgggagcatcccaggacaggctggatgagaccctgagcagcctgatctggtgggggacaarcagcccacagcagggggctggaaccacatgggcctgaaggaccccttcagcttcagcttcagccattctatgattctgtaactctttccaggcacgggagacctcaastgcacgttgtgtgtgtgctgggagagggccaaataacagcattttacagccaggaaaataaagacaaaatcacctctccaatgtcctgctgatcacttgatagaatcatagaatgaccagggttggagaagacctacaagatcatccagtccaaccccttctcttctgtgctgtttttcaatcaagaccctaaaaacacatcctgaagttctgtaccacaggaaaatttgggaaaacagggggggagtttgacccctgctttcccatgtatgaaacaaagaaagaataagaagcgactat

SEQ ID NO: 14127 - DNA, 600 bp, Chicken  19866894219047_1
ctgctccactgccattagcaatgcactctgctttctccccccatttaggccattactccaggctcacagggctgtggttggcaatgcgggcgccgggccccacagggatgccggccctgcagtcagccctcacgtcttcctccgctcttaagcggcggtaaaagaaaccacccccttgtgcctggagagcagagccgtgttaagccggcttgtttaaaagcactgcagctttcttttggcactgtgacaagtggggacgatggcaaaaggtctcttttctcgctgccccgtcacttcttmttgtgtgatgccaacagggcagcgcatcagtgcagccctccccgtgcacccacagctcctccaggtcaatcatatgcacaagaccctggtgatgacatcctgctgccgagtgccacctctccacgtccccagctccgctgctgtcccctggtgctgtctcacgtttggcacctgtgctccccacttcctccacccgcgctcgctcctcaccctcgcacgcccccgcgggatgatgcactgcgtggaggagcagcattagtcactgttctgtaggaagaaggctgcaagcagaagaggagg

SEQ ID NO: 14128 - DNA, 600 bp, Chicken  19866894219055_1
aaggaagaggggagaagatgtagtgccagagctgttaattttctgctttttgtactggactactggagaatctcattattttcagtgacatttatgttctggtaatccctacccacttcaagtcctaacagcacaaatctggtaggagagcgggtaattcctcagagtgaatgaaatctcatttctatggatttgtacctttataccctttgcatttacccctggttctcccagttccttctcactagcctcaccaacagcaagggcaggactgagtggtaggctgagtggtacactccrgatttgagaaagatctaatacctgacacaaatggaaagctattggcaggatatttctkctttctggcaccctaatcagctctctcacagcagtttttcctcgttagtacccaaaaaagggctctggcaggatatttttcatgtaaattccactagctactcacaacaaaagaatctgattgcaaaatgctaggagtaaaccattttccttatctatgggacaaatggatacctcagagtacctcttctagggtccagttctgggttcaaagacaaaataagactcatgccacagctgaag

SEQ ID NO: 14129 - DNA, 600 bp, Chicken  19866894219055_2
actactggagaatctcattattttcagtgacatttatgttctggtaatccctacccacttcaagtcctaacagcacaaatctggtaggagagcgggtaattcctcagagtgaatgaaatctcatttctatggatttgtacctttataccctttgcatttacccctggttctcccagttccttctcactagcctcaccaacagcaagggcaggactgagtggtaggctgagtggtacactccrgatttgagaaagatctaatacctgacacaaatggaaagctattggcaggatatttctkctttctggcaccctaatcagctctctcacagcagtttttcctcgttagtacccaaaaaagggctctggcaggatatttttcatgtaaattccactagctactcacaacaaaagaatctgattgcaaaatgctaggagtaaaccattttccttatctatgggacaaatggatacctcagagtacctcttctagggtccagttctgggttcaaagacaaaataagactcatgccacagctgaagactgaaaatctagtgtcagtttgcaaggcatgtccatatctcagttcacctcacctgc

SEQ ID NO: 14130 - DNA, 600 bp, Chicken  19866894219061_1
gggaaaattcctccttttgggagctttgcagccaaggcccagcccgtagggttcatgaccggcagcgtgcctcacgtacatttaacagctattggtaaaatctgggaagaagcataagtctggtgacttctactaaatcttccctttgtcctcattcataaaagagagtcatcagatcactcaccccggcaggacgataggcacccagcactgagtttcatttatcagggatgttatgggtggtggtacagggggggatgtacaaactgcagcaccaactttgtcttctactcacaaaaygaaacaaagcagaaaaggccgaggatgttagagaagaaggaggaatcacctaatttgtttgtcaaatagacttccactggacatttccaaggaaaggatagatagacacctcaataggccaatgaataccacactgcataatgaagagtcatggaaagggcaggagcctaactatgaattgcagagcaaaatgttcctctgaggcaaaaggagaacactgaccaacctcaagtttttctagatttgcaaaaaagtgaggaaggaacacgtaggcctgagaagtttgctagatacaagaga

SEQ ID NO: 14131 - DNA, 557 bp, Chicken  19866894219061_2
ccattgcctaaaaaggagaattagagacctctgcttacttggaaattttggaaatctttttaaaatattcctcttctttgggtatcccaaagccatggactgctgagcccagccccttttgagaatgtctatttgaaatagttgtgccagtgtttgcagtttgaatgatccttttagtacagaagtgaaagatgtgaatgtgtgtaaccagcaagaattaacggtgtatgaatcagcttggttactaaaatagtaaatcagtaaagccccaaaagcttctagtcagcatagccccattcrcaagtagtagttgcctcatccaggaataccaggtgaatcatgagcatgaaagttggtcacagttcaacataggaaaaatgaaatttaagcatgaacagggccttagctagctttggaagtggaattcaatgggcacattgcccattggaaggatttggggtggatatagaagaagttagtcctatgtgcatcccagttgttgactggaagctctttgactcttcggagttcagatgatacattaattcctcaggaag

SEQ ID NO: 14132 - DNA, 599 bp, Chicken  19866894219070_1
  misc_feature (1)..(97): n is any nucleotide
nnnnnnnnnnnnnnnnnnnnnnnnnnnnnnnnnnnnnnnnnnnnnnnnnnnnnnnnnnnnnnnnnnnnnnnnnnnnnnnnnnnnnnnnnnnnnnnnntatgtcatactgaagacattcctgtagtaggcttgcagacaaggaaactatccaccgtgtgcttccagagaaaagaaaccccaaaacataaatacctaaatgttgtcgtaccagtatctccaaagtcagggcagaatacattttaagcgttttccaagtaaaatcacctgaatagtaaacaatataaatgtatgtaatagagrgggaaaagaaagaaaaagagaagaaaaaaaaaaagtaatggcattatgttcrttaatttttgacaaatttctagtttgtcagattgtttgctttgtttagcctagatttacttctacaaaatagtggtgttatagtgagagtagactttggtacatcttcagttctatatttctgtgtatatgtcagcatttattaaataaatgcagtaaaaaagtattactwcttctacctgctatttaaaaattcaactgaaactggtcgtaaaaattagcatgaagattattggtttatacaaggc

SEQ ID NO: 14133 - DNA, 599 bp, Chicken  19866894219070_2
  misc_feature (1)..(45): n is any nucleotide
nnnnnnnnnnnnnnnnnnnnnnnnnnnnnnnnnnnnnnnnnnnnntatgtcatactgaagacattcctgtagtaggcttgcagacaaggaaactatccaccgtgtgcttccagagaaaagaaaccccaaaacataaatacctaaatgttgtcgtaccagtatctccaaagtcagggcagaatacattttaagcgttttccaagtaaaatcacctgaatagtaaacaatataaatgtatgtaatagagrgggaaaagaaagaaaaagagaagaaaaaaaaaaagtaatggcattatgttcrttaatttttgacaaatttctagtttgtcagattgtttgctttgtttagcctagatttacttctacaaaatagtggtgttatagtgagagtagactttggtacatcttcagttctatatttctgtgtatatgtcagcatttattaaataaatgcagtaaaaaagtattactwcttctacctgctatttaaaaattcaactgaaactggtcgtaaaaattagcatgaagattattggtttatacaaggcccctgaattttttctgtaacttcattgctattgaagaggtgtggaaaagggt

SEQ ID NO: 14134 - DNA, 550 bp, Chicken  19866894219070_3
cagggcagaatacattttaagcgttttccaagtaaaatcacctgaatagtaaacaatataaatgtatgtaatagagrgggaaaagaaagaaaaagagaagaaaaaaaaaaagtaatggcattatgttcrttaatttttgacaaatttctagtttgtcagattgtttgctttgtttagcctagatttacttctacaaaatagtggtgttatagtgagagtagactttggtacatcttcagttctatatttctgtgtatatgtcagcatttattaaataaatgcagtaaaaaagtattactwcttctacctgctatttaaaaattcaactgaaactggtcgtaaaaattagcatgaagattattggtttatacaaggcccctgaattttttctgtaacttcattgctattgaagaggtgtggaaaagggtcaataaccccatattcttcacataatcaggaatgatcaggaaatgtagaactaaatatagagaaaagggaaagttagtgaatatatttgcatatgcaaattaacttaattgatactgcttgc

SEQ ID NO: 14135 - DNA, 600 bp, Chicken  19866894219073_1
aaaaggcagaacacgagcacattatacattacaaattatccacttagaccttcctggagtgtaacgatgttgtgagaaatgtgctgcagagggaggttaggaaattaaactgggacccttaggagccatttcacacacgccatcgaacagccatcaggtggtaacaccttttggcctctcctaagctgaaaaccattcaaacagagttagggcagaaggctttttatgtcactgctacctttagttcagttcagccaggaggtgtcactccactaattgctgatttgaaaaacaaaacaygagcactggtrtaactcactaggaagaggggtgcttartattcctcatattttttcttcctttgccagatccttacatgagaagatcccaaattattgtcatccacaaaacctacttaagaaatgctgcaggccttagagaaacactgtttttacaaacaaacaaaaaaatgcatcatcttcctcctcaccacttactgggaacagcagattgaacatcagcagcttaaataaccacagcttcaaccgctgcagactgaaaccagacctaacatcagaagcaacatttacctggttagga

SEQ ID NO: 14136 - DNA, 600 bp, Chicken  19866894219073_2
cacgagcacattatacattacaaattatccacttagaccttcctggagtgtaacgatgttgtgagaaatgtgctgcagagggaggttaggaaattaaactgggacccttaggagccatttcacacacgccatcgaacagccatcaggtggtaacaccttttggcctctcctaagctgaaaaccattcaaacagagttagggcagaaggctttttatgtcactgctacctttagttcagttcagccaggaggtgtcactccactaattgctgatttgaaaaacaaaacaygagcactggtrtaactcactaggaagaggggtgcttartattcctcatattttttcttcctttgccagatccttacatgagaagatcccaaattattgtcatccacaaaacctacttaagaaatgctgcaggccttagagaaacactgtttttacaaacaaacaaaaaaatgcatcatcttcctcctcaccacttactgggaacagcagattgaacatcagcagcttaaataaccacagcttcaaccgctgcagactgaaaccagacctaacatcagaagcaacatttacctggttaggagcaatcacatc

SEQ ID NO: 14137 - DNA, 600 bp, Chicken  19866894219073_3
tccacttagaccttcctggagtgtaacgatgttgtgagaaatgtgctgcagagggaggttaggaaattaaactgggacccttaggagccatttcacacacgccatcgaacagccatcaggtggtaacaccttttggcctctcctaagctgaaaaccattcaaacagagttagggcagaaggctttttatgtcactgctacctttagttcagttcagccaggaggtgtcactccactaattgctgatttgaaaaacaaaacaygagcactggtrtaactcactaggaagaggggtgcttartattcctcatattttttcttcctttgccagatccttacatgagaagatcccaaattattgtcatccacaaaacctacttaagaaatgctgcaggccttagagaaacactgtttttacaaacaaacaaaaaaatgcatcatcttcctcctcaccacttactgggaacagcagattgaacatcagcagcttaaataaccacagcttcaaccgctgcagactgaaaccagacctaacatcagaagcaacatttacctggttaggagcaatcacatcaattcactgcgaagcgaggtgctgtga

SEQ ID NO: 14138 - DNA, 600 bp, Chicken  19866894219073_4
accttcctggagtgtaacgatgttgtgagaaatgtgctgcagagggaggttaggaaattaaactgggacccttaggagccatttcacacacgccatcgaacagccatcaggtggtaacaccttttggcctctcctaagctgaaaaccattcaaacagagttagggcagaaggctttttatgtcactgctacctttagttcagttcagccaggaggtgtcactccactaattgctgatttgaaaaacaaaacaygagcactggtrtaactcactaggaagaggggtgcttartattcctcrtattttttcttcctttgccagatccttacatgagaagatcccaaattattgtcatccacaaaacctacttaagaaatgctgcaggccttagagaaacactgtttttacaaacaaacaaaaaaatgcatcatcttcctcctcaccacttactgggaacagcagattgaacatcagcagcttaaataaccacagcttcaaccgctgcagactgaaaccagacctaacatcagaagcaacatttacctggttaggagcaatcacatcaattcactgcgaagcgaggtgctgtgaagacaccca

SEQ ID NO: 14139 - DNA, 600 bp, Chicken  19866894219073_5; identical to SEQ ID NO: 14138

SEQ ID NO: 14140 - DNA, 600 bp, Chicken  19866894219073_6; identical to SEQ ID NO: 14138

SEQ ID NO: 14141 - DNA, 600 bp, Chicken  19866894219073_7
acaccttttggcctctcctaagctgaaaaccattcaaacagagttagggcagaaggctttttatgtcactgctacctttagttcagttcagccaggaggtgtcactccactaattgctgatttgaaaaacaaaacaygagcactggtrtaactcactaggaagaggggtgcttartattcctcatattttttcttcctttgccagatccttacatgagaagatcccaaattattgtcatccacaaaacctacttaagaaatgctgcaggccttagagaaacactgtttttacaaacaaaraaaaaaatgcatcatcttcctcctcaccacttactgggaacagcagattgaacatcagcagcttaaataaccacagcttcaaccgctgcagactgaaaccagacctaacatcagaagcaacatttacctggttaggagcaatcacatcaattcactgcgaagcgaggtgctgtgaagacacccacatgctgattccttccattaactacctggattcatgttttaattcccagatactagaaaaacctgttggcataaacaataaatacttcattgacattccaaactctgcctccctca

SEQ ID NO: 14142 - DNA, 600 bp, Chicken  19866894219075_1
ttccatagtacaggttagttaatgtacaacaggcattcagccctggagaactgccacgccaacaagttagtgcctaagcctgaccacccctggcaccttaccctttgaccaaagcagagagcactccgggtacagaggagaggtgggaagggacagacctcaccaacctggggctgcagctgcatggctcgtgtctgcttgctgacctgcacaagaaaatagcaacatggctcaaatcccacattagcatgctattgcactattgaaaccttggtgaaacttttcaaaatacgtaatcartgcctacatcaaacccacaccgactagaaaacccagtaccactccaagtggtaggaagcaggagcacagaaattattagcagaccaatgtcctgctcctgggggagtgygggcaaatcctattacaagttaagattaaccatcagtcagagaacttaccagtgtcgagatcaaatataaaagatgtatgttctgtgtcttctgtttagcaacctgaaattagctcgcacgggtggatggtgctggccaaatggcagcacatgtgctgggaatggaaatcagagtcggaacagaatcctgt

SEQ ID NO: 14143 - DNA, 600 bp, Chicken  19866894219075_2
caaagcagagagcactccgggtacagaggagaggtgggaagggacagacctcaccaacctggggctgcagctgcatggctcgtgtctgcttgctgacctgcacaagaaaatagcaacatggctcaaatcccacattagcatgctattgcactattgaaaccttggtgaaacttttcaaaatacgtaatcartgcctacatcaaacccacaccgactagaaaacccagtaccactccaagtggtaggaagcaggagcacagaaattattagcagaccaatgtcctgctcctgggggagtgygggcaaatcctattacaagttaagattaaccatcagtcagagaacttaccagtgtcgagatcaaatataaaagatgtatgttctgtgtcttctgtttagcaacctgaaattagctcgcacgggtggatggtgctggccaaatggcagcacatgtgctgggaatggaaatcagagtcggaacagaatcctgtgggataccccaagcaattttaaagcagctatcttattacctaggcaattttcagggacaagcagaattcagacccagccgacactgctctccggtcccaccttggtgaa

SEQ ID NO: 14144 - DNA, 600 bp, Chicken  19866894219077_1
ctctcatcccttgaagtggtttgagccaaatactgctgtgatgtaggaagttatttaaccagtgagctggttatatccttaggcatttgagtctgaatgaacagaaggaaaaatcatttgtattgagcccagccagttcacctaagaaaaaagcctcaactgaggagcacagcatattctgatgctgagaacttctgcgtggtgaagtcaagataagatgtactgatgcacagagtatagtatcactcagcaccatgtgagagggcagtgtatcattcaccaagataccatgaaaggatkgtgcacagtgcaacctggacaatgatctacaaggcaaaagaggaagaaaccataaagaataagctagccagcatgccaaataatcataaataaaacctgaggcatgatggagactcagtgtgtagtacaataccgcccctcactgaagttaggccagatgagcttggcaaatcagtagctaggaagaaagctctaattgtcttcattaaaaagatagctttaaagagtccaagatgtacttgaagcagtctcaagcgcttaacagtctgtataactgttacaaaaaatgcacaacctaat

SEQ ID NO: 14145 - DNA, 600 bp, Chicken  19866894219077_2
aggggaaaaacaggagacaacggttgtataggctaccttttccttcttgcatgtttccttcatttatttataaccctactgataagacttgactggacacagtaaagactggatttttatttgaggaaatgctgaagaaatactggctcaagtctctgtctccttcccactaatgatccactgatacatcacccagtgacttcccacactctctgctaggacttcattctcagtttgggatggacaggtgacagatgcagagtcttctgtgggataagttggcccacttgaagaagccaragatctggcatgcagatctgctcttgctgtgcactaactactcaccatttaccatctccttactccggtactactttaagccaaccattgtattttttttctatcagttcctatttttcagctgttggtaagagcattggagcagcacatgaaactatcctcagacctcttatttgtaggggacaggtgctcctatctcttggtttagaagaaccttaaacggattctcctaccatctcttcactctatcttgccctgcacacacagctcatggtttggagacagcatcttcagggtgtt

SEQ ID NO: 14146 - DNA, 599 bp, Chicken  19866894219083_1
  misc_feature (1)..(20): n is any nucleotide
nnnnnnnnnnnnnnnnnnnnaacccgggtgtctccaagtaccgtgatccagcagtgcaagctcatgtgggaacaggtgtccttcccatcatggggacaccggcaaggactttgcctgcaagatccttttcccaaactcagacacttaatggcaaccctacagcaggtccctcaggacccagagtcacagccctgagctccttgggaccagtcccccagctgggctctgaagagctctgaccacacaggccaaggctccctgccttcctccatggaggcacaccagcgcttatcctgcctsacaaatgtcctacaacaccctgatttgccttcagttaaccaccccctggatttctcactgtggatgttacctaagacatttgaaattttgcatgctttgtctcagacctttagcttcagtagccctccatgggcttgtcagtgctgatgggayggcatagctattgcaacagtaccatggcagaaagtgctgaagctcttccatgccagttgtgcagcagttaatttagatggcargaagcccacagtgtcctgttcctgtgtcctgtccaagaggcgatgacattttctgattgcaaa

SEQ ID NO: 14147 - DNA, 600 bp, Chicken  19866894219083_2
accctacagcaggtccctcaggacccagagtcacagccctgagctccttgggaccagtcccccagctgggctctgaagagctctgaccacacaggccaaggctccctgccttcctccatggaggcacaccagcgcttatcctgcctsacaaatgtcctacaacaccctgatttgccttcagttaaccaccccctggatttctcactgtggatgttacctaagacatttgaaattttgcatgctttgtctcagacctttagcttcagtagccctccatgggcttgtcagtgctgatgggayggcatagctattgcaacagtaccatggcagaaagtgctgaagctcttccatgccagttgtgcagcagttaatttagatggcargaagcccacagtgtcctgttcctgtgtcctgtccaagaggcgatgacattttctgattgcaaacatgatcctacgcacctcagagtcaattttagtcacagactaaattgtataaatctgctttcatagaagataaaatcttcctttgtacttttttttccccactgctcaattaactattgttttgctcagcatgttttaatcataagtaagttca

SEQ ID NO: 14148 - DNA, 592 bp, Chicken  19866894219083_3
tgaccacacaggccaaggctccctgccttcctccatggaggcacaccagcgcttatcctgcctsacaaatgtcctacaacaccctgatttgccttcagttaaccaccccctggatttctcactgtggatgttacctaagacatttgaaattttgcatgctttgtctcagacctttagcttcagtagccctccatgggcttgtcagtgctgatgggayggcatagctattgcaacagtaccatggcagaaagtgctgaagctcttccatgccagttgtgcagcagttaatttagatggcargaagcccacagtgtcctgttcctgtgtcctgtccaagaggcgatgacattttctgattgcaaacatgatcctacgcacctcagagtcaattttagtcacagactaaattgtataaatctgctttcatagaagataaaatcttcctttgtacttttttttccccactgctcaattaactattgttttgctcagcatgttttaatcataagtaagttcattaatagatgtgctctttggagccatgagggactctgtgatatgacggcattaatatttttgaataacatcatta

SEQ ID NO: 14149 - DNA, 600 bp, Chicken  19866894219085_1
cttaaaagttgaaaaaatttgagtgattttaccactaaactctgtaacaggaaaacattaaaaatagcaagggatattgctgagtgtttacttagaactcttgctgaattttagtgcccaaagatatttctagaaaaaaacacatatattaacatacagataaagctgttcatcagcaagagatggtgaaaatatacttagcattctacacagcctagaaaatttagagttattctaaccgttggaaaagaaccatattgtatcttactgccatgtcactgagacattcagaaaagcttrttgcttcccagcaaytacaatgtgaaggaaaaatattaaaaaaagaaatcyttaagaagccacagaatcaaagagcacttgaggttgacagatacctttggacagcatctagtccagcccattgttcatgtagagccagctacggcagagtgctcagagccacatacagtcagggtttgattatctccagtgatggagacaccactgcctctgtttaatttgtgccacaattgtgttggaccacccaacagtgagtcttaacagggttgaacagaaggaaaagatcatctcccttgacct

SEQ ID NO: 14150 - DNA, 600 bp, Chicken  19866894219085_2
aatttgagtgattttaccactaaactctgtaacaggaaaacattaaaaatagcaagggatattgctgagtgtttacttagaactcttgctgaattttagtgcccaaagatatttctagaaaaaaacacatatattaacatacagataaagctgttcatcagcaagagatggtgaaaatatacttagcattctacacagcctagaaaatttagagttattctaaccgttggaaaagaaccatattgtatcttactgccatgtcactgagacattcagaaaagcttrttgcttcccagcaaytacaatgtgaaggaaaaatattaaaaaaagaaatcyttaagaagccacagaatcaaagagcacttgaggttgacagatacctttggacagcatctagtccagcccattgttcatgtagagccagctacggcagagtgctcagagccacatacagtcagggtttgattatctccagtgatggagacaccactgcctctgtttaatttgtgccacaattgtgttggaccacccaacagtgagtcttaacagggttgaacagaaggaaaagatcatctcccttgacctgatggtaatgtcctg

SEQ ID NO: 14151 - DNA, 600 bp, Chicken  19866894219085_3
aaaacattaaaaatagcaagggatattgctgagtgtttacttagaactcttgctgaattttagtgcccaaagatatttctagaaaaaaacacatatattaacatacagataaagctgttcatcagcaagagatggtgaaaatatacttagcattctacacagcctagaaaatttagagttattctaaccgttggaaaagaaccatattgtatcttactgccatgtcactgagacattcagaaaagcttrttgcttcccagcaaytacaatgtgaaggaaaaatattaaaaaaagaaatcyttaagaagccacagaatcaaagagcacttgaggttgacagatacctttggacagcatctagtccagcccattgttcatgtagagccagctacggcagagtgctcagagccacatacagtcagggtttgattatctccagtgatggagacaccactgcctctgtttaatttgtgccacaattgtgttggaccacccaacagtgagtcttaacagggttgaacagaaggaaaagatcatctcccttgacctgatggtaatgtcctgcctaatgcagcccaggatacattggcttccctgctg

SEQ ID NO: 14152 - DNA, 600 bp, Chicken  19866894219091_1
acagagagcaggagagaggtggagagtaagcttcttaggagctcctcttaatgagctgtgtgaaaacccgtgtgtgtcaaactgcaggtttcagcattggagctgtttctgcatgattgtctgtaggtggctgaatagtgcctcaatactaaactcccagaaaccaagaattactttctcattggagaaccagaacttaatatctgatctccagctgcttgctctcttgcacctgtgtgctgccagcactcccatccacctgagtgcacggaatggtgttaaaagagtccatacaagtgrtagcactttgttgtacgatttacagtgtattagtgtgttagaaataaaagcgaatctatgtaatagtcacttatgttaccaggagtgtgggtttgcataagtactaagaaataaatcactcttaagtggagatttgatttccactccacctaaaaggtcatccatctgcacactagtcccttctaatttatttgccaaccctagaaataaaaatattttaaattaaatataccaattttgtaaatttattataaatttattagctctgatagctcagttcatagcttctgagtgcacttc

SEQ ID NO: 14153 - DNA, 600 bp, Chicken  19866894219093_1
attaggaacttgttgaggagtcagatgcgaaatgtacagacataattctgtggtggagctttaggctatagttgactaatcaagtctttgaaaagtgcccattaagtaaggactattgagaaagcaaagtgtcttcatttcaagttggatcagataattgttgtgaaagatacatctgaaactgcttttgaagataacgctgactggtgctatgttgcccccaaacgcagtttatatgaagcagaactggtactgaatgaactaggttacaagtcctaacatttactccaggaattgggrtgaggatgagtgcatttgtagttctgaacactgattgatcagagtaacttttttttattttttaatttaggcattacctgaaacacagatttccagctatgcagctacgctgcaccgaaaaaaaccactggtaccagctctttataaagtcattcaagacccaaataatgaggtaggagaattaaataaacgtttgtttgcagttgtatagcttccacctctataactaaatgtagagaacttggagaagaagattgtcctttctgatgtggtctgacaggagtactgtccctcttatta

SEQ ID NO: 14154 - DNA, 600 bp, Chicken  19866894219093_2
agtcattcaagacccaaataatgaggtaggagaattaaataaacgtttgtttgcagttgtatagcttccacctctataactaaatgtagagaacttggagaagaagattgtcctttctgatgtggtctgacaggagtactgtccctcttattattctcttcaatttcgacatccgcttcgatgcttttctgataaggcacaacctcatcttctccccagaatacagtttatactgcctgctaaattttagttgtcacatctgacagttacacttgactttgtgagttgcttctttggccrgaaagcacctttgaggtgcaacaaagtagggcttacggtgaaaatctgagaagcctaatgtgcatcttacccagtggcttattacagtggaaaaaagaattggtgtgtaactcactgcatgcagttaaaataagcaagtcttttgtttgtactagtatgatgtttgtgaaattggatttaagctcttgtaaacaagagcagaaacaggaccccaacatataaacatatacaataaaaaattctttcccttgtctatgatttattttgcaactgatgctaaagctgctttccattccagtg

SEQ ID NO: 14155 - DNA, 599 bp, Chicken  19866894219102_1
  misc_feature (1)..(77): n is any nucleotide
nnnnnnnnnnnnnnnnnnnnnnnnnnnnnnnnnnnnnnnnnnnnnnnnnnnnnnnnnnnnnnnnnnnnnnnnnnnnnttatgtgtatggttgatcagatatgaaggaaagagtcagtgagaacatctttttgccatgctaagttacattatgtataaatccattgggaaagtaggttctggcatttcaggcatgtagaattagacaggttcataagaaacaacagaaggccatttgtatatttgtgtccattacagatttgtctctatttcttgaagtcagtggttataactcagatttytttgtcttcatatatgacactgtgttggttgcgtggaagtttgggaaatcctggacagtgccaacttagattcaatactgcgctagatttagtttcttacttacctgaacctacatagctgtggagggaaaaattcctgtctgtctccttccatttcctctgagctagtcagaaaagcagatgtagcaaggcagggctgatacatgattatttgtttgtagagtctcttctgagatttgtgattgtagatgagaccactgtgtcattaaaccagtgaggcaaaaacaagtaaataaaaa

SEQ ID NO: 14156 - DNA, 600 bp, Chicken  19866894219109_1
acaggacggggactctggcaccagcaaagagacgctcttcaggttgctcctgcctcatgggagccatggctgaacggggtgaggggatacccgaggccagaacggtggcagtgctatcccacctccttccacccagcaggaggtgaagcacggagcttaggggcctcttgtgtgggcacagtgcaaccacactgctgtccttgatggttctccagccatccagctcaagatatgcatatgaaatgatggctgcctggccctactgccaccttgcagaaggtcacaaccatatgggcactyggagtttgctctgttacagttgtagctgttgtgctgtagcaaaacatgttccctgtcttttacagggccaggagtcaccaccctcaggtcccccagggaccccaaagaggaacagcttgagtggagcacagagccagggctgtatgagggcatcctcacatcacctatcattccctgcttccccaaaaccacctacccacaagaggaaggggagagctagggagtggggatagtagcatggtcccatctctgcatgttccactcctcccctcacctagcacagagaaggaaacaccaaaa

SEQ ID NO: 14157 - DNA, 458 bp, Chicken  19866894219109_2
agcaaaacatgttccctgtcttttacagggccaggagtcaccaccctcaggtcccccagggaccccaaagaggaacagcttgagtggagcacagagccagggctgtatgagggcatcctcacatcacctatcattccctgcttccccaaaaccacctacccacaagaggaaggggagagctagggagtggggatagtagcatggtcccatctctgcatgttccactcctcccctcacctagcacagagaaggaaacaccaaaacttgttttctctcctgaagtcccacccatggttttcyccccmcatgctcccacttgcacagctgtgttaagtacagtctcctctacaaggccaaacctctctcaagccattcagtggtgtcatggcatcaaggataattgcagagtttccttttgccccaccaaaggtcaccagcagccatagcacacatgctga

SEQ ID NO: 14158 - DNA, 453 bp, Chicken  19866894219109_3
aacatgttccctgtcttttacagggccaggagtcaccaccctcaggtcccccagggaccccaaagaggaacagcttgagtggagcacagagccagggctgtatgagggcatcctcacatcacctatcattccctgcttccccaaaaccacctacccacaagaggaaggggagagctagggagtggggatagtagcatggtcccatctctgcatgttccactcctcccctcacctagcacagagaaggaaacaccaaaacttgttttctctcctgaagtcccacccatggttttcyccccmcatgctcccacttgcacagctgtgttaagtacagtctcctctacaaggccaaacctctctcaagccattcagtggtgtcatggcatcaaggataattgcagagtttccttttgccccaccaaaggtcaccagcagccatagcacacatgctga

SEQ ID NO: 14159 - DNA, 600 bp, Chicken  19866894219113_1
ataacacttatttttggtaaaagatggcccttttctatgtatgtcacatttattttcacattaagagcatccacatgggaaattacacatcgaatcacagcaatgaaggtgcactgatacaactatattggtaaattgcttcatttagacaaagtgtacattttttcccttagtatataattcccctaaaatcactgtattatcaattttacttcaggggagaggtagctagaacaatttgcaaccgaagagactgtctcagctaaaacactacaagcatggcacactttgccaaaaagraggtgtctagggaacttttcctccaaagtagttctgaaactgcatatcttattgctacagcacagagagaatttcaggaataaaaaaagaagcgaactcacagttgtacacacagacacaaaaagatatctggaatccatcattctcctcctaattgacagctagttaaagccaaatgctctctgatccagttacatttgtagtttttggatgtctttattggcataagacctacaaacaccagccggtcataattagaagcacgtgaactggatgagattcagtttgccattaactttc

SEQ ID NO: 14160 - DNA, 600 bp, Chicken  19866894219122_1
catttatacagccagagttgacctagacttaaagtaacccttattcaaagaggtactccattgcttcttgctataaatacaacttttttttcccgatcaaggtcaaaaatataaaaatcctattaaatacatgctttgaaagtaatgcttcccatttatggaagaaattacaacaggtacaaagagcccaataacactatttgatagagcaaattctcagctgcaaaacaatatctttcaacatagtcaccaccatcatgtagataagctgatcaagatgctcgtcactgcatggtgtgmcagctgtgcatggccatgcagaatgtggcttgtcttttatgtcactgtttacacttctgaaatgcatcacacagcacttcactgcgctcacatgctctctttggtctccatatttattcagcaagcatgctgaatgtcagtgggtaccattttttccaygtgaaggaatttgacaacacccttttgctttatacgcacacagacaccattttctcmaactgcctccctgctgccatccatcacatggcaacaamatgtaacagaatactggtgggaaggtccagcctctactgccatacc

SEQ ID NO: 14161 - DNA, 486 bp, Chicken  19866894219122_2
ggaagaaattacaacaggtacaaagagcccaataacactatttgatagagcaaattctcagctgcaaaacaatatctttcaacatagtcaccaccatcatgtagataagctgatcaagatgctcgtcactgcatggtgtgmcagctgtgcatggccatgcagaatgtggcttgtcttttatgtcactgtttacacttctgaaatgcatcacacagcacttcactgcgctcacatgctctctttggtctccatatttattcagcaagcatgctgaatgtcagtgggtaccattttttccaygtgaaggaatttgacaacacccttttgctttatacgcacacagacaccattttctcmaactgcctccctgctgccatccatcacatggcaacaamatgtaacagaatactggtgggaaggtccagcctctactgccataccaccaacgtccacatctgatgtcatgggacgatatgataaaatagg

SEQ ID NO: 14162 - DNA, 429 bp, Chicken  19866894219122_3
tcagctgcaaaacaatatctttcaacatagtcaccaccatcatgtagataagctgatcaagatgctcgtcactgcatggtgtgmcagctgtgcatggccatgcagaatgtggcttgtcttttatgtcactgtttacacttctgaaatgcatcacacagcacttcactgcgctcacatgctctctttggtctccatatttattcagcaagcatgctgaatgtcagtgggtaccattttttccaygtgaaggaatttgacaacacccttttgctttatacgcacacagacaccattttctcmaactgcctccctgctgccatccatcacatggcaacaamatgtaacagaatactggtgggaaggtccagcctctactgccataccaccaacgtccacatctgatgtcatgggacgatatgataaaatagg

SEQ ID NO: 14163 - DNA, 391 bp, Chicken  19866894219122_4
atcatgtagataagctgatcaagatgctcgtcactgcatggtgtgmcagctgtgcatggccatgcagaatgtggcttgtcttttatgtcactgtttacacttctgaaatgcatcacacagcacttcactgcgctcacatgctctctttggtctccatatttattcagcaagcatgctgaatgtcagtgggtaccattttttccaygtgaaggaatttgacaacacccttttgctttatacgcacacagacaccattttctcmaactgcctccctgctgccatccatcacatggcaacaamatgtaacagaatactggtgggaaggtccagcctctactgccataccaccaacgtccacatctgatgtcatgggacgatatgataaaatagg

SEQ ID NO: 14164 - DNA, 600 bp, Chicken  19866894219133_1
cttactgttaaggccctctgaagcttggtacttgctgactgtgaaacagggtggccatttgtgccatcactgacttgcagggaaaggatcctctgagatacctgtggtaagctgactactttggtgtacctgtgtatgaaaaaaacactactaacagaatcttagtataaactcctacagaaagcaatattgtgcaaactgcttccctgatttccttctttcttccgtgtgttcctgattacacacattgtctttcagggaacattacagttactaagaactctaatgccaaccaaagtkgcttgctaacttctcatcaagggttagaccaaacccttgaagtttgtgaaccatgttagaacaagacaaaggtaaaccagtttcatgtatgttaataacctttatgaaacagataaagagataaatcaatattcacgtacagcagcacactgttagatcagttaaagagacaaaaacatcttaatttaaatgaggttgcaaaaaactgattcaataaattactacattcaaacagatagaatgctggctaaatggaacaaagaatcagactgattcatgaggcagacatcaaaaagaact

SEQ ID NO: 14165 - DNA, 600 bp, Chicken  19866894219133_2
gtgaaccatgttagaacaagacaaaggtaaaccagtttcatgtatgttaataacctttatgaaacagataaagagataaatcaatattcacgtacagcagcacactgttagatcagttaaagagacaaaaacatcttaatttaaatgaggttgcaaaaaactgattcaataaattactacattcaaacagatagaatgctggctaaatggaacaaagaatcagactgattcatgaggcagacatcaaaaagaactactttttgtcagtcttgtctttagagaatttcagcagaaatcaaratctaatcaccacagctttcatgtcccactggttcaaaaacaatttaaaaaaataccaccaaaatccttaatacctgagctaccttcaccaaaacaacagagtaggtaatgaagcccctgcattcaccttaagaaagtactatcatttaaatacttcttataaaaatatttctactcctgcacatagttgtggataactgacctttgagttgagagcacagaattattttagactgtagtagttagaaaaggtttttgaagtacattctaagtagtttttgaacaatagtactttttaaa

SEQ ID NO: 14166 - DNA, 599 bp, Chicken  19866894219136_1
  misc_feature (1)..(8): n is any nucleotide
nnnnnnnnatagcattcctaaaggcaatccattgaaatgaaatgaagcagttgctcggatctgttgcctgaaaataccaaaaccaaaatggagcatttacttctcccactcagtaatcaaactttcccatcaaaattttgtacagagtaatttaattttcaatgaaaaaaaaatcatttttcaagcatggctttcaacaaactgttgggttctggaaatgtttttgctcttaaaggagaagttctgccaaaacattctggctgacagctgaggttaagggaaaatgggctgatttttttyccccyttttttttgtgccatatgggcaaaatttttaaattcccacaattttctgaagattgcgatgaaaacttttaccatttttcagcaaacatattctcgtaagaacttcttatakctcacatatgagtatccctcagggaaagcaacgactgggggagtcaggtggggctgatgtcttccgtggagtttagtatgacccccctctgtgtgtgcaagtgtgcgttgtctggctctaaacctgtaacacaagtttttcctgcgttacatttttacccagaagtctttataaacccagaa

SEQ ID NO: 14167 - DNA, 599 bp, Chicken  19866894219136_2
  misc_feature (1)..(3): n is any nucleotide
nnnatagcattcctaaaggcaatccattgaaatgaaatgaagcagttgctcggatctgttgcctgaaaataccaaaaccaaaatggagcatttacttctcccactcagtaatcaaactttcccatcaaaattttgtacagagtaatttaattttcaatgaaaaaaaaatcatttttcaagcatggctttcaacaaactgttgggttctggaaatgtttttgctcttaaaggagaagttctgccaaaacattctggctgacagctgaggttaagggaaaatgggctgatttttttyccccyttttttttgtgccatatgggcaaaatttttaaattcccacaattttctgaagattgcgatgaaaacttttaccatttttcagcaaacatattctcgtaagaacttcttatakctcacatatgagtatccctcagggaaagcaacgactgggggagtcaggtggggctgatgtcttccgtggagtttagtatgacccccctctgtgtgtgcaagtgtgcgttgtctggctctaaacctgtaacacaagtttttcctgcgttacatttttacccagaagtctttataaacccagaagtatt

SEQ ID NO: 14168 - DNA, 600 bp, Chicken  19866894219136_3
caaactttcccatcaaaattttgtacagagtaatttaattttcaatgaaaaaaaaatcatttttcaagcatggctttcaacaaactgttgggttctggaaatgtttttgctcttaaaggagaagttctgccaaaacattctggctgacagctgaggttaagggaaaatgggctgatttttttyccccyttttttttgtgccatatgggcaaaatttttaaattcccacaattttctgaagattgcgatgaaaacttttaccatttttcagcaaacatattctcgtaagaacttcttatakctcacatatgagtatccctcagggaaagcaacgactgggggagtcaggtggggctgatgtcttccgtggagtttagtatgacccccctctgtgtgtgcaagtgtgcgttgtctggctctaaacctgtaacacaagtttttcctgcgttacatttttacccagaagtctttataaacccagaagtatttataaatrttctcacccatgtgatgcttctgtgtcctggtcatcggaatgctgagcgtgatcaggccttgcttcaattcaacaaaccctggctagcaacacatcagtgccacc

SEQ ID NO: 14169 - DNA, 516 bp, Chicken  19866894219136_4
tgtgccatatgggcaaaatttttaaattcccacaattttctgaagattgcgatgaaaacttttaccatttttcagcaaacatattctcgtaagaacttcttatakctcacatatgagtatccctcagggaaagcaacgactgggggagtcaggtggggctgatgtcttccgtggagtttagtatgacccccctctgtgtgtgcaagtgtgcgttgtctggctctaaacctgtaacacaagtttttcctgcgttacatttttacccagaagtctttataaacccagaagtatttataaatrttctcacccatgtgatgcttctgtgtcctggtcatcggaatgctgagcgtgatcaggccttgcttcaattcaacaaaccctggctagcaacacatcagtgccaccacgcaggcactacagaacttgctgtctgtttggacaggagctatcagccgcctcgagaaagcctgacacaaaacactgctaaacatttcaatacctgctagtccacctacc

SEQ ID NO: 14170 - DNA, 600 bp, Chicken  19866894219141_1
taaggcaataaagaatgtctttgaggactcagctgttcccagctgtttatcccagaacgcattttccattacatttattttgttactcttgtaattaaacaataacctttgttatttgaggtaaagacttccaattacatgtttccaaaaatgaatttgaattttcccaggttcaagtctgctgggaataagttcagttcatgattttcagtgctcccatattacctccaaaacttcaggttcttctcaaactccatgaatgtcatctaccacagctttgtaccaaattaagacaactaraattaatatataatatgcacacaggaacatttctctattgctccatgaagaggacagtgaagaacacatgacaactgctcaggaagatctacttggaaataatatctacccaactgagttaagtctgctccatccttcttgggtatcatcaggaaaaggcaaatggaagcagaatgggaaatatgaaaacactcatgtgaggctatacgcacaagactacaaacataagtaccctcaaattcaccttaacgctatccttcaatatttttttttttaatctgttgcttgacagcatctgaa

SEQ ID NO: 14171 - DNA, 600 bp, Chicken  19866894219143_1
tacagtgcttttgaaagcaagggtattaacatccaacctttagatacagtcttatgtaagaacactttaactgactatatcctgttgcttcacattggttaaaaaacaccagggacatgctgttcttggtacttcataacagactgctcttattagagaccttctttttcacatttcacaatttttatagtggccaacagcaaaagaggtacagatagtagtaataaagtggtgataatagtgataaccagctcttacctaatgtctttctacatttgatttcaaagccctgttaaaagrtacacatgatactcttcatgatacagctgaaaagcacaaaccactgtggcaaagacagatataatgctaggatatccttagatcaagtcctgtttccttgactcctctaggtcttgctctagaataaatacatgacaataacaatggtaagaaagcaatgataacattatgatctgcaggtagtatttaattttttttatgttttataatattattgattcatagaataattgagtacctacaacatgttaaagcatttattattgttgacttttataataattacatcatgtttgagtt

SEQ ID NO: 14172 - DNA, 600 bp, Chicken  19866894219146_1
attacagaattcattaaacagtcctgggtttgttttgaaacatctacatgattatgcactgcagtaattcattaagagcaagagaagtgttggcaacatcttttcactgacctttgaaaattactaagtgagaactagcttgcagttgcaattctagtggagtataaactggcatgacttttgttagaagtactccagcagcaacaaaatgcatttccatctcagagtctgtcactctgacctcatagtgtcaagcaatgaatatcatctgtgagatcaactttgggaaaaaaaatcctratttctttggttgcttttgggctgttcttggatatagccatttgccattcaaaagctctttttaaataggatgtatgtatttctttgtttctctctatatagcttcttaggcttatatagaaataaaattttcttctaatatggcatttgttatacatggagactgaggtgaacgagatatcagaatacctactgcgttgctaagattcattatgttgatggtttcagtactgtacttggttacattaggataatcctgaagtactacatagaattattttgatttatttagggattcca

SEQ ID NO: 14173 - DNA, 600 bp, Chicken  19866894219149_1
aaggagaccaggtaggcttctaagcaaagtaggtcagtcacatagaagtcatacatagattttcctcaggtccaaagcgagagcactcatttctacttgtatgagtgtggcccattgctcacacttttaaaatggatatttccatatcagtactcacccaaaataatgtttaattcaaaaatccagatgcagcctcaccagggagggaggatcactttgctcaacctgctggccatgtgctttttaatgcaccctgggataccactgactgtcttggccacaagggcacactgctggctsacagccaacctgctgcccaccaggacatccagatccctctctgagatctctccagcagctcagcccctaatctttactgatgctacttaaacaatgttatttaaagagtgtacctgcataggaaataaataatgtgtaccctcagtctcttaggagaagtgttaacttttatgttaattaactagttcatctgcaaaccgtggggaaactaattatgtactggaagaataagtgctgttattcacacaaaacaaggtagatgaatctttgctttgagttcagaattgattgaagccctaa

SEQ ID NO: 14174 - DNA, 600 bp, Chicken  19866894219157_1
acctttgaaccaagccctgcaaggcttcatgaaaggaaggcagcttgggcgaacaccttttgaattagctgagcagtcctgtagccttggtttgttgctgtcctgaactattgtgtggtgttgtttgtgtgctgtcgcaattatttcatttcaccccagacggtgaagaaatctttgtgtgtggttaatattgctgcatagatggaataatacgagagtgctaacaaagaacgtaggcaaacccatctgttccttgtgtgcgatggaagcacagctttcctgtctgaagagagatttgcwgctgattgtcagtgggttattagagctgagggctgaagcacaggttgccattaacagccatcctctgcctgctctgatcctgagcttcttccagttggctaaatggagagcagctccaaaatcagcagaatgctggtacagtacaagcacacagagccttagttttgggaggatggcatcctagccagtgttgttccaaaagcagggacttctgtgccaggctgcactgcagcatctcacagatgcagggaaggccttctaagtcagcatcccttcagctgaaggtcaatcttcagtgtg

SEQ ID NO: 14175 - DNA, 600 bp, Chicken  19866894219160_1
tcagtgcttgtgtacaatggagagtttgaactgttttctctttgtactttgttaactttattgtttcagcaacaaaggtgaatgtgataacaagaaagaaattcagtaataaggcactcattcttgctatgtgaattcctgtaaataatttgggtcttgttttttaactaaaattttaaggaatagcagtgagttgtacaccagattcctttctttgattttttttccaggtttggaaactttcagtcagttggttcatgaagatgattatggaagtgtaagtatagatgttaactgaawacacagtctgataagagacagccacattctgtattaggtatttttcaaggagcagtagatctgcaagtttcattaattactttttcagaaaataacatttggaaagctgttaacaaactgggaaatattttatgtttgtaacgatgaacataaattgggaattctaattctcacatctcatttttatagtttcttatcaatgaatccgaaatctatgacttcccgaggtttgcacacagaggaatcttacttgacacttcaaggcactatttgccattgaaatctattctcacaaacctg

SEQ ID NO: 14176 - DNA, 599 bp, Chicken  19866894219166_1
  misc_feature (1)..(11): n is any nucleotide
nnnnnnnnnnnatttggtagaggctgcaagaaataacgtcttttcttttcatttgcgttcttatgcaaatgaatacccactaacttttattttctctgtttcccaattgtcatgcaaagcccgtcgccctgcgctgcgtctcctctggccttcctccctctcctcctcctcttcctcctccctgaggtgattcggtgctgtgcccatagcgttgcaggacaactcgcagcagaaggctgcattgggcagctctgcagtgacccaggactggcgcaggtgtcagctttgtgacccagaccygagccagtggggatgagagcttttggagcccaaagagcctcagtccccactcagatatctgcacgtacaaggagtctgagtcaagttacagcgtgcgcgcgtcgctgggaggtttggggatggaaatgggagcacyggagagctccctcccgtcgcatccagcagccggcagctcgctgtgcagcccggtgcctgctccccgctcacagccctgccagcagccggggtgacaaaggacgtgggcacactgctggcagcagagccggcacggccctttgttcagccctcgccccgcggag

SEQ ID NO: 14177 - DNA, 600 bp, Chicken  19866894219166_2
cgtctcctctggccttcctccctctcctcctcctcttcctcctccctgaggtgattcggtgctgtgcccatagcgttgcaggacaactcgcagcagaaggctgcattgggcagctctgcagtgacccaggactggcgcaggtgtcagctttgtgacccagaccygagccagtggggatgagagcttttggagcccaaagagcctcagtccccactcagatatctgcacgtacaaggagtctgagtcaagttacagcgtgcgcgcgtcgctgggaggtttggggatggaaatgggagcacyggagagctccctcccgtcgcatccagcagccggcagctcgctgtgcagcccggtgcctgctccccgctcacagccctgccagcagccggggtgacaaaggacgtgggcacactgctggcagcagagccggcacggccctttgttcagccctcgccccgcggagctgcagcctcccagcctttgcattttgatgccggcgcctttcttttgcattgaccggagtttatcacatatctctggttgggatcctgcctagcttagcataagacaaaaatgagaaggagggaaaaaaaaaaaaaa

SEQ ID NO: 14178 - DNA, 599 bp, Chicken  19866894219174_1
  misc_feature (1)..(76): n is any nucleotide
nnnnnnnnnnnnnnnnnnnnnnnnnnnnnnnnnnnnnnnnnnnnnnnnnnnnnnnnnnnnnnnnnnnnnnnnnnnngtgatccatcagaagggacgtgctgctaatcagcatgaaaccgacacacgtcacatccccacagagcacaacacagtgcagaacagctccgcagagaaatgctttctggggaggggacctggacacgcagctcttcccttaggcctataggtccacctcagcctttctctcatacttaccccattggtgctgagatccataaatgttttctcttttgctccctmatcgccacacaaacgtcccatttttaagtgaaaaaagatagaagcaatcttttatatcctctatagctgaagctggagtgctcctttaccaggaaatggtttcttgttatcagaagatgacatcattattttacagtaaaagcctcagccctattttattttttttcagtcttcttttcttcccccatcatcttggaaacagaactcacccagtagcttgcaaagagcaataactacagaaagatggtttggctctgtctcctggagacaggcactaccaacatagcatcactgacgaa

SEQ ID NO: 14179 - DNA, 600 bp, Chicken  19866894219174_2
agagcaataactacagaaagatggtttggctctgtctcctggagacaggcactaccaacatagcatcactgacgaagttaagacaaacttccttcccacagtcacctgcagcttacagtgccattcacagtggaagagcagcctgctttgaatgcaggggattacgtttcatccacacctttctggcttcctccccactaaagttaaccatactggctctcttatgtcacccactctacctgtaagagcatataacacaactgtctcattgctgggctaatacaagagggcaagctgtgyctctctggaaaactcccagaggaagagggataagttgtctttgcacttctctcaaaataccctcccctccttcaaagcaatgtacccaagggtggggaaaagcccttatatcacttacataaggtaacataagtgtgagaaagtgctttaaatggcccttattccccaagaaccaaaggatactgggggccggggggaggatgtgacagcctgcaacagaccgtgggaatgaggaaggccattagggacagatgtgaactactgtagcatcaccccatgcaaagatgcaccagcctgctc

SEQ ID NO: 14180 - DNA, 600 bp, Chicken  19866894219178_1
atttggcacacaacgttaccgagtcagatgtttgttccttttttggtgcttggtgtttgtgttttgcctgttgctttgactcacactctcgctttagtaaagacttgttatactgttgtcatgtacggcgttcacagatttatgccacaggattgaactttagtagccagaaagtctcagctttactccttatggcaggggctgctccctgctacaagctttttctctttccccggtagagaaatgagcccaactggcaatatcccagaagtgctgtggagtcttgctgcattgctaagycacatgcgcyttttggtggttgatgatctgcccccttctaaccttgccaacaagagtctttctgttgacttcagtgggagacaacagaagctacaaagagtggaggctgaactctccgtgtaaggaggagctgcaaagcaagcgaggtgatcacattctgactagtcttagcaaaatccaaatgaaatccagaggtttccaaagcttataaaaattgagggagaatcactagtcagaattaatggcttcagcttttacattgcttgcgttgcaaagcagtcctggctggtttttctgcat

SEQ ID NO: 14181 - DNA, 600 bp, Chicken  19866894219178_2
caacgttaccgagtcagatgtttgttccttttttggtgcttggtgtttgtgttttgcctgttgctttgactcacactctcgctttagtaaagacttgttatactgttgtcatgtacggcgttcacagatttatgccacaggattgaactttagtagccagaaagtctcagctttactccttatggcaggggctgctccctgctacaagctttttctctttccccggtagagaaatgagcccaactggcaatatcccagaagtgctgtggagtcttgctgcattgctaagycacatgcgcyttttggtggttgatgatctgcccccttctaaccttgccaacaagagtctttctgttgacttcagtgggagacaacagaagctacaaagagtggaggctgaactctccgtgtaaggaggagctgcaaagcaagcgaggtgatcacattctgactagtcttagcaaaatccaaatgaaatccagaggtttccaaagcttataaaaattgagggagaatcactagtcagaattaatggcttcagcttttacattgcttgcgttgcaaagcagtcctggctggtttttctgcattaggataaaa

SEQ ID NO: 14182 - DNA, 600 bp, Chicken  19866894219179_1
ggtgcgtggggatcctgaatttattcagaccttaaaaattgtggccacatatgtcatttttcaccaggttgaccttttcagcagacaggtcattctgacacagacaaggaagaagcagcagggccacctgcgccacccatcccaggagctgcgggctgcacgcgctgcgccggaggtggggaacgcgtgcagaaaggagcgcatcgctgcagaactgctttgttctcagcttccctgaacgcccaacacagacgagcacacaaactgctcgagtcactgcacactgacaaattctgggarggcagcagtatcccttctttaaaaaaaaaaaagacaaaggaattccacactgtggaatccttcctattcccagcagtttctgtcagtgttctcactgcagggtcaggctgcaggccgggtgctgcctcggttccctgcctgccttcccaggctcgaaggccaatgggagctttcagaggagatgctgcagctggagattcaggaggtgacaggcaggcacgtgacgaacagacctgccatatatccaccttggtaggccatgggctacacgcttccattccgtaacaatttcagttggaa

SEQ ID NO: 14183 - DNA, 600 bp, Chicken  19866894219181_1
accgctgcacagtgatttatcttcttggtgtcaccaactgttctcgatcttgaaatatattttaattgtaggcgacctttaatttatttcatttcttatttctaagattccaataaaaagctaaaaggtgaccgttccagtctggcccacatcctgaacattttcatccaaaaaattcccacacatctaaattgaacaagctgtggatagaaagaacctcttttctgttggaaagccatcaaatgcaactctacgttagaaccaaactaactctgaagttttagaaaaaaagatttattyccacgtttttcttcaccatttgacaatctttatatttaaaatgtaagtatgtgaaatacatggaaaaaattaaacagctgtgtagtcactgattgtttcctggaaagtatctggcagacaggtttttgctttcattccttgctgtcccataactttattccactcaaagtgcaaaaaacccacagaagtatctcaaaacaaagagctcttcctggtagttgaagtgatgaacagcttcctacacacacacacaaaaaacaacacagtgtactttgtcatttcagactttattattttgtt

SEQ ID NO: 14184 - DNA, 600 bp, Chicken  19866894219183_1
gttgagcctaaaggaaccatctcctcctgcaaagaccttgtggctacccaaatgagccttaattaagccagctattaaactcaaaaggaaatacctaacaggcagacagagcaaacccactgattaaaaataatgggttcgtcttcatctggtacaacttagtctggctctgtggacaacatactgaagtgcactgattgataacagctgaagatccactccaacattcttctaactcagatggctgccataaaacacagcaggaaaccctcctgctgcccccatcactgcctgggtgartgccctgagcaattcgggcactgctctgcaggcacagccatggcctggggctgtctgcagtgcccataacttgcatgcttcccttgcagcgtgaccctgtggacgaaagtgagaggtgagcagcagcactgcctgaaccccaaacgccagaacacagtgaggctgctcaagtggtaccgagtatggaaggagaagggcaggtaagagaatgggcacacgctgccggtgctgcatccagcacaggggatgcgtttcattgccaaaattataagtagaaacggatgctcatgatgcaatttc

SEQ ID NO: 14185 - DNA, 600 bp, Chicken  19866894219187_1
aatcccccaggagctgagctgaggctggcaccacagggaattatcccagggtgttcgatccttgctttgtttcttctctggcaatcctcattgtcagggcaggagcagacaggaatgtcagccatcccacagggatgcccaatgggctgggaagggatgctgtgcagccagcaggaaggttggggctgtttcttagatggcaacctccacttctaatactcaagttgtctttaattggtaaaaccctcttttctctcaccactgtactgcctttctgcctcttccctttgagttccgggyactttggaagctctctgtgccctgcagagatgtttggtctttccatctgtgcatgcaggagggtcggtgaggctctgccagctctgggttcacactgggatgggactgatgaaggtcagcgtgctgcgtgctagactgggggtgcagggtcagccccatggctgcttctcccaggcagggatctgttggatgggctctgttgtctggcagcagcaytattgcagctgcttggctcctttgagtcaggccagcaccagccacaaactccatgaaccaagtccttgcattccctatcacatc

SEQ ID NO: 14186 - DNA, 600 bp, Chicken  19866894219187_2
tactcaagttgtctttaattggtaaaaccctcttttctctcaccactgtactgcctttctgcctcttccctttgagttccgggyactttggaagctctctgtgccctgcagagatgtttggtctttccatctgtgcatgcaggagggtcggtgaggctctgccagctctgggttcacactgggatgggactgatgaaggtcagcgtgctgcgtgctagactgggggtgcagggtcagccccatggctgcttctcccaggcagggatctgttggatgggctctgttgtctggcagcagcaytattgcagctgcttggctcctttgagtcaggccagcaccagccacaaactccatgaaccaagtccttgcattccctatcacatccttcccagcagtgctaaggcaccacgttttggagagctttgccctgaccccactactaacacatctcctgcacgcagcctggatgcttcctccctcctggctgcgttacagagctcggcccccccaaactcctctgcatttgctccatcacccacccaaactgccccttcaccggcacaggcagccgggagcagctcgggtaccacagggcgatac

SEQ ID NO: 14187 - DNA, 600 bp, Chicken  19866894219194_1
cccttgtaacatagtctgtgaagccagaagagtaaaagcaataaggtattaatagttcactttttcatgcagccatttctgttataagaaaatgtctttaaaattgaactaggggtatttctgcagttgtaaaattctccagaacttccaggcattgggttttgttctattgcttggaaacaataaatacgaatgaagctgagccttatgcttttagctgatcagaaatactccctcttcagctataaaactggttttgctattccatatcctctcgttagaaggaccaagaaggctgcrgagtcatctagcttttagattagggcatagcacaytttccttgaacagggtgaaaaggaaacaaggtatgttatttacagtccttcctgragcagagcygtgcgcttgtcatgagagcagaaatgagctgggggtgtgcactgattccagtgttggtttttctgcatggagtgtggtcacagcatccatccctctcagtcccaaacaaatggcgctcacctgggcacgttggcacctgcagcacagctggctggcattgcaggaaggatggtgcgcaggtgataccatgctgtccccacc

SEQ ID NO: 14188 - DNA, 600 bp, Chicken  19866894219194_2
aagcaataaggtattaatagttcactttttcatgcagccatttctgttataagaaaatgtctttaaaattgaactaggggtatttctgcagttgtaaaattctccagaacttccaggcattgggttttgttctattgcttggaaacaataaatacgaatgaagctgagccttatgcttttagctgatcagaaatactccctcttcagctataaaactggttttgctattccatatcctctcgttagaaggaccaagaaggctgcrgagtcatctagcttttagattagggcatagcacaytttccttgaacagggtgaaaaggaaacaaggtatgttatttacagtccttcctgragcagagcygtgcgcttgtcatgagagcagaaatgagctgggggtgtgcactgattccagtgttggtttttctgcatggagtgtggtcacagcatccatccctctcagtcccaaacaaatggcgctcacctgggcacgttggcacctgcagcacagctggctggcattgcaggaaggatggtgcgcaggtgataccatgctgtccccacctgcatatctgctggggctggtagggggtgtgctta

SEQ ID NO: 14189 - DNA, 600 bp, Chicken  19866894219194_3
aatgtctttaaaattgaactaggggtatttctgcagttgtaaaattctccagaacttccaggcattgggttttgttctattgcttggaaacaataaatacgaatgaagctgagccttatgcttttagctgatcagaaatactccctcttcagctataaaactggttttgctattccatatcctctcgttagaaggaccaagaaggctgcrgagtcatctagcttttagattagggcatagcacaytttccttgaacagggtgaaaaggaaacaaggtatgttatttacagtccttcctgragcagagcygtgcgcttgtcatgagagcagaaatgagctgggggtgtgcactgattccagtgttggtttttctgcatggagtgtggtcacagcatccatccctctcagtcccaaacaaatggcgctcacctgggcacgttggcacctgcagcacagctggctggcattgcaggaaggatggtgcgcaggtgataccatgctgtccccacctgcatatctgctggggctggtagggggtgtgcttagactttgtggtcaccaatccacatccgctgccatcttctgtgtgtgatgaaagtg

SEQ ID NO: 14190 - DNA, 600 bp, Chicken  19866894219194_4
aaaattgaactaggggtatttctgcagttgtaaaattctccagaacttccaggcattgggttttgttctattgcttggaaacaataaatacgaatgaagctgagccttatgcttttagctgatcagaaatactccctcttcagctataaaactggttttgctattccatatcctctcgttagaaggaccaagaaggctgcrgagtcatctagcttttagattagggcatagcacaytttccttgaacagggtgaaaaggaaacaaggtatgttatttacagtccttcctgragcagagcygtgcgcttgtcatgagagcagaaatgagctgggggtgtgcactgattccagtgttggtttttctgcatggagtgtggtcacagcatccatccctctcagtcccaaacaaatggcgctcacctgggcacgttggcacctgcagcacagctggctggcattgcaggaaggatggtgcgcaggtgataccatgctgtccccacctgcatatctgctggggctggtagggggtgtgcttagactttgtggtcaccaatccacatccgctgccatcttctgtgtgtgatgaaagtggatttttct

SEQ ID NO: 14191 - DNA, 599 bp, Chicken  19866894219204_1
  misc_feature (1)..(176): n is any nucleotide
nnnnnnnnnnnnnnnnnnnnnnnnnnnnnnnnnnnnnnnnnnnnnnnnnnnnnnnnnnnnnnnnnnnnnnnnnnnnnnnnnnnnnnnnnnnnnnnnnnnnnnnnnnnnnnnnnnnnnnnnnnnnnnnnnnnnnnnnnnnnnnnnnnnnnnnnnnnnnnnnnnnnnnnnnnnnnnnntttttatatgctgtgctttgagagcacttatatgaagtgctcatcaaaatctcaaatgtgtaaactggagtttaattgctatatttgatgctaccactctttaaaaagaaattaagcaggcctrcatttttttccagtggaaaatgctacaatctgcagaacagtacttctctctttggctactgtaccatttacttgcttgttttggtgtggcgtatgttcagaggaaggaatgctaataaaaatgttcacacttcttcttttcaccttgaactctgacaggctcaacagcaagcaactttatttggcttaatcagcactcatatgcccacattacaggaatacagaaccacgagtcctcctcttgcctagcctgacccagtcctagcttcaatgaaaacagttcagacatttggtctttgc

SEQ ID NO: 14192 - DNA, 600 bp, Chicken  19866894219204_2
ttccagtggaaaatgctacaatctgcagaacagtacttctctctttggctactgtaccatttacttgcttgttttggtgtggcgtatgttcagaggaaggaatgctaataaaaatgttcacacttcttcttttcaccttgaactctgacaggctcaacagcaagcaactttatttggcttaatcagcactcatatgcccacattacaggaatacagaaccacgagtcctcctcttgcctagcctgacccagtcctagcttcaatgaaaacagttcagacatttggtctttgcaaagctcrtctgaatcaaagtggttataggactgggggtgaagagagaggggcacactgcagccatggtgcacagaccacaggatggggacacagcattctggctgtcctcacccccaacctccccactgcagcctggggagtggaatatttgtatctctggctcttgtacaatctttatttacagactgaggagggaggcagcaaactcctttgccaccatgactcacgcaagtcctcagccagggctattcagagggctcagcatcattgcatctcaggtctgagcagagtagcaaagagcagagg

SEQ ID NO: 14193 - DNA, 600 bp, Chicken  19866894219205_1
tatctgggaggatgcaagaagcgtgaccataactgatgtgagaggagtaagagtgggaaatcacgcagcccatgcctgttccccagctcactaaaaaaaaatgccttatgcaaaaaaatctaaacgatagcaatcaccaggtccctgaagacaataggtaagcagctcaatataagcagtagggataaataacaagctggctttgtcaaatgctttgagatcttgaggtgaaaagctctacctaataagcccgaagcattcgcgttatatttatgatcattgtgattaaagtgaagaaasaccccaatatcaaaatcccaagataaataaacaaaaaacaacactggagcagcatcatgaagcagattgcctcttcaccccagggccgcagggggctgtgtcccrcctaccaccattcctgccttgtccccaaggatggggaggtmatcggtgggctacagtggtggcttgtgacatcccaaatacagtggtcaatgctggatgcctccatgaaagtggtgaagccactatcatggggcagccagaaaggtggttgtggtaagcagcactcctggaggatgggcgaatatcttcacggag

SEQ ID NO: 14194 - DNA, 600 bp, Chicken  19866894219205_2
ttatgcaaaaaaatctaaacgatagcaatcaccaggtccctgaagacaataggtaagcagctcaatataagcagtagggataaataacaagctggctttgtcaaatgctttgagatcttgaggtgaaaagctctacctaataagcccgaagcattcgcgttatatttatgatcattgtgattaaagtgaagaaasaccccaatatcaaaatcccaagataaataaacaaaaaacaacactggagcagcatcatgaagcagattgcctcttcaccccagggccgcagggggctgtgtcccrcctaccaccattcctgccttgtccccaaggatggggaggtmatcggtgggctacagtggtggcttgtgacatcccaaatacagtggtcaatgctggatgcctccatgaaagtggtgaagccactatcatggggcagccagaaaggtggttgtggtaagcagcactcctggaggatgggcgaatatcttcacggagagggcatgggtgagtaaatttcttcatggaaaaggcaaggatgagtaaatctcttcatggaaaagacaagaatgagtaaatctcttcatggaaaagacaagaatg

SEQ ID NO: 14195 - DNA, 600 bp, Chicken  19866894219205_3
gaagacaataggtaagcagctcaatataagcagtagggataaataacaagctggctttgtcaaatgctttgagatcttgaggtgaaaagctctacctaataagcccgaagcattcgcgttatatttatgatcattgtgattaaagtgaagaaasaccccaatatcaaaatcccaagataaataaacaaaaaacaacactggagcagcatcatgaagcagattgcctcttcaccccagggccgcagggggctgtgtcccrcctaccaccattcctgccttgtccccaaggatggggaggtmatcggtgggctacagtggtggcttgtgacatcccaaatacagtggtcaatgctggatgcctccatgaaagtggtgaagccactatcatggggcagccagaaaggtggttgtggtaagcagcactcctggaggatgggcgaatatcttcacggagagggcatgggtgagtaaatttcttcatggaaaaggcaaggatgagtaaatctcttcatggaaaagacaagaatgagtaaatctcttcatggaaaagacaagaatgagtaaatctcttcatggaaagggtaaggatgaatgaatttc

SEQ ID NO: 14196 - DNA, 600 bp, Chicken  19866894219207_1
ccatattgtgatcaaaagcatacagcaagattagtgatcatctgtagctcagctgttatttttactgggttatcaaagctctggggaggattttgtaaagctatttagcctgaaggaagggattaaagaggtttctcctcgtgaaacatctgttgcaaacgtaccttctaatattcagagccgaaagttaaaattaatcagaaaggggaactttctttcctgttcagcagccatcccatgggccggtcaccgtttccttctttgcccaaaacagaaactgcccccactgctgtatagcaraagacttctctggatgctgtgcccctcagtccttaatgggatacttcacatttttcattaagctcccttccctttcaccaactaatgagaaaccggacttgaagtggctgttacagtcagaaaggccaaccacccgtgatcttctcttcattccctgattctcagactctaaactcatgcttttgtgatatatgcatgtagactgatgttttttgcaaacaggtacctgaaggaacagcacctgatcacggctactttgaccaacagaagctgagtattttcccaaatggagcccattat

SEQ ID NO: 14197 - DNA, 502 bp, Chicken  19866894219209_1
attaaaatccagtttcatcctcaacatgatgaaagttttaaattaaattgtcctcatccttgatcgagtttaatgtttttggtctatcagtgtttcccagacaagccaagtgtcacattgaggcatgatttgcatattcatgaaataatttgtattcagaagcattgtttaatgctttttggacagtttttcatactaataagtgtttaactcaagagactatgcaggtaatctgaaaaatgaaagtctatcacaatgttaacaaaatattacatttaagtctaaaataaataaatgaaytctgaattaatgcttttkttttatcagagaagctaccagcacagcaatggaatatacctttacaagaaaataattaggaatgcccttctttctcagagacatgtttattttcttctttatgtagaggaaatggacctgggggtgttgattgatgctagactgaacatgagccagcagtgtgcccaggggtcaagaaggccaa

SEQ ID NO: 14198 - DNA, 484 bp, Chicken  19866894219209_2
cctcaacatgatgaaagttttaaattaaattgtcctcatccttgatcgagtttaatgtttttggtctatcagtgtttcccagacaagccaagtgtcacattgaggcatgatttgcatattcatgaaataatttgtattcagaagcattgtttaatgctttttggacagtttttcatactaataagtgtttaactcaagagactatgcaggtaatctgaaaaatgaaagtctatcacaatgttaacaaaatattacatttaagtctaaaataaataaatgaaytctgaattaatgcttttkttttatcagagaagctaccagcacagcaatggaatatacctttacaagaaaataattaggaatgcccttctttctcagagacatgtttattttcttctttatgtagaggaaatggacctgggggtgttgattgatgctagactgaacatgagccagcagtgtgcccaggggtcaagaaggccaa

SEQ ID NO: 14199 - DNA, 600 bp, Chicken  19866894219213_1
atttactcatgttactgaggcttgttcttcctgaaatctatttgtgcctctcttgcataggattgccaggaccttcaggcccaccagggagaccaggatcttcagtatccacctcaggtaggctcttcagattcattccctaccttgtgccctgagaatgtcctgtttgttttggttccagtctgtccttggttatgaacagatggagccaaaggaaacttgtatcatgtcctgttgtatgtcataaggaaatgtttttgtttcaattacagaaacatttgtctccggtccaccgggtcyaccaggtccaccaggaccgaagggagaccaaggtgagtcccactgcctcaccaagatactgggtgagtgacaacaccacaggctgaaaagaaggaaggaagggcttggaggcagaaactctcctgcctttctgtgcctataagaatgatcactaagtaggactcctgtctgcttccataaaaaaaaatcattttcaaagaaatttgttagtctatagtactggtgtcaaggcagttgctctattcagatcccagctttgtaacatgcaggagcattcacaacttcaaatttgccattaaa

SEQ ID NO: 14200 - DNA, 600 bp, Chicken  19866894219213_2
caaagaaatttgttagtctatagtactggtgtcaaggcagttgctctattcagatcccagctttgtaacatgcaggagcattcacaacttcaaatttgccattaaaggggatcaatggggaacaatctttttgcaaaatacaacatggacttggtaagtcaatgtaaggaggtggccctgttgggcatagctcagctcatgcctggcaggaagaaataggatctactcactttacccacttctgccttgcaaattgaaggccatgagagtattccgaagtgtgggctgaaatgctgttaygaatcagagcaaaaaaaaatgctaacaatgcacctctgcttccctgttcacaggygaaccaggtccacgaggattcacaggtaaggaggcttccaggggttgttgttgaggtgcagtgtagtttgtgtatatgacacctcttctttttctgtgtcccgtgcaggtgaaccaggtgaacctggccttccaggattctcttcccatggtcagtccatacactttttcctcatytgaatacattgtccataagctgaagccaggggcaaaatctaactcagttttggtggagccagaattttg

SEQ ID NO: 14201 - DNA, 600 bp, Chicken  19866894219213_3
cccagctttgtaacatgcaggagcattcacaacttcaaatttgccattaaaggggatcaatggggaacaatctttttgcaaaatacaacatggacttggtaagtcaatgtaaggaggtggccctgttgggcatagctcagctcatgcctggcaggaagaaataggatctactcactttacccacttctgccttgcaaattgaaggccatgagagtattccgaagtgtgggctgaaatgctgttaygaatcagagcaaaaaaaaatgctaacaatgcacctctgcttccctgttcacaggygaaccaggtccacgaggattcacaggtaaggaggcttccaggggttgttgttgaggtgcagtgtagtttgtgtatatgacacctcttctttttctgtgtcccgtgcaggtgaaccaggtgaacctggccttccaggattctcttcccatggtcagtccatacactttttcctcatytgaatacattgtccataagctgaagccaggggcaaaatctaactcagttttggtggagccagaattttgtccacacggtttgtacctttgaatttatgactctcctttgtacttgacaggtggt

SEQ ID NO: 14202 - DNA, 600 bp, Chicken  19866894219213_4
ttacccacttctgccttgcaaattgaaggccatgagagtattccgaagtgtgggctgaaatgctgttaygaatcagagcaaaaaaaaatgctaacaatgcacctctgcttccctgttcacaggygaaccaggtccacgaggattcacaggtaaggaggcttccaggggttgttgttgaggtgcagtgtagtttgtgtatatgacacctcttctttttctgtgtcccgtgcaggtgaaccaggtgaacctggccttccaggattctcttcccatggtcagtccatacactttttcctcatytgaatacattgtccataagctgaagccaggggcaaaatctaactcagttttggtggagccagaattttgtccacacggtttgtacctttgaatttatgactctcctttgtacttgacaggtggtacagtcaccatgcaaggacctccaggcccaccaggcccaccaggacctaaaggtgaagtcataatctaccttctttctatgttagtggcctcacacaaccatgtctggttaaaactgaaggatggagcaacctagtctttagagaattagagctgttcccacccttgccttttcag

SEQ ID NO: 14203 - DNA, 600 bp, Chicken  19866894219217_1
agcttgcctggcctgcagcaggctccctgaccaagctgcactcccattagactccagcctgcaccccttacctaggctggaaggggcagggtacagaagccaaacactggagtcatctccctaggaaaatgacatccctctcccttgtgatcacacagcaaagtaagggccatacaatccgtttgctcttgctagtgagcccttttccaagcccttgctctattatgtatctcgaaccattaaaatcagagcaattggaacaaataaatactcaaaaccatacagaagtttcttgccagwgtagccttctctcctttatctgatagaaggaaagctaaatgcacagtagatcatacagatcaaaatgtaccgastcccttcaatcttagcaatgtttattccaaggcagtgctggtgggaactgacccaggccagaagatctggagaagctcagtgcgtaggttgggatggtcccttttactgtggggaatccaaaaatctgcaggatgctttttttaaataactagggcatgtaaacatcagcaccaagtgggatttctatctgtgcttctctatttagatgaaatgaatgccagttat

SEQ ID NO: 14204 - DNA, 600 bp, Chicken  19866894219217_2
ggctggaaggggcagggtacagaagccaaacactggagtcatctccctaggaaaatgacatccctctcccttgtgatcacacagcaaagtaagggccatacaatccgtttgctcttgctagtgagcccttttccaagcccttgctctattatgtatctcgaaccattaaaatcagagcaattggaacaaataaatactcaaaaccatacagaagtttcttgccagwgtagccttctctcctttatctgatagaaggaaagctaaatgcacagtagatcatacagatcaaaatgtaccgastcccttcaatcttagcaatgtttattccaaggcagtgctggtgggaactgacccaggccagaagatctggagaagctcagtgcgtaggttgggatggtcccttttactgtggggaatccaaaaatctgcaggatgctttttttaaataactagggcatgtaaacatcagcaccaagtgggatttctatctgtgcttctctatttagatgaaatgaatgccagttattcactgagcacatattcatgcttttgaattcgtgaactgagtttggttaggagtttgtattcatggtactaatt

SEQ ID NO: 14205 - DNA, 600 bp, Chicken  19866894219218_1
ttgctgcccaggagaacacaactactatcgtgtttcgtatgtttgataaaattttggcaccagagcttgtcccatctattctggataagtttataaaaccttacctctgtgaacacaatctccaaaaggatgaacttcttttacagtatataaaggtacacttttttttttcattttgaataaaccaattgaaacttgagtaagcagtaaacaaatctgataatcattttatttacacatgaattttaaaatcagttttcagggtttgtttactgccatcagcaaacttactgaaactaytttggcaataaacagatatgagagaatatctgtcccttaatgcctagaaacattctgtcgtttgtaatattttaggactatgttttacaatataatatattctaccttttcaattagaatatcctattaatttttaatcaaaacatgcaggatttgctagaacgttgccgtacacgatctgcttctgtatttgaaactgcatgggaggcaaaggcaatagctgtcactggttgtatctctgatacagatgtaagtatgtttaataaaatagctctaatacatcaattcagaatggagcac

SEQ ID NO: 14206 - DNA, 600 bp, Chicken  19866894219218_2
aaaacatgcaggatttgctagaacgttgccgtacacgatctgcttctgtatttgaaactgcatgggaggcaaaggcaatagctgtcactggttgtatctctgatacagatgtaagtatgtttaataaaatagctctaatacatcaattcagaatggagcacctaatttttatggaagtacatgagaacatgtttatataagtgataagaggaaaaaaatatcatgctgcccctttattctgatattctttgcttgagaatctaattgtaattttgatatcatcacatagaaaactcaccracttttgcacgtctgaaggtctgtggtgtcataaattacttctatctttttctaatctagtttgatacattatgataatgaatacttgtcacacaatggaggttgggctaagaagtcaagtgcttgcctaaagaatcacaggtgaacaatacttcaaggagtagcttgtaacttattttgatgagtaagcttttcrtgttctttttctagctgaaatttgatgcagttctgcagataatgcatggtgctgtggtaccatggagtggagcagtagagcagctggtaaaacagcatttggaa

SEQ ID NO: 14207 - DNA, 600 bp, Chicken  19866894219218_3
ataagtgataagaggaaaaaaatatcatgctgcccctttattctgatattctttgcttgagaatctaattgtaattttgatatcatcacatagaaaactcaccracttttgcacgtctgaaggtctgtggtgtcataaattacttctatctttttctaatctagtttgatacattatgataatgaatacttgtcacacaatggaggttgggctaagaagtcaagtgcttgcctaaagaatcacaggtgaacaatacttcaaggagtagcttgtaacttattttgatgagtaagcttttcrtgttctttttctagctgaaatttgatgcagttctgcagataatgcatggtgctgtggtaccatggagtggagcagtagagcagctggtaaaacagcatttggaaatgaatcatgtcaagtaagacaacatcctatagactatacctcagttttatgtttacttttcagttagaatctaatttatttaaaattatagctatatatttgatcacctctgtacatcagatacatacgtaacaaattaatagtagtctaatttgtccacagagtaaagttattgcaggaaagttaccgactgat

SEQ ID NO: 14208 - DNA, 600 bp, Chicken  19866894219219_1
atatatggaaacaccttttgcactctgtattagtaggaacttaagtgtaatcattgctttctatgggatatgagtatgtttcttaattatagataaacttccaaagatgtaaagtgctttttagtattggcgttacattaccttaatcctctttttaagagcgtgatggaaaacttcgaaagaagctctgcatcctcaatgccttcagttttcaccccgccttcaaaaattgtaggcacaccagtacagcctgcaaatactacaaagatttctacaatgagacctcttgcaacagcatayaaagcttccacgagtgactaccaggtattttaagggaaacagaagcatgtgttttttgtgtaatcttctgttatgagtgtgaggcttggacgcatgttaacttcaatatgaccttagcctttttttctcctgttatcactggtaaagatctggtttatgtgcataggtaggcctacaaaatcatttaacaagtttatttacttgtccagaggttgagggcttgttttgaaacttgaaggtattttatcataatatagtaacatgtaggaaaagtgtgttttttttaacactaacccttgt

SEQ ID NO: 14209 - DNA, 599 bp, Chicken  19866894219232_1
  misc_feature (1)..(21): n is any nucleotide
nnnnnnnnnnnnnnnnnnnnnttttttacctgctggctgataacaaactggactttagtcatttgttatcttggtttatcagttaacttattagttatcaactattagattttgtgagcatcccttttgctcagtatgggtgtaagaaaaattattgtgttaacagaagaaaacactgaggcaaggagaaatgaagattcagggaagctgtcttcggtgcttctgttcctgggttcctgatggaactgttctaggtcttgaacatcagagcgggcatgggctcacaaagctgctctgatrtatctgagaactggtgatatttttttccctttgaaaatctggattttggagtccaaagctgggttcccaaactgaaacatttaaatcagagtcccctgttttggtcatggaagtgcacagaggcagcgagtgggaaggaatttggactgttcaccaaggagtggttgagcagcgctgtgctgaaacactattaatcttgctggtgatttggtgagagtgcttttgcgtgctgggaaagcacagggtctgctcgtcttctgagcctcaggttgctgctttggactgggtttctttttggt

SEQ ID NO: 14210 - DNA, 600 bp, Chicken  19866894219232_2
tcacccgacaagatgatggctactaaaaaggggaataatttgggaaaactcataaagcccattatctcctgctgaaaccatttctctttgccatttctgaagtttctgcaaaatagatccagaatcctgtatgtagcacgagactagtttattaagagagagcacttagaactgtacagagcactgcattgcattcctggggacacccagctccaagctatgtcacttctttaggtcttgacaggtgattccaatctgtctatgcagcaaaggagaaatatttcacctgttccaaaatayaccaggaagcgaaaggctgttgatgcagttgctcacacacacagcctaggaaatcagagagagaggcatcaaagtgcagtttctggctaggattcttattaatattttttccccttaataaagaaagaaacatctgaagacgttgttaaggcatttcaattcttgcttcatttattcaattgcattttaatttcaaaacgaatgctatattctaaagttctctctgaagggaaggatatgcataaagggaaaataacaaattcaaggagagaatctctttccaaaagggtggcaaaacat

SEQ ID NO: 14211 - DNA, 600 bp, Chicken  19866894219234_1
agagcgctgcttgcagagccaagaactgctgtgcttctcacactgctgtgccagcaaggagcttggggtgcacatgaaggggacacagccaggacagctgacccaaaggggtgtcccacaccaccacagtgctatgctcagcactaaaagctgaggtaaagaaggggggaatggactgatgggaagtagggaacaaattaattcctcatttctctttgcttgcatgtgctttacctagaaaactgcctttatctgaacccacaagttcttgcacttttaccttccaatttttccccccascccacctgagcagtgagcgagcagctgggtgatgctgagctgcctgctgggttaagccacaacacttatttttgcattaggaaaaaaaagtgtaattatctgagactcagctttacaggagacacatggtaaggctctggaagacatatccagctctctgactcacatctagagagtgagtcagatgtgctctggaccacaatctagaacacattgtggtccagagcacattgttcggcacctaagctgtagtacaccactacaagattcttgtgctattcgtggacatgcagccccaac

SEQ ID NO: 14212 - DNA, 599 bp, Chicken  19866894219237_1
  misc_feature (1)..(87): n is any nucleotide
nnnnnnnnnnnnnnnnnnnnnnnnnnnnnnnnnnnnnnnnnnnnnnnnnnnnnnnnnnnnnnnnnnnnnnnnnnnnnnnnnnnnnnnccccgcgcccggctccggtcaggcaggtgagcaccgcaccgggaacgggaactgcaccgggagtgggaactgcaccgggagcgggtgggtgtgcggggcacggggagcgcggggcgccgggagcggtgcgggtaccggcagagctcggggttaccggcagcgctcggagcaccgggaattgggggggctctgcgccgttgggtcccgggacgmacggacggacccgcggaagttcccggtcyccgcgccccgttctcaacgccgcgaccccggaaaaaccccgcaccgggggctgaggggggtccgctcccggtaaagcccatcgggtccccccgcaccccttcctcggccgaacccccccttcgccctcccccctgtgcggcacctgcagcccccgcagctccgcggatatttcgggccgcgccgggaaccggacgggaggaggcggccaccgaagccctaccgggacccccccggcgccgcattgggggaacgggtagccgggacgcggt

SEQ ID NO: 14213 - DNA, 599 bp, Chicken  19866894219237_2
  misc_feature (1)..(58): n is any nucleotide
nnnnnnnnnnnnnnnnnnnnnnnnnnnnnnnnnnnnnnnnnnnnnnnnnnnnnnnnnnccccgcgcccggctccggtcaggcaggtgagcaccgcaccgggaacgggaactgcaccgggagtgggaactgcaccgggagcgggtgggtgtgcggggcacggggagcgcggggcgccgggagcggtgcgggtaccggcagagctcggggttaccggcagcgctcggagcaccgggaattgggggggctctgcgccgttgggtcccgggacgmacggacggacccgcggaagttcccggtcyccgcgccccgttctcaacgccgcgaccccggaaaaaccccgcaccgggggctgaggggggtccgctcccggtaaagcccatcgggtccccccgcaccccttcctcggccgaacccccccttcgccctcccccctgtgcggcacctgcagcccccgcagctccgcggatatttcgggccgcgccgggaaccggacgggaggaggcggccaccgaagccctaccgggacccccccggcgccgcattgggggaacgggtagccgggacgcggttcccggaaggacgggcagaacccgggtgt

SEQ ID NO: 14214 - DNA, 599 bp, Chicken  19866894219243_1
  misc_feature (1)..(104): n is any nucleotide
nnnnnnnnnnnnnnnnnnnnnnnnnnnnnnnnnnnnnnnnnnnnnnnnnnnnnnnnnnnnnnnnnnnnnnnnnnnnnnnnnnnnnnnnnnnnnnnnnnnnnnnnactccctaacatttcttccactctgaaagagagctgagaagtgcattacatcaattacaacgtggcatccattgtagtgtagtgtatgggatttgtttatctccttgttttttgatacttaacctcacggctcaagaaccattatgtgcccaattaactttggtttatatgctctgcgtgttttaaatctgcagcrtgttttctctagaaaaattactttactacaaaamtgcaatcattttagccagcacggccacactgagatttgggagtttattatcttaccacggatcaaaaaaggacagatgtagctactaaatatagagttgaaaggggacagatttggttatgggagacattcataccttagattctttaaggttataccaaaaacctgaatgttttcctgggaattacatgccaaaggccctcaagaaattcataaattttagagcctctcatttcttttgaccaaagaactgctgagaaagcaaa

SEQ ID NO: 14215 - DNA, 599 bp, Chicken  19866894219243_2
  misc_feature (1)..(70): n is any nucleotide
nnnnnnnnnnnnnnnnnnnnnnnnnnnnnnnnnnnnnnnnnnnnnnnnnnnnnnnnnnnnnnnnnnnnnnactccctaacatttcttccactctgaaagagagctgagaagtgcattacatcaattacaacgtggcatccattgtagtgtagtgtatgggatttgtttatctccttgttttttgatacttaacctcacggctcaagaaccattatgtgcccaattaactttggtttatatgctctgcgtgttttaaatctgcagcrtgttttctctagaaaaattactttactacaaaamtgcaatcattttagccagcacggccacactgagatttgggagtttattatcttaccacggatcaaaaaaggacagatgtagctactaaatatagagttgaaaggggacagatttggttatgggagacattcataccttagattctttaaggttataccaaaaacctgaatgttttcctgggaattacatgccaaaggccctcaagaaattcataaattttagagcctctcatttcttttgaccaaagaactgctgagaaagcaaactacagaggagtaccctgtgtattacactactta

SEQ ID NO: 14216 - DNA, 600 bp, Chicken  19866894219254_1
taaactgatttccaacacaacagcaacaaaaaatcatactgaaatgaaaatatttatcataactgcttgtggaaatgagaaagttttcttcattttcagggaaaacaacatgatggttccttaagaaaccacttcaaggccgacactttactggtctggaccttctgcagtaaaagatgaatgcaaagtgtttgcaagagaccctgcctccatactctcttctccatgatggagaactcacacatcaggcacatgggatctcagggggctattgcagtacgtgactgcccatgagcaagytgcaggttcagggagatgatggaaagaagaagtcaaatggagaaatcccatgcctagcatgtgagatgtgactaatctgctgttctgacctgagagtgtcttacacagccataaacatctccagcagggtgagctcagtggagaagcagtctctcttctggaagaactgttggtgagggttggagatgtgagctatgtgttccccattcattttcagctccattcatggtgctggaaaacattgctcagctcctacacctctctccagcttttgtcttacaaatttctcagataatgcca

SEQ ID NO: 14217 - DNA, 600 bp, Chicken  19866894219258_1
ttacaaaatctggtttattgggcctaaacacaagctacaggtattgcttgtgtgcacgtaaactaatgtttgctaactacagtcacaagccacacatttcacgctgcatttacaactgaaccaagtcaggttcagctctgatcatcttctaaaatttctgctgttctttgtttgtttctttgtttagttgtttgttttcttctgagccttggaaaatacctactaaaattgtaacagcttgaatcctatttttttttctgaaaattcagctataatcatattttgcatacataaacacgkatttacttgaacattaagttccttcaagaaaggtttgcaaatggaatcttaaaaaaatttactgcttaaacagcgacacagactccagtagagaaatgatagyattttctgtagaaggaactgcaactcatttatgggaatccagagaaacatactttctctgtgtgacagctcacatgtctttttttacatatagttgaactgtaaagatatttacatgtaggtgtaagcaccagtattaatataaaaacagtcatattaaactgattatttaattatgtctttgttcttatcttagtg

SEQ ID NO: 14218 - DNA, 600 bp, Chicken  19866894219258_2
ctgcatttacaactgaaccaagtcaggttcagctctgatcatcttctaaaatttctgctgttctttgtttgtttctttgtttagttgtttgttttcttctgagccttggaaaatacctactaaaattgtaacagcttgaatcctatttttttttctgaaaattcagctataatcatattttgcatacataaacacgkatttacttgaacattaagttccttcaagaaaggtttgcaaatggaatcttaaaaaaatttactgcttaaacagcgacacagactccagtagagaaatgatagyattttctgtagaaggaactgcaactcatttatgggaatccagagaaacatactttctctgtgtgacagctcacatgtctttttttacatatagttgaactgtaaagatatttacatgtaggtgtaagcaccagtattaatataaaaacagtcatattaaactgattatttaattatgtctttgttcttatcttagtgagataactttacaattaaatgtttcttattcagaaaaaaattgtgatcttggtctgacaaatctggcacaaacagggtatgaagagccagcccaagactgtgc

SEQ ID NO: 14219 - DNA, 584 bp, Chicken  19866894219261_1
tggccacaacctgggctttgggctgagcactgtgcaggggagagggaggatgcagagcagagctccctgcctgtcagtgattgcagcagcctctctccaagccgtgtcctctctggagcccactagctgccaggcgcccggccaaagctgtgctgtgaggccaagctcttcacggagcagctatttgccaggtaatgctgatgggaacctgctgtggtacagagtgctgcaggcagggctccttctgcccctgggggacatctccttgggccaacccttgccctgcacggggctcctgtrggctgcaagaggtgatacagaaaaattcgatctggctgtcaagaaattttcccatgggaaattttgacttcttgtcagaaactgcagtgtgtttctgtttcagcccccagaaaagcatgaatgggaacaaaggttccactttggcagagggaaggggctcaccgaagaaaacaccccaattttcaagcaaagcagacacatcctgccattttcctctttggttggaaactcaatttgtcgtcccccccccccccccaaaaaaaagaacaaaatcaaaggaaaag

SEQ ID NO: 14220 - DNA, 600 bp, Chicken  19866894219265_1
atgatacactggcagaagccaactgtcatttcatgaataaagcagacgtaacttaatgaaacatgctcagctgtcagatgcatttatataaatgcttttttccttataaggattttcctcatttaaattctcacaatcttttgtcattgtaatatttaaaatccattgcactcctcttgcttaatttgtgcattatatttttgcaaacgcttaaggaatttgtactggtcactgcacttaggtaccgcatgcaaatctggggaaaagagctgttgagagctgtaccaaagctgcagcatyccttcacaagggtttattacggagctagatcctttcccggaggaattatccaatagcactctattaaaggaccataaaaattttaaagacattttatgattcggccagtgacctctacaaaaatttctcccaaggcttccacaaattttatctcaacgtggaaacaaaaaactgcacaggagcaatcagatttaatttaaattaatttgtagtttggcaacaacaaaaagccagtgtttccagaatcaggtgagctaagaggattattataatattacataaaataatctttcttttatt

SEQ ID NO: 14221 - DNA, 600 bp, Chicken  19866894219265_2
atctttcttttattctaacagtaataacaaaaaagaaatgaaattagatttccatatgctctctttattcctggagggttcatattctttttttttcatgtatctgaaccaaacgagggagcatcaaagttggctacactgatgcgcagcagatagacattttgctgttccgattctaactagaagattaggagctcctgaaatggcaccagctaagtgactgaatttgatcaccagcacattcagaaaagggagcgagacagctcctctcagtctcattacagactccaggatgaaccraggtacacatgaattttgtatgagataaattgaaaaagttgtatcaaaagttcaagttgtgattatttctcattgaaactttattttttgaagagtgtctatcctcataacaaatatttactccttattccagtgttgtgcattgagaataatagccaatatttgccttaatatttctcccaaattcttcatttgaaatgcaattaaaagatayccacattttcttctgagaaagacccaatttcccgatttcagttgctgataggtatgaaacaacatcacataggggggaaaaaaaaa

SEQ ID NO: 14222 - DNA, 600 bp, Chicken  19866894219265_3
aagtgactgaatttgatcaccagcacattcagaaaagggagcgagacagctcctctcagtctcattacagactccaggatgaaccraggtacacatgaattttgtatgagataaattgaaaaagttgtatcaaaagttcaagttgtgattatttctcattgaaactttattttttgaagagtgtctatcctcataacaaatatttactccttattccagtgttgtgcattgagaataatagccaatatttgccttaatatttctcccaaattcttcatttgaaatgcaattaaaagatayccacattttcttctgagaaagacccaatttcccgatttcagttgctgataggtatgaaacaacatcacataggggggaaaaaaaaagaaaaagacaagagagaaagaagtcatcccaaccttctgtcaggcactttacagcataatgagctatgatgaaaaacaagtcaaacgctgaaaaaacaagaaagcttggaaatctgatcttgctgacaggatctggagtaattaattttaacccatgtgaccactggatgtccycactgttccttgaatgcagtgcaaacatcatctagctggc

SEQ ID NO: 14223 - DNA, 600 bp, Chicken  19866894219265_4
ttctcccaaattcttcatttgaaatgcaattaaaagatayccacattttcttctgagaaagacccaatttcccgatttcagttgctgataggtatgaaacaacatcacataggggggaaaaaaaaagaaaaagacaagagagaaagaagtcatcccaaccttctgtcaggcactttacagcataatgagctatgatgaaaaacaagtcaaacgctgaaaaaacaagaaagcttggaaatctgatcttgctgacaggatctggagtaattaattttaacccatgtgaccactggatgtccycactgttccttgaatgcagtgcaaacatcatctagctggcagatagaaaaagcagcagatttgacaaagagcagtgtgtgcaaggacacaaccagtgatgactcccacagtagccaaatctccagtgcatacagacgcaagcacacacacctgcatgtacagaagcaaactggagagcaggggagcagcagcccacaggcactgatagagaaatactctttgaatacagtttccaccaaattcacttggcgtctgctgcacgcttaataatgcatcacggagcgaggctgggtgacagat

SEQ ID NO: 14224 - DNA, 600 bp, Chicken  19866894219272_1
ataagtcacctccaataacttttctatcttataaatattttgtggacgcttgacattttgtggcaactgggcaagaataaagcagcttgggaaaatcaaatacgtggctacgatataaagatggatttgcactcctagtaatatgcaaaattccaacagtgccagggactaaatctcagccccagtgccatccaggccttttcaaacctggctagctgccaggtcctcactcaaaaactcttcccatgactaaaaggcgcagctacattttctttgcttttcaaataacccaaatctctsctgtgtcacatacacagaaatccacctgtcagccatgagctgtggataactgatagcattctattattattctctgmatgaagattgcttttaagggatattaatgtaccccgtgagctcagtgcaaaagggtgaaggaccacttagaaatgcttcagagatctcatgatgcaacacgcaagcctctgtgctgctgaaatgtatgtaagtgtagtggctaacaagcttcatgatcttacacttccaacctgatgtccaagttcaagtaattagcagacgtttaaaggaggtctacatttc

SEQ ID NO: 14225 - DNA, 600 bp, Chicken  19866894219272_2
taaagcagcttgggaaaatcaaatacgtggctacgatataaagatggatttgcactcctagtaatatgcaaaattccaacagtgccagggactaaatctcagccccagtgccatccaggccttttcaaacctggctagctgccaggtcctcactcaaaaactcttcccatgactaaaaggcgcagctacattttctttgcttttcaaataacccaaatctctsctgtgtcacatacacagaaatccacctgtcagccatgagctgtggataactgatagcattctattattattctctgmatgaagattgcttttaagggatattaatgtaccccgtgagctcagtgcaaaagggtgaaggaccacttagaaatgcttcagagatctcatgatgcaacacgcaagcctctgtgctgctgaaatgtatgtaagtgtagtggctaacaagcttcatgatcttacacttccaacctgatgtccaagttcaagtaattagcagacgtttaaaggaggtctacatttctcagatagctgctagctgacctttccttgaccttcagagccataagattcatttgcttctttaaatgaacaaaaaaa

SEQ ID NO: 14226 - DNA, 599 bp, Chicken  19866894219281_1
  misc_feature (1)..(21): n is any nucleotide
nnnnnnnnnnnnnnnnnnnnnaaaacagagacagtcttctctggatgggagtaaagacccctgcctatcgtctaaatctatctgtgttttgtaagcgaagcaagcagttaataacaccctggaagtaacaggtgttgcctaggaggctgaaagtgagaagtgaactagcgagctgtgctccacctgggattcgccagagcctggaggtcattgacaaagatgtcttgacttgaaactgtaaactttctttgggatatgttctgcgcttgaataatcaagcatggaatgatttattggcawtttatgcagatagaagacttggtctgaagagagacaaataccccattgaaataggcttctttttgatggaaataaaaataaaatgcttgacttgctttttatcatgatgtagcttgcaatcttctacatgtccttggagagagagtgttcatacactctacagatgtgtaacattagctagcacgacatttttcacttaatatccaacacatgctcactgtggtcctcattattactcaacaaaaagcttgcacaacctaaaattaattaaaaaatactgcagtaatgcagccacatgc

SEQ ID NO: 14227 - DNA, 511 bp, Chicken  19866894219281_2
agacaaataccccattgaaataggcttctttttgatggaaataaaaataaaatgcttgacttgctttttatcatgatgtagcttgcaatcttctacatgtccttggagagagagtgttcatacactctacagatgtgtaacattagctagcacgacatttttcacttaatatccaacacatgctcactgtggtcctcattattactcaacaaaaagcttgcacaacctaaaattaattaaaaaatactgcagtaatgcagccacatgctctcatgaaatgagaatatcactgcctgaaaygttagctgcaacaaactgaaagtctgatggtctcatcttagtaagctgctcatcttccttctcgtgtgctaacattcctaaatacatggtaaaacattaaaatctaattacaggatagatgaccagaaaactttctttcacatgtaagataggtctagctgcttggttaatgttgccattcaggtacaattgaagtcgacagagaaagtca

SEQ ID NO: 14228 - DNA, 600 bp, Chicken  19866894219298_1
gctgcatgtgagtgtgagcccactcctctttagactgataaatctgtttaacaataatttagttctctaaaccagcaaagagactcaactagaactgatgaagctttctgatacttctctgcaaacgtgagttgatcctcttgcttggagaaaaattctgggaatcagtgctccctgcttttacagttgtcatttaatttttctcactgctgagccttgcaacaaagggacctgttactattgattctattgagttttctgagatacagatgcatatgcctgtccacaaagaaatggatwgataccacttcatcctgtgtagtaacttagcacgtgcagaaagcctgaggtgctactggcctgtgaggcaaacataaaggtagtaagaatactcacataaaaaataagccacatgattggacattctctaccctcttttctactctttacggcaagtaagtataaataagcttttttcaccatcatgtttttctgcagttgcatggcaactttgaggttttcttagaaaggggcaaaacatgtttgtttctcacaagtatgcgtatcaacctacttacttgaagtttttttttcccatta

SEQ ID NO: 14229 - DNA, 599 bp, Chicken  19866894219302_1
  misc_feature (1)..(55): n is any nucleotide
nnnnnnnnnnnnnnnnnnnnnnnnnnnnnnnnnnnnnnnnnnnnnnnnnnnnnnnaaccattcccatgattctatgacaaaacccattattttttaaaatcagctttgaaattcattgagtgatcttttaatactagcatgcaaccaagttcctgacccaccttctgttcatcactcgtagttctgtgtacttctttatttccccaccatttattgacactcaaaagtaaacaatttcagacttcctggttccttttcacatcagagtttgttcacaacttctttctgctggtttcctaygttttctacatcagtagcacgctcctgtgctgcaacaattgaacacggcattccagagaaaggtgaaacgttgatctatgtaacaccaccataacatttcacatcctgtttttattgattcagaatattttatctgaccacaactatattctctaaagaggtcttaattcagcccgtcacagtgatacctaggtccctttccttaaattacacaattaattaggatccaataaactgcattaatagcacatactttgccctccagtatgaattactttgcattaatcaagatggaattt

SEQ ID NO: 14230 - DNA, 599 bp, Chicken  19866894219304_1
  misc_feature (1)..(43): n is any nucleotide
nnnnnnnnnnnnnnnnnnnnnnnnnnnnnnnnnnnnnnnnnnnttttgtatcttagcacctgtttgagttgctgctaacgtgcttgcacttgtaaaactggaagcctaccctgaaagcgagcagtcaaacagggaggcttatcagggcttccagggggacaggctgcagagtcctgcacagggacgagtgaggtgagcagccagcagctgttctgtttgtgggtgaccgtctgatcgtgcctcagtccctgactgcggggcttgtagagatgccagggggaggctggtaggtggaggatygacttaaaataaaaattcaatacacaggttgctccgaaattaatgccgcctccttattttcgtggatactgcaacgtcagcgttcatatgtttggaagggggttatttcctggtttgtcatggcatcccttgcagtggtgtgcatcaggttactattcttacttgttaataaggcttcagtcagacatttaaatagggtraagatgtgtagcggcctgttgcattggttgtacctgcactatattcatgtaaattaaagaaaaaagcacaacaaagaaaacaaacaaaacctcttaaca

SEQ ID NO: 14231 - DNA, 600 bp, Chicken  19866894219304_2
ccagcagctgttctgtttgtgggtgaccgtctgatcgtgcctcagtccctgactgcggggcttgtagagatgccagggggaggctggtaggtggaggatygacttaaaataaaaattcaatacacaggttgctccgaaattaatgccgcctccttattttcgtggatactgcaacgtcagcgttcatatgtttggaagggggttatttcctggtttgtcatggcatcccttgcagtggtgtgcatcaggttactattcttacttgttaataaggcttcagtcagacatttaaatagggtraagatgtgtagcggcctgttgcattggttgtacctgcactatattcatgtaaattaaagaaaaaagcacaacaaagaaaacaaacaaaacctcttaacatttttcccatgcattcagtgctgaaatrtttactgaactgaggaagtttgttcaaaaggggatgatcctgagaaatcaagtggttgtcttagtgctgtaattgccctgcgatacgatcttgtgttgaaatggtatctttcctctagctgaaaccttatgagctattgcacagcatggcagtttttataaaacacacagact

SEQ ID NO: 14232 - DNA, 600 bp, Chicken  19866894219304_3
gttgctccgaaattaatgccgcctccttattttcgtggatactgcaacgtcagcgttcatatgtttggaagggggttatttcctggtttgtcatggcatcccttgcagtggtgtgcatcaggttactattcttacttgttaataaggcttcagtcagacatttaaatagggtraagatgtgtagcggcctgttgcattggttgtacctgcactatattcatgtaaattaaagaaaaaagcacaacaaagaaaacaaacaaaacctcttaacatttttcccatgcattcagtgctgaaatrtttactgaactgaggaagtttgttcaaaaggggatgatcctgagaaatcaagtggttgtcttagtgctgtaattgccctgcgatacgatcttgtgttgaaatggtatctttcctctagctgaaaccttatgagctattgcacagcatggcagtttttataaaacacacagactgaaagctctcakctctgtaaaatgtgctggagttacagtgaggaggagtattcccattgtttcttataaaattgtcataatttcaaggacatttctgtattcccttagcaaaagctctactgctgct

SEQ ID NO: 14233 - DNA, 463 bp, Chicken  19866894219304_4
ggcctgttgcattggttgtacctgcactatattcatgtaaattaaagaaaaaagcacaacaaagaaaacaaacaaaacctcttaacatttttcccatgcattcagtgctgaaatrtttactgaactgaggaagtttgttcaaaaggggatgatcctgagaaatcaagtggttgtcttagtgctgtaattgccctgcgatacgatcttgtgttgaaatggtatctttcctctagctgaaaccttatgagctattgcacagcatggcagtttttataaaacacacagactgaaagctctcakctctgtaaaatgtgctggagttacagtgaggaggagtattcccattgtttcttataaaattgtcataatttcaaggacatttctgtattcccttagcaaaagctctactgctgctctgctgcttgtgttgggccgacagaggatgagcagatggataatggga

SEQ ID NO: 14234 - DNA, 600 bp, Chicken  19866894219315_1
cagaaacttgtttattttttaatattttcttattaaaacataaaaaaattggcaacaaaaaagaccaatccagtgggatgtttggccttagttttatgaaactaatgcacagataaattaaaacatagcaaaaattagttgattttcaccttgaagatgcgtgtctaactcatttaaatgaacagtcaaatccaccaaaaatgctaaatctgcaagccaattttcatcttcaagttctggcacaaattttccttttgattccatcaatggcttcatttcatttcacaaaacatcaaatcyctttatcattttaccctgccgcagcctccttactttaggaaagtaaatgatgtccccataatcagcacccatgcttttaaggaactcctggaactgacagaagcaccgatcaaatacatatcacaaaacttgaccaagcatgtggcaggagtgagaggcagagctagcactctgggaaagctgcatgattaattactgacagtattttctagaacctcatctagttttagtaataccaatttcttcattaccacaattatttatattgattaaatgagggaaaacgagacaaagcaaagc

SEQ ID NO: 14235 - DNA, 599 bp, Chicken  19866894219316_1
  misc_feature (1)..(77): n is any nucleotide
nnnnnnnnnnnnnnnnnnnnnnnnnnnnnnnnnnnnnnnnnnnnnnnnnnnnnnnnnnnnnnnnnnnnnnnnnnnnngatgagcttgtctgcctactaaacaaaactgcaacaagtttccagaattgatgcccttagtaatgattttcaagaatctgccttaatgtctgaaaattactttcaaagattttgttagttcctttaaaaacaacagccaaaagtaaaaaataaaaaataaaaaaattgtaacctctcccaacactcagcttctctgaaactatgtcatctctcctgtgagaamgttgttctccagyctgggggctgtgatctcctttccacaatttcatccataaacagacagaactgtgaagcctatttattcgtcagttagggatgaatgttaccagtgatacttgtaaattgtagaaataaatttagtgtggcaagcatggtctctaagcaacactgaagcctcttcatctgtacattgcattcatgtatgatcttgactggatattcaaaacccttttttgtatgcaaagaaaacagagcacgtcttactgcattgtgaactaaattttcctttttcataagcaaaga

SEQ ID NO: 14236 - DNA, 599 bp, Chicken  19866894219316_2
  misc_feature (1)..(64): n is any nucleotide
nnnnnnnnnnnnnnnnnnnnnnnnnnnnnnnnnnnnnnnnnnnnnnnnnnnnnnnnnnnnnnnngatgagcttgtctgcctactaaacaaaactgcaacaagtttccagaattgatgcccttagtaatgattttcaagaatctgccttaatgtctgaaaattactttcaaagattttgttagttcctttaaaaacaacagccaaaagtaaaaaataaaaaataaaaaaattgtaacctctcccaacactcagcttctctgaaactatgtcatctctcctgtgagaamgttgttctccagyctgggggctgtgatctcctttccacaatttcatccataaacagacagaactgtgaagcctatttattcgtcagttagggatgaatgttaccagtgatacttgtaaattgtagaaataaatttagtgtggcaagcatggtctctaagcaacactgaagcctcttcatctgtacattgcattcatgtatgatcttgactggatattcaaaacccttttttgtatgcaaagaaaacagagcacgtcttactgcattgtgaactaaattttcctttttcataagcaaagaaaatacttttatt

SEQ ID NO: 14237 - DNA, 600 bp, Chicken  19866894219318_1
tacctacagcctgatttgcatgaatattatgcacccagaactcctactgagatcaaaaaaacagctcagcgcctctgcaaaaacaggttgctggcatccagaactggaggcaagcaaactctgtgcatctttcaaaaatctgggtctgcatccctcattaggggtggccactgaatcaaatgcaggcttccatctcaacagcttttggtaggatccacttcaacttatggctctaaaaatgtccatctgagcccttcatacaatttttggaggctgccagttgaccttttgctctctctyctgtattttatttatcacatgatttgaggcatttttcctagagcctaggatcacagactggctgaggttgacagggacatctggtcatctggtccaacccctgctcaaggagggccactcagagctggatcacgtacaaacagattttagtctccaaggatggagactccacaacttttctgggcaacctagaagtactacaagtgctctgcattcgctgtgggccatctctacatgcacacacatatacaagtacaaaagcagtcatcctacagcagtcaccatgaggttttccaagtg

SEQ ID NO: 14238 - DNA, 600 bp, Chicken  19866894219329_1
ccatcttaagggaagatagtatcaaacaaaatcagttatgtcttaattgtgacaactacgttttgtaaacaattctacagcataagtgaagatgttaggttatcagtaatgaacgttttcgtcctctcagttgtgggatatctgcaaacatctgcttcactttcatctaaaagactactcacaggatgtcagcctcatctcatcccaacgtgctgtatggtacacagccttaatgccagtttgtgatttttttctcatgtttgaacagcacaaagccaaagcttcgtctttggttagttycactgagacgccactggtttttacatgtgctctttcttcccatgaacacagagaacaaccgcactgcaaacagcattcggtattttgaatcatcaagcactgtcaatgtaatattaattaatgaaagctaactaacagattgtgtttaaaaatgaaacctatttgagggcatctgataagacataagagctgcagaaatttacacagaactccctcaaaactgtgtggatacaggtgctgcttatagagtaggcactggttcgttcctctgcagattatccaaacaagcatcagctcaac

SEQ ID NO: 14239 - DNA, 600 bp, Chicken  19866894219332_1
cagcatttggtcccccagcaaccgtgacaataaacagccagaggcagatttacagccttagcaacagcctgaagttgtcagcaatttgggattctccatcaggatgctgacccatacatttgcctgatgactgttgtgcctctttcagttgaggtagaaaataattattcacacatatttacttagaaaagatatgtttcagttaaaagagaaatgtttctgcatatcataggctgactggaattttcttaatcatgcagataagccatacacaaatgagtagctttcatgaaattaacrgcactatgtttgtgaatgagatctactggtgtgagtaaaccttcttcttagagcactgcatgacagaatccatttgaatgaaattccatgtttccctgtgactagtgcctgttcaagtattttccaggcagaataacaatactaccttgttcacacacattcatctgcttgaacagaaaattataagatcacattctatactattaagaatacatacaagaattctttgtggttrtatacttacagaatcataagataaaacctagttttgtaaccttagcaggattgttcttgaataac

SEQ ID NO: 14240 - DNA, 600 bp, Chicken  19866894219332_2
gactggaattttcttaatcatgcagataagccatacacaaatgagtagctttcatgaaattaacrgcactatgtttgtgaatgagatctactggtgtgagtaaaccttcttcttagagcactgcatgacagaatccatttgaatgaaattccatgtttccctgtgactagtgcctgttcaagtattttccaggcagaataacaatactaccttgttcacacacattcatctgcttgaacagaaaattataagatcacattctatactattaagaatacatacaagaattctttgtggttrtatacttacagaatcataagataaaacctagttttgtaaccttagcaggattgttcttgaataacttatttatgcgttgctaactcgagcctattttcatgcttaattattcatacattttgttattttattttcgtgattctattttacagtttgtatgatagaggaaagacactgttgaaataaaaagttgaagtaaacatttataatttcatacttgccttgtaaaaaatgtatttcctgtagcgtttaagaatatgtttcattctgttctgttctggttgttaccaatggcactga

SEQ ID NO: 14241 - DNA, 600 bp, Chicken  19866894219335_1
aaataatgaataagctataattttcctattcttaacagaagagctctgttcctctttgggaatgttgaattcaatctgagttgcattcatacaagaatgagactttcaacaaaaatttacatcactgtttttgaaaaggaattgcaaaacagtttctcatgggaaactgattttttcctttttttaattacaatgacagtaagtttctttcttgaaaagaatttttgaggttttggagaggaagaggtgaattaggagtaatgtttttgttcactgtgggatacattccctagacaatayagtgagatagcaagatcaaacataaatatatatataaataaaaaccatatgcgtttcattatgaacatgcagagtaagatgaattcacctcatcaggttttctctcagcagccaactgtttgctacrttgratggagatacycttttctcttctgatcctatatagcctcagctgtcaaaagcaaagatagagtgtatggactagaaatagagatggctatcactcctttcctctccaccagtgctgtactggtatcccagtgaagtgcttgggagcactggcttattggagatgccatc

SEQ ID NO: 14242 - DNA, 600 bp, Chicken  19866894219335_2
tttttgaaaaggaattgcaaaacagtttctcatgggaaactgattttttcctttttttaattacaatgacagtaagtttctttcttgaaaagaatttttgaggttttggagaggaagaggtgaattaggagtaatgtttttgttcactgtgggatacattccctagacaatayagtgagatagcaagatcaaacataaatatatatataaataaaaaccatatgcgtttcattatgaacatgcagagtaagatgaattcacctcatcaggttttctctcagcagccaactgtttgctacrttgratggagatacycttttctcttctgatcctatatagcctcagctgtcaaaagcaaagatagagtgtatggactagaaatagagatggctatcactcctttcctctccaccagtgctgtactggtatcccagtgaagtgcttgggagcactggcttattggagatgccatccttcacactgtagcaggagctgctcagcacatgaacagccttcttaaaaatgcattttgaacaactgcattgtgtatgcctgtgatatcatggggagctattttatttccgtacatcttttttgttc

SEQ ID NO: 14243 - DNA, 600 bp, Chicken  19866894219335_3
tgaaaaggaattgcaaaacagtttctcatgggaaactgattttttcctttttttaattacaatgacagtaagtttctttcttgaaaagaatttttgaggttttggagaggaagaggtgaattaggagtaatgtttttgttcactgtgggatacattccctagacaatayagtgagatagcaagatcaaacataaatatatatataaataaaaaccatatgcgtttcattatgaacatgcagagtaagatgaattcacctcatcaggttttctctcagcagccaactgtttgctacrttgratggagatacycttttctcttctgatcctatatagcctcagctgtcaaaagcaaagatagagtgtatggactagaaatagagatggctatcactcctttcctctccaccagtgctgtactggtatcccagtgaagtgcttgggagcactggcttattggagatgccatccttcacactgtagcaggagctgctcagcacatgaacagccttcttaaaaatgcattttgaacaactgcattgtgtatgcctgtgatatcatggggagctattttatttccgtacatcttttttgttcctct

SEQ ID NO: 14244 - DNA, 600 bp, Chicken  19866894219335_4
tgcaaaacagtttctcatgggaaactgattttttcctttttttaattacaatgacagtaagtttctttcttgaaaagaatttttgaggttttggagaggaagaggtgaattaggagtaatgtttttgttcactgtgggatacattccctagacaatayagtgagatagcaagatcaaacataaatatatatataaataaaaaccatatgcgtttcattatgaacatgcagagtaagatgaattcacctcatcaggttttctctcagcagccaactgtttgctacrttgratggagatacycttttctcttctgatcctatatagcctcagctgtcaaaagcaaagatagagtgtatggactagaaatagagatggctatcactcctttcctctccaccagtgctgtactggtatcccagtgaagtgcttgggagcactggcttattggagatgccatccttcacactgtagcaggagctgctcagcacatgaacagccttcttaaaaatgcattttgaacaactgcattgtgtatgcctgtgatatcatggggagctattttatttccgtacatcttttttgttcctctcctgttgtatt

SEQ ID NO: 14245 - DNA, 600 bp, Chicken  19866894219336_1
tagatttcttttacaatagtttctcgttcatttaatgcaaagaatgactgacagcaactagagaaactctgttatgccagcatgcatctagtcagagagccaacattcaaggtgaaaagtagcaatgtcatttctacatcaggcagatgtcttctgccaagctggatcatgggcatggttgttcattcacacactgtgcgttcaactgaacacaataactaaactaaacaaactaaaacaaggaatatttgcacaaattcctggcaaaacttgtattcaaatcagcaacaccccaagggmtaaaattcaaaagcctatcactttgaatgytttgggttttttggcgctctgcatagcgttcagttctcagatagtgcaaatgttttctctctgtccttttccattggaaatacagaaataataccctgtcaaacacacacacctggtttatatgttctgtgaccaggccattttcagaacaatgacaaacactaattctaagccagcgtaacaatgaggacaagaagacactgtcatttcagctgcttacagacaccacaatcactcaaaaattaaagaaacccaaatatattcagatct

SEQ ID NO: 14246 - DNA, 600 bp, Chicken  19866894219336_2
tttaatgcaaagaatgactgacagcaactagagaaactctgttatgccagcatgcatctagtcagagagccaacattcaaggtgaaaagtagcaatgtcatttctacatcaggcagatgtcttctgccaagctggatcatgggcatggttgttcattcacacactgtgcgttcaactgaacacaataactaaactaaacaaactaaaacaaggaatatttgcacaaattcctggcaaaacttgtattcaaatcagcaacaccccaagggmtaaaattcaaaagcctatcactttgaatgytttgggttttttggcgctctgcatagcgttcagttctcagatagtgcaaatgttttctctctgtccttttccattggaaatacagaaataataccctgtcaaacacacacacctggtttatatgttctgtgaccaggccattttcagaacaatgacaaacactaattctaagccagcgtaacaatgaggacaagaagacactgtcatttcagctgcttacagacaccacaatcactcaaaaattaaagaaacccaaatatattcagatctgtaataactgagattcaaactaattcagaa

SEQ ID NO: 14247 - DNA, 600 bp, Chicken  19866894219339_1
tcctatcccaaaagacagtgcacatcactttacccactaaaggctgtatcttgagcttttgtttcagtgggagattcacatatcgccactccatggcaatgtccatcccgtgtcaacgttctatctggcacaaactctgcaatattccaatgttaccaccattgtttccaacatgttgaagctgagattcagctctaggtacagttccctggtcataacctgctgatttgtgcaggtgaaccgatggagacattcttcatttcatgacgtgacagctatgcatgcttctctgggacatgkcttgtctttcacatcactgtcaccactgctgaaatgtgccacccagtgcctctctgtgttcacatctactgcttgaccccaataaacattcagaaagcatcaatgattatcaattgggtgcaagtttttccacatggaggaattcagttccacacctttgcttcagatgcatttccatgttggaccctattttgatagaatgcccctctgctgccatttattgcatagaacagtagaagaaaagtaagttaaaaaaaaagaaaaatctgcaatccaagacaccaaatgcaaccccctttg

SEQ ID NO: 14248 - DNA, 358 bp, Chicken  19866894219344_1
ctaaaccgtagtcagaattgtcaatagtcaaataagaatagttagtatacaaagtcttgtgagcactaacataaagcaaatattccagtagggctgaactagcatcacttcttcaattgtaaacagtcatcttctgtggaatgtgagggtggttccctctgggacacttctctcctattactaagtacagtcattagtaagaacaggatagacagtaactaaatacgaagacacatacacaaaaacaaaggcactaaaattcagggagatagactgaaagagttttgagtgtgagcaagrgcacatagmgactggtatgagggacattctgaagataaactctgaaagctttgagaaa

SEQ ID NO: 14249 - DNA, 349 bp, Chicken  19866894219344_2
agtcagaattgtcaatagtcaaataagaatagttagtatacaaagtcttgtgagcactaacataaagcaaatattccagtagggctgaactagcatcacttcttcaattgtaaacagtcatcttctgtggaatgtgagggtggttccctctgggacacttctctcctattactaagtacagtcattagtaagaacaggatagacagtaactaaatacgaagacacatacacaaaaacaaaggcactaaaattcagggagatagactgaaagagttttgagtgtgagcaagrgcacatagmgactggtatgagggacattctgaagataaactctgaaagctttgagaaa

SEQ ID NO: 14250 - DNA, 600 bp, Chicken  19866894219347_1
aacctttctgaggaaaatcggtgacagaggaaactggagcagagcttttctcacattttcaatctgaaacaaaggtggtgaagtgaacactatttactctgctgttattggtgcagattaaaccaaacacagaatgaaagcaaaccccttcagatatattatccccctcctctcaatgctcacttcatttgaatgttctcttggggtcagcatcagtcccataaatgagcatttgagttcactgagaactgacagctgaggctgtttatttgagcctatacttctatctggtaaacaggrcttctaccataaccgaaagcaacacagcaatttttttttccttttacaaaatgtacagaagaattgcagccacggtggttgaaaaccatcattgctctgtatttactgatggatttcccttcatctaaaaggagatgtgaaaaagacaaaggcacctgagcagcactgatgggcttttaatggctgaagtaaggataatccacaagatgttgtcttcctctttacaaagagatattctgaaaggaggttttttttttctccccgtagagatgtaaatgtcttcaagtggaaaaaagctct

SEQ ID NO: 14251 - DNA, 599 bp, Chicken  19866894219348_1
  misc_feature (1)..(20): n is any nucleotide
nnnnnnnnnnnnnnnnnnnnttcctgtgcttcaatcctgtgaataatattataagtgtgtaaggtgcttgtactgctgtaaagtcaaaatcgtgctcattcttcagctacgagcagaactggagcgtcaacagaaactctttcttttctgctctaagaacttggcaaactaagatactttacagtcaggagccccagctctgagttgaagctggtggtgatgtgcggctttggaaagatatattcagtagtgtctgctgcagagactttggcaatcacattttatcggctgttgacatgmtagttctgaaatcacaatatttttaaccttttgagatgtttcttaacgtgtttgagtttgatatttttttccctctttggcaggctgagaaatttgcacaaagaggtactttatgtttagagatcggtgagaaagaactgtgacctttgcgctgtaactggtggaaaaagtgggcagaagggartgctcagctcatcaggaaccatgcaggacctcactaatgttagttgcattcgaggcttcrgcaggcagatctttattttaatccaaaatttgaaatacaaattgtggaggggcca

SEQ ID NO: 14252 - DNA, 600 bp, Chicken  19866894219348_2
tcaggagccccagctctgagttgaagctggtggtgatgtgcggctttggaaagatatattcagtagtgtctgctgcagagactttggcaatcacattttatcggctgttgacatgmtagttctgaaatcacaatatttttaaccttttgagatgtttcttaacgtgtttgagtttgatatttttttccctctttggcaggctgagaaatttgcacaaagaggtactttatgtttagagatcggtgagaaagaactgtgacctttgcgctgtaactggtggaaaaagtgggcagaagggartgctcagctcatcaggaaccatgcaggacctcactaatgttagttgcattcgaggcttcrgcaggcagatctttattttaatccaaaatttgaaatacaaattgtggaggggccatccttacakagagtttctattcacctctctgctcgctgtctcccttctcatggtctcctaagtgttggagcatcgcccagcagtgatggtgacaggggcacagcagtgaccttgggcactttcagaaacggatgggcacaatttctcaaagtttagtgaagagaaaaaaaaaacaacccaaactc

SEQ ID NO: 14253 - DNA, 600 bp, Chicken  19866894219348_3
cagtagtgtctgctgcagagactttggcaatcacattttatcggctgttgacatgmtagttctgaaatcacaatatttttaaccttttgagatgtttcttaacgtgtttgagtttgatatttttttccctctttggcaggctgagaaatttgcacaaagaggtactttatgtttagagatcggtgagaaagaactgtgacctttgcgctgtaactggtggaaaaagtgggcagaagggartgctcagctcatcaggaaccatgcaggacctcactaatgttagttgcattcgaggcttcrgcaggcagatctttattttaatccaaaatttgaaatacaaattgtggaggggccatccttacakagagtttctattcacctctctgctcgctgtctcccttctcatggtctcctaagtgttggagcatcgcccagcagtgatggtgacaggggcacagcagtgaccttgggcactttcagaaacggatgggcacaatttctcaaagtttagtgaagagaaaaaaaaaacaacccaaactctccagaattatcttgaaactgaaagaaattagttataagggtttctggccacacatgttc

SEQ ID NO: 14254 - DNA, 586 bp, Chicken  19866894219348_4
aaatcacaatatttttaaccttttgagatgtttcttaacgtgtttgagtttgatatttttttccctctttggcaggctgagaaatttgcacaaagaggtactttatgtttagagatcggtgagaaagaactgtgacctttgcgctgtaactggtggaaaaagtgggcagaagggartgctcagctcatcaggaaccatgcaggacctcactaatgttagttgcattcgaggcttcrgcaggcagatctttattttaatccaaaatttgaaatacaaattgtggaggggccatccttacakagagtttctattcacctctctgctcgctgtctcccttctcatggtctcctaagtgttggagcatcgcccagcagtgatggtgacaggggcacagcagtgaccttgggcactttcagaaacggatgggcacaatttctcaaagtttagtgaagagaaaaaaaaaacaacccaaactctccagaattatcttgaaactgaaagaaattagttataagggtttctggccacacatgttctatgtccataagtgtctgcaggctgtacccagcaggggataaggaaacat

SEQ ID NO: 14255 - DNA, 600 bp, Chicken  19866894219349_1
agtacgagatttctacccgcctgctactctttttttctgctgggctatcaaccttattttgttttgctttttcttttacttagctaggatttatgtttttggcatccaaatatttatgtaccacttgagtttagcctagggagactacaggtttccaaactggcattcttgaaatactgaaagaggagaaaaggagatcttacttaaaaacaaaatgaaacagcaaaagtgaacaagcaagaattagtctgatatatgagactatatggggtagttcaccgcttacattcctttgaaatrcaatacatcgatgtgttgtttctttggcaagtgtttgctgtaggaacattacatgttaacagttctgtaaaramgattawgcctggtgatcttttttttcatcctggttttagagcagttatctgtgtaaataattcttagtgtgatttattagcttcacagcctccctttacactctaccttatgtttcacctatggaaatggaacttctgaattttgggttagaaactgtgcattggctggtaatttttttccaactattgccttgatatcttgccgtttctgtaacactactttgtg

SEQ ID NO: 14256 - DNA, 600 bp, Chicken  19866894219349_2
cttttacttagctaggatttatgtttttggcatccaaatatttatgtaccacttgagtttagcctagggagactacaggtttccaaactggcattcttgaaatactgaaagaggagaaaaggagatcttacttaaaaacaaaatgaaacagcaaaagtgaacaagcaagaattagtctgatatatgagactatatggggtagttcaccgcttacattcctttgaaatrcaatacatcgatgtgttgtttctttggcaagtgtttgctgtaggaacattacatgttaacagttctgtaaaramgattawgcctggtgatcttttttttcatcctggttttagagcagttatctgtgtaaataattcttagtgtgatttattagcttcacagcctccctttacactctaccttatgtttcacctatggaaatggaacttctgaattttgggttagaaactgtgcattggctggtaatttttttccaactattgccttgatatcttgccgtttctgtaacactactttgtgctgagagcacagtgaggagttccagagacaatgattgtgctgttagtgacctgacagcaaagccatggaatc

SEQ ID NO: 14257 - DNA, 600 bp, Chicken  19866894219349_3
tttacttagctaggatttatgtttttggcatccaaatatttatgtaccacttgagtttagcctagggagactacaggtttccaaactggcattcttgaaatactgaaagaggagaaaaggagatcttacttaaaaacaaaatgaaacagcaaaagtgaacaagcaagaattagtctgatatatgagactatatggggtagttcaccgcttacattcctttgaaatrcaatacatcgatgtgttgtttctttggcaagtgtttgctgtaggaacattacatgttaacagttctgtaaaramgattawgcctggtgatcttttttttcatcctggttttagagcagttatctgtgtaaataattcttagtgtgatttattagcttcacagcctccctttacactctaccttatgtttcacctatggaaatggaacttctgaattttgggttagaaactgtgcattggctggtaatttttttccaactattgccttgatatcttgccgtttctgtaacactactttgtgctgagagcacagtgaggagttccagagacaatgattgtgctgttagtgacctgacagcaaagccatggaatcct

SEQ ID NO: 14258 - DNA, 600 bp, Chicken  19866894219349_4
tagctaggatttatgtttttggcatccaaatatttatgtaccacttgagtttagcctagggagactacaggtttccaaactggcattcttgaaatactgaaagaggagaaaaggagatcttacttaaaaacaaaatgaaacagcaaaagtgaacaagcaagaattagtctgatatatgagactatatggggtagttcaccgcttacattcctttgaaatrcaatacatcgatgtgttgtttctttggcaagtgtttgctgtaggaacattacatgttaacagttctgtaaaramgattawgcctggtgatcttttttttcatcctggttttagagcagttatctgtgtaaataattcttagtgtgatttattagcttcacagcctccctttacactctaccttatgtttcacctatggaaatggaacttctgaattttgggttagaaactgtgcattggctggtaatttttttccaactattgccttgatatcttgccgtttctgtaacactactttgtgctgagagcacagtgaggagttccagagacaatgattgtgctgttagtgacctgacagcaaagccatggaatcctctgtct

SEQ ID NO: 14259 - DNA, 600 bp, Chicken  19866894219353_1
cccacaggcaccctcgacccagggcaggaggaggtagcccccccccccatgttttgtgagaaatgtccaaagccaaaggagagcagacacgctgagatgcttgctgaggatcacatgaggtgctccatcctgtgcaaagctcatttccctttattttcacagccacaaccacaagagcagctgtccccctccatcccagctgactccagctggggcacggcaggttgcaggcacatctcagccagagagaaaacacgagggagggaggagagcagggtttatggctgtgatccttgaagyttgcagcttgtcttactgtctstggcacatagctttctccgaatgaattgctacaccacaacaagtccttgtgctcgataacagaaggagcatgtgtttgtgatgaaacaaaaactgtgaacaaaactaacgggtgtatatatttttctaagaagtagaaaagcagtgatatgagagctgagtgtgagcattttcacaggaacgagctgctttttgccactgggtcagtgtctttgccctgcacataaacaacactacatctcacagggaagtctgactgcagcgtgggctgcctgggag

SEQ ID NO: 14260 - DNA, 600 bp, Chicken  19866894219353_2
ggcaggaggaggtagcccccccccccatgttttgtgagaaatgtccaaagccaaaggagagcagacacgctgagatgcttgctgaggatcacatgaggtgctccatcctgtgcaaagctcatttccctttattttcacagccacaaccacaagagcagctgtccccctccatcccagctgactccagctggggcacggcaggttgcaggcacatctcagccagagagaaaacacgagggagggaggagagcagggtttatggctgtgatccttgaagyttgcagcttgtcttactgtctstggcacatagctttctccgaatgaattgctacaccacaacaagtccttgtgctcgataacagaaggagcatgtgtttgtgatgaaacaaaaactgtgaacaaaactaacgggtgtatatatttttctaagaagtagaaaagcagtgatatgagagctgagtgtgagcattttcacaggaacgagctgctttttgccactgggtcagtgtctttgccctgcacataaacaacactacatctcacagggaagtctgactgcagcgtgggctgcctgggaggggagatattgctgtcctaagg

SEQ ID NO: 14261 - DNA, 600 bp, Chicken  19866894219353_3
atggggaaagtgggttggtttggctggagagatgaaacagatgagttcagctgccctgctctgaataagcaggcgagaatcaggtaggatgaggttataaaacagtgcagttcttggcagtccattaagatggcagggactggggtagaagggaagcagcactgtagaaacagaggaaggagaggatttaaggatgtcaagtgcttgtgtggcccctcagcctgtgagagagaagctgcagatgctgcagatttgatggatgaggtggactgtggccaagcccagcagagagctgagaastggctccattgtgcccaacacagagcataggctggagtgaggagaggtactgcgcagtggcaagtatcctgaaatccttgataagcactgggcactgtgtggtaggaatgagcagcccttcagggccctcagtgataaagtgaaaaaagatcaagctgtggttggagaggctggttggttttgaggcaggtttcctcaatcttgaaaaggctgaggaccattacaggctgaagggccaggcctgaggactggggcttgttaatgaagaatggtcataaccaccaggtaacttggcaagca

SEQ ID NO: 14262 - DNA, 600 bp, Chicken  19866894219354_1
agcacttatgcttttttttttttcttttttgtgtgtgtgtgtgtaaatgagtctaaatgtctgaaaataattttaatgaccgctgagtgggcagagataattctacctattatacctctccattttcctatgatggtgaacttctcaaactgtctgtaaaagcccagattctcctgttaccctcgtgcatacccagacaccaggaagacatatgtcttaatggataatggctccattgtgtgaatactgtcagtatcatatcagtgtgacacaaatacagcaaattagccgttacttgcytcagaactgcttcagctctttgtgtggaatggaaaaggtgcaagtgaaaactctctgaagcagcatgaggcttttcctttttttaatagtattcttgtggaaaactgcaccatgttttagtgctaattcaatgccattttttttttcaaagtaatgtaagaattaatgttcatattttacctgggcacttggaaattgctatgttggcaaaatcttcctgaaggaatgctaatgacaatcttttccaaacatactcaaaagaaacattccttgtgcatatcatgctaaatgttcagagag

SEQ ID NO: 14263 - DNA, 600 bp, Chicken  19866894219378_1
catgctataaccacaaattgggaatgttgtatcaatacttaatgtagactctttatgcatcaaaatttgaaacaatctgttgcttactaaagttttctttagtaagatgcctactgcatctgttctagcagatttatctagctctttcatgtagtttctagctatgtgaacttttcaccacatgcacacgagttgtaaagcacagagctatctgtctgtgataggatcctgtgttgctattgatgttaactgatatggctactgaataacagaatttgttgctgctactcctaccacttrcctttattacaggcagtagcatagaagaaaagtacaggcaaccaatagcctaccctaataactacaggcccaggaagagcacggagtacgcaggttctttacactgtgttctatatgctgtccactaaggctttctataatacattgtttttttgacagatgttaattaatctctactaatcttttgggtcctagatgtaagaagtgaacagaagtcataacatggatttacttggcgttttccctgtcagctacttttgaggatactgtaccatttatttcttcatctattccaagtgc

SEQ ID NO: 14264 - DNA, 600 bp, Chicken  19866894219379_1
ttaagtgtaactcagttagttagctgtaattcagttctttagcagttgtgcctcttttaagaataaagctcataatagcagggctctgtacaatctaaggctctactttcattagagtgttgacccaaaatatctctagaagtacctgtcacaagataacagtgttctttggatatcagatgataaaaatgaaatagatgagagcgtaaattcgatggagtttattgtaactacacatactaattgtaattaagcctgagcagaatgcaagcaatctaatcataagaagaagagagagaraaaagccacttactgtgtacacaaggtaaaaaactgttagtcttaaatgctgtgatgagctacagttaagaaaatcactgacctctcatattcttcttcacaatgtagatattttcttcactatacatcactcctggaccatccaatgagagctattccaagctctagttgtggagctacacttataaggctgtgactttcagttgtatgagtgaaagtgatgtacgagtgaaagtgttgtatgagtgaaagattgatgcaaggctatcaggtatgtttctagaaggctgctggtacatg

SEQ ID NO: 14265 - DNA, 600 bp, Chicken  19866894219384_1
taggacaagtggttcagtctcggttagttgagttcactcgggccctctcacccaaagctgaacgcggtactctgcgctcatgtcctccttaggaaagaattttgtgcctctcagttgaacagtggtggttttacacccttgagaaatacatcttcaaaagcattacctcttctaggcagagatcttcagggctgcagactattacacttgagctttcgagtgccacaaactctttacttttaaagcactgagagtcgtgcctgttgttttcaagcttctctccaggcagactaattcttytattattctctgtacattcgtatcaggtggtaaatctgcagtacagtgaagttcaggatcgggtcatgctcactggccgccacatggttcgagacgtgagctgcaagaactgcaacagcaaactgggctggatctatgaatttgccactgaagacagccagcgctacaaggaaggccgtgttatcctggaaagagctttggtccgagagagcgaaggatttgaggagcacgttccatctgacaattcctgaagaggcttgaatcttccgtcaggttctcttcatttgaaacttaaaagta

SEQ ID NO: 14266 - DNA, 600 bp, Chicken  19866894219393_1
gatctataaaaacgaattaaaagactcatttttctcccttgaagaagattccttcttcctatcattttgccatcaaggttataattaaagacactggctgctgtggcctgtatacataactgcaatatatgatcaaggatcatgagcactaggataaatgcactatcacactaattatcgtgttatcttaccgacgggaggctgttttatctctacctagagatgaaggacatatctgacagacaccaggactttgctttgatgtcagatttgtgtacaaaagaatcaaagactcaaacyctttccaaaatggttccaatgtggtttaatcctgccagatgattccctgcctccccgccagagcctgctttgaagtggtgctgcacagcgcgtgctgctggtgtgtattcccaaaagctgaagtgctgggtgtagccccacatgctgagcagaaggccatgccctccacctcacactgctactccctcatttacatgatcacagggcagagaggggatgtgatgaggagggcaggcagggatggctgamggggcactggttaaagtgccgtccctaggatgctcctggggcatgtggcca

SEQ ID NO: 14267 - DNA, 544 bp, Chicken  19866894219393_2
gactttgctttgatgtcagatttgtgtacaaaagaatcaaagactcaaacyctttccaaaatggttccaatgtggtttaatcctgccagatgattccctgcctccccgccagagcctgctttgaagtggtgctgcacagcgcgtgctgctggtgtgtattcccaaaagctgaagtgctgggtgtagccccacatgctgagcagaaggccatgccctccacctcacactgctactccctcatttacatgatcacagggcagagaggggatgtgatgaggagggcaggcagggatggctgamggggcactggttaaagtgccgtccctaggatgctcctggggcatgtggccagccacttcctgcttccggccttgctttctataagagcacaaccaccctgggctcatcacaccaccagtgccagcacatcagtgagagcatgtctgatatcacctccaccacagggacctccatgttcctaatgagaggtcacgctggctgttctgccaatcctctcctctaccaagcgctttgctacttgctg

SEQ ID NO: 14268 - DNA, 549 bp, Chicken  19866894219401_1
tcagtttgaaaactgtagtaacttacccaaattactgcatcttgtgtctcttcaggggaatggaaaaggtgaatagcagctatttttgcaacacagcggctcagatgtatttctctatatgcagagttatttctttttaccacagtgcattcactcctcttcttttcaaagccaggccctagaaaagtgctcttccggttgaacaacaaacactcctcaaattttcaatgtaagcttcagagaggatgtcttagagtcacacacctgaagtgcttggccttgagtactttaaaaatagasgtttctacatctgtcagaataaagaatatccagccaggaactgttggcataaaaacaagagccttggtcttagcaatctagcacttccacctggataaagaaatactgaaaggaattcgaagacagccagcaacataataaaaacaaatgagcctgtgtgcataccctgaagtagcttaaggaaaaggggtgtacccttatttgaggaaaattcttgatacgacaggaagaaaacaaattggacagaca

SEQ ID NO: 14269 - DNA, 599 bp, Chicken  19866894219405_1
  misc_feature (1)..(134): n is any nucleotide
nnnnnnnnnnnnnnnnnnnnnnnnnnnnnnnnnnnnnnnnnnnnnnnnnnnnnnnnnnnnnnnnnnnnnnnnnnnnnnnnnnnnnnnnnnnnnnnnnnnnnnnnnnnnnnnnnnnnnnnnnnnnnnnnnnnnnnctctaagaacataataaaagttttgtaacctattgagagttaacatagaaattaaatgtaaacatagcttccccacactgtgcaaagaaaagtccaacctaacaaggatggttctggtttgttggtaaactgattattcacacttcacatacagaaacacagtttyctgaaccttctgtaaygtttgttaagagttacctgagtaaactgccagtaaagcttcattctcttggctttggcataattgcattcaatgagcctgggcctgctgttcacatccaccaggcatctgttgtcatcatcgtcaatagtgggactcagaacacccacatggagctgctgattgcttgtgtaataaacattctgcaagaagaaacacaaacatgatttgtggcctctaaaaagaagcagcactttcaccaaaaaccaaatggcaaatataaatgtactgaatagcagtaggct

SEQ ID NO: 14270 - DNA, 599 bp, Chicken  19866894219405_2
  misc_feature (1)..(118): n is any nucleotide
nnnnnnnnnnnnnnnnnnnnnnnnnnnnnnnnnnnnnnnnnnnnnnnnnnnnnnnnnnnnnnnnnnnnnnnnnnnnnnnnnnnnnnnnnnnnnnnnnnnnnnnnnnnnnnnnnnnnnnctctaagaacataataaaagttttgtaacctattgagagttaacatagaaattaaatgtaaacatagcttccccacactgtgcaaagaaaagtccaacctaacaaggatggttctggtttgttggtaaactgattattcacacttcacatacagaaacacagtttyctgaaccttctgtaaygtttgttaagagttacctgagtaaactgccagtaaagcttcattctcttggctttggcataattgcattcaatgagcctgggcctgctgttcacatccaccaggcatctgttgtcatcatcgtcaatagtgggactcagaacacccacatggagctgctgattgcttgtgtaataaacattctgcaagaagaaacacaaacatgatttgtggcctctaaaaagaagcagcactttcaccaaaaaccaaatggcaaatataaatgtactgaatagcagtaggctgaccctatggttgctt

SEQ ID NO: 14271 - DNA, 600 bp, Chicken  19866894219405_3
aattgcattcaatgagcctgggcctgctgttcacatccaccaggcatctgttgtcatcatcgtcaatagtgggactcagaacacccacatggagctgctgattgcttgtgtaataaacattctgcaagaagaaacacaaacatgatttgtggcctctaaaaagaagcagcactttcaccaaaaaccaaatggcaaatataaatgtactgaatagcagtaggctgaccctatggttgcttttaaattgtttccattcatacaggaagcaacataacattttaagattaacagttaaccaayaaacattgttggtaatagttaactactgaatttagtctcctattcagtctggttcagtctgagtggatcctgcagggcagaagcaaaatgatggccctggctgggtaaactaccttaatctgtttgttggcaaaacttcacagaaataggacaatcgaatgtaatcatgcttagcagagataataagcaggttgccacttacctttcaaacagctcaacctacccaataacatcacttcacttatcagtgtcaaccagttcagaaaaataagtgtaaagtcttgtattctcaaataccac

SEQ ID NO: 14272 - DNA, 600 bp, Chicken  19866894219405_4
ataccacggggacaggcatctttcagcttataatcagcatggaaaataaactcaaactgaagctgactgtgatggttattacttctaactgagctatttcaggatatagctttgcttatctaatattatggatattattatattaccatgaatataattactatatactatagtactactgtatattatcgtatcttatccaataatatctcatcatcttccagaatagaacccattatgcacagtattttcattactatgtttatccaataattctatcacattataagcacacaactkgttcaaattctgcttcagctgctaatgaacagtaagatactggtttgtgtagctcaccagacagcttttctgaaaactatgaacaacccccagctcctttaccccagccccggaayaggagagtcccgaggtaccatctcacaatgtacttgttaggtatgcatacgtgactttctattaatcatcgtttaaattgacctgcagtatgaaatgacctgtaatatgaaaaaatattacatataaaaamcatgcttgcatttcattactttctatgtagccctaataaaaaggagcatgtaa

SEQ ID NO: 14273 - DNA, 600 bp, Chicken  19866894219405_5
tatctaatattatggatattattatattaccatgaatataattactatatactatagtactactgtatattatcgtatcttatccaataatatctcatcatcttccagaatagaacccattatgcacagtattttcattactatgtttatccaataattctatcacattataagcacacaactkgttcaaattctgcttcagctgctaatgaacagtaagatactggtttgtgtagctcaccagacagcttttctgaaaactatgaacaacccccagctcctttaccccagccccggaayaggagagtcccgaggtaccatctcacaatgtacttgttaggtatgcatacgtgactttctattaatcatcgtttaaattgacctgcagtatgaaatgacctgtaatatgaaaaaatattacatataaaaamcatgcttgcatttcattactttctatgtagccctaataaaaaggagcatgtaattgtaatttaaataagttattataaagatgaatctccatagcagcacttattcaggaagaagatacttttaacaaatattatcaattatgccatccagtcttaagtacaaaatgga

SEQ ID NO: 14274 - DNA, 600 bp, Chicken  19866894219405_6
ttttcattactatgtttatccaataattctatcacattataagcacacaactkgttcaaattctgcttcagctgctaatgaacagtaagatactggtttgtgtagctcaccagacagcttttctgaaaactatgaacaacccccagctcctttaccccagccccggaayaggagagtcccgaggtaccatctcacaatgtacttgttaggtatgcatacgtgactttctattaatcatcgtttaaattgacctgcagtatgaaatgacctgtaatatgaaaaaatattacatataaaaamcatgcttgcatttcattactttctatgtagccctaataaaaaggagcatgtaattgtaatttaaataagttattataaagatgaatctccatagcagcacttattcaggaagaagatacttttaacaaatattatcaattatgccatccagtcttaagtacaaaatggacaacgaagtatttttgtttcaaacacttcagaatacccaagcaaaacaccttaccagcaattctgctcctaaaatactgcaacatcatcatcaactaacccaacaggatagaaatgttgagataattcaga

SEQ ID NO: 14275 - DNA, 599 bp, Chicken  19866894219408_1
  misc_feature (1)..(159): n is any nucleotide
nnnnnnnnnnnnnnnnnnnnnnnnnnnnnnnnnnnnnnnnnnnnnnnnnnnnnnnnnnnnnnnnnnnnnnnnnnnnnnnnnnnnnnnnnnnnnnnnnnnnnnnnnnnnnnnnnnnnnnnnnnnnnnnnnnnnnnnnnnnnnnnnnnnnnnnnnnnnnnnttggccgatgcatctaatgctgtgctcactgcaagccttcttcaaacaataacaattcccaattcattgtgtatgtgcatgcacaaaagaaacatgatgaaagctgtctttcatctctttgaatacagcagaaaattctgrgctgcttaaaattgaattttgtcagatggtttaaaatcaacaggcgcatacacagttcagtgcagctgggaccagtgcagcataagctatccaatgatctacaccttactgtagcatgttgcaaaaataaatgtgtctgggaggatccgtgtagccatcaaagtgattcggacgagcatttcagtgattacttatactgacagaaaatactaattccctgttatgtgatacttaatcttttcatttactaaataatttgggtaggtgtgttcatctcttatggaagtgaagcttatgtg

SEQ ID NO: 14276 - DNA, 600 bp, Chicken  19866894219411_1
tgctgctcaggacgtctattacagagatgaaatcggaaacatctccaccagccacctgctggtcctggatgactctgttgagatggagatccgtccccgcttcccactttttggggggtggaaaacccattacatcattggctacaacctgccaagctacgaatacctctacaatcttggtgggtggtttgggcaaagggaataagaaaccttttactctgcatttaaaggtggttcctgtacagtagtgaattcaaagccatggtatgctgtaccttagcaattgttgctaggagttayttctagaatatgcaaatccatcccttttttctgtgcttcctacaggtttttgtagacatcagtttaaaacatatttgagtgagctagtgccccctgctgcatgatgcatctgactgaattctgcttctaataggagctgagcttcrggcttgctctttgttctttgaaacgtaaccactctgtggtctgcactgtcctaggtgatcagtatgccctgaaaatgagatttgtggaccatgtctttgatgagcaagttacagattctctgactgtcaagattgtactgccagaaggtgccaa

SEQ ID NO: 14277 - DNA, 582 bp, Chicken  19866894219411_2
acctgccaagctacgaatacctctacaatcttggtgggtggtttgggcaaagggaataagaaaccttttactctgcatttaaaggtggttcctgtacagtagtgaattcaaagccatggtatgctgtaccttagcaattgttgctaggagttayttctagaatatgcaaatccatcccttttttctgtgcttcctacaggtttttgtagacatcagtttaaaacatatttgagtgagctagtgccccctgctgcatgatgcatctgactgaattctgcttctaataggagctgagcttcrggcttgctctttgttctttgaaacgtaaccactctgtggtctgcactgtcctaggtgatcagtatgccctgaaaatgagatttgtggaccatgtctttgatgagcaagttacagattctctgactgtcaagattgtactgccagaaggtgccaagtaagtaccattactcctggtttgttgctgtagaagatgctgtgttggtaacagttattggggcttctctgatggcctgaagacagtgaaacagcatagcgactacacgtagagaccttggaacgcag

SEQ ID NO: 14278 - DNA, 600 bp, Chicken  19866894219412_1
tgggtgccccatccctggagacactcaaggccaggctggacggggctctgagcaacctgatctagctgtaggtgtccctgttccctgcaggggagttggactagatgacctttaaaggtcccttccaactcaaatgattctacgatacaccatcctgcacattgaaatgatgttttcttgcagttgctcttctccttccttggttttagagctcctttacctgaactaagcactttttaatgcctttgcagcacttacagttcctgtttacacacagaggaagacacaaaccaagttcawaacttgtgacatcacttgatcccttactgtactacacctctatcaaaatttcctatagcagtaccgttgtctacgtcagccttygatgccatttgtttmatataaagggagttatataaagttacaaagagaagcaatttgattattccctgtgaaaatgaatgtatgtatgcctaccattccttctggatttacattacagttcccgctggatgagggagaagtatgtgttttccatgtgctatccgaagcattattttagctcactagaactcaatgcttacgaaaaatctgtctaac

SEQ ID NO: 14279 - DNA, 600 bp, Chicken  19866894219412_2
ctgcaggggagttggactagatgacctttaaaggtcccttccaactcaaatgattctacgatacaccatcctgcacattgaaatgatgttttcttgcagttgctcttctccttccttggttttagagctcctttacctgaactaagcactttttaatgcctttgcagcacttacagttcctgtttacacacagaggaagacacaaaccaagttcawaacttgtgacatcacttgatcccttactgtactacacctctatcaaaatttcctatagcagtaccgttgtctacgtcagccttygatgccatttgtttmatataaagggagttatataaagttacaaagagaagcaatttgattattccctgtgaaaatgaatgtatgtatgcctaccattccttctggatttacattacagttcccgctggatgagggagaagtatgtgttttccatgtgctatccgaagcattattttagctcactagaactcaatgcttacgaaaaatctgtctaacttcataaatgttagcttaaaaaaaaatctgtatcattcacagaaagcgttagttgagacatcaagaattcattaaactgaggaa

SEQ ID NO: 14280 - DNA, 600 bp, Chicken  19866894219412_3
actagatgacctttaaaggtcccttccaactcaaatgattctacgatacaccatcctgcacattgaaatgatgttttcttgcagttgctcttctccttccttggttttagagctcctttacctgaactaagcactttttaatgcctttgcagcacttacagttcctgtttacacacagaggaagacacaaaccaagttcawaacttgtgacatcacttgatcccttactgtactacacctctatcaaaatttcctatagcagtaccgttgtctacgtcagccttygatgccatttgtttmatataaagggagttatataaagttacaaagagaagcaatttgattattccctgtgaaaatgaatgtatgtatgcctaccattccttctggatttacattacagttcccgctggatgagggagaagtatgtgttttccatgtgctatccgaagcattattttagctcactagaactcaatgcttacgaaaaatctgtctaacttcataaatgttagcttaaaaaaaaatctgtatcattcacagaaagcgttagttgagacatcaagaattcattaaactgaggaaattcagttcaagata

SEQ ID NO: 14281 - DNA, 600 bp, Chicken  19866894219417_1
ttttcatcccatcaccaacctggtggctgggaggaaagaaaggaagagagaaaaaagatccataaagcaaacaagcattgggaaactggccaaagttctacagacacagtaaaataacctcttattggtttctatctacttttaggcaatgtacatgccctcaccccagcatttgtactgcaacaagcttacacagtagagatgctgaacaaagcatcctgttttgtgaggaggtagacttcttgaacagaagtcaccatccagcaggagacaccaaggaaggtgcctgcacttctcttyttgcatctgtcttgttctgagatagcatgtgctgtactttgagacaaatgtctggacgtacaaagttaagaatagacagatctctgctcaggtttcatccttgatttccagtgggtgtctgatgcccttttaagtttaagacttctaccttgttttgaaggcactcggtgagtcgtttaaatggataggagcgatgaattgaaggattttcataagttctgacaagttcttgtctgattttgatgcatgattttctctgtgccttgctatgataaacaatcatcttgagaaactggattt

SEQ ID NO: 14282 - DNA, 600 bp, Chicken  19866894219422_1
cagaaaactctttggagcactttttctagaaacaaacaagtgaacaaggaagtcataaaatcttaaaacacaaactgagccagaaaactccctttctggaagctgctgccacttcttcgctcccttggtccctgttttcttcccctaccccatcacagccatcattcccatcctggtcatcatccccttccctcccctgtgctgccctttctggctggagacagagaggagcgagtcactgagatggagggaagggcactgggcatccccaggaatacgcatggaaggagaaggcatccratgccactgcagcattgggaggggaggttggtggtggttgggatttcatctaaggggtgccttgcctgtcctccccagccccaaaactcctgggctgagtttttctagggaaacgtgtttgcaggtccctccttgcttcccggctgccctcaccagtggggagccaagaccttgcaagccaatgcccaactccaggctcactgaaaagctgctttctggagctgtaggcactgagctgcctctgctgcaaagcacatctctccctgtggctgtctttgctttctccctcatcttgcgcta

SEQ ID NO: 14283 - DNA, 600 bp, Chicken  19866894219434_1
cccttccacagggcctactcaagatagtggctttgtgtcaagccagcaatgagcctgtggctgaaatgcccagctccagttgtcagagcagatgacagagcagcttttttcttgccacattcatagcataagagattggtttccctcgagggagcctgaaaataagccttaatatgcacaatgcacaaggtccactgcagtactgatgccgagaggaaacaaaggcttcctgctctgcagcctccatgagggtgggtaatcccatcagttccagccgccgcaccagaagcagctccacayagtgcagtaagactgctctgaaaccacctttctgctgtgaaatcctagtgggaagagatgcatatgcatcccaccactgaaacagtcagctctggtttcaatkcatcctgatattaggccagaaataacattaaaagtaacaaaaaaaaaacatcagtcaaagaggaacttcacaacaggctttggctatttgggactaggttgttaattagtaatatttattactaataaatcgacagaaaaacttcaagggagccttgcacctgagtctcacctctttatgttaattgggaatagtcg

SEQ ID NO: 14284 - DNA, 600 bp, Chicken  19866894219434_2
cttttttcttgccacattcatagcataagagattggtttccctcgagggagcctgaaaataagccttaatatgcacaatgcacaaggtccactgcagtactgatgccgagaggaaacaaaggcttcctgctctgcagcctccatgagggtgggtaatcccatcagttccagccgccgcaccagaagcagctccacayagtgcagtaagactgctctgaaaccacctttctgctgtgaaatcctagtgggaagagatgcatatgcatcccaccactgaaacagtcagctctggtttcaatkcatcctgatattaggccagaaataacattaaaagtaacaaaaaaaaaacatcagtcaaagaggaacttcacaacaggctttggctatttgggactaggttgttaattagtaatatttattactaataaatcgacagaaaaacttcaagggagccttgcacctgagtctcacctctttatgttaattgggaatagtcgctgcacttccagactggcccggctgatggtggctgcaaaggatttgccttgacagtaactgaagaacaacatctgcaggacatgggagtaatacactgacaca

SEQ ID NO: 14285 - DNA, 600 bp, Chicken  19866894219436_1
ttccttaaaaccaccctgccatcaaatctgtcggtttaattgtgagtattgcagttcggtatcctgctgagccctagaccttgtgccccctattcttttgttttccatataagtcgactcatagaataacacaggtcttccctggtgcatggggagatgagcaaggatgtggaaaaaaaatggaagttggtctgatctagctgatccaacgagggttgttgaaaaacccttttcaactctgttcttaaaatccttctgcttcctgcagtgatccttctacagcagccagctcttaatgcycgacagggatgaaaaatgattcaaaaaggaaataaaaaacacgtaggcttttgtgagctctctgagcatttgaccagccccggctgcatgtggcagctccaccctctgttgaagcaactcagttgttagytgtaggatgtggagagttgactctaaagttttccattacttctcaggaacagtagaactagagctagagattcacactcagctacagatgtacatgtcaaggccactgtatctttcctccatatcatctaaagagaaatggtgtatcttggaacagcctgcaagttttgc

SEQ ID NO: 14286 - DNA, 600 bp, Chicken  19866894219436_2
acaggtcttccctggtgcatggggagatgagcaaggatgtggaaaaaaaatggaagttggtctgatctagctgatccaacgagggttgttgaaaaacccttttcaactctgttcttaaaatccttctgcttcctgcagtgatccttctacagcagccagctcttaatgcycgacagggatgaaaaatgattcaaaaaggaaataaaaaacacgtaggcttttgtgagctctctgagcatttgaccagccccggctgcatgtggcagctccaccctctgttgaagcaactcagttgttagytgtaggatgtggagagttgactctaaagttttccattacttctcaggaacagtagaactagagctagagattcacactcagctacagatgtacatgtcaaggccactgtatctttcctccatatcatctaaagagaaatggtgtatcttggaacagcctgcaagttttgcttcttttctgtctctgtgttcctctttctgtgactttgtgctgcrgagatgttccccgttccaacttgtatcacaccatgtggctgacagtagcaagagactggggacttggggtctcatggaaaccaat

SEQ ID NO: 14287 - DNA, 600 bp, Chicken  19866894219436_3
ggcttttgtgagctctctgagcatttgaccagccccggctgcatgtggcagctccaccctctgttgaagcaactcagttgttagytgtaggatgtggagagttgactctaaagttttccattacttctcaggaacagtagaactagagctagagattcacactcagctacagatgtacatgtcaaggccactgtatctttcctccatatcatctaaagagaaatggtgtatcttggaacagcctgcaagttttgcttcttttctgtctctgtgttcctctttctgtgactttgtgctgcrgagatgttccccgttccaacttgtatcacaccatgtggctgacagtagcaagagactggggacttggggtctcatggaaaccaatgcggctattgaaggtgattctaaaagacctgggtagcgtagctattaaagctataacattaaagtttgttaaacgyrtccaggactggtatttccattttaaaataaatcctaattttaataaagtaaaagttaaaggctctgctgaatgtctagacaaaataatttcctaacatctataatttccctttcccttcccagtcgtatgttacagag

SEQ ID NO: 14288 - DNA, 600 bp, Chicken  19866894219436_4
ctcagctacagatgtacatgtcaaggccactgtatctttcctccatatcatctaaagagaaatggtgtatcttggaacagcctgcaagttttgcttcttttctgtctctgtgttcctctttctgtgactttgtgctgcrgagatgttccccgttccaacttgtatcacaccatgtggctgacagtagcaagagactggggacttggggtctcatggaaaccaatgcggctattgaaggtgattctaaaagacctgggtagcgtagctattaaagctataacattaaagtttgttaaacgyrtccaggactggtatttccattttaaaataaatcctaattttaataaagtaaaagttaaaggctctgctgaatgtctagacaaaataatttcctaacatctataatttccctttcccttcccagtcgtatgttacagagaaagtgcccgtgtaactggtaatgcttcagcaagctctcattccagtagtgatgttttcttggatgctcttttgtaattgtctgagttcctctgagcagctctrcattccctagatggggagagaaagatttaaacttctactgaaaggcttcacgagagt

SEQ ID NO: 14289 - DNA, 600 bp, Chicken  19866894219436_5
tcagctacagatgtacatgtcaaggccactgtatctttcctccatatcatctaaagagaaatggtgtatcttggaacagcctgcaagttttgcttcttttctgtctctgtgttcctctttctgtgactttgtgctgcrgagatgttccccgttccaacttgtatcacaccatgtggctgacagtagcaagagactggggacttggggtctcatggaaaccaatgcggctattgaaggtgattctaaaagacctgggtagcgtagctattaaagctataacattaaagtttgttaaacgyrtccaggactggtatttccattttaaaataaatcctaattttaataaagtaaaagttaaaggctctgctgaatgtctagacaaaataatttcctaacatctataatttccctttcccttcccagtcgtatgttacagagaaagtgcccgtgtaactggtaatgcttcagcaagctctcattccagtagtgatgttttcttggatgctcttttgtaattgtctgagttcctctgagcagctctrcattccctagatggggagagaaagatttaaacttctactgaaaggcttcacgagagtg

SEQ ID NO: 14290 - DNA, 600 bp, Chicken  19866894219436_6
ctaaaagacctgggtagcgtagctattaaagctataacattaaagtttgttaaacgyrtccaggactggtatttccattttaaaataaatcctaattttaataaagtaaaagttaaaggctctgctgaatgtctagacaaaataatttcctaacatctataatttccctttcccttcccagtcgtatgttacagagaaagtgcccgtgtaactggtaatgcttcagcaagctctcattccagtagtgatgttttcttggatgctcttttgtaattgtctgagttcctctgagcagctctrcattccctagatggggagagaaagatttaaacttctactgaaaggcttcacgagagtgatgacttttctggttaatttgtatgtttctaggagtacaatctaagtttcccagctaaccatttaatcaaacacagaaatgcagaaaaagtagaagaaagaaaaaataggaatcagaatgaaatatatctctgttgtacttctcaataaatttggaagcttccaggtcagtatctgttgactttgaagtacagttgtctcaatctgactcaagccaggatatcaaaagttgctgagtttcag

SEQ ID NO: 14291 - DNA, 600 bp, Chicken  19866894219448_1
ccaggggggtgagtttacacttgcttcctccaatacctctctccctgttaaagcccgtctgtgttttctctggcatcttccctccctccagccatggggcacccacgtgaatgagtgcattgaactctcccattgaagcagcgtcagcaggtccttcgctatgcttattttcatgttactcctttataaggcaggggagcaaaaagcccaggccatggtaaggcactgtctgcatgccctgagccactgcatggggggcagccactgtcaatcccttacgcttccctctgcctcctcctkcccatgccatgtgagtagagcgtttgttgcttgttaaagtgccttttccatatgacagaccaagatgctgatttttttttaaatccctctgagtccttctgctgtctcagtggattcagagttctgtcactgtgattagccctccaggacttccagtgcctaaaaaaagtcaccacacataagcaagaatcaagtgccagtcccggcagcgggaacttcagggacacattgtttaatattcactgtgcgcagccctcagccctgcgcaagtgccgctgtacaagtgggtcacagcaccta

SEQ ID NO: 14292 - DNA, 600 bp, Chicken  19866894219453_1
tttcctacactcttttcatgtctgatttatgtccatcttttgtctgaagagcactgtatgctaagcccctaaagcaaacccaattcatgagtctgtgagctgatatgcaccaaggcatccatcacatctttgcagttctcataaagtgaatacagcgatcttgggaaaacactcctagcagcaaggttctgtttgctgagctcttcagtcagtatttcaggagagcacgcttgctcagtgctatagcttatcctgcatgccctgcttagctgtctgtttattcacaaacatattggctcycagactgcactgtgagtttatcagaactgtcacaagaaaagatgctaacaaacaaacaaaagtcaccacagtcttaccgtcagctgaaacgctctttttcttgccaacacgctttacagtttcccaagttctgttcagcatagagaaaacaacaagttgatagattaaaagtatccatgttttgtaaattatcttctacccttgcagttgtacttagaaagaaaagatgccattgttcagtgaggcccagcaagaaagcagctggttgtaggtaacccctgtcctgttttggccatgtaa

SEQ ID NO: 14293 - DNA, 600 bp, Chicken  19866894219460_1
tctgcagcttctctcttttctgagctgaattgttgacatgagtttcccgtcaccaaattgattcccattacctcctatttgttttcgtaaacaaaatttgttgcgtctcagggtacttaaaatgataaaatatgctgatgaatgtgagtcgtatcagccaagccatgtattttgacactgaagtggtcagaatttagccctgctgtggatctaatctgaatctgacatttaaatgaaagttgaggtcactgaggctatactagctgaaacaaaaggaaggaaaatcatcaagttctctgrgatgcgatgctgacaaatttaatggtccttcagtgagttcaaacatcttttagaggggacttaacatctccaaataagtgcatcctcatgaaatagaaattacagtggttggtttgcaggcaaatgatgacaataatttttcatctcattctgtagaagaaaacgagcccttccacagttggctctgtcagtcacagtcagacagcttaggctracatccatttcattggcaactgttgtacttttcatagcgggctgcttttattatggatcaaaagggtcaattttaagggtaagaga

SEQ ID NO: 14294 - DNA, 600 bp, Chicken  19866894219460_2
tctgaatctgacatttaaatgaaagttgaggtcactgaggctatactagctgaaacaaaaggaaggaaaatcatcaagttctctgrgatgcgatgctgacaaatttaatggtccttcagtgagttcaaacatcttttagaggggacttaacatctccaaataagtgcatcctcatgaaatagaaattacagtggttggtttgcaggcaaatgatgacaataatttttcatctcattctgtagaagaaaacgagcccttccacagttggctctgtcagtcacagtcagacagcttaggctracatccatttcattggcaactgttgtacttttcatagcgggctgcttttattatggatcaaaagggtcaattttaagggtaagagatgtttaaacatattatttaaaaaaaaagaaaattacagtaataaggaaactagttttaaaattaccttttgtgtatgtgccgtcttatcacggtgaaataatgggatcagacaagagaaaaagatgtattttttatgtgcacgctccatctctgaatgcagattttaaacagcagccatacgtacactcattttgacagcctgtatgtgggtca

SEQ ID NO: 14295 - DNA, 589 bp, Chicken  19866894219465_1
tggtaaacagtgtatataattagcaagtgttttattagatggctaataccacttctgttagcagttgttcaggaagacagattttggagcagattctgtatgtgtgaaaatctaaagacatatgggcatggaaacatatttagattcggatttccaaccactcttctgtcatgcctgactcttctccactgttgttcagtatcacaagtatgacttttggtgcaagcatgttcagctttagagtctgaagctttgaggagcgagtggataaccttcctccctatgtcaggacgtgtactyctgtctctgggctgtctatgacctgtgggagcagtcagcatttgatgggacatgcttggactctgcctgcctttcttgaaagttacggagagctatcgcagccttatgccactcacagatcctacaaaaaacaaaacaaaacaaaaaaaactatctacccaaaggtctccctagctcagctacttgtttcccgtaaaggccaatgatggttgcatggaaaaaaggtactgggaacagggcaaatactggctaatgcttccttttgtctagctttttggcatttttctgc

SEQ ID NO: 14296 - DNA, 550 bp, Chicken  19866894219467_1
ctgctacagctcctttctcattaggagacagacttcaaaattatctcctattttgcataccttgaaaattgttactgcgtttctgtctcagaacatctctatttccatcatacaaccaattgctgtttggtggtatgttgaagaaatctgattcttactgtgtattgagctgtttcacacattaagacagccagttttaggaatcgggcagttaaattttcgttaaggttgctggcagatgcagggcataatggtgcctcctgtatttcaggtgacccagggcactctgacaataatcamgtaaatactttgtatatattatagtattcctgacttagaaaaagcaattaagccaaactgtgtgggaggagaggagcagcattggcttgggttcacccctggctgtgtgtgacaactggagttgcacaactttactgatactatatgtataattgtatatagtggtctgtcagtgatttgataaactgacagaaatacgtaggatgtgtttcatgtagtaattcttatagttcagatatgagcttcacat

SEQ ID NO: 14297 - DNA, 599 bp, Chicken  19866894219475_1
  misc_feature (1)..(1): n is any nucleotide
nccagagggactgcaagggacattgtaattatgcagaggtctatttctgcttttaagcacacaggaatgaatcaattcaggaaagcatgaaaaagcccttacagtttcaggctcgcatctaacatttttttctgcttacttctgggtacagcagagaagtaccatcagcatagacatatacaggcctgtgaacccagcagcctgaaaaagcatccaagtccagggtgccattctttcactgccagatgtttcagacttactacatcccagcctatgttcacctaaactggggcagttgcrcaggagctggcattcttttggttattttagtgaaaagcttgtctgttgagagcatatatagagcagactgtggttctggggcagaagtagtccttgtccttccaagatgaccttctcttgccaagaaatgtagagagagttcaggctgcagggagtggaatatctattaagaagttacttctgcatttaaatggaattgagggttacaatcattggaaattaagtcttccaagagatcttggcaacaacaataacatagaaatacggtgcctcactgttccacacttttggttgctgaa

SEQ ID NO: 14298 - DNA, 600 bp, Chicken  19866894219478_1
gcacacagatttgtgtgcttcttcatatatgcagtgatacttctggtttggatcacggacagagaaaacttagctttggttggtgcagcaggagttctttaacgcgtaactaaagatgccatggtcaactgatggcaagatgtgatgtaattccttcctttttaaagagctggatttcttcaggaatcacaggatgttggttagaagggaccttgaaagaccaactagtgcaatccccctgctggagcaggagcacctgcatcaggtcacacaggaacacctgcatcaggccacacaggygggttttgaatgtctccagagaagatcaccccaccacctctctgtgcagcccgttccagtgttctgttaccctcaccacgaagaagttttttctagtatttaagtggaaccttctatgttccagcttgcacccattaccccttgtgctatcactggatgtcactgagaagggcctggctccatcctcatgacagtcactcttcacatatttgtaaacatgaatgaggtcacccctcagtctcctcttctctaagctaaacaggcccagctccctcagcctttccttgtaagggagatgct

SEQ ID NO: 14299 - DNA, 600 bp, Chicken  19866894219489_1
atggactcaaaaagaaatagatgtttgaagagtgctttatatattaaaagaaaaaaacaaacaaacaaacaaaaaaaaaaagaattgctttatgtttaacagaaaaaaaaagaaaaaaaaaaaaacaaaaacagatcaatgcttttgattgttttgaaaggaagaaagacaatgggacggcatacgcctggggtatgtcctgagaggttatggacattgtgctccctgcctgcttggatcaggaaacttgtgcattacatttgatttcctttcttctccgttgttgtcgttgtcgttgtygttgttgttgctttttctttggaagatgagctttttaatggttttatccgatgtaaaaggggtcctgcaagattgcaaattaacaaaagctggttttatagcggatcatgaactatgcacaaaactgggttcgagacttgttctttcgttctcgaggttccgtagtgtatttagctccattacctttcctcagagtaattgcatctcgctgccaccgcgcgcccactgcacacatagatattttatatctctctccacacactctcatataagatatgtatgtgtgtctgtgcgggctga

SEQ ID NO: 14300 - DNA, 600 bp, Chicken  19866894219503_1
gggtagacctgcaccctgcaaaggtcaacctgtgcaacccacaattattttccactgaagtcttatatcaacaaaatctccctggaaggattacggcctttcagaataaacctttaatcttaaatacacatgccagcatgtcccatttcaaccaaatatgagagactttttcaaaaagcagtctcacacatacatgtggggttcagagatatgtgtcagcatggtagcactcactccatactttggttgctacgttatgtgtattctttctcctgggcagcacaggtgtttccatatttwtgtacatatagatgcacatacacaaaatatgtatgcgtccctgtatgactgggttcttctagacaacagatggatacatggagggccggcagcagcctgycatgaggccagtgmagcagccctggtgatgggggctgcgactgaaggagaacagcggggctgagcagagtgctgagagctgcccacagacctgcagccccataggggagcatggggtgtgcagggctgggccaccctaactctgtggtaacctcggcagtacttggcactttctttccatcctygtcatctcctaattcc

SEQ ID NO: 14301 - DNA, 600 bp, Chicken  19866894219503_2
tcagaataaacctttaatcttaaatacacatgccagcatgtcccatttcaaccaaatatgagagactttttcaaaaagcagtctcacacatacatgtggggttcagagatatgtgtcagcatggtagcactcactccatactttggttgctacgttatgtgtattctttctcctgggcagcacaggtgtttccatatttwtgtacatatagatgcacatacacaaaatatgtatgcgtccctgtatgactgggttcttctagacaacagatggatacatggagggccggcagcagcctgycatgaggccagtgmagcagccctggtgatgggggctgcgactgaaggagaacagcggggctgagcagagtgctgagagctgcccacagacctgcagccccataggggagcatggggtgtgcagggctgggccaccctaactctgtggtaacctcggcagtacttggcactttctttccatcctygtcatctcctaattccagctgcactcactcaaatgggcagtaatccgactctagaggagattacrgaaccagagatagctgcatttaggattactgaaaggaaatgaaggaatcta

SEQ ID NO: 14302 - DNA, 600 bp, Chicken  19866894219503_3
taatcttaaatacacatgccagcatgtcccatttcaaccaaatatgagagactttttcaaaaagcagtctcacacatacatgtggggttcagagatatgtgtcagcatggtagcactcactccatactttggttgctacgttatgtgtattctttctcctgggcagcacaggtgtttccatatttwtgtacatatagatgcacatacacaaaatatgtatgcgtccctgtatgactgggttcttctagacaacagatggatacatggagggccggcagcagcctgycatgaggccagtgmagcagccctggtgatgggggctgcgactgaaggagaacagcggggctgagcagagtgctgagagctgcccacagacctgcagccccataggggagcatggggtgtgcagggctgggccaccctaactctgtggtaacctcggcagtacttggcactttctttccatcctygtcatctcctaattccagctgcactcactcaaatgggcagtaatccgactctagaggagattacrgaaccagagatagctgcatttaggattactgaaaggaaatgaaggaatctaatccactcctaccc

SEQ ID NO: 14303 - DNA, 600 bp, Chicken  19866894219503_4
ggtgtttccatatttwtgtacatatagatgcacatacacaaaatatgtatgcgtccctgtatgactgggttcttctagacaacagatggatacatggagggccggcagcagcctgycatgaggccagtgmagcagccctggtgatgggggctgcgactgaaggagaacagcggggctgagcagagtgctgagagctgcccacagacctgcagccccataggggagcatggggtgtgcagggctgggccaccctaactctgtggtaacctcggcagtacttggcactttctttccatcctygtcatctcctaattccagctgcactcactcaaatgggcagtaatccgactctagaggagattacrgaaccagagatagctgcatttaggattactgaaaggaaatgaaggaatctaatccactcctaccccttacattactgggctgcagtaagacctcgtaccaccttttaggattttaaacaaatgaaatcgtttggagaaggggacagaaagagacagagagactatgcttacccattccatgagtcaaatggcagagaataaggtgatttgttaagtggtggcgttgaggctactc

SEQ ID NO: 14304 - DNA, 600 bp, Chicken  19866894219503_5
tgggttcttctagacaacagatggatacatggagggccggcagcagcctgycatgaggccagtgmagcagccctggtgatgggggctgcgactgaaggagaacagcggggctgagcagagtgctgagagctgcccacagacctgcagccccataggggagcatggggtgtgcagggctgggccaccctaactctgtggtaacctcggcagtacttggcactttctttccatcctygtcatctcctaattccagctgcactcactcaaatgggcagtaatccgactctagaggagattacrgaaccagagatagctgcatttaggattactgaaaggaaatgaaggaatctaatccactcctaccccttacattactgggctgcagtaagacctcgtaccaccttttaggattttaaacaaatgaaatcgtttggagaaggggacagaaagagacagagagactatgcttacccattccatgagtcaaatggcagagaataaggtgatttgttaagtggtggcgttgaggctactcgttyctgcatcccaataagcagtgcacctgaatgggcccgaggcccgcagctcctcagagctctc

SEQ ID NO: 14305 - DNA, 600 bp, Chicken  19866894219503_6
tctcctaattccagctgcactcactcaaatgggcagtaatccgactctagaggagattacrgaaccagagatagctgcatttaggattactgaaaggaaatgaaggaatctaatccactcctaccccttacattactgggctgcagtaagacctcgtaccaccttttaggattttaaacaaatgaaatcgtttggagaaggggacagaaagagacagagagactatgcttacccattccatgagtcaaatggcagagaataaggtgatttgttaagtggtggcgttgaggctactcgttyctgcatcccaataagcagtgcacctgaatgggcccgaggcccgcagctcctcagagctctcctcaggaccagaggaagtccaggctgcagatccaaaagctgcagaagtgatctggtaatggtctgagcaacagtatcaaccccacccccrgaaaacctcacacctcgagagaaaaccacccccacaccataatgcggagctctcagtgtacaaccattaaaaaataacagtaaacttagttagagtgtactttgcctcagaagattttctgctccattctgtttatgtaaagccaggaa

SEQ ID NO: 14306 - DNA, 600 bp, Chicken  19866894219503_7
cctcgtaccaccttttaggattttaaacaaatgaaatcgtttggagaaggggacagaaagagacagagagactatgcttacccattccatgagtcaaatggcagagaataaggtgatttgttaagtggtggcgttgaggctactcgttyctgcatcccaataagcagtgcacctgaatgggcccgaggcccgcagctcctcagagctctcctcaggaccagaggaagtccaggctgcagatccaaaagctgcagaagtgatctggtaatggtctgagcaacagtatcaaccccacccccrgaaaacctcacacctcgagagaaaaccacccccacaccataatgcggagctctcagtgtacaaccattaaaaaataacagtaaacttagttagagtgtactttgcctcagaagattttctgctccattctgtttatgtaaagccaggaagaaaatagccgatacttgctacagtggtaaaaatgaaatcttattgctttttcctagattcactttaaatcagtgaaagaggatacacttttccatccaatgatgtaagcatgcgacacaagcagtgctgaactaacccagtcctgggcca

SEQ ID NO: 14307 - DNA, 600 bp, Chicken  19866894219505_1
gcccccactgacgaaactttgccatgtagatcccatacaacaatgcctttttttttttttttttttcaaggtgcaagcatctgtaatgcaattgagagtcttttggaagaaaaaactaatgtgtgtctttttttactgagtggtgcagagtgatacatttgatatttaagattcctctccaaaacatgctgttttgtactgagcaagactttgccaagacctacttctacttcacttactgtttgttaaagactgcatgtatggaaataactcatccgatttcagtaaggcttcctttgraagcagagctatttctgctcaaagttcgtagtgaccagcacagaaatgaagatgattttgcarggtaatgactaagatataagtgagacagtgggcagaagaagctcttagcttcttgctttatgctggcagcacggtggcgttacatctagagaaattacaaagaaacgtgtttctagcttcttccaaaatgtctttcctaacttcattagaatgatcactccgttccatacaataacttagtctaccatttggagtatcagtagcacattgtcgtgcagggccatggactttatggag

SEQ ID NO: 14308 - DNA, 600 bp, Chicken  19866894219505_2
tttcaaggtgcaagcatctgtaatgcaattgagagtcttttggaagaaaaaactaatgtgtgtctttttttactgagtggtgcagagtgatacatttgatatttaagattcctctccaaaacatgctgttttgtactgagcaagactttgccaagacctacttctacttcacttactgtttgttaaagactgcatgtatggaaataactcatccgatttcagtaaggcttcctttgraagcagagctatttctgctcaaagttcgtagtgaccagcacagaaatgaagatgattttgcarggtaatgactaagatataagtgagacagtgggcagaagaagctcttagcttcttgctttatgctggcagcacggtggcgttacatctagagaaattacaaagaaacgtgtttctagcttcttccaaaatgtctttcctaacttcattagaatgatcactccgttccatacaataacttagtctaccatttggagtatcagtagcacattgtcgtgcagggccatggactttatggagaagggacagaaaaaaggggacactgcacattacaaaggatagaaagaaggaaaatcagagaga

SEQ ID NO: 14309 - DNA, 600 bp, Chicken  19866894219518_1
tatttcttcagtttacatgtactcatggctgcctaacacagggataatgtggaattttgtttcaaacaagcttactcagggtaaccccttaatctcctgagttccacaatccctgaaagactgtctctgtagagaagcacatcaagtttggaagatcttgacacctatctcccagatatatctcagaatcatctaaaaagatgaagcattcctcaacctaattgtaaagtacaacttgatctaacagacatgttcagaaaacaattagggattctatgtctatgtaaatatattggcagmaagtattaccagccaataatacctttaaaatgaatggaaagtgaaaatgtgtaatttctttttgaatttatgctgtttgagtaagaactattaatatatctggatatccttagaagctaaatttgcctatttagaagaatgtagtctactattcattcaagtgagccactgagccattttcttcagtagctgcaggcttgaaaaattagaatcatagaggaaataaactaagcaaaaaaatgaaaccatccaccctccccaacaatagtttcttaacaaacttaaaaaatatattaaaaa

SEQ ID NO: 14310 - DNA, 600 bp, Chicken  19866894219520_1
tgttttcatcaagttgttattaagcatatgaatggcagctgaagtcaagcaaaagaaaggaaagattagacctgcatgataatacatgttatctgagggatattggtattcccttctaatgtgacatccataggtccagaggtatgggaactgccctacactgtgtgttctggcactgaagttgagttcaatttattgctccacttcaaaagtgtatcctgctgaattaaagggcattacagtggctgtctgttgcatgagtggccagtgtttttagtttggacttgtctattaaatgcyacacaggcatgagatcttttttgtttcctcgcaacttctggaacagcctagccttaagacttcagcagagaacaaaaggttttctgaaccaccctgtggtcatggctttaaattacaaactttggatgatgagcaagagattttggtagggcagtgcacagcagtggagacactcgggtatttcagtgtgtgtcatggcacccttgcagagctgggaactggagcatcctatagcaaagctcttagttgactctgcagtgcttaatctttctaatatggcccataatttgtagtgaaaga

SEQ ID NO: 14311 - DNA, 600 bp, Chicken  19866894219528_1
agaggaaattgattatcaggcagtcctgatcaattcattttccctacatattctttttcactggaattaatatatttcactttattaaaatttcatgctgtaagggagcttttaatgttatgaaccaataatgccaataaactgttagtacaaacagtctaggagagatgtgcaaaaacttcatatgtggaatgaaataaggaaggtagaaaagagagaaggaagaggaacagctaaatgaaaacaaagtgagattaaataagtagtaaacttatcctttgcctattcttcattgtgttrctgcctgattagagttttcttggtatatgcctatctgaaatattctccttggtctgtaaagcattgtgaacacatcaggtgaacaaaagtattctatctggaatatcacagtggtttttgagactggctttgtgmaatttgtgtcgtctacccaatgcctttaccagaacttcgtgccttgaaatgtgtatctctgtccctggagtccactgaaagcagcaatacaggaatgtggcattagctcaggtttatgtagaggggctttgtagagccttgggctgctcagtgcaagaataatga

SEQ ID NO: 14312 - DNA, 600 bp, Chicken  19866894219528_2
aataaactgttagtacaaacagtctaggagagatgtgcaaaaacttcatatgtggaatgaaataaggaaggtagaaaagagagaaggaagaggaacagctaaatgaaaacaaagtgagattaaataagtagtaaacttatcctttgcctattcttcattgtgttrctgcctgattagagttttcttggtatatgcctatctgaaatattctccttggtctgtaaagcattgtgaacacatcaggtgaacaaaagtattctatctggaatatcacagtggtttttgagactggctttgtgmaatttgtgtcgtctacccaatgcctttaccagaacttcgtgccttgaaatgtgtatctctgtccctggagtccactgaaagcagcaatacaggaatgtggcattagctcaggtttatgtagaggggctttgtagagccttgggctgctcagtgcaagaataatgaattgtgctattggtagagatactgaagtttactccatctggagcagttacacgagtgcattaatttgcaggattggcataaccatagcaagacagcacttcttgctatctttcagctgtgaaaagatccacacta

SEQ ID NO: 14313 - DNA, 600 bp, Chicken  19866894219529_1
ctatctgaattgtacattagacactaagaagtcatttgtgttactgacacttgcagtggtgtttccaacagccatcagataggctaataactttctactatctaatcatttttctgataaggtgtataattcttgataggaaatttgatagcagcgtggtatatggtgttgaaatctgacgtcctgacacatactggatcttgtgcacccctttctgtctgcctgatgtatcaacttgcaccatccagcagagccacctgcagcataacaaaggccaaagcactgtgcatgtaatgctayatgtaggtctctgatgcaatatttgctgcacaaacctgatgatctgcaaagcattaggtcagaagaagcccatctgcatcttttcagatgtcagtcatgacttgccaaggcaacaagccacaaactcatatcagaaaataacaaggtcttgtcatatgcagatacttkaatacattcagggcagccttatcctttctacaaggtttatgaaatccctacgaggaaggattctgaattttgactaggttcattcactaataatcaatatgcctcaagagcacttaacagttcctaatcatc

SEQ ID NO: 14314 - DNA, 600 bp, Chicken  19866894219529_2
ttgaaatctgacgtcctgacacatactggatcttgtgcacccctttctgtctgcctgatgtatcaacttgcaccatccagcagagccacctgcagcataacaaaggccaaagcactgtgcatgtaatgctayatgtaggtctctgatgcaatatttgctgcacaaacctgatgatctgcaaagcattaggtcagaagaagcccatctgcatcttttcagatgtcagtcatgacttgccaaggcaacaagccacaaactcatatcagaaaataacaaggtcttgtcatatgcagatacttkaatacattcagggcagccttatcctttctacaaggtttatgaaatccctacgaggaaggattctgaattttgactaggttcattcactaataatcaatatgcctcaagagcacttaacagttcctaatcatcaaaacatttttttttttctttcttgttaccagacatctacatgtaatattrcaagatgcagaatattatttgactctggaaatttagttcagtgttgagcattttcccaaaatgatttgcactagttgcatggtgcatctgattgatgaagtgtttgctggatgatat

SEQ ID NO: 14315 - DNA, 600 bp, Chicken  19866894219529_3
cattaggtcagaagaagcccatctgcatcttttcagatgtcagtcatgacttgccaaggcaacaagccacaaactcatatcagaaaataacaaggtcttgtcatatgcagatacttkaatacattcagggcagccttatcctttctacaaggtttatgaaatccctacgaggaaggattctgaattttgactaggttcattcactaataatcaatatgcctcaagagcacttaacagttcctaatcatcaaaacatttttttttttctttcttgttaccagacatctacatgtaatattrcaagatgcagaatattatttgactctggaaatttagttcagtgttgagcattttcccaaaatgatttgcactagttgcatggtgcatctgattgatgaagtgtttgctggatgatatgctatgaaatgtgctatgagctctggcacaggatttcaatgcacagagtctggttgggctcattacttacaccattggttggcaacttcaaagttgtctcagatctacccatgcaattctgatgaaatgggaaaccatcatattttctataggcacagtttagtatgatgctgctgtataaac

SEQ ID NO: 14316 - DNA, 600 bp, Chicken  19866894219530_1
aaaatctacaatgcacaaccaagagagattttatttcactgtaataaagacagcaagagggaagaaaaacttcacctgaaacaaagtagcagctttccagatttcatcctcagagacaaaactacatttcttacagagacaaaaggatatctactgttgaaagacttattaggatcagtgcggtgtcctgaaattcagtgaccatctggaagcacactgcgtactggagcagtgaggagaagttcagtctggtggctccgtacacccagtcagaagtgtctcacaaagaagtgctcacamaaaaccactctaagcttagcctatttattattctgtctcaaaacaagagaagtccagttaaatgcaatttgacagcagaatgttttatttactatcaggaacgaaccaagtgttggttcacaacactaagcagcagatcagaatagaaaaatgcacagaaaagagatctaccctactggtgcaagaactgcagcttcggcacagtcaagaatatgttttcaaaacaacagaagaaaacacacgctcccaacaatgaaagacagcagaaacacatgcacaaagtgttgagttcttcctcgc

SEQ ID NO: 14317 - DNA, 600 bp, Chicken  19866894219531_1
tgcacagcaagctccagaaaatattgcacactgtagtaataggcatagataggatgctttttctatggcctcacctgcactggtaatagtaacaatgcttacatgcttgtggcactcatcaatgaccacattgcaacatctgagatttaatcatgatgacagaacattttttgtcacaagctggaagtcagctactacatcagtgcaccaatgaccactgtatgctgcccatcccgtgtttgaccactgtgggaaaccactgggcagggagccttaagtgggcaggaaatattatctaargaacaaacaacacatcgcaaagctatcragggcgatgtgaggcaatgtcatgcattaattctgcatgtttgaatatgagacagggcaagaatgctgcctagggacaagggctttgtgctccaaaacagccaagtcagttagttccctcagatttcccctcatacagacttaaaagacagctgaaacactcacatctcaccttcatgtgagacacctccacgcacaacagtgtgcgatgagctagagttcccactagtgcaagaagctttccctcatcctcaacttatgtcagcattttct

SEQ ID NO: 14318 - DNA, 600 bp, Chicken  19866894219531_2
cactgtagtaataggcatagataggatgctttttctatggcctcacctgcactggtaatagtaacaatgcttacatgcttgtggcactcatcaatgaccacattgcaacatctgagatttaatcatgatgacagaacattttttgtcacaagctggaagtcagctactacatcagtgcaccaatgaccactgtatgctgcccatcccgtgtttgaccactgtgggaaaccactgggcagggagccttaagtgggcaggaaatattatctaargaacaaacaacacatcgcaaagctatcragggcgatgtgaggcaatgtcatgcattaattctgcatgtttgaatatgagacagggcaagaatgctgcctagggacaagggctttgtgctccaaaacagccaagtcagttagttccctcagatttcccctcatacagacttaaaagacagctgaaacactcacatctcaccttcatgtgagacacctccacgcacaacagtgtgcgatgagctagagttcccactagtgcaagaagctttccctcatcctcaacttatgtcagcattttctaagccaccaggagctagatgtttgcaac

SEQ ID NO: 14319 - DNA, 599 bp, Chicken  19866894219544_1
  misc_feature (1)..(113): n is any nucleotide
nnnnnnnnnnnnnnnnnnnnnnnnnnnnnnnnnnnnnnnnnnnnnnnnnnnnnnnnnnnnnnnnnnnnnnnnnnnnnnnnnnnnnnnnnnnnnnnnnnnnnnnnnnnnnnnnnttgggctttttctggcctgctttacatgcattatcatgctctgcaggaaacacagcaagcacagcagcttgtcaaagtaaaagctggttaaggcttcttgtaatacagcaattcagtagttgaaaaaattgtcagtacattctacagtggggaaaaaaaacaaaacattgaatattccatggaagarggaccatgagcctgaagccaaagyggtacagaggaatgctaatacaaagctaatataacacaccttgctactcttgggaagcttgctttcaccacaaaataaaatgatgaggccacaaagttattaggagacatgctttaactctgtattaagagaaaatggcaatctttactctgttattaaaatacacgatacagttactcagctgtgattggttgctatgcaacctcagcccaggattggactcctaagctagaaagaaatttaggtttttatacacaccctcctctttcttcata

SEQ ID NO: 14320 - DNA, 599 bp, Chicken  19866894219544_2
  misc_feature (1)..(89): n is any nucleotide
nnnnnnnnnnnnnnnnnnnnnnnnnnnnnnnnnnnnnnnnnnnnnnnnnnnnnnnnnnnnnnnnnnnnnnnnnnnnnnnnnnnnnnnnnttgggctttttctggcctgctttacatgcattatcatgctctgcaggaaacacagcaagcacagcagcttgtcaaagtaaaagctggttaaggcttcttgtaatacagcaattcagtagttgaaaaaattgtcagtacattctacagtggggaaaaaaaacaaaacattgaatattccatggaagarggaccatgagcctgaagccaaagyggtacagaggaatgctaatacaaagctaatataacacaccttgctactcttgggaagcttgctttcaccacaaaataaaatgatgaggccacaaagttattaggagacatgctttaactctgtattaagagaaaatggcaatctttactctgttattaaaatacacgatacagttactcagctgtgattggttgctatgcaacctcagcccaggattggactcctaagctagaaagaaatttaggtttttatacacaccctcctctttcttcataatttcctattaattattgtggatg

SEQ ID NO: 14321 - DNA, 600 bp, Chicken  19866894219551_1
ccttcaaggagaatgtatttcagcatgaatcaagagataaatagtgatggtttgttaacgtgaaggaactatgtggaaactacttcataggaattttactattagcattatttacaatgctgtggaaaagtgtatagtatacagagctcattctttggcttacagtataaaatctttcataattgttagttttgccctaagtggctgcgctggagaggtgcctcgttctccgtttgtgctgacgtgctgttgagtcatgccctcccgtgttcagcagaggaggacccctgcctcagcacmgtcagagctcccacacataccgtgctctgttgcttttggaacacagaacttctttgtttccctgtttgtcctcacccattccatttcctccaytgagtgcgactcttgctctgttgtttctttatatgaatgcaaacttagttgagagtgtctaatgacactggggcttctgagcacgcaaagaaggaagatgtatgccttattttgtgtgcttagaagaagsttaggcatttctccagttaactttcataaaaggttagatttccctttgcatcaacttatcctaggatacatgcacta

SEQ ID NO: 14322 - DNA, 600 bp, Chicken  19866894219551_2
ttttactattagcattatttacaatgctgtggaaaagtgtatagtatacagagctcattctttggcttacagtataaaatctttcataattgttagttttgccctaagtggctgcgctggagaggtgcctcgttctccgtttgtgctgacgtgctgttgagtcatgccctcccgtgttcagcagaggaggacccctgcctcagcacmgtcagagctcccacacataccgtgctctgttgcttttggaacacagaacttctttgtttccctgtttgtcctcacccattccatttcctccaytgagtgcgactcttgctctgttgtttctttatatgaatgcaaacttagttgagagtgtctaatgacactggggcttctgagcacgcaaagaaggaagatgtatgccttattttgtgtgcttagaagaagsttaggcatttctccagttaactttcataaaaggttagatttccctttgcatcaacttatcctaggatacatgcactaaactcactaggttaaagtgaatcctcttcacagaaagttacaacctcatcatctgaacaggcgaaaatgggactgtgtaattatgtgatgtta

SEQ ID NO: 14323 - DNA, 600 bp, Chicken  19866894219551_3
cgttctccgtttgtgctgacgtgctgttgagtcatgccctcccgtgttcagcagaggaggacccctgcctcagcacmgtcagagctcccacacataccgtgctctgttgcttttggaacacagaacttctttgtttccctgtttgtcctcacccattccatttcctccaytgagtgcgactcttgctctgttgtttctttatatgaatgcaaacttagttgagagtgtctaatgacactggggcttctgagcacgcaaagaaggaagatgtatgccttattttgtgtgcttagaagaagsttaggcatttctccagttaactttcataaaaggttagatttccctttgcatcaacttatcctaggatacatgcactaaactcactaggttaaagtgaatcctcttcacagaaagttacaacctcatcatctgaacaggcgaaaatgggactgtgtaattatgtgatgttatctagtctgactgctgcgcttactacattaataagaataaattggggccggggagccatgtgcagccagtttcccggcctgtggccgtcaccagcactgctctccactgttgagagctgcttaggaggag

SEQ ID NO: 14324 - DNA, 599 bp, Chicken  19866894219552_1
  misc_feature (1)..(78): n is any nucleotide
nnnnnnnnnnnnnnnnnnnnnnnnnnnnnnnnnnnnnnnnnnnnnnnnnnnnnnnnnnnnnnnnnnnnnnnnnnnnnnaacccttatggcagttcaccttacgatggtggatgaaaccctgtgttggcaatgtgcagatttttgcctaaataagttcttttcaggaaactaaaataggaaggacaggaagcagtgcccacttgggtctgcatcccagctgggaaactgatccagggcaataggatgtgctaacagacccgcagaggggcgcggggaggcaggacctgtggtggggatgcrcgtcccctgcccaccccagcagctttgggagaagcagccagacgctgtcagcccgctctcttccagcagggctcaagcttttcatcttaatctctatttctgcagcgtttttatttcctgatgaaagcaaaacccggcctgagccatggggatggggggggggggggggtactgcactccttcagcagaagagcatcactgcatctttctgtccaacctttcctcctggacacagcccataagaaacttactctaagtcattgtacttaggggaagagctgcctcaccagccctgctac

SEQ ID NO: 14325 - DNA, 600 bp, Chicken  19866894219558_1
ggaggctcatttctgcccttccgtggcaccagaggaaatacgggtacccacccgtgggagtcgtccctccctcacagcaggctgccgtccgctgctccttgaccagatacccagcagattatttttgtcttggctcacgtagtcccaatgttacaattacccgctgacctcaaacgcttacttttaaaattacccctctttgagcaaaccctctgtctagtgggttgggtggttttttattttttatttttatgtctaaatggttaaatagtgggtgtggttggggagagagaaaagaamgcttccagagcaggcaggagggggagggccgtgagggtcttagcatggagaagcccacgtgctccagagaggagacacgaggcttcctctccttcctcagtaacatcttcwtctgcagggtcaggtttcctcaatgacaaatgtcatttcttagtggtctctattcctctcacaggtacgccttgagacaaactcttgcagctgtggcataaccccggataatcaaagcagcatcctttggatgcggygtgaaagtcagtacttgtctgtaaactgatgttgaacgtaatggaataggcc

SEQ ID NO: 14326 - DNA, 600 bp, Chicken  19866894219558_2
cagcagattatttttgtcttggctcacgtagtcccaatgttacaattacccgctgacctcaaacgcttacttttaaaattacccctctttgagcaaaccctctgtctagtgggttgggtggttttttattttttatttttatgtctaaatggttaaatagtgggtgtggttggggagagagaaaagaamgcttccagagcaggcaggagggggagggccgtgagggtcttagcatggagaagcccacgtgctccagagaggagacacgaggcttcctctccttcctcagtaacatcttcwtctgcagggtcaggtttcctcaatgacaaatgtcatttcttagtggtctctattcctctcacaggtacgccttgagacaaactcttgcagctgtggcataaccccggataatcaaagcagcatcctttggatgcggygtgaaagtcagtacttgtctgtaaactgatgttgaacgtaatggaataggccagcaactccaaagcattcagggcccgaagacaaacacagatggggagaagcagccggactgcaaagctgtgttcaccgtgcaggagggatgtcagtcatccacggctgaat

SEQ ID NO: 14327 - DNA, 600 bp, Chicken  19866894219558_3
tttatgtctaaatggttaaatagtgggtgtggttggggagagagaaaagaamgcttccagagcaggcaggagggggagggccgtgagggtcttagcatggagaagcccacgtgctccagagaggagacacgaggcttcctctccttcctcagtaacatcttcwtctgcagggtcaggtttcctcaatgacaaatgtcatttcttagtggtctctattcctctcacaggtacgccttgagacaaactcttgcagctgtggcataaccccggataatcaaagcagcatcctttggatgcggygtgaaagtcagtacttgtctgtaaactgatgttgaacgtaatggaataggccagcaactccaaagcattcagggcccgaagacaaacacagatggggagaagcagccggactgcaaagctgtgttcaccgtgcaggagggatgtcagtcatccacggctgaatgttctattaaactgactgcaaagcttctcagaatgcacagaaacctctccaggagggagagaggagcatcttgttcaggggtggagagcatgagggaaggggacaccagtgtactatagtgacgggaaaaaaaggga

SEQ ID NO: 14328 - DNA, 533 bp, Chicken  19866894219558_4
cagggcccgaagacaaacacagatggggagaagcagccggactgcaaagctgtgttcaccgtgcaggagggatgtcagtcatccacggctgaatgttctattaaactgactgcaaagcttctcagaatgcacagaaacctctccaggagggagagaggagcatcttgttcaggggtggagagcatgagggaaggggacaccagtgtactatagtgacgggaaaaaaagggaagcagctgacaggagaatgcacaattcctcacaaccagaacgttcatacagctccttcaggtggctgtrtgctatggatttctctccatgctcctactagcctcaaagcccagctgagctgacttaagtctgattggaaccactgtaaaagataaggctctaggggggaaggacttcagctgggctggttttgaaggctggccttcaactactttctgttgcctggccagcagctcattagagtcacacgtcaccaacaaaaagctgaggtcagtgcttgtggaggaagcctgccagcagtg

SEQ ID NO: 14329 - DNA, 600 bp, Chicken  19866894219559_1
taaagtcttgggtttagttctaaaaagaatttcaattatgaatttggctatgttgaggtgaactcatattgctagaactcaagctttcttgaaagagttaagtttgttaacctccagagctagaatctttcatgtgtgaatcatgaataacagatcttatgacatctgcaggactttataaacaactttgattggtagtggaagtggatttaacttcccttttcagcagatgtagagaatgagccttaaaaaagagtgataactctggtttgtctacattgactttctaattattgatcrtaataataaatcaaagagtggagcagactgtgagaggagattcttagttgcgttaagagggaatatgtacaggatggtgttagggtacggaataaagcagggaaataagagagaaataggaataaaaaattatattttaraacattgaacyggtgattccagacagccagaagttttgctgctgaatacagactgtgtataaactacctttgcttctgtacaagctacctgctgccagcaacaagtatgatggttgaatggcagcaaataaaaatctcctgtatgatgtttgttctgtgc

SEQ ID NO: 14330 - DNA, 600 bp, Chicken  19866894219559_2
tcatgaataacagatcttatgacatctgcaggactttataaacaactttgattggtagtggaagtggatttaacttcccttttcagcagatgtagagaatgagccttaaaaaagagtgataactctggtttgtctacattgactttctaattattgatcrtaataataaatcaaagagtggagcagactgtgagaggagattcttagttgcgttaagagggaatatgtacaggatggtgttagggtacggaataaagcagggaaataagagagaaataggaataaaaaattatattttaraacattgaacyggtgattccagacagccagaagttttgctgctgaatacagactgtgtataaactacctttgcttctgtacaagctacctgctgccagcaacaagtatgatggttgaatggcagcaaataaaaatctcctgtatgatgtttgttctgtgccaagtaagggcacagattgacaggttgctgtgttctccgaagactgattctgtttaaagatgatcgcctgctaatcaacagatattaaatgttgttactgcatttatcttttctatatttgtttcttgtttttagatgct

SEQ ID NO: 14331 - DNA, 600 bp, Chicken  19866894219559_3
agatcttatgacatctgcaggactttataaacaactttgattggtagtggaagtggatttaacttcccttttcagcagatgtagagaatgagccttaaaaaagagtgataactctggtttgtctacattgactttctaattattgatcrtaataataaatcaaagagtggagcagactgtgagaggagattcttagttgcgttaagagggaatatgtacaggatggtgttagggtacggaataaagcagggaaataagagagaaataggaataaaaaattatattttaraacattgaacyggtgattccagacagccagaagttttgctgctgaatacagactgtgtataaactacctttgcttctgtacaagctacctgctgccagcaacaagtatgatggttgaatggcagcaaataaaaatctcctgtatgatgtttgttctgtgccaagtaagggcacagattgacaggttgctgtgttctccgaagactgattctgtttaaagatgatcgcctgctaatcaacagatattaaatgttgttactgcatttatcttttctatatttgtttcttgtttttagatgctgccattgttag

SEQ ID NO: 14332 - DNA, 600 bp, Chicken  19866894219559_4
tctgtactttgtttttttctgggggtgacagatggaacatattaaaaatctcgtggtggatgaagataatgaaggatgtactccactgcattatgcatgcagacaaggtgtggctctctctgtaaataatttactcagcctcaatgtgtccatttattcgaagagcagagacaagaagtcaccattacactttgctgccaggttagtatagtttaggcaatggaatcaatgccatttaccatcagtatttctttgacattaatttctgtgtttgtctttcaaagctatggccgcatcaayacatgccaacgacttataagggatatgaaagacacaaggcttttgaatgaaggtgataagaagggaatgactccccttcatttggcagctcagaatggtcatgagaaggtcgttcagtttcttctgaaaagaggggccctttttctctggtatgtgttcaggcttccattcattaaagtaaaaaagagctatcaccttactttttttttttgtctgtcaactaagtaactaatacaatacaaatgtaaatacaatatataaaaataaatattttatgcatataataaataatatttacaa

SEQ ID NO: 14333 - DNA, 600 bp, Chicken  19866894219559_5
aaatttttaatggaaaaagattgttttagaaataatcatgtgagcttcactgttgtcatgttctgttagaggtttgtgtaagaattctcaggactagtggttcacaggcaatttgccttacactctgagtacagatttcattggtcattggcagctttccaccctgatttccagtttccaagaccaaatctgtaaaaccaggatcgaaagatacaagaagtttaaagtcctgttacccagatactctgtagagttataactctcatgtcttcttcttccaaagccatgacaatctacacytcagctgcaccttggagctagggctgtatatcttctgaaaagatcctatgaaaagcaggcctgccatagtgtcagtatttatgactgtggagattccactaactgagctgctgaatccctggaggcattcaaggccagactggatgtcgttctgggcagcctggtctagtggttggtgaccctgcacatagcaagagggttgaaactagatgatcattatggtcctttcaacccaggccattctatgattctatgattttatgatttccagtgtccttagctggacatagtccacctagc

SEQ ID NO: 14334 - DNA, 600 bp, Chicken  19866894219593_1
aacctaatccttcctgacacaaaagcggcagacccaggagtgcgaagggttaatggtggtcccttttttttcctccctccaattgttttgacaacacttttcaaagtgtgacattccaagcccttgcaatacaatgtaatattactgtaattacacaggtcattacattttaaatagagaacaataaaatgcttatcgcactgaaaaagaacaggtgttcttgcccttctttggtatttatgctaattgtttttcatctccttcagaaatatttatggctggcgtgttaagatttcagtytcgatgcgacaatattaattctttgctaatctttatggttgaggtttaatgtctgcagtatggattatagtattaacatccaccaactcatttaataatgtaggtacaacttaatatgtcagcactttaggtactttatgatacatagctattcaatggagactgcattattcactttcattttttttttctaattgagtagttgtgcttttataaagtttctggacttgtgcaaaaacaagctactaaataacagctgacgatcctgcagcataaattgaatggaacctccataaagaa

SEQ ID NO: 14335 - DNA, 600 bp, Chicken  19866894219593_2
agttgtgcttttataaagtttctggacttgtgcaaaaacaagctactaaataacagctgacgatcctgcagcataaattgaatggaacctccataaagaaactttcctcatgtctaattaggtagattgctgaatcactgctatagcattagcatagctgctatacagtggcaaacagaatggatctgttaacttatttccagtaaggaatctgagttattttgaattctcttcattttcttttattattattatttttttttttttctgatagcttttctttctggagcaaacagtgcrttgctgagcccaccagcttctctttagggggctatgaaaattagttagagaaaagtttcatgtttctgggaccttgcaaaacaatataatgcagcgctgttactggagtgtattggataattgcaggactgcacttcattaaaaataatatttgccttggaaatcaaacaattttaatagctgcagcagtggctgatctatactggaaaaaaaaatacagtagacacctttccaggcttttttgaatgcattcatacatgaattgatgattttgagtgtattttatttattttttttccc

SEQ ID NO: 14336 - DNA, 600 bp, Chicken  19866894219602_1
actttgattcattttgacggttaccgtagtatcttacacatgtatttcactcttatttatgttgaaattacatatgtacacttaaaaataagtcaacaatatctacttagttatccaagtttgtgttttgtatagggatgagcctgggagataaaagcaaattacacttctgttcagataactttctttctctaacgtgctggcaaagacctgggtacattcaggttgcagtaatgatgcttgtttctttgaactcaagtaaaaagctgtttcaatgtaaagtggattttatacaaatayggaaaagcagtattaatccacatagaaatataacccttgtgctcagggaaatctgggtaactgttagaaacttggatacgaaaaatgttgatctaccaaatataacacaacaaacaaaccatgaataccttcaataacctaaatgaggaaaactataagttgacaatctatatctacgtttatctatggtatttctcttttaatttatcaattcagcatcaaaattttctctgagaaaaatgaattttcttactgaatcaagttactacttatggcactgttttctttcacattgtattt

SEQ ID NO: 14337 - DNA, 600 bp, Chicken  19866894219603_1
aaaggcattcttagtgttagcgtcagaggaatgggttggagcacagacagaaagaaaacatcttggggttcttgtacctgtctgaagttggtttgataaaaaaagttttagctcaaggagcaaaatcttcacaagggaaaataatgtaatttattttacttcaattgttttcatgctggtttttaattccagtgcccattcttctgagtcacagtgctttatttttataggtacatctctttgaggtttgaagctgctctgactttccaggcatttttttgtcaacttcacagtactctmaggtctcctaagcctttctgacacttctccttctttcctgatctggtcttgctttaggatgtatagtatgtgtgagcagaacagacagagaaggatctggaagctctttgagaaggaattaaaatgtttgggcaataacggactgccacaagttcatggggaccaggagggaaaaaaaaatactgctaccaacctaacaaactgtagactgccctaaaaagatgtactgcagatgtgagagctactccttcttttctgtaacctttcccattcacgtgcacaccctttttgtactgtgga

SEQ ID NO: 14338 - DNA, 600 bp, Chicken  19866894219605_1
cactctttggttgctgtcattgcccacagggtaatgctatcaaattgtggtatgttcctcacataaattatgtagtttagcctacaggtgccctaaattaactttttttttcaatacccactaagtgcgctttttagctcttggaataagagacatggaaccaaaagaagttaaaatgtaacttacagaacagcagctcttcatcactgccagaaatttagtgatagctctgctgattagctgcttgttgtacttgcaagataatactaaaactgtaaccctgctagttttggtataggstggtaatgaaattgcagtgcaggagtgccaggtaggtgagataaatgtatgattcctaacatgaactttaagtgtttgggaatgattttaattaaaaatatttttcactggattttggaagatcattgaaagttttctagttgttggttttgcagttatttataaggattggaagcaattttgkaggagacaatcacttgatagaactttgcttagttctaccgctctactcactggctattgaactttgctacaaaaagttgtaaagccttgcttgggagaatagctgttccttttgtc

SEQ ID NO: 14339 - DNA, 585 bp, Chicken  19866894219605_2
acagaacagcagctcttcatcactgccagaaatttagtgatagctctgctgattagctgcttgttgtacttgcaagataatactaaaactgtaaccctgctagttttggtataggstggtaatgaaattgcagtgcaggagtgccaggtaggtgagataaatgtatgattcctaacatgaactttaagtgtttgggaatgattttaattaaaaatatttttcactggattttggaagatcattgaaagttttctagttgttggttttgcagttatttataaggattggaagcaattttgkaggagacaatcacttgatagaactttgcttagttctaccgctctactcactggctattgaactttgctacaaaaagttgtaaagccttgcttgggagaatagctgttccttttgtcttgttccataataaagttttccctattgcttatcgttgcctctcttttctgaattaaaatgttacagcttgctttcattcttggggagctccttgtctaccctgttaaatccctgggttgttggacatagtagtcaacagacaatgatggaagcacagccatagatttt

SEQ ID NO: 14340 - DNA, 600 bp, Chicken  19866894219606_1
aaaaaagtccttgtttttctttttccccaactcaatacagagctcagatacacagaaaccattttgatatttaaaatccatttgatatttaatcagagcagaggtgtggcatgcaaagatcatgggcatatatctgaactgagccttaggaaacactaacaacaaacccatactgataaagaacagctgtattcttatatcagaaaccacgaggacaaataattaatttgccttcattaatttccccgttctttcctggcaaaaagtcaataagggcttagtttacagatctgactgtcrtgacaagagtggatgtttggaaagatcgtatcaatcactgggtcatcaggcattagtataaaagtcgatttctgtttctgccctttccctccaatctccctttagagctggctactaacaggaagcctggggaaaggactgtgttaaaatgttggtgatcattttcttctttaatagggaggaactggagtttgtttctgaatctcagctgtgcagggctgcacagrgctgtgagtcaaaaggggagwgcaagggtacggtgttygtttcctcctgaatgacagtaatgtggaggcccag

SEQ ID NO: 14341 - DNA, 600 bp, Chicken  19866894219606_2
ttgccttcattaatttccccgttctttcctggcaaaaagtcaataagggcttagtttacagatctgactgtcrtgacaagagtggatgtttggaaagatcgtatcaatcactgggtcatcaggcattagtataaaagtcgatttctgtttctgccctttccctccaatctccctttagagctggctactaacaggaagcctggggaaaggactgtgttaaaatgttggtgatcattttcttctttaatagggaggaactggagtttgtttctgaatctcagctgtgcagggctgcacagrgctgtgagtcaaaaggggagwgcaagggtacggtgttygtttcctcctgaatgacagtaatgtggaggcccagagcagggaaaacaccacaacacacacaatgctgttatgcattctcttacattcctctgatgctgggtttagacgtgtctttagaagaacaaaagggtcatagacatacatagaatatatacatacaaaagctatacatcacaaatactgctctttctacaagtctgcagattgaggaaatcattaggaaccagtaaatacaaaaaaggcagagcaggactccagttc

SEQ ID NO: 14342 - DNA, 586 bp, Chicken  19866894219606_3
ttctttcctggcaaaaagtcaataagggcttagtttacagatctgactgtcrtgacaagagtggatgtttggaaagatcgtatcaatcactgggtcatcaggcattagtataaaagtcgatttctgtttctgccctttccctccaatctccctttagagctggctactaacaggaagcctggggaaaggactgtgttaaaatgttggtgatcattttcttctttaatagggaggaactggagtttgtttctgaatctcagctgtgcagggctgcacagrgctgtgagtcaaaaggggagwgcaagggtacggtgttygtttcctcctgaatgacagtaatgtggaggcccagagcagggaaaacaccacaacacacacaatgctgttatgcattctcttacattcctctgatgctgggtttagacgtgtctttagaagaacaaaagggtcatagacatacatagaatatatacatacaaaagctatacatcacaaatactgctctttctacaagtctgcagattgaggaaatcattaggaaccagtaaatacaaaaaaggcagagcaggactccagttcctgggag

SEQ ID NO: 14343 - DNA, 569 bp, Chicken  19866894219606_4
gtcaataagggcttagtttacagatctgactgtcrtgacaagagtggatgtttggaaagatcgtatcaatcactgggtcatcaggcattagtataaaagtcgatttctgtttctgccctttccctccaatctccctttagagctggctactaacaggaagcctggggaaaggactgtgttaaaatgttggtgatcattttcttctttaatagggaggaactggagtttgtttctgaatctcagctgtgcagggctgcacagrgctgtgagtcaaaaggggagwgcaagggtacggtgttygtttcctcctgaatgacagtaatgtggaggcccagagcagggaaaacaccacaacacacacaatgctgttatgcattctcttacattcctctgatgctgggtttagacgtgtctttagaagaacaaaagggtcatagacatacatagaatatatacatacaaaagctatacatcacaaatactgctctttctacaagtctgcagattgaggaaatcattaggaaccagtaaatacaaaaaaggcagagcaggactccagttcctgggag

SEQ ID NO: 14344 - DNA, 600 bp, Chicken  19866894219607_1
tttacatattgtgtgttttaaggtagtggagcatctctcatatgaggaaaagttgtgagaggtgggactgtttatttaccccacagaagggaagcctgagtgtagatcttgtctgaagggaagctgcaaagagctaggctgtttttggtggtgctcagtgacagaacagaaagcaatggttgcaaactggaacacaggaacatcagaaagcactcctgtgctgtgtaggtagtggagcactggcacagcctactgtttttaattattctgcagggaagttatttgagacagctttagagrtaaactaataaatgggccaaagatcttgggcagtttattaaataagatatcagcattatatctcagatttaaagtagcatgtaggaaaaagcaaagatttgtattcagaatctttatttagaaaggaatacttcagttttcaggataagacccaacaactgggtaaatatctccttcgtatctactgcttttcttataccctcaagtaccaaagttattcctgcttttatgtaactgatgggtaaaatgctttcctgttttttaaattttatagtaactgtgttgtgtacagattcacaa

SEQ ID NO: 14345 - DNA, 600 bp, Chicken  19866894219607_2
cattatatctcagatttaaagtagcatgtaggaaaaagcaaagatttgtattcagaatctttatttagaaaggaatacttcagttttcaggataagacccaacaactgggtaaatatctccttcgtatctactgcttttcttataccctcaagtaccaaagttattcctgcttttatgtaactgatgggtaaaatgctttcctgttttttaaattttatagtaactgtgttgtgtacagattcacaattaaaactgtaaaataacaaatgacttttgacaaattctaaaattatcttctygcaatcacctgcgtccacctatagttcctatgttgtttctcttgatccagataagacagtgtagagggtgttctcatatcatcagtaagtgaggtgtagttattttacacctgcatctcacttcgttttttatctctttatttgcttcacttgctaagcctgcagataacttggaaacgaaatgatttactgggagcatatccctgaactatctaagggaaaatgttttagatatttaagctcttcctgcatcctatacagataagtggcattttcaatgtgctgttttacccatctgaa

SEQ ID NO: 14346 - DNA, 600 bp, Chicken  19866894219608_1
gtctggcaccagagcaccattgctccactgcttgcagtgcacaagggtgagagaaatcaaaaccagcccatgccaagtctgcgcatcactccctcgtcctcatctctctcatttcatttctccatggcagccattcccatctcagctcccggtccatgctcatgcagaagcttccccacttctgctgcaggaacagctctgtgctttccaggggtctttggagacatcaacctctaagccacgggacgtgctccctacacttggagagctctgccccacctacatccagattcagtggamagtscttctctttattccccaatgatcttagggaggagtctttattcttggctgttctgttctctgggcatccttctgaggaagaaggccagctcatttgctgtctctaggccctmkctctgggagattttctactcttttcattttaatgttcactcccatcctcagcagtttcttattctcttgctgagcagtctggtgtgccattggaattgtcagaagctcagaggccatcctgagcagttttaccttttcctggaggacttggactggcagccacccacaaggcttaggacagct

SEQ ID NO: 14347 - DNA, 600 bp, Chicken  19866894219608_2
ggcaccagagcaccattgctccactgcttgcagtgcacaagggtgagagaaatcaaaaccagcccatgccaagtctgcgcatcactccctcgtcctcatctctctcatttcatttctccatggcagccattcccatctcagctcccggtccatgctcatgcagaagcttccccacttctgctgcaggaacagctctgtgctttccaggggtctttggagacatcaacctctaagccacgggacgtgctccctacacttggagagctctgccccacctacatccagattcagtggamagtscttctctttattccccaatgatcttagggaggagtctttattcttggctgttctgttctctgggcatccttctgaggaagaaggccagctcatttgctgtctctaggccctmkctctgggagattttctactcttttcattttaatgttcactcccatcctcagcagtttcttattctcttgctgagcagtctggtgtgccattggaattgtcagaagctcagaggccatcctgagcagttttaccttttcctggaggacttggactggcagccacccacaaggcttaggacagctctta

SEQ ID NO: 14348 - DNA, 600 bp, Chicken  19866894219608_3
tttctccatggcagccattcccatctcagctcccggtccatgctcatgcagaagcttccccacttctgctgcaggaacagctctgtgctttccaggggtctttggagacatcaacctctaagccacgggacgtgctccctacacttggagagctctgccccacctacatccagattcagtggamagtscttctctttattccccaatgatcttagggaggagtctttattcttggctgttctgttctctgggcatccttctgaggaagaaggccagctcatttgctgtctctaggccctmkctctgggagattttctactcttttcattttaatgttcactcccatcctcagcagtttcttattctcttgctgagcagtctggtgtgccattggaattgtcagaagctcagaggccatcctgagcagttttaccttttcctggaggacttggactggcagccacccacaaggcttaggacagctcttawgggaaaggggactgaccctctctgaaaggtttcacaggatgtgggatctctattgggctccaaaatggggcttagaaaaatatcctgtctgtacagtgattagaattgatg

SEQ ID NO: 14349 - DNA, 600 bp, Chicken  19866894219608_4
ttctccatggcagccattcccatctcagctcccggtccatgctcatgcagaagcttccccacttctgctgcaggaacagctctgtgctttccaggggtctttggagacatcaacctctaagccacgggacgtgctccctacacttggagagctctgccccacctacatccagattcagtggamagtscttctctttattccccaatgatcttagggaggagtctttattcttggctgttctgttctctgggcatccttctgaggaagaaggccagctcatttgctgtctctaggccctmkctctgggagattttctactcttttcattttaatgttcactcccatcctcagcagtttcttattctcttgctgagcagtctggtgtgccattggaattgtcagaagctcagaggccatcctgagcagttttaccttttcctggaggacttggactggcagccacccacaaggcttaggacagctcttawgggaaaggggactgaccctctctgaaaggtttcacaggatgtgggatctctattgggctccaaaatggggcttagaaaaatatcctgtctgtacagtgattagaattgatgc

SEQ ID NO: 14350 - DNA, 479 bp, Chicken  19866894219608_5
ttctctttattccccaatgatcttagggaggagtctttattcttggctgttctgttctctgggcatccttctgaggaagaaggccagctcatttgctgtctctaggccctmkctctgggagattttctactcttttcattttaatgttcactcccatcctcagcagtttcttattctcttgctgagcagtctggtgtgccattggaattgtcagaagctcagaggccatcctgagcagttttaccttttcctggaggacttggactggcagccacccacaaggcttaggacagctcttawgggaaaggggactgaccctctctgaaaggtttcacaggatgtgggatctctattgggctccaaaatggggcttagaaaaatatcctgtctgtacagtgattagaattgatgccctaaaaactaggactggtttattggtgaaggccataacattaagtcacagcacagagacagccctg

SEQ ID NO: 14351 - DNA, 599 bp, Chicken  19866894219609_1
  misc_feature (1)..(68): n is any nucleotide
nnnnnnnnnnnnnnnnnnnnnnnnnnnnnnnnnnnnnnnnnnnnnnnnnnnnnnnnnnnnnnnnnnnnctcagagtatcatcatcgttcgtgatggtctatcacttaaagtaggctcacatcagcagtcatcaccctgctccctcaggcacccctcttcttgttctccatagacttggaagagaaacatcctcggacaaacattttcattttcaaactcttcctgctctacagtcaccccccacatcaaaacaaacagcagcctttaaggtgtggattccaccaaccatcatccaacaartattttaatccatgggatccctactacaggggcaaatgcaacacttgcatttctagaatcagcaagtcaacactcttcagatgttattagtacagacaaggtgcaaattacaccaagacaccaaccaggataaatcaatatcagtcgaagagcctctttgtctgatctcaatataaccagctgtgctgaggccaagcacttacaagctcttaaacacacactgttagcagtgatatgtgcacatacctgaaaaacaaagaaacaagttttcatagcctgttgattttacctcctcacac

SEQ ID NO: 14352 - DNA, 600 bp, Chicken  19866894219610_1
ctcactttatgtgcagagcaacagggtttgtttaatgtgagcctaagtgctttttgccaggctaaaaccaccacgccaacacagggaacaggttggactgtcaagaaaatgaataccaagcagcacggtgtgtttgggtagaactgtcccggcgtgctcctcctcctacctgacacaaacaaataggaacatggaagagcactgccacccgtgcactgctgggggcaaagggttctgtgtttgtcagcatcttctgtgccaccagcaacagcgcagaggcgtctcatggcaaagctgctmaactttgaggctggtatttctgcacaggtttttatctcacttcaaggaatgtggagggtttatgtgaacctaaagatgaaggtcttaggattaggaacatgcaaaataccacacagctctaagctaccacagcgatcctgcatttgctggccacagcttcagtcaggcttcgtgcctcctgctgcatgtgaaagcaaagggagagaggtgccagtgctacacatgaagcaggtggcctttgggctgccttggcaactctgcctcacyttggagccagcascgccaatacwgccattaaac

SEQ ID NO: 14353 - DNA, 600 bp, Chicken  19866894219610_2
acagcgcagaggcgtctcatggcaaagctgctmaactttgaggctggtatttctgcacaggtttttatctcacttcaaggaatgtggagggtttatgtgaacctaaagatgaaggtcttaggattaggaacatgcaaaataccacacagctctaagctaccacagcgatcctgcatttgctggccacagcttcagtcaggcttcgtgcctcctgctgcatgtgaaagcaaagggagagaggtgccagtgctacacatgaagcaggtggcctttgggctgccttggcaactctgcctcacyttggagccagcascgccaatacwgccattaaacagacatctgggataggaagaccagtgcagaggagcagaatgatcttattttacagyacaaattgcggttgtgctctgatacagagtgtgcaaaaacatctaaatcttaatttcagaggacacaagtgaagcaaagagctgaccaygtcactggtgagctgttccagctggtacttatgttctgccaaacctgaaagaaaagtcttctctgaatctgcgtaagtttcaaagtttctattcactgacctctgcaaaatcaggttgggtg

SEQ ID NO: 14354 - DNA, 600 bp, Chicken  19866894219610_3
gtctcatggcaaagctgctmaactttgaggctggtatttctgcacaggtttttatctcacttcaaggaatgtggagggtttatgtgaacctaaagatgaaggtcttaggattaggaacatgcaaaataccacacagctctaagctaccacagcgatcctgcatttgctggccacagcttcagtcaggcttcgtgcctcctgctgcatgtgaaagcaaagggagagaggtgccagtgctacacatgaagcaggtggcctttgggctgccttggcaactctgcctcacyttggagccagcascgccaatacwgccattaaacagacatctgggataggaagaccagtgcagaggagcagaatgatcttattttacagyacaaattgcggttgtgctctgatacagagtgtgcaaaaacatctaaatcttaatttcagaggacacaagtgaagcaaagagctgaccaygtcactggtgagctgttccagctggtacttatgttctgccaaacctgaaagaaaagtcttctctgaatctgcgtaagtttcaaagtttctattcactgacctctgcaaaatcaggttgggtgacaggaatgactg

SEQ ID NO: 14355 - DNA, 600 bp, Chicken  19866894219610_4
aaagctgctmaactttgaggctggtatttctgcacaggtttttatctcacttcaaggaatgtggagggtttatgtgaacctaaagatgaaggtcttaggattaggaacatgcaaaataccacacagctctaagctaccacagcgatcctgcatttgctggccacagcttcagtcaggcttcgtgcctcctgctgcatgtgaaagcaaagggagagaggtgccagtgctacacatgaagcaggtggcctttgggctgccttggcaactctgcctcacyttggagccagcascgccaatacwgccattaaacagacatctgggataggaagaccagtgcagaggagcagaatgatcttattttacagyacaaattgcggttgtgctctgatacagagtgtgcaaaaacatctaaatcttaatttcagaggacacaagtgaagcaaagagctgaccaygtcactggtgagctgttccagctggtacttatgttctgccaaacctgaaagaaaagtcttctctgaatctgcgtaagtttcaaagtttctattcactgacctctgcaaaatcaggttgggtgacaggaatgactgcatggcttct

SEQ ID NO: 14356 - DNA, 592 bp, Chicken  19866894219610_5
ggtttatgtgaacctaaagatgaaggtcttaggattaggaacatgcaaaataccacacagctctaagctaccacagcgatcctgcatttgctggccacagcttcagtcaggcttcgtgcctcctgctgcatgtgaaagcaaagggagagaggtgccagtgctacacatgaagcaggtggcctttgggctgccttggcaactctgcctcacyttggagccagcascgccaatacwgccattaaacagacatctgggataggaagaccagtgcagaggagcagaatgatcttattttacagyacaaattgcggttgtgctctgatacagagtgtgcaaaaacatctaaatcttaatttcagaggacacaagtgaagcaaagagctgaccaygtcactggtgagctgttccagctggtacttatgttctgccaaacctgaaagaaaagtcttctctgaatctgcgtaagtttcaaagtttctattcactgacctctgcaaaatcaggttgggtgacaggaatgactgcatggcttctccacagcccagacaatgcagatctggctctatcaccacttaactggaacttccctatt

SEQ ID NO: 14357 - DNA, 503 bp, Chicken  19866894219610_6
gctggccacagcttcagtcaggcttcgtgcctcctgctgcatgtgaaagcaaagggagagaggtgccagtgctacacatgaagcaggtggcctttgggctgccttggcaactctgcctcacyttggagccagcascgccaatacwgccattaaacagacatctgggataggaagaccagtgcagaggagcagaatgatcttattttacagyacaaattgcggttgtgctctgatacagagtgtgcaaaaacatctaaatcttaatttcagaggacacaagtgaagcaaagagctgaccaygtcactggtgagctgttccagctggtacttatgttctgccaaacctgaaagaaaagtcttctctgaatctgcgtaagtttcaaagtttctattcactgacctctgcaaaatcaggttgggtgacaggaatgactgcatggcttctccacagcccagacaatgcagatctggctctatcaccacttaactggaacttccctatt

SEQ ID NO: 14358 - DNA, 599 bp, Chicken  19866894219612_1
  misc_feature (1)..(56): n is any nucleotide
nnnnnnnnnnnnnnnnnnnnnnnnnnnnnnnnnnnnnnnnnnnnnnnnnnnnnnnncctgactggaaaactaaaaatacaaataaaagagaaggtactgtttgccacttaacaacaggacagaataatttattctttgtttgttttaaagttaggctcttatttgatgcaattatttaggttttatgtgtattaatattctccagacgtttctaagcctttcagcaaaggttttggttgcaggtcagtttcaataaggactctgaatgttacaaacaagaagcttgggctgtggtcttaygaagaatacaaagcccaccatctattaagttcatatagttttatgtatgtgatcaaccctaatcctttgctgtacgcttatatctgcacaggtaatccatatgtacatagattgtgtgatgttgcatcttatcacctttcattagagcagggctgaacccacagtgataagctctgcttcttgtagcagcttcaatcctttttaaagggcaatgtgaaaaaattagaaaggcttggtattcagacagaaaggaagagattaaaaatcttttttttcttctcttcctctctacctgtttt

SEQ ID NO: 14359 - DNA, 600 bp, Chicken  19866894219613_1
tttgtcacagctcagcacaacacttggtcactaaatgatgcagctctttgatatctcattcccattttggtttgcttaggcaaatccagatgatctctgccctgtgcatcagtggatgctacaatcattatggctgtgctcaggcccccattccacaggaagaaccactggaattgtttactatggagaaaaggaggctgaagggagaccttattgctctcttccagtacctgaaaggtgattgcagtgggagcagggctggtctcttctcactggtgacaggacgaggggaaatggccycaagttgcaccaggggaggtttaggttggatatcaggaaaaacttctctactgaaagggctgttaagcacaggaataggctccccagggaggtggttgagtcaccatccctgaatgtstttaraaaccatctggatgtggtgctcagagatatgatttagyggagggttgttagagttagggtagcatgattaggctgtggttggacttgatgatctttaaggtcttttccaacctgagcaattctacggttctatgattctatgattcctgctctggtcttggccagcacagatcacta

SEQ ID NO: 14360 - DNA, 600 bp, Chicken  19866894219613_2
ctacaatcattatggctgtgctcaggcccccattccacaggaagaaccactggaattgtttactatggagaaaaggaggctgaagggagaccttattgctctcttccagtacctgaaaggtgattgcagtgggagcagggctggtctcttctcactggtgacaggacgaggggaaatggccycaagttgcaccaggggaggtttaggttggatatcaggaaaaacttctctactgaaagggctgttaagcacaggaataggctccccagggaggtggttgagtcaccatccctgaatgtstttaraaaccatctggatgtggtgctcagagatatgatttagyggagggttgttagagttagggtagcatgattaggctgtggttggacttgatgatctttaaggtcttttccaacctgagcaattctacggttctatgattctatgattcctgctctggtcttggccagcacagatcactaactccaacccctggcacctgcaccatcccaccattccttctgcagatgtgaaattcagcatgagcaaaactcacccaggtctaggtcataacaagccctaggttagaaaaacgtggtg

SEQ ID NO: 14361 - DNA, 600 bp, Chicken  19866894219613_3
atcattatggctgtgctcaggcccccattccacaggaagaaccactggaattgtttactatggagaaaaggaggctgaagggagaccttattgctctcttccagtacctgaaaggtgattgcagtgggagcagggctggtctcttctcactggtgacaggacgaggggaaatggccycaagttgcaccaggggaggtttaggttggatatcaggaaaaacttctctactgaaagggctgttaagcacaggaataggctccccagggaggtggttgagtcaccatccctgaatgtstttaraaaccatctggatgtggtgctcagagatatgatttagyggagggttgttagagttagggtagcatgattaggctgtggttggacttgatgatctttaaggtcttttccaacctgagcaattctacggttctatgattctatgattcctgctctggtcttggccagcacagatcactaactccaacccctggcacctgcaccatcccaccattccttctgcagatgtgaaattcagcatgagcaaaactcacccaggtctaggtcataacaagccctaggttagaaaaacgtggtgttgtc

SEQ ID NO: 14362 - DNA, 600 bp, Chicken  19866894219613_4
gaaccactggaattgtttactatggagaaaaggaggctgaagggagaccttattgctctcttccagtacctgaaaggtgattgcagtgggagcagggctggtctcttctcactggtgacaggacgaggggaaatggccycaagttgcaccaggggaggtttaggttggatatcaggaaaaacttctctactgaaagggctgttaagcacaggaataggctccccagggaggtggttgagtcaccatccctgaatgtstttaraaaccatctggatgtggtgctcagagatatgatttagyggagggttgttagagttagggtagcatgattaggctgtggttggacttgatgatctttaaggtcttttccaacctgagcaattctacggttctatgattctatgattcctgctctggtcttggccagcacagatcactaactccaacccctggcacctgcaccatcccaccattccttctgcagatgtgaaattcagcatgagcaaaactcacccaggtctaggtcataacaagccctaggttagaaaaacgtggtgttgtcaattttagttggtgttttgactaaatatgcaaggatta

SEQ ID NO: 14363 - DNA, 600 bp, Chicken  19866894219615_1
ctgagcaccaaaaccagccctctcgtggaagcagtttacccctcacttccaagggaagggatgactcccaaacgcctggctaaggtggttcaattattaaaagagaaatatatgctattttggattagtaaaacacacttctgccacttacttagcacgcttgctttaaggacagaccacagaaggcacagacttaggggctgggatactctgaatcatccgcacggcaagctggaaacatgtctgtcacatgcacttatttatgcttacaaaaatagcaccgtgaaagaagcagatgcrtgagcacaaaaaaagaacttaaatcgagttagttattctagagatactgscagacactggtgaatttaacagggaaacgtccccctcttgtatgtaaatgttaaaggtctccatttcaagagcgctaaataataaacgctccgtaaagccacgtgttgaaacagtatgttgtaagcctgctttgtacagagatgttactctttccaccaccacaggacgtacaggaacttctctactcattcatgttgagatatgaatggttaaagggattgcttacaaaatatgttcttcctccaacgt

SEQ ID NO: 14364 - DNA, 600 bp, Chicken  19866894219615_2
aagggaagggatgactcccaaacgcctggctaaggtggttcaattattaaaagagaaatatatgctattttggattagtaaaacacacttctgccacttacttagcacgcttgctttaaggacagaccacagaaggcacagacttaggggctgggatactctgaatcatccgcacggcaagctggaaacatgtctgtcacatgcacttatttatgcttacaaaaatagcaccgtgaaagaagcagatgcrtgagcacaaaaaaagaacttaaatcgagttagttattctagagatactgscagacactggtgaatttaacagggaaacgtccccctcttgtatgtaaatgttaaaggtctccatttcaagagcgctaaataataaacgctccgtaaagccacgtgttgaaacagtatgttgtaagcctgctttgtacagagatgttactctttccaccaccacaggacgtacaggaacttctctactcattcatgttgagatatgaatggttaaagggattgcttacaaaatatgttcttcctccaacgtttgtgtcaatcacagactaacagcaatgagacagccccaattcccgctcc

SEQ ID NO: 14365 - DNA, 600 bp, Chicken  19866894219616_1
ccaggacttaataaagctacagcgtgtgatggtgctgccatgcaaagtgattcaaggtaggatggtgcaaaggcatccgttgtgaactgctgctttggtactgctgggggctacaggtcctgttccttcagggtagtgagggtagatggcatttgaaggacccttccaactcaaatgaggtgctcagaacagggagaaggagcatgttttgctgaagtccatgtgaaagttgggaagatgcagcaggagggatactggtttgcagctgatgtcatcagcagcctgggtagtttgtctgaygtaacagtgagctcgctgggtgaatgccagtctaagaaggcatgtttcagtttaattcaaggatgctattgtgtttaacactggaagttaaagtggtattgctattctgactgggaagtttatccaaaagaaaacaaagtgcaaacagcagtttggggccatagcagtaacaygcagtgatggagcctacaggagcagcaaacaggaaactgaatttggttattgggctttccttttatcccaggcatcatttctgccccttcaacctgacagacagtggaaaacaaatggtgttggtaa

SEQ ID NO: 14366 - DNA, 600 bp, Chicken  19866894219616_2
aatgaggtgctcagaacagggagaaggagcatgttttgctgaagtccatgtgaaagttgggaagatgcagcaggagggatactggtttgcagctgatgtcatcagcagcctgggtagtttgtctgaygtaacagtgagctcgctgggtgaatgccagtctaagaaggcatgtttcagtttaattcaaggatgctattgtgtttaacactggaagttaaagtggtattgctattctgactgggaagtttatccaaaagaaaacaaagtgcaaacagcagtttggggccatagcagtaacaygcagtgatggagcctacaggagcagcaaacaggaaactgaatttggttattgggctttccttttatcccaggcatcatttctgccccttcaacctgacagacagtggaaaacaaatggtgttggtaactgaagtcaggtgttggtgggtgttctctggttggatggatgtattcctcaatctgtccctgctatcgaagtgtaaatagatttaacgaggtaaaacgaatcttagctcgttggccagcatataaatcagcaaaattaattaaattccacaatttaaaatgtgcygtggatgc

SEQ ID NO: 14367 - DNA, 600 bp, Chicken  19866894219616_3
agtaacaygcagtgatggagcctacaggagcagcaaacaggaaactgaatttggttattgggctttccttttatcccaggcatcatttctgccccttcaacctgacagacagtggaaaacaaatggtgttggtaactgaagtcaggtgttggtgggtgttctctggttggatggatgtattcctcaatctgtccctgctatcgaagtgtaaatagatttaacgaggtaaaacgaatcttagctcgttggccagcatataaatcagcaaaattaattaaattccacaatttaaaatgtgcygtggatgcttccctagrgtagctaaatagaatttcattgatatcattgcaaattttgttctgtttactgcacccrgagtgagctgggagcattcctacaaacagggtaggggttctggctgcccccccaggacagctgctgctggcacacactgagccccastgccaccagcacacattgtgtgggtgagggctgctgggatgctgcatgtcaggcactcagcctgcacagctgtgggagcacatggagggggcatagatggaaccacrtttctactttctgtgttactgcctttggaat

SEQ ID NO: 14368 - DNA, 600 bp, Chicken  19866894219616_4
gagcctacaggagcagcaaacaggaaactgaatttggttattgggctttccttttatcccaggcatcatttctgccccttcaacctgacagacagtggaaaacaaatggtgttggtaactgaagtcaggtgttggtgggtgttctctggttggatggatgtattcctcaatctgtccctgctatcgaagtgtaaatagatttaacgaggtaaaacgaatcttagctcgttggccagcatataaatcagcaaaattaattaaattccacaatttaaaatgtgcygtggatgcttccctagrgtagctaaatagaatttcattgatatcattgcaaattttgttctgtttactgcacccrgagtgagctgggagcattcctacaaacagggtaggggttctggctgcccccccaggacagctgctgctggcacacactgagccccastgccaccagcacacattgtgtgggtgagggctgctgggatgctgcatgtcaggcactcagcctgcacagctgtgggagcacatggagggggcatagatggaaccacrtttctactttctgtgttactgcctttggaattccaaaggtaatttata

SEQ ID NO: 14369 - DNA, 600 bp, Chicken  19866894219616_5
ccaggcatcatttctgccccttcaacctgacagacagtggaaaacaaatggtgttggtaactgaagtcaggtgttggtgggtgttctctggttggatggatgtattcctcaatctgtccctgctatcgaagtgtaaatagatttaacgaggtaaaacgaatcttagctcgttggccagcatataaatcagcaaaattaattaaattccacaatttaaaatgtgcygtggatgcttccctagrgtagctaaatagaatttcattgatatcattgcaaattttgttctgtttactgcacccrgagtgagctgggagcattcctacaaacagggtaggggttctggctgcccccccaggacagctgctgctggcacacactgagccccastgccaccagcacacattgtgtgggtgagggctgctgggatgctgcatgtcaggcactcagcctgcacagctgtgggagcacatggagggggcatagatggaaccacrtttctactttctgtgttactgcctttggaattccaaaggtaatttataacatgaatcctcctagaaataagggttggaagatttttctctgcaatacaaaggattg

SEQ ID NO: 14370 - DNA, 600 bp, Chicken  19866894219616_6
ctggttggatggatgtattcctcaatctgtccctgctatcgaagtgtaaatagatttaacgaggtaaaacgaatcttagctcgttggccagcatataaatcagcaaaattaattaaattccacaatttaaaatgtgcygtggatgcttccctagrgtagctaaatagaatttcattgatatcattgcaaattttgttctgtttactgcacccrgagtgagctgggagcattcctacaaacagggtaggggttctggctgcccccccaggacagctgctgctggcacacactgagccccastgccaccagcacacattgtgtgggtgagggctgctgggatgctgcatgtcaggcactcagcctgcacagctgtgggagcacatggagggggcatagatggaaccacrtttctactttctgtgttactgcctttggaattccaaaggtaatttataacatgaatcctcctagaaataagggttggaagatttttctctgcaatacaaaggattggttcatgcagaaataattgctctgatacgacagagagcaagttcaagttccaarggtttgttgctgcataatttgtattcttccaga

SEQ ID NO: 14371 - DNA, 600 bp, Chicken  19866894219616_7
gccagcatataaatcagcaaaattaattaaattccacaatttaaaatgtgcygtggatgcttccctagrgtagctaaatagaatttcattgatatcattgcaaattttgttctgtttactgcacccrgagtgagctgggagcattcctacaaacagggtaggggttctggctgcccccccaggacagctgctgctggcacacactgagccccastgccaccagcacacattgtgtgggtgagggctgctgggatgctgcatgtcaggcactcagcctgcacagctgtgggagcacatggsgggggcatagatggaaccacrtttctactttctgtgttactgcctttggaattccaaaggtaatttataacatgaatcctcctagaaataagggttggaagatttttctctgcaatacaaaggattggttcatgcagaaataattgctctgatacgacagagagcaagttcaagttccaarggtttgttgctgcataatttgtattcttccagaattacatcctattaaactacaagattgagattttatgctggaattggttttcataaggagaaatatttcatatggaaataaatcag

SEQ ID NO: 14372 - DNA, 600 bp, Chicken  19866894219616_8
attaattaaattccacaatttaaaatgtgcygtggatgcttccctagrgtagctaaatagaatttcattgatatcattgcaaattttgttctgtttactgcacccrgagtgagctgggagcattcctacaaacagggtaggggttctggctgcccccccaggacagctgctgctggcacacactgagccccastgccaccagcacacattgtgtgggtgagggctgctgggatgctgcatgtcaggcactcagcctgcacagctgtgggagcacatggagggggcatagatggaaccacrtttctactttctgtgttactgcctttggaattccaaaggtaatttataacatgaatcctcctagaaataagggttggaagatttttctctgcaatacaaaggattggttcatgcagaaataattgctctgatacgacagagagcaagttcaagttccaarggtttgttgctgcataatttgtattcttccagaattacatcctattaaactacaagattgagattttatgctggaattggttttcataaggagaaatatttcatatggaaataaatcaggaaagttttacagaatgtgac

SEQ ID NO: 14373 - DNA, 535 bp, Chicken  19866894219616_9
ggacagctgctgctggcacacactgagccccastgccaccagcacacattgtgtgggtgagggctgctgggatgctgcatgtcaggcactcagcctgcacagctgtgggagcacatggagggggcatagatggaaccacrtttctactttctgtgttactgcctttggaattccaaaggtaatttataacatgaatcctcctagaaataagggttggaagatttttctctgcaatacaaaggattggttcatgcagaaataattgctctgatacgacagagagcaagttcaagttccaarggtttgttgctgcataatttgtattcttccagaattacatcctattaaactacaagattgagattttatgctggaattggttttcataaggagaaatatttcatatggaaataaatcaggaaagttttacagaatgtgactgtgttaaggagcgtgtgaatgtgttaatgaagcactcagagtggccgagttgtgccccatggctcgcactgctgcccttactgttccatgctgg

SEQ ID NO: 14374 - DNA, 600 bp, Chicken  19866894219619_1
cgccacgctccgcacatgggttccctgcgtgggttccctgcgtgggttccctgcgcagccctcggggcccagtggcgtggttcggctcaccacgcgctctttacagttctgcctgttgtacggcacgatgctgtctctgctgtatccctctcatgtttcttgtcctcctttctgtgggttaggcagaccttcctcgctgctctgtgatgagaagtctcttgtgataactgataacatgagaaaatctttcctgtgtttcagacgccttgagtagaaagtgcttttctgatctgtgacacwtctctgtcagcggggcccgcggggacggtgactttttgctggtgtgctgcattacaagtgcactggtttgttttgatgcctgctattactccccggtaatcgttgctgtgattctctctcctcttctggttaattatatttgtttagaatccgttttctttacaaatacaatattggctttcattttctccagagtgagtccccttttgttaccttctgctctttctgcagactcctaaagccgtttttattcctcaccctcttccacctttggcaaaaactcaggaggatgcccaaccc

SEQ ID NO: 14375 - DNA, 600 bp, Chicken  19866894219622_1
atggtgaaacagcatacagaaatttgtattgcaagcacatgagctcatgtacacaccaaatatgctctgcagtcaagcgcttcgtccaggcttgtctaagggagacagaatcagcttatgaagaatacactgctatgtactgtcctcctatatttcaggagttaagttcctgtaataattcagttatatttacttcttattcagaaattctgggtgaaagttgctgcaagcatgagatttaacaggctgttcataatgattggcaagttccagctggaacatcggaaaaggtatgaaagyacaaacataataagtcttaagtaaaggaatagcttctctttattaagaaagagtgrgtgagatggttagcgcttttgaaatcagatgacaagggtaatgtaaaatagtattttatcatatttttattttggttttcattacaagacagaacatacctgtatgaatctgttatttgtgcactaggtataaaatgtaaaatttgaattttgaaggagaaggaacatatgtttctcacaagggtaaggtccactgaaattagttcaagactgtaccttttcctcagtaaatgcaatttcacct

SEQ ID NO: 14376 - DNA, 600 bp, Chicken  19866894219622_2
caaatatgctctgcagtcaagcgcttcgtccaggcttgtctaagggagacagaatcagcttatgaagaatacactgctatgtactgtcctcctatatttcaggagttaagttcctgtaataattcagttatatttacttcttattcagaaattctgggtgaaagttgctgcaagcatgagatttaacaggctgttcataatgattggcaagttccagctggaacatcggaaaaggtatgaaagyacaaacataataagtcttaagtaaaggaatagcttctctttattaagaaagagtgrgtgagatggttagcgcttttgaaatcagatgacaagggtaatgtaaaatagtattttatcatatttttattttggttttcattacaagacagaacatacctgtatgaatctgttatttgtgcactaggtataaaatgtaaaatttgaattttgaaggagaaggaacatatgtttctcacaagggtaaggtccactgaaattagttcaagactgtaccttttcctcagtaaatgcaatttcacctttatttctatgatatttttttcatgaaaagccatttcttatatttacagtcctttg

SEQ ID NO: 14377 - DNA, 599 bp, Chicken  19866894219625_1
  misc_feature (1)..(100): n is any nucleotide
nnnnnnnnnnnnnnnnnnnnnnnnnnnnnnnnnnnnnnnnnnnnnnnnnnnnnnnnnnnnnnnnnnnnnnnnnnnnnnnnnnnnnnnnnnnnnnnnnnnnctagaagtattcccatgcagtgggtccataattacatccagagatagaggtttagttaaaaataaaagtgcattttcacgtctttcatctgcaaatccaggtctagtaacagaacatggctaaatcattgctagaatttgatgccaggacacttggtggcatagagacaaaaactactttatgaacaagtaaatatattmaaggagacaaggagacagagaaggagaggaagcaatgatatacaggctaactgatatctgcaaacttaccacaatcaaagataagtgctaaaagctgtgtttttgctaagaatttctctcaagctcacatagaacagctggcagtatttcaaatcctaaagcctctctttctgttaaggatagagtactcatatatacttccccaaagtgaggaaagataacagcctacatgcccaagcctyttctgtaaygtamaggaccagagagcaccagacccactctaagcattgacttccagt

SEQ ID NO: 14378 - DNA, 600 bp, Chicken  19866894219625_2
gccaggacacttggtggcatagagacaaaaactactttatgaacaagtaaatatattmaaggagacaaggagacagagaaggagaggaagcaatgatatacaggctaactgatatctgcaaacttaccacaatcaaagataagtgctaaaagctgtgtttttgctaagaatttctctcaagctcacatagaacagctggcagtatttcaaatcctaaagcctctctttctgttaaggatagagtactcatatatacttccccaaagtgaggaaagataacagcctacatgcccaagcctyttctgtaaygtamaggaccagagagcaccagacccactctaagcattgacttccagtcagttccttactgcagtcactgtgcaagatacatgacagcgtacatctgctagtttgggttttgcttttcaaatacatttacgtactggctttgacaccagctgttccactttaaagcacagttcaagttggcaccttgactgaagtcagaaatttgtcagttttaccattaactttttcaagttcacaatcacaacttttcaccctctaaagcagctataacaaagaattatcagatactta

SEQ ID NO: 14379 - DNA, 600 bp, Chicken  19866894219625_3
cttggtggcatagagacaaaaactactttatgaacaagtaaatatattmaaggagacaaggagacagagaaggagaggaagcaatgatatacaggctaactgatatctgcaaacttaccacaatcaaagataagtgctaaaagctgtgtttttgctaagaatttctctcaagctcacatagaacagctggcagtatttcaaatcctaaagcctctctttctgttaaggatagagtactcatatatacttccccaaagtgaggaaagataacagcctacatgcccaagcctyttctgtaaygtamaggaccagagagcaccagacccactctaagcattgacttccagtcagttccttactgcagtcactgtgcaagatacatgacagcgtacatctgctagtttgggttttgcttttcaaatacatttacgtactggctttgacaccagctgttccactttaaagcacagttcaagttggcaccttgactgaagtcagaaatttgtcagttttaccattaactttttcaagttcacaatcacaacttttcaccctctaaagcagctataacaaagaattatcagatacttatggtaacca

SEQ ID NO: 14380 - DNA, 600 bp, Chicken  19866894219625_4
gtggcatagagacaaaaactactttatgaacaagtaaatatattmaaggagacaaggagacagagaaggagaggaagcaatgatatacaggctaactgatatctgcaaacttaccacaatcaaagataagtgctaaaagctgtgtttttgctaagaatttctctcaagctcacatagaacagctggcagtatttcaaatcctaaagcctctctttctgttaaggatagagtactcatatatacttccccaaagtgaggaaagataacagcctacatgcccaagcctyttctgtaaygtamaggaccagagagcaccagacccactctaagcattgacttccagtcagttccttactgcagtcactgtgcaagatacatgacagcgtacatctgctagtttgggttttgcttttcaaatacatttacgtactggctttgacaccagctgttccactttaaagcacagttcaagttggcaccttgactgaagtcagaaatttgtcagttttaccattaactttttcaagttcacaatcacaacttttcaccctctaaagcagctataacaaagaattatcagatacttatggtaaccaagga

SEQ ID NO: 14381 - DNA, 600 bp, Chicken  19866894219632_1
gcctctatttctggcttatcactggtggcaaatatattcagggaagtgtcttttatgcatttatttctatctcttcaacttctctggttgtaaggttttccttttaattcatgagaattttggagaaaaatacgctggttcagaaacttggaattttcacaaggaagatctgtactctgtaagtgtttagggaggagaaagagagataaccagggtgatttgcctgtcttagccagagagcaagaaaggacttacttatgtcataaaactgggtatgctaaatacaggtaatctactgtwcttttgtcctctgtcagtaggttttacatgtcacagaacttgatgacattgttttttatgcattgaagaaagcatatcagagctcaaataatacagtaaactgtttgtcattgttctttcaaatgcagtagctagttattcttctaagtgattcttcatttcttacaaactattttgtttttttctctcttttgcatggcttgtcttcaatgaaaattgatagatgtctcttagctggagctctacagtgtgacagttgagacttgatatagaccacagttagtgattgctgctgtgagc

SEQ ID NO: 14382 - DNA, 600 bp, Chicken  19866894219636_1
agctagcatccagcatcctgtcacttgtaggtatcactcaagaagggcatttgactgcccttccccttagcttaaccagtgattgaatatgttgtttcagccagacccgtgactgcatacagatcaaatgcacagtcagtggtagccgttaacacgaccaacagcaataggaatttttctttctggcagcatttctaagaactgccatgtggactgatttttatgttaggttttcaatagttctttttaaaggcagtttcatgaagacttcttttgatattgcacatattcgcctgatcwtcttccttatagcagttgtttgctacaataattcccatatcttcacagcacttggttccatctacattaattttagtaagttcaaaagtaggccatggaagcaaaatgaagtgtgggcaawgtgcaaaaactcttcaatagtttcatttaatttgacatataaaataaatatggattttattctggggtgtattgtcatcttcaaaagattgcaaatcctagaaagtcattttattgggtctttggttagtgagttttaagcaataatttatttcaattaaatgacagcatcttttaatc

SEQ ID NO: 14383 - DNA, 600 bp, Chicken  19866894219636_2
gatcaaatgcacagtcagtggtagccgttaacacgaccaacagcaataggaatttttctttctggcagcatttctaagaactgccatgtggactgatttttatgttaggttttcaatagttctttttaaaggcagtttcatgaagacttcttttgatattgcacatattcgcctgatcwtcttccttatagcagttgtttgctacaataattcccatatcttcacagcacttggttccatctacattaattttagtaagttcaaaagtaggccatggaagcaaaatgaagtgtgggcaawgtgcaaaaactcttcaatagtttcatttaatttgacatataaaataaatatggattttattctggggtgtattgtcatcttcaaaagattgcaaatcctagaaagtcattttattgggtctttggttagtgagttttaagcaataatttatttcaattaaatgacagcatcttttaatctcaatgaaatgacttggcagtcaagcagttctgcctttagagctttcatacatttattcatctgcccaaatttccaaagactttagagttcagttgaagtttcatccagaattaatgattt

SEQ ID NO: 14384 - DNA, 599 bp, Chicken  19866894219638_1
  misc_feature (1)..(94): n is any nucleotide
nnnnnnnnnnnnnnnnnnnnnnnnnnnnnnnnnnnnnnnnnnnnnnnnnnnnnnnnnnnnnnnnnnnnnnnnnnnnnnnnnnnnnnnnnnnnnnttggattctgagcaggaagagcgatatgaagtttatcaatacgtcgttgatgatttgttcgtgcttgaacgttatgagcattttctgctttctaaaatgtgtgactattgatcagcactgatgttagctttaagatgcagtgattgaaagcttattttcaggtgtcacgaaattatccatatttattctgggatttcactcgctaytatctgatgcattccatgttatgttcttctgcttagaatrtgaaatataactgctactagaaaaaaagcaaatatggaaaggtgctttggagagatgtatgggagtttctccatttactttctmttccagctccaaggctattcatcagtttgttgctgtgcagaggtagctcccggttttgatcctacctaagtgcatgtatgggtgcaaggatatagatgactctcgtttaacatttgtgcttgctatgaaatatgagaatgaaatgaatttcgtctctttcacccgcaagatctca

SEQ ID NO: 14385 - DNA, 599 bp, Chicken  19866894219638_2
  misc_feature (1)..(54): n is any nucleotide
nnnnnnnnnnnnnnnnnnnnnnnnnnnnnnnnnnnnnnnnnnnnnnnnnnnnnnttggattctgagcaggaagagcgatatgaagtttatcaatacgtcgttgatgatttgttcgtgcttgaacgttatgagcattttctgctttctaaaatgtgtgactattgatcagcactgatgttagctttaagatgcagtgattgaaagcttattttcaggtgtcacgaaattatccatatttattctgggatttcactcgctaytatctgatgcattccatgttatgttcttctgcttagaatrtgaaatataactgctactagaaaaaaagcaaatatggaaaggtgctttggagagatgtatgggagtttctccatttactttctmttccagctccaaggctattcatcagtttgttgctgtgcagaggtagctcccggttttgatcctacctaagtgcatgtatgggtgcaaggatatagatgactctcgtttaacatttgtgcttgctatgaaatatgagaatgaaatgaatttcgtctctttcacccgcaagatctcaaaagagaatagaaaggaagataaaactcatttcaatatgt

SEQ ID NO: 14386 - DNA, 600 bp, Chicken  19866894219638_3
gtttatcaatacgtcgttgatgatttgttcgtgcttgaacgttatgagcattttctgctttctaaaatgtgtgactattgatcagcactgatgttagctttaagatgcagtgattgaaagcttattttcaggtgtcacgaaattatccatatttattctgggatttcactcgctaytatctgatgcattccatgttatgttcttctgcttagaatrtgaaatataactgctactagaaaaaaagcaaatatggaaaggtgctttggagagatgtatgggagtttctccatttactttctmttccagctccaaggctattcatcagtttgttgctgtgcagaggtagctcccggttttgatcctacctaagtgcatgtatgggtgcaaggatatagatgactctcgtttaacatttgtgcttgctatgaaatatgagaatgaaatgaatttcgtctctttcacccgcaagatctcaaaagagaatagaaaggaagataaaactcatttcaatatgtacagagagarcatttcttatttctgctgatggctgccacatcttttcagtgggaacagctggtatctaaatggcttcctcagcta

SEQ ID NO: 14387 - DNA, 600 bp, Chicken  19866894219638_4
actgctactagaaaaaaagcaaatatggaaaggtgctttggagagatgtatgggagtttctccatttactttctmttccagctccaaggctattcatcagtttgttgctgtgcagaggtagctcccggttttgatcctacctaagtgcatgtatgggtgcaaggatatagatgactctcgtttaacatttgtgcttgctatgaaatatgagaatgaaatgaatttcgtctctttcacccgcaagatctcaaaagagaatagaaaggaagataaaactcatttcaatatgtacagagagarcatttcttatttctgctgatggctgccacatcttttcagtgggaacagctggtatctaaatggcttcctcagctaaaacaatgtctatctcgctttaaaatttcagcaggaagctgctgtttcatcatttagtcgtgtcacatatttatagtgttgtgtttagctgtagtgtttgagaaacaaaaaatgaaagaaaattgatgcactgtatatcttggcaccagtgaatataaggttatggttagtcataaaacctataatctgttgcaaaggggaggaaccaaattctcagtgctgtgg

SEQ ID NO: 14388 - DNA, 600 bp, Chicken  19866894219638_5
cagcaggaagctgctgtttcatcatttagtcgtgtcacatatttatagtgttgtgtttagctgtagtgtttgagaaacaaaaaatgaaagaaaattgatgcactgtatatcttggcaccagtgaatataaggttatggttagtcataaaacctataatctgttgcaaaggggaggaaccaaattctcagtgctgtggtaaaacttttagaaatagaacaattaaaaagtctggaaggaaatatggcccctgttcagcaatatgtttctgttcatgcctaagtataaacatctcagcaatmctggaacttgttttgcagtgaaacacccactgaagtacatgtagcctaggtgaggacatgcacttctcataaatcctcctttagctggcgaatcatttttttctggcaaatttccatatgaaaatcaaaaatggaaaatggaaacaaaatgggattccaagacaaaggattaaaaacgtgtttacaggatagggaataaattcaaacaaagtgtcaatattcactgaacaaatgaattcatacttcagtgtgcattttttcttgccatgatgtttataccagagaagccagtaacgttta

SEQ ID NO: 14389 - DNA, 600 bp, Chicken  19866894219639_1
ataacttattatacttcgtttgaaaacatttgtttttatgttacatgcatatgactgcatattaaattgtatttacttatttttagagagcatttttaattttcaccaggagctttttatgcaaacacgtgaagtaggcgtatcttgtaggctgaagataacccatgtgaatgttacagacacactcacacaagcatctccaggttcacaggtatgcatttacagatcccttaattgttggcccaaccccttttgcccaatgctcctgcccagatcctgacccatgggtcccctactcayctgttatgccttgccttccaggtttctttctctgtacagttttgtttctacttttacytattatctcttttacatttcacatgctgtccttgatcagataaccttaacaaagtaggtgctctcacctttcttatagcactacaataccttcagttcctgacctctggtatggtttgtgagttctggaaaagcagagcctggcagaagcatctgccctaggtttgagagggctctaattgttattaataaaataaagtaatcrctatttttttgttttaatttacatttttgaataatgat

SEQ ID NO: 14390 - DNA, 600 bp, Chicken  19866894219639_2
atattaaattgtatttacttatttttagagagcatttttaattttcaccaggagctttttatgcaaacacgtgaagtaggcgtatcttgtaggctgaagataacccatgtgaatgttacagacacactcacacaagcatctccaggttcacaggtatgcatttacagatcccttaattgttggcccaaccccttttgcccaatgctcctgcccagatcctgacccatgggtcccctactcayctgttatgccttgccttccaggtttctttctctgtacagttttgtttctacttttacytattatctcttttacatttcacatgctgtccttgatcagataaccttaacaaagtaggtgctctcacctttcttatagcactacaataccttcagttcctgacctctggtatggtttgtgagttctggaaaagcagagcctggcagaagcatctgccctaggtttgagagggctctaattgttattaataaaataaagtaatcrctatttttttgttttaatttacatttttgaataatgatactgtgtttaaaactagctggtattcaatagagcgaaggaacttgcttcagttctagt

SEQ ID NO: 14391 - DNA, 600 bp, Chicken  19866894219639_3
ctcctgcccagatcctgacccatgggtcccctactcayctgttatgccttgccttccaggtttctttctctgtacagttttgtttctacttttacytattatctcttttacatttcacatgctgtccttgatcagataaccttaacaaagtaggtgctctcacctttcttatagcactacaataccttcagttcctgacctctggtatggtttgtgagttctggaaaagcagagcctggcagaagcatctgccctaggtttgagagggctctaattgttattaataaaataaagtaatcrctatttttttgttttaatttacatttttgaataatgatactgtgtttaaaactagctggtattcaatagagcgaaggaacttgcttcagttctagtgaaacacacagagacaaaatacaaacagtgcagcactgggggatccatgtgctggatttaaggggttttaaagctgtctgagccttgytaaatgtgaagtttttccttcctgtagtcttgtgaagccaggtaaactgtttccatttcaaggcayacaagacatagaaaaagactrcatagtggtctgccaaagattattgtgtt

SEQ ID NO: 14392 - DNA, 600 bp, Chicken  19866894219639_4
ccttcagttcctgacctctggtatggtttgtgagttctggaaaagcagagcctggcagaagcatctgccctaggtttgagagggctctaattgttattaataaaataaagtaatcrctatttttttgttttaatttacatttttgaataatgatactgtgtttaaaactagctggtattcaatagagcgaaggaacttgcttcagttctagtgaaacacacagagacaaaatacaaacagtgcagcactgggggatccatgtgctggatttaaggggttttaaagctgtctgagccttgytaaatgtgaagtttttccttcctgtagtcttgtgaagccaggtaaactgtttccatttcaaggcayacaagacatagaaaaagactrcatagtggtctgccaaagattattgtgtttccytccatgttcattatgttagtaacctattccccttttctctgcccagtaaagtatgaaaagcctttattttatagttcatgcaccttattactcctttattcttcagttgaggtcatgagttatttgttcaaatattccacttcacaacataaatatgtagctgataattattattagctg

SEQ ID NO: 14393 - DNA, 600 bp, Chicken  19866894219639_5
gccctaggtttgagagggctctaattgttattaataaaataaagtaatcrctatttttttgttttaatttacatttttgaataatgatactgtgtttaaaactagctggtattcaatagagcgaaggaacttgcttcagttctagtgaaacacacagagacaaaatacaaacagtgcagcactgggggatccatgtgctggatttaaggggttttaaagctgtctgagccttgytaaatgtgaagtttttccttcctgtagtcttgtgaagccaggtaaactgtttccatttcaaggcayacaagacatagaaaaagactrcatagtggtctgccaaagattattgtgtttccytccatgttcattatgttagtaacctattccccttttctctgcccagtaaagtatgaaaagcctttattttatagttcatgcaccttattactcctttattcttcagttgaggtcatgagttatttgttcaaatattccacttcacaacataaatatgtagctgataattattattagctgataaacagtgatcaccatttagtagcttcttttcctaggtgccctgcaaaccacagaatcatcaga

SEQ ID NO: 14394 - DNA, 600 bp, Chicken  19866894219639_6
taattgttattaataaaataaagtaatcrctatttttttgttttaatttacatttttgaataatgatactgtgtttaaaactagctggtattcaatagagcgaaggaacttgcttcagttctagtgaaacacacagagacaaaatacaaacagtgcagcactgggggatccatgtgctggatttaaggggttttaaagctgtctgagccttgytaaatgtgaagtttttccttcctgtagtcttgtgaagccaggtaaactgtttccatttcaaggcayacaagacatagaaaaagactrcatagtggtctgccaaagattattgtgtttccytccatgttcattatgttagtaacctattccccttttctctgcccagtaaagtatgaaaagcctttattttatagttcatgcaccttattactcctttattcttcagttgaggtcatgagttatttgttcaaatattccacttcacaacataaatatgtagctgataattattattagctgataaacagtgatcaccatttagtagcttcttttcctaggtgccctgcaaaccacagaatcatcagatggttaactacagaggcatac

SEQ ID NO: 14395 - DNA, 600 bp, Chicken  19866894219639_7
ttttttgttttaatttacatttttgaataatgatactgtgtttaaaactagctggtattcaatagagcgaaggaacttgcttcagttctagtgaaacacacagagacaaaatacaaacagtgcagcactgggggatccatgtgctggatttaaggggttttaaagctgtctgagccttgytaaatgtgaagtttttccttcctgtagtcttgtgaagccaggtaaactgtttccatttcaaggcayacaagacatagaaaaagactrcatagtggtctgccaaagattattgtgtttccytccatgttcattatgttagtaacctattccccttttctctgcccagtaaagtatgaaaagcctttattttatagttcatgcaccttattactcctttattcttcagttgaggtcatgagttatttgttcaaatattccacttcacaacataaatatgtagctgataattattattagctgataaacagtgatcaccatttagtagcttcttttcctaggtgccctgcaaaccacagaatcatcagatggttaactacagaggcatacagttgccattttgcttcagttcttcagcagcta

SEQ ID NO: 14396 - DNA, 600 bp, Chicken  19866894219639_8
aaaccacagaatcatcagatggttaactacagaggcatacagttgccattttgcttcagttcttcagcagctataaatttaaagtgtttgcaagtggtggcaatcactatttgtgtgtagcagtttcataagtaagtgctagtatttcagattcagacttgtcagaaactctgaagataaagctcagctctattaaatccattaaatttgcgttgggccagcctctcttttaataaaatctttaggtgatgctacaaacttttaatattcctcccaaatgccacatttcaaggctagagraattccattttaatgttaagggaatttagtaaagacttaatttttactatctgcttcaatttaaaacaacagtcttcatttctttctcttcacagatgtttctattaatattttatgacatgtagcagtagaacgatgtagattctagggtgtttttttttcttttttccagcttagttatattcatctgtcacttattacatttcaatactggcattgtaagcacttcaaaaaaaaatctggcttggccattgtctttcatctctgtattcttttgctgatctgtgttttcttcttttt

SEQ ID NO: 14397 - DNA, 600 bp, Chicken  19866894219639_9
cagaaactctgaagataaagctcagctctattaaatccattaaatttgcgttgggccagcctctcttttaataaaatctttaggtgatgctacaaacttttaatattcctcccaaatgccacatttcaaggctagagraattccattttaatgttaagggaatttagtaaagacttaatttttactatctgcttcaatttaaaacaacagtcttcatttctttctcttcacagatgtttctattaatattttatgacatgtagcagtagaacgatgtagattctagggtgtttttttttrttttttccagcttagttatattcatctgtcacttattacatttcaatactggcattgtaagcacttcaaaaaaaaatctggcttggccattgtctttcatctctgtattcttttgctgatctgtgttttcttctttttctgaaacagcgtacattcttccagcagttgccactaaagacggaggaagtacaaaccatgtttctctttatttgtaccaaaagtcaaaaatacctaaagctgccattgaaattccaagcagataattctattaagtctaaaataacattacgtacattgtat

SEQ ID NO: 14398 - DNA, 600 bp, Chicken  19866894219644_1
gtttggcagagggatggcattttgctttggaaatacccaaagatagaagctgagatttccctgcaaggctttactcgctttgtggaaaaagcagctccattctagcaacgtatcaaatttggttactgaaatctcctgcagatcagtgtgctgaaatgtccttcgtttgcccttgggagccgtggtaccttcatgatatcagaacagctttttcctataggaatagcgggtggcaggaagaaaatcagacttttatttccagagaaaaagacataaacattccaagagaagtggagttayggagtgaggctgggatagtttgcagcttaaatctgcaggactcttctacctttgccacgaaggaagtgagagaaggcactgccccamgtcctctgcctccatcagtttaatcagcacacctcaaatgcaggagcctgctggaagaactggcatataarcgtgaattagaaggaaatcttayccaagttgctgggaaagctctagaaagcccatcccagagctgcacactgaacttctggggaggaaagtaattacgagcactgagtgcatgaaataatcctcagcaccagtgtcagacaa

SEQ ID NO: 14399 - DNA, 600 bp, Chicken  19866894219644_2
aaagcagctccattctagcaacgtatcaaatttggttactgaaatctcctgcagatcagtgtgctgaaatgtccttcgtttgcccttgggagccgtggtaccttcatgatatcagaacagctttttcctataggaatagcgggtggcaggaagaaaatcagacttttatttccagagaaaaagacataaacattccaagagaagtggagttayggagtgaggctgggatagtttgcagcttaaatctgcaggactcttctacctttgccacgaaggaagtgagagaaggcactgccccamgtcctctgcctccatcagtttaatcagcacacctcaaatgcaggagcctgctggaagaactggcatataarcgtgaattagaaggaaatcttayccaagttgctgggaaagctctagaaagcccatcccagagctgcacactgaacttctggggaggaaagtaattacgagcactgagtgcatgaaataatcctcagcaccagtgtcagacaaacctgtccttgcagctttccatgctgttactgattaatccttttatcagccctgtgccatcctcagagttacccccagctctgacca

SEQ ID NO: 14400 - DNA, 600 bp, Chicken  19866894219644_3
tccttcgtttgcccttgggagccgtggtaccttcatgatatcagaacagctttttcctataggaatagcgggtggcaggaagaaaatcagacttttatttccagagaaaaagacataaacattccaagagaagtggagttayggagtgaggctgggatagtttgcagcttaaatctgcaggactcttctacctttgccacgaaggaagtgagagaaggcactgccccamgtcctctgcctccatcagtttaatcagcacacctcaaatgcaggagcctgctggaagaactggcatataarcgtgaattagaaggaaatcttayccaagttgctgggaaagctctagaaagcccatcccagagctgcacactgaacttctggggaggaaagtaattacgagcactgagtgcatgaaataatcctcagcaccagtgtcagacaaacctgtccttgcagctttccatgctgttactgattaatccttttatcagccctgtgccatcctcagagttacccccagctctgaccatcagtaaccacttccttggaagctcccatggactgttaagctgctgatggcccactggctggtgtctatta

SEQ ID NO: 14401 - DNA, 600 bp, Chicken  19866894219644_4
gtggtaccttcatgatatcagaacagctttttcctataggaatagcgggtggcaggaagaaaatcagacttttatttccagagaaaaagacataaacattccaagagaagtggagttayggagtgaggctgggatagtttgcagcttaaatctgcaggactcttctacctttgccacgaaggaagtgagagaaggcactgccccamgtcctctgcctccatcagtttaatcagcacacctcaaatgcaggagcctgctggaagaactggcatataarcgtgaattagaaggaaatcttayccaagttgctgggaaagctctagaaagcccatcccagagctgcacactgaacttctggggaggaaagtaattacgagcactgagtgcatgaaataatcctcagcaccagtgtcagacaaacctgtccttgcagctttccatgctgttactgattaatccttttatcagccctgtgccatcctcagagttacccccagctctgaccatcagtaaccacttccttggaagctcccatggactgttaagctgctgatggcccactggctggtgtctattaagagggacaccttgaactacagg

SEQ ID NO: 14402 - DNA, 600 bp, Chicken  19866894219646_1
ccacatccagcctggccttgaatgccacaaaatctcagcataacctggaatcacagattcgtagaataccttgggttggaagggacctcaaagatcatccagtgccaaatccctgccccttacctttgggcactttttggtgctgccatagagcatctccggcaaatggtgtttgcatctcgctgcctatggatgtcttccaagctggtggctgtttcttgggcaatccagaaaatatccctccgtgtgttcccatatagactgcctgcagctgctctgctgagcaaggagatgggaagygtgagaaaacctgagctctggactcatgtttcacagagctgggagtgagagggccacgagagggtggggaaaagccacccattcctttagatatttaggaaaaaggggatggaaggagggatgctttayagcctggactgggaggtactgaatgccccagctccaggagcacagttgtaataggggcacaaagttaaaggaagggatttgagggatttaacctgctcctgctttatttaaatcatgggcagcctggaaagatactttattttattaagaaaggtatgaatggggagaaag

SEQ ID NO: 14403 - DNA, 600 bp, Chicken  19866894219646_2
gcactttttggtgctgccatagagcatctccggcaaatggtgtttgcatctcgctgcctatggatgtcttccaagctggtggctgtttcttgggcaatccagaaaatatccctccgtgtgttcccatatagactgcctgcagctgctctgctgagcaaggagatgggaagygtgagaaaacctgagctctggactcatgtttcacagagctgggagtgagagggccacgagagggtggggaaaagccacccattcctttagatatttaggaaaaaggggatggaaggagggatgctttayagcctggactgggaggtactgaatgccccagctccaggagcacagttgtaataggggcacaaagttaaaggaagggatttgagggatttaacctgctcctgctttatttaaatcatgggcagcctggaaagatactttattttattaagaaaggtatgaatggggagaaagcactactcacttttcacagaagggacacagtggatagagaagagcacatctggtggggggaaccatgaaacgcccacccatcagcccggctacctttgcagcatggcaacactctgtttcttgctcaga

SEQ ID NO: 14404 - DNA, 600 bp, Chicken  19866894219647_1
tgttcctctgaataattatttaattaaaggcatcattactgacccagatagtcatgatgtgatctgtataaaatacactttccctcttacaagtgtctgtttccagagatgaagttgtttttccacaaagaaataaagaacaaataaaacatttggtcaagacataagatagcagcatcttcactattaaagtaataataacattaatagtcattcatctgtttaatatctgctcagaaggacctttagaatgaaagcagcttattggaataacaaagacaggtgtttggaacagaggaraacagaacaatgaaatgctgttcatgagaaaagcgcattgatttgcaggatggccaacatactggctaaaactctgaaaagttaccactagattgaaagaaaattacaattgctgaaagaaaaagcacacaaacaaaaagccttccaaattaaaattccacagttcagcacaatgaaaacatttgaaaggctttcagtaccaatggccgcattatcagtgctgcaatctgtccaggaaaaagccacaggtattgcagctgcttgtatgaggtgaggtttgctgctcagcaggagtcctac

SEQ ID NO: 14405 - DNA, 600 bp, Chicken  19866894219653_1
gtgagaaaatttctacatttttgcaatcggatgaagtataattttttactgtcaagtacaagattgaattgtcgcagccaattagagcccagagctgtcacactgaatatgataagattatttcttagctcttagattcctacactctgaataacatgtaagctattctagaactatatggctaactctaactagaaacaatccaaaaagatttgaggtgatctctgccctgctgctctcatgggttaagtcatgttttatagttccttgctcaggaagtcctgttctttttattctccrtttgtgttgtaacctcaccttacaagacttatctccccacctcatctattagacttgacttaatcatttattaaattaattattcttcattctatgactggttttggaaaggtgatcagagaagaagagaggggcagctatagtaatacatttcttttcagaaaattgaaagctattactgctaacttctctcatccatcgtattcgtcaatgttaaggaagtcatctttgattatgtgatggcaatttgtcattccctgtaacatcagctgtgcaatgcttgatggcacttttacaggt

SEQ ID NO: 14406 - DNA, 600 bp, Chicken  19866894219655_1
tgaaacccaagtgaattcaaacagcgtgttggaaacaaagccaaagacacgtgctgtaggtcagccagagaacacactcaaggtgacagtggtctggagcagaacagagcagaaatcagatgcccatatttctagcatggctgtcctccacctcccccagcactgcctaattccagaaggggggaaaagaatatcagtgggacaatatttgagtaatctggagcactggaagggaatgcattggtctcttttggtcagtagttctgttcacaaagggaacattggcacctgaaagagagygcacacggagcttgaaatgatttccactttaaasagagaggggcagaactggaaacacgtctgtgatctgaggagaaatccttgaacctgttactgtcatgcaarctgcagttgtttgtagagtgtgactgatgtccagtagaatgtaaaatatcttgagctgaaaggccttggggatatcattagaaagtgtcagtgtccccctaggacagtcagatagcatgtcaggtgtcagtgtgccccatagcagagaaactttctttgcatcaaaggagatctgmtggaaatgcatttctcaag

SEQ ID NO: 14407 - DNA, 600 bp, Chicken  19866894219655_2
acaaagccaaagacacgtgctgtaggtcagccagagaacacactcaaggtgacagtggtctggagcagaacagagcagaaatcagatgcccatatttctagcatggctgtcctccacctcccccagcactgcctaattccagaaggggggaaaagaatatcagtgggacaatatttgagtaatctggagcactggaagggaatgcattggtctcttttggtcagtagttctgttcacaaagggaacattggcacctgaaagagagygcacacggagcttgaaatgatttccactttaaasagagaggggcagaactggaaacacgtctgtgatctgaggagaaatccttgaacctgttactgtcatgcaarctgcagttgtttgtagagtgtgactgatgtccagtagaatgtaaaatatcttgagctgaaaggccttggggatatcattagaaagtgtcagtgtccccctaggacagtcagatagcatgtcaggtgtcagtgtgccccatagcagagaaactttctttgcatcaaaggagatctgmtggaaatgcatttctcaagatgaacttagggygtgaaatttcctgccatccct

SEQ ID NO: 14408 - DNA, 600 bp, Chicken  19866894219655_3
agagcagaaatcagatgcccatatttctagcatggctgtcctccacctcccccagcactgcctaattccagaaggggggaaaagaatatcagtgggacaatatttgagtaatctggagcactggaagggaatgcattggtctcttttggtcagtagttctgttcacaaagggaacattggcacctgaaagagagygcacacggagcttgaaatgatttccactttaaasagagaggggcagaactggaaacacgtctgtgatctgaggagaaatccttgaacctgttactgtcatgcaarctgcagttgtttgtagagtgtgactgatgtccagtagaatgtaaaatatcttgagctgaaaggccttggggatatcattagaaagtgtcagtgtccccctaggacagtcagatagcatgtcaggtgtcagtgtgccccatagcagagaaactttctttgcatcaaaggagatctgmtggaaatgcatttctcaagatgaacttagggygtgaaatttcctgccatccctcctgcatgaggtcgtttgtttggctatctgctaygaggacagggctgctttgctaacaaaggagggttgga

SEQ ID NO: 14409 - DNA, 600 bp, Chicken  19866894219655_4
ttggcacctgaaagagagygcacacggagcttgaaatgatttccactttaaasagagaggggcagaactggaaacacgtctgtgatctgaggagaaatccttgaacctgttactgtcatgcaarctgcagttgtttgtagagtgtgactgatgtccagtagaatgtaaaatatcttgagctgaaaggccttggggatatcattagaaagtgtcagtgtccccctaggacagtcagatagcatgtcaggtgtcagtgtgccccatagcagagaaactttctttgcatcaaaggagatctgmtggaaatgcatttctcaagatgaacttagggygtgaaatttcctgccatccctcctgcatgaggtcgtttgtttggctatctgctaygaggacagggctgctttgctaacaaaggagggttggatttaacctgattctaactagctgtgatctaacccagctctccacctatacaaaggcctttctttgcactgcaaacattgcttgaaaaacagcaggctttgccctctgcctgcgtttggagccgtgctttgtacagcagcactgtttgatggtgcctgctgcgggctgcccacacat

SEQ ID NO: 14410 - DNA, 600 bp, Chicken  19866894219655_5
gaaatgatttccactttaaasagagaggggcagaactggaaacacgtctgtgatctgaggagaaatccttgaacctgttactgtcatgcaarctgcagttgtttgtagagtgtgactgatgtccagtagaatgtaaaatatcttgagctgaaaggccttggggatatcattagaaagtgtcagtgtccccctaggacagtcagatagcatgtcaggtgtcagtgtgccccatagcagagaaactttctttgcatcaaaggagatctgmtggaaatgcatttctcaagatgaacttagggygtgaaatttcctgccatccctcctgcatgaggtcgtttgtttggctatctgctaygaggacagggctgctttgctaacaaaggagggttggatttaacctgattctaactagctgtgatctaacccagctctccacctatacaaaggcctttctttgcactgcaaacattgcttgaaaaacagcaggctttgccctctgcctgcgtttggagccgtgctttgtacagcagcactgtttgatggtgcctgctgcgggctgcccacacatcaaagcccagcatgagagagctgagtgccacc

SEQ ID NO: 14411 - DNA, 600 bp, Chicken  19866894219655_6
tgaggagaaatccttgaacctgttactgtcatgcaarctgcagttgtttgtagagtgtgactgatgtccagtagaatgtaaaatatcttgagctgaaaggccttggggatatcattagaaagtgtcagtgtccccctaggacagtcagatagcatgtcaggtgtcagtgtgccccatagcagagaaactttctttgcatcaaaggagatctgmtggaaatgcatttctcaagatgaacttagggygtgaaatttcctgccatccctcctgcatgaggtcgtttgtttggctatctgctaygaggacagggctgctttgctaacaaaggagggttggatttaacctgattctaactagctgtgatctaacccagctctccacctatacaaaggcctttctttgcactgcaaacattgcttgaaaaacagcaggctttgccctctgcctgcgtttggagccgtgctttgtacagcagcactgtttgatggtgcctgctgcgggctgcccacacatcaaagcccagcatgagagagctgagtgccaccgcagtgctgcccacacagctacctgtttgactggggattatgggatgtgctgtgt

SEQ ID NO: 14412 - DNA, 600 bp, Chicken  19866894219655_7
aacctgattctaactagctgtgatctaacccagctctccacctatacaaaggcctttctttgcactgcaaacattgcttgaaaaacagcaggctttgccctctgcctgcgtttggagccgtgctttgtacagcagcactgtttgatggtgcctgctgcgggctgcccacacatcaaagcccagcatgagagagctgagtgccaccgcagtgctgcccacacagctacctgtttgactggggattatgggatgtgctgtgttatctgctgtgctgttcggcccccaccggggctgctttawgtgcatcrcatccgtgttcaaccctggttccctgcagccccgttaggagaggggctctttatgtgcctcctcctgggggtttgggcagcgccttcrtggctttcctagcacagccacacagacagcattatcagtgttggcttgaagtatttctgtgctccgtgggtgcggtagtgtttcagaatggatattaataagtcacagctatgagaatattaaaagaggctcatgtgtctgagttagggaaagggattaatgcaaaaatgttttcgtacaaacagagctgtgatgtggaaccaa

SEQ ID NO: 14413 - DNA, 600 bp, Chicken  19866894219655_8
tctaactagctgtgatctaacccagctctccacctatacaaaggcctttctttgcactgcaaacattgcttgaaaaacagcaggctttgccctctgcctgcgtttggagccgtgctttgtacagcagcactgtttgatggtgcctgctgcgggctgcccacacatcaaagcccagcatgagagagctgagtgccaccgcagtgctgcccacacagctacctgtttgactggggattatgggatgtgctgtgttatctgctgtgctgttcggcccccaccggggctgctttawgtgcatcrcatccgtgttcaaccctggttccctgcagccccgttaggagaggggctctttatgtgcctcctcctgggggtttgggcagcgccttcrtggctttcctagcacagccacacagacagcattatcagtgttggcttgaagtatttctgtgctccgtgggtgcggtagtgtttcagaatggatattaataagtcacagctatgagaatattaaaagaggctcatgtgtctgagttagggaaagggattaatgcaaaaatgttttcgtacaaacagagctgtgatgtggaaccaaatgcaggc

SEQ ID NO: 14414 - DNA, 600 bp, Chicken  19866894219655_9
gccctctgcctgcgtttggagccgtgctttgtacagcagcactgtttgatggtgcctgctgcgggctgcccacacatcaaagcccagcatgagagagctgagtgccaccgcagtgctgcccacacagctacctgtttgactggggattatgggatgtgctgtgttatctgctgtgctgttcggcccccaccggggctgctttawgtgcatcrcatccgtgttcaaccctggttccctgcagccccgttaggagaggggctctttatgtgcctcctcctgggggtttgggcagcgccttcrtggctttcctagcacagccacacagacagcattatcagtgttggcttgaagtatttctgtgctccgtgggtgcggtagtgtttcagaatggatattaataagtcacagctatgagaatattaaaagaggctcatgtgtctgagttagggaaagggattaatgcaaaaatgttttcgtacaaacagagctgtgatgtggaaccaaatgcaggctggtgtcagattcacctatggagcctgtcagggttagcaggagcactgcactgcctgcctgtgctctgctcggggagttcagcagagt

SEQ ID NO: 14415 - DNA, 600 bp, Chicken  19866894219656_1
gacaaaggccttgtcttcaacaatgactactgttttctgtgctttagcgtatcaatgtccaaaactagcagataattataaacatagggtagcatgggagtattatctttctcattgccaatcattatgaaaaccaagatattttctgttgtatctatattaaaaaatgccaaaacatattaatttcacagttccattcttagacagctacatatatgtacattttcagttattacaatattacagaaaaaatactataaatatatatatttttaatttaaaagtggctatctctgtcayatgcacttcaggtgaaaggaatcattggcacaaaacatggtacaacagtagagtatccagttgtaagacatgagcataagaaagagtccttgtaatttgaaggtaaatttaggaaaacaattaattgtgtggttaactcttstttaaatcacagtaaattgtgtaatgtgtaatgtgtactgtaaaaaaactaagcctagcatttccctgaacaaggtcagacatacgtacacagtaaagtacatgtattaaagacttgaatttcatgttccagctcaaatggatctaatagttatttgc

SEQ ID NO: 14416 - DNA, 600 bp, Chicken  19866894219656_2
tttctgttgtatctatattaaaaaatgccaaaacatattaatttcacagttccattcttagacagctacatatatgtacattttcagttattacaatattacagaaaaaatactataaatatatatatttttaatttaaaagtggctatctctgtcayatgcacttcaggtgaaaggaatcattggcacaaaacatggtacaacagtagagtatccagttgtaagacatgagcataagaaagagtccttgtaatttgaaggtaaatttaggaaaacaattaattgtgtggttaactcttstttaaatcacagtaaattgtgtaatgtgtaatgtgtactgtaaaaaaactaagcctagcatttccctgaacaaggtcagacatacgtacacagtaaagtacatgtattaaagacttgaatttcatgttccagctcaaatggatctaatagttatttgcattttgcaccagtcctcttccttttggaattggtcttttctgaaatcagaaaatgaaggaagccctttaaataaggtataatcagaaaacactaattccaaacgcaattctaataaaaaatggggcgagattctctgttttg

SEQ ID NO: 14417 - DNA, 600 bp, Chicken  19866894219657_1
cctccaaacatagaacagaatggcctgggttgaagaggaccacaaatgatcatctcatttcaacccccctgctatgtgcagggtcgccaaccagcagcccaggctgcccagagccacatccagcctggcctcgaatgcctccagggatggggcaacctaacatggcagtgtttttggtccaaggttgcccatcatggtgccctgcagccggaggtgagctcgggtgggctggctggggcatcttcggagcctggctgtaaaatcaatgcttgggaatgtgagtaagcaatctttattttyggagctaataagcctcagccattagcatgggataatagatctccctgctcgccccgtctgacagagcccggagggtgtggggcagtgctgagatccaggccatccatttgggggcctggaaagtattctgaatttagatgcctttccttccctgtctgaaatatataggcctgcgtgcgtttacagtgctatataaattcttagcagcggtacacagagctgtatgcatgattaatggtagcaataagcaggggggaaattttgcttgaagatagaatcgagggaaaaggaagrgagcgt

SEQ ID NO: 14418 - DNA, 600 bp, Chicken  19866894219657_2
attttyggagctaataagcctcagccattagcatgggataatagatctccctgctcgccccgtctgacagagcccggagggtgtggggcagtgctgagatccaggccatccatttgggggcctggaaagtattctgaatttagatgcctttccttccctgtctgaaatatataggcctgcgtgcgtttacagtgctatataaattcttagcagcggtacacagagctgtatgcatgattaatggtagcaataagcaggggggaaattttgcttgaagatagaatcgagggaaaaggaagrgagcgtgggggtgacctgcagggggctgcgctctgtgctgccagatcccaattcagcctcacgtggcacaggcggggtgctttgagataatttgtgtaattaattgaagatgtgtgccagcactgtttactaaatggagccgcagagcaaggaggatttggcagggctaattatagcagctggaagaaagtcgacttgaaagttgcccagctcctgtgttctgctcacctggttaatgagagcggaacaggagaaggagagattgttagatgatggatttggggcagaaaatggcaaatg

SEQ ID NO: 14419 - DNA, 600 bp, Chicken  19866894219658_1
ctgaatctctgctgctgagtttacattatgacactgtactactaacagtctgtggagactgtctgattatgccataaaaaaatgtcattataatgttggatttaaaagaaaaacccttaaccctggaaaaaaacacattagaatgtcatcattaggtgggactgccacagcagaaggaggtgggcgtctgtgtaatggaccttgcataagcacagaaggacctcctggtgaggccattacgatgcgagacaacagtggctgaacaatttcagtgcaaatctacggagaccccactgagtygcagaaatgaagaagactgctgtgcagaagtacctctgctgcctacaaaaatamgaaaaaaaaaaatgcatatcatctctcattttaattttgctccagagatagcctgggaagcagccctcccgcctctcggagctcctccatgccagcaggcagtgggtgctgcagggtgacgcgcgagcaggccgcagactgggccgcagggccacagcaaagcaccctggcatggtaccggctcctgcccagactgtgttgataaacaaatgtttaccctctccccattaaactcagagctaccta

SEQ ID NO: 14420 - DNA, 600 bp, Chicken  19866894219658_2
gagactgtctgattatgccataaaaaaatgtcattataatgttggatttaaaagaaaaacccttaaccctggaaaaaaacacattagaatgtcatcattaggtgggactgccacagcagaaggaggtgggcgtctgtgtaatggaccttgcataagcacagaaggacctcctggtgaggccattacgatgcgagacaacagtggctgaacaatttcagtgcaaatctacggagaccccactgagtygcagaaatgaagaagactgctgtgcagaagtacctctgctgcctacaaaaatamgaaaaaaaaaaatgcatatcatctctcattttaattttgctccagagatagcctgggaagcagccctcccgcctctcggagctcctccatgccagcaggcagtgggtgctgcagggtgacgcgcgagcaggccgcagactgggccgcagggccacagcaaagcaccctggcatggtaccggctcctgcccagactgtgttgataaacaaatgtttaccctctccccattaaactcagagctacctataaatgttcatatatgggaaacaactcttcccagcatttggcctttgccctgtc

SEQ ID NO: 14421 - DNA, 600 bp, Chicken  19866894219689_1
tataacatcctagttgatgtgatgactgagtcaataaacactcaggcagtagtagcagttacagaagtattatatgaaataagaaatattttaaaagccaccttctttgagtatctaactaggaacattcaaagacatagtggaaatattaagtcagagattgaagcagtgactgagcacctggtgggaaagcagggccaacccaggggagctcaggtgcatgcaatgtacctgagtgaccagaaggggtggagccaggatccaccccttcccagaccccatttaagggttggcaggggragggggtgggcrtaagtgtcttttgttggagaactctgcttacctgaggccttctgtgggtaagyagctttgtttccttatttctgtgcttatggctgttgcatttgagcaagtcttcacttgctgtagcytagaatcttgttgctttgctgtcattgttgtgctttctattgcattacaaaaaaaatcacagaattgtaggggttggaagggatctctagagattgtcaagtctgctcccctgataaacagtttccctacagcaggtctcacaggtaggcatccagttaaagcttgaat

SEQ ID NO: 14422 - DNA, 600 bp, Chicken  19866894219689_2
gttgatgtgatgactgagtcaataaacactcaggcagtagtagcagttacagaagtattatatgaaataagaaatattttaaaagccaccttctttgagtatctaactaggaacattcaaagacatagtggaaatattaagtcagagattgaagcagtgactgagcacctggtgggaaagcagggccaacccaggggagctcaggtgcatgcaatgtacctgagtgaccagaaggggtggagccaggatccaccccttcccagaccccatttaagggttggcaggggragggggtgggcrtaagtgtcttttgttggagaactctgcttacctgaggccttctgtgggtaagyagctttgtttccttatttctgtgcttatggctgttgcatttgagcaagtcttcacttgctgtagcytagaatcttgttgctttgctgtcattgttgtgctttctattgcattacaaaaaaaatcacagaattgtaggggttggaagggatctctagagattgtcaagtctgctcccctgataaacagtttccctacagcaggtctcacaggtaggcatccagttaaagcttgaataacttcagagaa

SEQ ID NO: 14423 - DNA, 600 bp, Chicken  19866894219689_3
agtattatatgaaataagaaatattttaaaagccaccttctttgagtatctaactaggaacattcaaagacatagtggaaatattaagtcagagattgaagcagtgactgagcacctggtgggaaagcagggccaacccaggggagctcaggtgcatgcaatgtacctgagtgaccagaaggggtggagccaggatccaccccttcccagaccccatttaagggttggcaggggragggggtgggcrtaagtgtcttttgttggagaactctgcttacctgaggccttctgtgggtaagyagctttgtttccttatttctgtgcttatggctgttgcatttgagcaagtcttcacttgctgtagcytagaatcttgttgctttgctgtcattgttgtgctttctattgcattacaaaaaaaatcacagaattgtaggggttggaagggatctctagagattgtcaagtctgctcccctgataaacagtttccctacagcaggtctcacaggtaggcatccagttaaagcttgaataacttcagagaatgagaatctaacacttctctggccagcctgcttattatatgtaatatggaata

SEQ ID NO: 14424 - DNA, 600 bp, Chicken  19866894219689_4
aagacatagtggaaatattaagtcagagattgaagcagtgactgagcacctggtgggaaagcagggccaacccaggggagctcaggtgcatgcaatgtacctgagtgaccagaaggggtggagccaggatccaccccttcccagaccccatttaagggttggcaggggragggggtgggcrtaagtgtcttttgttggagaactctgcttacctgaggccttctgtgggtaagyagctttgtttccttatttctgtgcttatggctgttgcatttgagcaagtcttcacttgctgtagcytagaatcttgttgctttgctgtcattgttgtgctttctattgcattacaaaaaaaatcacagaattgtaggggttggaagggatctctagagattgtcaagtctgctcccctgataaacagtttccctacagcaggtctcacaggtaggcatccagttaaagcttgaataacttcagagaatgagaatctaacacttctctggccagcctgcttattatatgtaatatggaataataggtttctttttctcctgaagcttttatttctatttcatgaagtgttctcttccttttatcttc

SEQ ID NO: 14425 - DNA, 600 bp, Chicken  19866894219690_1
cagatatcgagagcatgtcactaatcacgatcaacatcagaaaacaaaacactgaaggtaacaaacactgaacagagcatgcggtgtcgggcctataccgttaactgaaaaaccttccttttgaaacttgcataataattctgaaaggaccacttcttttaacaaatcgcttagcaccatgctgctacacagcacaaagaacacttgttttagaaggcgctcatttgcagactatctgctttatgacagtgccatgagaaaaacttagcaagagaatgaagattttgttaattcaaaacrgttttgtttgataaactgccctgagattctacatgtcacagttaataaagaattagaaagactctactgggctctataaaactttgcctacagcctacgatgtctcatggcagccccagtatgaaaggcttgaataagccaaagaataaagcagtctaaatgcatccacttattcacactactaatatgatcatgggaaatagtctaaaattattaaaaaaaatagctgacttcatataagtgaaggaaatgcaagcgggcttagcactgaactgcttgatttttatccctctgttcaat

SEQ ID NO: 14426 - DNA, 600 bp, Chicken  19866894219691_1
acatttaaatcacaaccactttaagttcccaggataataaagaggttatgcgtcatttagcccaaggaacattttgatataataattttgggaaacttcctgtttctttctcatacagcgtcctgtgttaagtagagagactgtggtgtgaatgttacctggactgatttctgcatgcagtgaattgcccttaccttctttctctgtgtgccaatccacacacaaaagaatgtttcaaatcacagccaactgttgtaagtgccctccaaggaatcttttatttaagaaaataaaataatraaaaaaaatcccaagtactttcattttcatttattttcatgttaaataattgtaaagcatataagcaagtggttttctttcaattgagtctcaaaatcacgagttttcttttcattgcagaaacatcagagatcttcatcatttatttaataaaaatctaaccctttatccttggttaaaatttctacttgggatacttttgtccgacaactgcacctcaaacatacctacgtacaaattgttcataggaaatggaagaatgttttgggatgaaggatactttttgtagagtacataagg

SEQ ID NO: 14427 - DNA, 600 bp, Chicken  19866894219696_1
tctttaagcctggtggcttttctgtagcagtgctgtgaggctgtggtaacaatggagcaacttggagccccactttgaggcacctccacttcaggatcctctgcatccaccccaggtgacagcagtgggacccatgcagagctgctctgtggagatgttactgtggtggttctgctgctctcctctgctcttcggatgagatgcaggattgctttcaaaccatccactcttcttttaccaatgtaacactcagatgagcagttagcagtgccgcatctgtgacgccgctgtaattcaaayggcccctcgttagtgacagagatgtgcatgttgacaaacccaaatcctccccgcctgcccctygtccttaggggtcggtgctcacctggaggcgatggatccggggctcctggcagcgtggcgaagccctgctatgtagggaaggtccacaccgtctgcctgccgttttcctgccaatccatccagccctgccrgcggtgaacgctctgcacrgatggatgcagtgcgggtggaatcacagcgccgtgcccggctccatgcagtcacctttccccggggtgacggcggcgcggccgcttt

SEQ ID NO: 14428 - DNA, 600 bp, Chicken  19866894219696_2
ggagccccactttgaggcacctccacttcaggatcctctgcatccaccccaggtgacagcagtgggacccatgcagagctgctctgtggagatgttactgtggtggttctgctgctctcctctgctcttcggatgagatgcaggattgctttcaaaccatccactcttcttttaccaatgtaacactcagatgagcagttagcagtgccgcatctgtgacgccgctgtaattcaaayggcccctcgttagtgacagagatgtgcatgttgacaaacccaaatcctccccgcctgcccctygtccttaggggtcggtgctcacctggaggcgatggatccggggctcctggcagcgtggcgaagccctgctatgtagggaaggtccacaccgtctgcctgccgttttcctgccaatccatccagccctgccrgcggtgaacgctctgcacrgatggatgcagtgcgggtggaatcacagcgccgtgcccggctccatgcagtcacctttccccggggtgacggcggcgcggccgctttccctgacccagagagcagagctgaagctgaaagcagagcctgtgagaacagcagcctttattc

SEQ ID NO: 14429 - DNA, 600 bp, Chicken  19866894219696_3
gatgagatgcaggattgctttcaaaccatccactcttcttttaccaatgtaacactcagatgagcagttagcagtgccgcatctgtgacgccgctgtaattcaaayggcccctcgttagtgacagagatgtgcatgttgacaaacccaaatcctccccgcctgcccctygtccttaggggtcggtgctcacctggaggcgatggatccggggctcctggcagcgtggcgaagccctgctatgtagggaaggtccacaccgtctgcctgccgttttcctgccaatccatccagccctgccrgcggtgaacgctctgcacrgatggatgcagtgcgggtggaatcacagcgccgtgcccggctccatgcagtcacctttccccggggtgacggcggcgcggccgctttccctgacccagagagcagagctgaagctgaaagcagagcctgtgagaacagcagcctttattcccagagcataaatgatggaaggagtcgttcacgcgcttgtaacagattaaaaacaaataagagctcagtgctgtttgggtgatggtgcacctcgtgcagcgttctctcctcatcgccctgtgtyggtgcag

SEQ ID NO: 14430 - DNA, 600 bp, Chicken  19866894219696_4
ttcaaaccatccactcttcttttaccaatgtaacactcagatgagcagttagcagtgccgcatctgtgacgccgctgtaattcaaayggcccctcgttagtgacagagatgtgcatgttgacaaacccaaatcctccccgcctgcccctygtccttaggggtcggtgctcacctggaggcgatggatccggggctcctggcagcgtggcgaagccctgctatgtagggaaggtccacaccgtctgcctgccgttttcctgccaatccatccagccctgccrgcggtgaacgctctgcacrgatggatgcagtgcgggtggaatcacagcgccgtgcccggctccatgcagtcacctttccccggggtgacggcggcgcggccgctttccctgacccagagagcagagctgaagctgaaagcagagcctgtgagaacagcagcctttattcccagagcataaatgatggaaggagtcgttcacgcgcttgtaacagattaaaaacaaataagagctcagtgctgtttgggtgatggtgcacctcgtgcagcgttctctcctcatcgccctgtgtyggtgcaggtgaacttgcagaggtttt

SEQ ID NO: 14431 - DNA, 600 bp, Chicken  19866894219696_5
cctgccrgcggtgaacgctctgcacrgatggatgcagtgcgggtggaatcacagcgccgtgcccggctccatgcagtcacctttccccggggtgacggcggcgcggccgctttccctgacccagagagcagagctgaagctgaaagcagagcctgtgagaacagcagcctttattcccagagcataaatgatggaaggagtcgttcacgcgcttgtaacagattaaaaacaaataagagctcagtgctgtttgggtgatggtgcacctcgtgcagcgttctctcctcatcgccctgtgtyggtgcaggtgaacttgcagaggttttaataagtgctgacagagcctcagttccgtctcattaaaaaaatatcacagcagtgacaaaggtaattcttccacatcggtgctcaggaagtggtggcactgccacagcacttccctgcctggacacggagcccttcgcatccaatgctgcttgtttcaatacgccatacccgtacagtccccacacagctaacagatgtatctgtggatgttgttaaataccccatttctttctccttccccctcctcctaaccgcatttcaggttaaaatgaa

SEQ ID NO: 14432 - DNA, 600 bp, Chicken  19866894219697_1
ccgagtcagctcaaatttgtcatggaatcatttcctcattgttttcttcacaattatcaccttctgtagctcccagccagcctggaaacaacttagaaatgccggtcacacaggcaggagatgcaggaacacaggctatttctcccacatgcacctaacacagggcgtggaatgagaggacgagctcccacattcaaggatgtggtattttgcacaagatctgttggtggacagatgctgcagctctgtccaggaggagctgagccccctggcacttgggaggaaggaacgcagcacagyragcactgcagctggactccctgacccaacagtgggaggaatgcaggcaccaccactctgcagcacccagcagcagcagagcagcgagatgcaaaaggcatgagctctttgttcttttccaaattgagcgatcaggcagcaggcagcctgcctccgctccagcgctcctgtaaagggctgcttgttgcccagaagttcaccgcatcgctaaaaatgcaaactgtaagctgattagctattcatagtctttcttgattagctcaccattaatatttcaatgtcagaactggatgcacagtg

SEQ ID NO: 14433 - DNA, 600 bp, Chicken  19866894219697_2
cgagtcagctcaaatttgtcatggaatcatttcctcattgttttcttcacaattatcaccttctgtagctcccagccagcctggaaacaacttagaaatgccggtcacacaggcaggagatgcaggaacacaggctatttctcccacatgcacctaacacagggcgtggaatgagaggacgagctcccacattcaaggatgtggtattttgcacaagatctgttggtggacagatgctgcagctctgtccaggaggagctgagccccctggcacttgggaggaaggaacgcagcacagyragcactgcagctggactccctgacccaacagtgggaggaatgcaggcaccaccactctgcagcacccagcagcagcagagcagcgagatgcaaaaggcatgagctctttgttcttttccaaattgagcgatcaggcagcaggcagcctgcctccgctccagcgctcctgtaaagggctgcttgttgcccagaagttcaccgcatcgctaaaaatgcaaactgtaagctgattagctattcatagtctttcttgattagctcaccattaatatttcaatgtcagaactggatgcacagtgc

SEQ ID NO: 14434 - DNA, 600 bp, Chicken  19866894219698_1
aagaagtagtagttaataacaagactcaataaagatttgctcaccttcattgctagagctttgatttttacgagctcaactaatatgctcattttgtaagttgtaaaatcgatcttttgtaagatcaatttcagaagcacagctacatatagcaggtgtaaaaacatctctttcttaacagaatagttcatttaatagagacccagatatgtaagcatcaagttgttaaaatttagaaataggcactgcatattatggacttttcatagaaaaactgtctaacattccccacagtaaaawttcatctgttttaagaccattaaaatgagtatgttctacataagaaatttaaatacagagagcaacataagattcttagttctcaaaatgttaaacagactcactgcaaatttttctgtactatacacagagcagatttcagggttttttttttttccttcccctaaagggaaaataagacaaagatttaccactgtctttcacttggagatagtggaatacattaaatgttttaacgtgccttaataacttcatcagaaattgcttcttgcttgtattgtgttccataccagtcttccg

SEQ ID NO: 14435 - DNA, 600 bp, Chicken  19866894219706_1
ctgcttcccccgcaccctgagcaccaggcagcaggacacagcccgtccctgggcctggccaaggagtgtgcctggagcaccaggaggggccttcgcagactctggcacagcaccacctgcttgcatttccttgccccatccgccagctccttgagaaccttccaggaggagcgggtaatttcttatggccgcgcaggggctgcccccagccgaccaccccttgctctgctctaacatcggctcttaatgaattgctcgctgcagacaagcaaagccttaccaggcagcccagtcccttcygccctcacgacccaaaccagcccacgttcagcaacgaaaacacagagacgggccggccggccccttacctccaccaggtgaggcgcggggttgaagccacacatgttgcacacctgctgccggcagctcgtgcaggcgttgtagttggggggctcagcggagcccacgttgatctcagccttgcagaggggacacagcaccctggctttcggcacttcctttggcttgacgcccggctccgctttgctcgccttggcggccccgacccggccctgcgccccgccggctttggggccggct

SEQ ID NO: 14436 - DNA, 600 bp, Chicken  19866894219708_1
aaagccagatgcacagaacatccgttcggtctgacgttcaggtgagcagacaatgaactctgctcattaaaacactcatttctttttagggcagccatctgtccttaagcatagacaatactcaatgcagatgtctctaccatgcctgaatagcaaccaaatgccaggcaagggtttctaaacaaggcctggcatctacctggccagttttgacccaattctatttgattgatcctcactggcaagactttaatccatgacagagacaccagagctactcctggggctcctaacagtgarcactatgctaagcatgctgccctggcacaggaccacccaagttaacccactggtaacagagccctcagccacccacagaggtgttagggggcatcaagaggcagcacagagtatggtcacaccagtagatacagtcaggtgaagggatgagattttgyatagtaaccacatgaagttaaaagccagcaaagtaggagcaaacaggatagtggtgcgcactggaagtaggctagttttgtgtcactacacagcaatctcagggatagttcacaaaatgcagccaattatgttaaaaataaa

SEQ ID NO: 14437 - DNA, 600 bp, Chicken  19866894219708_2
aaatgccaggcaagggtttctaaacaaggcctggcatctacctggccagttttgacccaattctatttgattgatcctcactggcaagactttaatccatgacagagacaccagagctactcctggggctcctaacagtgarcactatgctaagcatgctgccctggcacaggaccacccaagttaacccactggtaacagagccctcagccacccacagaggtgttagggggcatcaagaggcagcacagagtatggtcacaccagtagatacagtcaggtgaagggatgagattttgyatagtaaccacatgaagttaaaagccagcaaagtaggagcaaacaggatagtggtgcgcactggaagtaggctagttttgtgtcactacacagcaatctcagggatagttcacaaaatgcagccaattatgttaaaaataaaagagacttcaaaaaattctaatgtggtctgcagtcctatctctggtaagcacccacatcccaaaaacacttcattttgacaaggtaacatctgtcctgacgaaagggaaaggtctcacctggattcaaccacgcagatcatctttgagatatccatcc

SEQ ID NO: 14438 - DNA, 599 bp, Chicken  19866894219709_1
  misc_feature (1)..(37): n is any nucleotide
nnnnnnnnnnnnnnnnnnnnnnnnnnnnnnnnnnnnnaccaatttgatttattggctagacagcgctgacattgaactttgtgcatgtttgaaataaagctaatggtatagagcttttaagaatttagctgcatccttttcaaacactcttttgactgatctgaaacttcaccttccctgctcataaaatatccttttgtataggaacctgtttgctactacttttaaggaggaaccacaacagcacttagatacaattcagaatttgtatgaaagtgtctcattagagatctgatttgrttatgctgactttgttggaaagactcccatggatatcagttgtgagctctgagttcttatattgaaaaggaaaaaactgcatatacctcaaatattttccctagagtccactaagtcacttatggagaagaaaatgtcagatgctaacttaagttttcttattctaactgcttccattaaggttctggagactttttccactgagctctaaagctatgttcttaattcaacttagagtaattagttgttccataaaacactgtctttggagtaggaaatgcttatttttatatatttag

SEQ ID NO: 14439 - DNA, 600 bp, Chicken  19866894219709_2
tttgtgcatgtttgaaataaagctaatggtatagagcttttaagaatttagctgcatccttttcaaacactcttttgactgatctgaaacttcaccttccctgctcataaaatatccttttgtataggaacctgtttgctactacttttaaggaggaaccacaacagcacttagatacaattcagaatttgtatgaaagtgtctcattagagatctgatttgrttatgctgactttgttggaaagactcccatggatatcagttgtgagctctgagttcttatattgaaaaggaaaaaartgcatatacctcaaatattttccctagagtccactaagtcacttatggagaagaaaatgtcagatgctaacttaagttttcttattctaactgcttccattaaggttctggagactttttccactgagctctaaagctatgttcttaattcaacttagagtaattagttgttccataaaacactgtctttggagtaggaaatgcttatttttatatatttagatataaaatttccttctatatatagtaggaaatcagcttatttttataaygatgatgagacttgtgtaaaaattaaag

SEQ ID NO: 14440 - DNA, 600 bp, Chicken  19866894219709_3
tgagttcttatattgaaaaggaaaaaactgcatatacctcaaatattttccctagagtccactaagtcacttatggagaagaaaatgtcagatgctaacttaagttttcttattctaactgcttccattaaggttctggagactttttccactgagctctaaagctatgttcttaattcaacttagagtaattagttgttccataaaacactgtctttggagtaggaaatgcttatttttatatatttagatataaaatttccttctatatatagtaggaaatcagcttatttttataaygatgatgagacttgtgtaaaaattaaagcaaacatgcagaacaacctttgttctttaaaaaaaaaaaaaaaaaacacacaaaaaaaaccgaaaaaccattttgatgactcagtttcatttctcaatgtatattttaaataatgaccattgcaggtacttcagttcaagcgaatgaaaattgttagaactaaccagtatttgtacatctttgtggttagttctgggattcgagatctttataagagttgaagccaatgtaaatattatcatatcagtgatatatatatgaaagataaattt

SEQ ID NO: 14441 - DNA, 600 bp, Chicken  19866894219709_4
tgaaattgtaagattgatcaacagagaagagaaaataagggaataatgagactggactgtaaagtaatgttagtgtgccagcaacctaagtgctatctagtttttgtaggcaaatgatcaagatatgagataaaagcctgttcatgctatgagactgtaagtctcatagaaatttattgtcattaaaaaaagcagctggaacattatgctattatatgttagcctcccatcagaggtgaggccaaaggtaggggatggccaacaactggagtcaagggtagaaacctaagtgtgcttgcmytgtaaagtttgattggctgaaggagaatcagaggttgaataggatggtgaggaaacatgggctggcttccccagacctacttgggggagggaaggaagacttgatgaagaacttctaggcaraagatgagcaaggcagagaaggactaatctagttgccagttttcagctggtgtagaggaaggagtttgaggaattagttattagtgacgtgtatatgctaaaaacgaaaaaggagtatgaaagagtggaatctcatgggtggctgtgaggaagatttgaattgtggttgttggtggg

SEQ ID NO: 14442 - DNA, 600 bp, Chicken  19866894219709_5
gaaattgtaagattgatcaacagagaagagaaaataagggaataatgagactggactgtaaagtaatgttagtgtgccagcaacctaagtgctatctagtttttgtaggcaaatgatcaagatatgagataaaagcctgttcatgctatgagactgtaagtctcatagaaatttattgtcattaaaaaaagcagctggaacattatgctattatatgttagcctcccatcagaggtgaggccaaaggtaggggatggccaacaactggagtcaagggtagaaacctaagtgtgcttgcmytgtaaagtttgattggctgaaggagaatcagaggttgaataggatggtgaggaaacatgggctggcttccccagacctacttgggggagggaaggaagacttgatgaagaacttctaggcaraagatgagcaaggcagagaaggactaatctagttgccagttttcagctggtgtagaggaaggagtttgaggaattagttattagtgacgtgtatatgctaaaaacgaaaaaggagtatgaaagagtggaatctcatgggtggctgtgaggaagatttgaattgtggttgttggtggga

SEQ ID NO: 14443 - DNA, 600 bp, Chicken  19866894219709_6
tatgagataaaagcctgttcatgctatgagactgtaagtctcatagaaatttattgtcattaaaaaaagcagctggaacattatgctattatatgttagcctcccatcagaggtgaggccaaaggtaggggatggccaacaactggagtcaagggtagaaacctaagtgtgcttgcmytgtaaagtttgattggctgaaggagaatcagaggttgaataggatggtgaggaaacatgggctggcttccccagacctacttgggggagggaaggaagacttgatgaagaacttctaggcaraagatgagcaaggcagagaaggactaatctagttgccagttttcagctggtgtagaggaaggagtttgaggaattagttattagtgacgtgtatatgctaaaaacgaaaaaggagtatgaaagagtggaatctcatgggtggctgtgaggaagatttgaattgtggttgttggtgggagctctgcagcacagagaggctggctacaatgggctggtgctaaaatggagataagggcagaagaaactgcaagttagagcagcagtatggagaccgagtaggcagagtataaaaggctaaga

SEQ ID NO: 14444 - DNA, 556 bp, Chicken  19866894219727_1
taaggagaatcaaattttgaaactccaaattcttgaagtagttacagttttgaatactgacgttaggagaaacaactataagtattttcaattcattaatgagagcttttttgcatcctagacctcattcattgagtctgtttatagcttttctaggaattggactaaaagcagctcagacatttaccataaagtagcattctggttatcctgctggtcctgatttatttaaaacacactttggattagcagaaaccatctttagattaagatgtggcaactcaaaatgaccatctgaargctattttcagcacaaatggttcatttatccaacaaattgtcatgcctggtcaagacccccttctttggaggttgcgtgtgagtatggttccttcatagaaggggaatcaccctccttgagaaaatgttctcttaatgaaacctctcgcatttcgctctgtagagctaataggactgcatatgtggcctggaatataatccagaacaataggtctctgctttctggacctttcttctttgcttggcagaagccttg

SEQ ID NO: 14445 - DNA, 600 bp, Chicken  19866894219733_1
agccccaactctcaggctgtctttgtaggggatgcaaaaaccttcctcacctaaacactggagaagggaaatgggtcaatttggttaacagcagtggaaagtgatcaaggttacacaagcattttgctgctgttgtaacagctgccttagcgtttcactggggatatcttacatgctagagatgcgggtcttctgtaagtctttttcacctttaggagagaagtagaaaaggaaataagttggcttccattcttctcacgggaagctactgcagttctgtaacttctgtcactgcttacytgctaacctattcccatcaagttttgctaaattttacactggatttgttggtgggatgtagaatctctcagcattgcttttgttgatgtgaaattggttttagcttagaaagaggcaggaagtatttccagtattcaggaagcatttggacagtactttcagaaagtgattatacttgagtgtccttttcaactcgggatcttctgtgattttacagaatgctaaagcaaatacaaaaccgttattgtgtaagtggctacaaaatgttatccccatgctggaaaagattttcctgaggtg

SEQ ID NO: 14446 - DNA, 599 bp, Chicken  19866894219739_1
  misc_feature (1)..(108): n is any nucleotide
nnnnnnnnnnnnnnnnnnnnnnnnnnnnnnnnnnnnnnnnnnnnnnnnnnnnnnnnnnnnnnnnnnnnnnnnnnnnnnnnnnnnnnnnnnnnnnnnnnnnnnnnnnnnttaactcagaggaagatgcaactgcacagaccccattcagttgaatatgaaagtaaggcagcatcttgattgcactgaaatacagtctgaacggacagattttgtgtttacacttcatccaggttatgtcatccagccaactgaaaatacacagatacttacaggtattcctgttgttgcataatttttttwaaatatgcctgaactgtaccctgctcttgtagcagctttctttcagtagacagacatttgtttgaggatatggggggattggttttgtttcccttggcacctcattttgaaatatgcaattagaatactaagattaccagcccataggatttgagccaggagagtctgttgcttttctcgaaagattttgatatccgagagtaaagctgcacttttatkatttgattcagtatccttaaaagataaatctagcatattttgaggaagcaatagctacgccaaatggtatgggtctgtcc

SEQ ID NO: 14447 - DNA, 600 bp, Chicken  19866894219739_2
acttcatccaggttatgtcatccagccaactgaaaatacacagatacttacaggtattcctgttgttgcataatttttttwaaatatgcctgaactgtaccctgctcttgtagcagctttctttcagtagacagacatttgtttgaggatatggggggattggttttgtttcccttggcacctcattttgaaatatgcaattagaatactaagattaccagcccataggatttgagccaggagagtctgttgcttttctcgaaagattttgatatccgagagtaaagctgcacttttatkatttgattcagtatccttaaaagataaatctagcatattttgaggaagcaatagctacgccaaatggtatgggtctgtccaaggtctcatggcagatcttcaagcyctgtctgcctccatgatcacctaagatttttgcatgccaacatttagctgacttgagttcttgcttggtattatatggaaattaagcttctagtttgtgtgaatgctaatgaacattcttccagttctctacacctcactgttctttgcaaatctgtatttcagctgaagctctgctgacagcatcttcctcca

SEQ ID NO: 14448 - DNA, 600 bp, Chicken  19866894219739_3
cttgtagcagctttctttcagtagacagacatttgtttgaggatatggggggattggttttgtttcccttggcacctcattttgaaatatgcaattagaatactaagattaccagcccataggatttgagccaggagagtctgttgcttttctcgaaagattttgatatccgagagtaaagctgcacttttatkatttgattcagtatccttaaaagataaatctagcatattttgaggaagcaatagctacgccaaatggtatgggtctgtccaaggtctcatggcagatcttcaagcyctgtctgcctccatgatcacctaagatttttgcatgccaacatttagctgacttgagttcttgcttggtattatatggaaattaagcttctagtttgtgtgaatgctaatgaacattcttccagttctctacacctcactgttctttgcaaatctgtatttcagctgaagctctgctgacagcatcttcctccatcctgttagcactgcactgtctcacatgcagkgtcaggaaggaactcagaagggtcrtataaaasaagtttctagcaaagaaaaattgaacactgactctctgtat

SEQ ID NO: 14449 - DNA, 600 bp, Chicken  19866894219739_4
gcatattttgaggaagcaatagctacgccaaatggtatgggtctgtccaaggtctcatggcagatcttcaagcyctgtctgcctccatgatcacctaagatttttgcatgccaacatttagctgacttgagttcttgcttggtattatatggaaattaagcttctagtttgtgtgaatgctaatgaacattcttccagttctctacacctcactgttctttgcaaatctgtatttcagctgaagctctgctgacagcatcttcctccatcctgttagcactgcactgtctcacatgcagkgtcaggaaggaactcagaagggtcrtataaaasaagtttctagcaaagaaaaattgaacactgactctctgtatwtcatctgcacattatagcagcagatgcttccatacaaaaatatcccratttggattcatccagcagcaggatgtttagctgctgagatctttgttatgggaaggtggggaatggaaagaggtcgggcccctaatacacacgttcaaattctttctctgctggtcctgtgtaggtgcatttaccatcatttttctcatttgcacacttagagcttttgttttgttc

SEQ ID NO: 14450 - DNA, 600 bp, Chicken  19866894219739_5
cgccaaatggtatgggtctgtccaaggtctcatggcagatcttcaagcyctgtctgcctccatgatcacctaagatttttgcatgccaacatttagctgacttgagttcttgcttggtattatatggaaattaagcttctagtttgtgtgaatgctaatgaacattcttccagttctctacacctcactgttctttgcaaatctgtatttcagctgaagctctgctgacagcatcttcctccatcctgttagcactgcactgtctcacatgcagkgtcaggaaggaactcagaagggtcrtataaaasaagtttctagcaaagaaaaattgaacactgactctctgtatwtcatctgcacattatagcagcagatgcttccatacaaaaatatcccratttggattcatccagcagcaggatgtttagctgctgagatctttgttatgggaaggtggggaatggaaagaggtcgggcccctaatacacacgttcaaattctttctctgctggtcctgtgtaggtgcatttaccatcatttttctcatttgcacacttagagcttttgttttgttctctgaaacagacaactaaatagcag

SEQ ID NO: 14451 - DNA, 600 bp, Chicken  19866894219739_6
ggtatgggtctgtccaaggtctcatggcagatcttcaagcyctgtctgcctccatgatcacctaagatttttgcatgccaacatttagctgacttgagttcttgcttggtattatatggaaattaagcttctagtttgtgtgaatgctaatgaacattcttccagttctctacacctcactgttctttgcaaatctgtatttcagctgaagctctgctgacagcatcttcctccatcctgttagcactgcactgtctcacatgcagkgtcaggaaggaactcagaagggtcrtataaaasaagtttctagcaaagaaaaattgaacactgactctctgtatwtcatctgcacattatagcagcagatgcttccatacaaaaatatcccratttggattcatccagcagcaggatgtttagctgctgagatctttgttatgggaaggtggggaatggaaagaggtcgggcccctaatacacacgttcaaattctttctctgctggtcctgtgtaggtgcatttaccatcatttttctcatttgcacacttagagcttttgttttgttctctgaaacagacaactaaatagcagttgttttc

SEQ ID NO: 14452 - DNA, 600 bp, Chicken  19866894219739_7
tgtctgcctccatgatcacctaagatttttgcatgccaacatttagctgacttgagttcttgcttggtattatatggaaattaagcttctagtttgtgtgaatgctaatgaacattcttccagttctctacacctcactgttctttgcaaatctgtatttcagctgaagctctgctgacagcatcttcctccatcctgttagcactgcactgtctcacatgcagkgtcaggaaggaactcagaagggtcrtataaaasaagtttctagcaaagaaaaattgaacactgactctctgtatwtcatctgcacattatagcagcagatgcttccatacaaaaatatcccratttggattcatccagcagcaggatgtttagctgctgagatctttgttatgggaaggtggggaatggaaagaggtcgggcccctaatacacacgttcaaattctttctctgctggtcctgtgtaggtgcatttaccatcatttttctcatttgcacacttagagcttttgttttgttctctgaaacagacaactaaatagcagttgttttcttccttgttgatagcctatatgagaggcatgtgttgcttgtg

SEQ ID NO: 14453 - DNA, 600 bp, Chicken  19866894219739_8
tgacttgagttcttgcttggtattatatggaaattaagcttctagtttgtgtgaatgctaatgaacattcttccagttctctacacctcactgttctttgcaaatctgtatttcagctgaagctctgctgacagcatcttcctccatcctgttagcactgcactgtctcacatgcagkgtcaggaaggaactcagaagggtcrtataaaasaagtttctagcaaagaaaaattgaacactgactctctgtatwtcatctgcacattatagcagcagatgcttccatacaaaaatatcccratttggattcatccagcagcaggatgtttagctgctgagatctttgttatgggaaggtggggaatggaaagaggtcgggcccctaatacacacgttcaaattctttctctgctggtcctgtgtaggtgcatttaccatcatttttctcatttgcacacttagagcttttgttttgttctctgaaacagacaactaaatagcagttgttttcttccttgttgatagcctatatgagaggcatgtgttgcttgtgctcttgtcccatctgagactcagaccttgggactacaaggtgtattt

SEQ ID NO: 14454 - DNA, 600 bp, Chicken  19866894219741_1
tctctcacattgttaggactattagagattagattattatggcaaggaagatttaaatctctcatttacctgaacagcatcataatacattttcttgccttcttcatctgtcttgtctgacatcagccatgccttgagcaaatattcataaaagctatccccaagccctccaatggagacatgatctaaaaggcaataaagaagttcaacagcaagtccatctgtagcacagacaataaaatacaataatagtttgtaattgtggtagagtaatgcatttaaagatgtctcattgctaastttttcaaaggagatcatggaaaagaawctagaatttatacatataacatctacttcatgtttatagtctatctcataaaaaatgtattaacccaacttgttttttatcttaaaaattatcaaaaaagtagaaaatgctgtgtaatttgagaaatactttcccctcttaccatgtaggcattgcttttgtttgtcatttatcaaatgatgtgtcatttaagacacatcataaaaaaagcccaaatgttttagttccctactactgaggcaaatttattttattatttattttacagtatt

SEQ ID NO: 14455 - DNA, 600 bp, Chicken  19866894219741_2
ttagattattatggcaaggaagatttaaatctctcatttacctgaacagcatcataatacattttcttgccttcttcatctgtcttgtctgacatcagccatgccttgagcaaatattcataaaagctatccccaagccctccaatggagacatgatctaaaaggcaataaagaagttcaacagcaagtccatctgtagcacagacaataaaatacaataatagtttgtaattgtggtagagtaatgcatttaaagatgtctcattgctaastttttcaaaggagatcatggaaaagaawctagaatttatacatataacatctacttcatgtttatagtctatctcataaaaaatgtattaacccaacttgttttttatcttaaaaattatcaaaaaagtagaaaatgctgtgtaatttgagaaatactttcccctcttaccatgtaggcattgcttttgtttgtcatttatcaaatgatgtgtcatttaagacacatcataaaaaaagcccaaatgttttagttccctactactgaggcaaatttattttattatttattttacagtatttgaaaatgtcaatctctatgcttaaaaa

SEQ ID NO: 14456 - DNA, 600 bp, Chicken  19866894219744_1
gcactaaggtatgcagtgagaacgctcaagcaagttcagggagaggcagcagtgatgcttgcagggaatggagaggggaaaatgtgccacgaattgagcagagagacctctgtttgcttgtccctgcatccttggtaccattcaagttcctgggataagctggcatccatcccaaactcctcccaaagggcattctcaggttggatgtgaagaaaattttcttctcagtggtaatgcattggaccacactgtccaggcaggaggtggagtcaccacccctcaaagtgctcaaaaaatggrgagatgctgtactgggggacatggtttagtgggcatgggtggggttggactggatgaccttggtggcttttaccagctttaatgattctatgatttacaacttaaagtataataacaaagtcaaagggtgccttttttttttttctttttaagttaacaattccttacaagtctaatggctgtcttaagccgtctagaaaacaaatagatttgttcccaaatcatcagcattcagtcaaatcagctcaaactggcaacatgctatcaagacctattcctgtccatgtcacatgcaggtga

SEQ ID NO: 14457 - DNA, 600 bp, Chicken  19866894219749_1
gaaggtaaagttttcttacacaagtacttgttcatctatgccttgttgtctttaaatagtaaatgcagtgtatcaggtgattttcagtattgcttccacagtgaagttttctgtacacttctacatatatccagatgtaaaagacagtacacaagacataacttcctgaagataaaatgtataaatgtcatcaactcttacatttcattttcctcttctttttcacttacatacaactcagactaagaacaaggtacaaaaatgtcaaagacttctgtaaaggaattctgacatcagttytgaacttgtcatttcctcatatttgaatcttgtaatcaatttatattccctcagtttataatactaaattaataactagaaaaaagtaaaataagatctatcctgtcgttatcaccattacattttcctttcatatccctaacaagatcttttcattcaggcctactgaaacagaaatcattaaaggcttcctcactcatactagactatagccagataggcgcataataggaaattaactttcttcacaagctgtatctttcattgaattttccacacacacaaaagccatgtagtgaa

SEQ ID NO: 14458 - DNA, 478 bp, Chicken  19866894219749_2
attacattttcctttcatatccctaacaagatcttttcattcaggcctactgaaacagaaatcattaaaggcttcctcactcatactagactatagccagataggcgcataataggaaattaactttcttcacaagctgtatctttcattgaattttccacacacacaaaagccatgtagtgaacaactggattaatgaaaaaatcatttcctctcttctttctgtagctgctattagatcagtggagttctggtagattggcaacaactgttggtatctcttcgcttgcaagctttttygttagttgtagctttttctgtgggatcctctctggggcatgatccacttaccagtctcatttgagtgttttcacagtctgcccacttgtgatactgtgagattggtcttgatatctccaatagcataatgtagtactgcagatttttggtcttcctgcctgaattctgggtcttttaa

SEQ ID NO: 14459 - DNA, 599 bp, Chicken  19866894219755_1
  misc_feature (1)..(165): n is any nucleotide
nnnnnnnnnnnnnnnnnnnnnnnnnnnnnnnnnnnnnnnnnnnnnnnnnnnnnnnnnnnnnnnnnnnnnnnnnnnnnnnnnnnnnnnnnnnnnnnnnnnnnnnnnnnnnnnnnnnnnnnnnnnnnnnnnnnnnnnnnnnnnnnnnnnnnnnnnnnnnnnnnnnnntcttcctgattgccttttaacagtagccttttaattgcagattcttgtgtaatgtaaagtggaaataaacaatgaattgtttcctttccagtatccagacagctagagtcataaggtgtctttgaatgcgaacarggctgaatgaatcagacccaaatatactccaccttgtggggtttggatttcattaagttcccagcaaacagagatgcaattagcaaattctttattaattgtctgtatactaggtaagacagtmaaagcctgtaaatacaggctataatgattacttaattgcagcactactcaagttkaaggcattgttaattcatagtgtcatggatctaactacagtatagcacatcactaaaycaccataattttatctgtttcttacttctagtgaataacaagtcccagatctagggtgttat

SEQ ID NO: 14460 - DNA, 599 bp, Chicken  19866894219755_2
  misc_feature (1)..(41): n is any nucleotide
nnnnnnnnnnnnnnnnnnnnnnnnnnnnnnnnnnnnnnnnntcttcctgattgccttttaacagtagccttttaattgcagattcttgtgtaatgtaaagtggaaataaacaatgaattgtttcctttccagtatccagacagctagagtcataaggtgtctttgaatgcgaacarggctgaatgaatcagacccaaatatactccaccttgtggggtttggatttcattaagttcccagcaaacagagatgcaattagcaaattctttattaattgtctgtatactaggtaagacagtmaaagcctgtaaatacaggctataatgattacttaattgcagcactactcaagttkaaggcattgttaattcatagtgtcatggatctaactacagtatagcacatcactaaaycaccataattttatctgtttcttacttctagtgaataacaagtcccagatctagggtgttatctgataattcttttaagcgtccaactgtcccttaaaaattaattgattagcatgtaaataaaatcaaactgccaaaatcactagctattaatctacacatagtaccaaagttaactcaagactg

SEQ ID NO: 14461 - DNA, 600 bp, Chicken  19866894219755_3
ttttaacagtagccttttaattgcagattcttgtgtaatgtaaagtggaaataaacaatgaattgtttcctttccagtatccagacagctagagtcataaggtgtctttgaatgcgaacarggctgaatgaatcagacccaaatatactccaccttgtggggtttggatttcattaagttcccagcaaacagagatgcaattagcaaattctttattaattgtctgtatactaggtaagacagtmaaagcctgtaaatacaggctataatgattacttaattgcagcactactcaagttkaaggcattgttaattcatagtgtcatggatctaactacagtatagcacatcactaaaycaccataattttatctgtttcttacttctagtgaataacaagtcccagatctagggtgttatctgataattcttttaagcgtccaactgtcccttaaaaattaattgattagcatgtaaataaaatcaaactgccaaaatcactagctattaatctacacatagtaccaaagttaactcaagactggaatgttgttctgggttacaacaccgataaatatgaggggaaaagctaaggttagg

SEQ ID NO: 14462 - DNA, 600 bp, Chicken  19866894219755_4
tgaattgtttcctttccagtatccagacagctagagtcataaggtgtctttgaatgcgaacarggctgaatgaatcagacccaaatatactccaccttgtggggtttggatttcattaagttcccagcaaacagagatgcaattagcaaattctttattaattgtctgtatactaggtaagacagtmaaagcctgtaaatacaggctataatgattacttaattgcagcactactcaagttkaaggcattgttaattcatagtgtcatggatctaactacagtatagcacatcactaaaycaccataattttatctgtttcttacttctagtgaataacaagtcccagatctagggtgttatctgataattcttttaagcgtccaactgtcccttaaaaattaattgattagcatgtaaataaaatcaaactgccaaaatcactagctattaatctacacatagtaccaaagttaactcaagactggaatgttgttctgggttacaacaccgataaatatgaggggaaaagctaaggttaggtgaacctcctattggtccgtttccttcccttgtggctaggaactgtacctagttaaat

SEQ ID NO: 14463 - DNA, 599 bp, Chicken  19866894219775_1
  misc_feature (1)..(27): n is any nucleotide
nnnnnnnnnnnnnnnnnnnnnnnnnnnttcattcccctgggctcctttctctccctcttttcagaagggcatcacaactgatttatattcttcccattctttgcttcccagctctccccgctaggaagatgctcttccccaggatacggatggacacttgttctcgctcacaagagatacaggagggctgcagggagctccggtaaggatgcacagaacacccagccttcctgcctgccctgctcgctcctctctctgctccggggcgctttggctgctcggtttattcgctgttgctgycgcccttcccccagccctttgggcagccttcgctcagcttcttgctgctggtggaccaccgactccraggagcagcgctcggtgaagcagagagggagcggggcgcgtttgggtatttggcgtagtcagacctgcccacctccagctgaggaggaggagggaatcagcgctctccagcaaacaggctgcaggcgaggaaaactttgagcgtgagagataaaaggggaggtccggaatctggctgcacgcacccataagtggkggggctggagccatcgaggatccttatatagcacctg

SEQ ID NO: 14464 - DNA, 600 bp, Chicken  19866894219775_2
ggcatcacaactgatttatattcttcccattctttgcttcccagctctccccgctaggaagatgctcttccccaggatacggatggacacttgttctcgctcacaagagatacaggagggctgcagggagctccggtaaggatgcacagaacacccagccttcctgcctgccctgctcgctcctctctctgctccggggcgctttggctgctcggtttattcgctgttgctgycgcccttcccccagccctttgggcagccttcgctcagcttcttgctgctggtggaccaccgactccraggagcagcgctcggtgaagcagagagggagcggggcgcgtttgggtatttggcgtagtcagacctgcccacctccagctgaggaggaggagggaatcagcgctctccagcaaacaggctgcaggcgaggaaaactttgagcgtgagagataaaaggggaggtccggaatctggctgcacgcacccataagtggkggggctggagccatcgaggatccttatatagcacctgaaccccaaatagtttttaattaacagtagctgttcgtttagtcttgcccgagtgcttttcaagattgc

SEQ ID NO: 14465 - DNA, 600 bp, Chicken  19866894219775_3
ggggcgctttggctgctcggtttattcgctgttgctgycgcccttcccccagccctttgggcagccttcgctcagcttcttgctgctggtggaccaccgactccraggagcagcgctcggtgaagcagagagggagcggggcgcgtttgggtatttggcgtagtcagacctgcccacctccagctgaggaggaggagggaatcagcgctctccagcaaacaggctgcaggcgaggaaaactttgagcgtgagagataaaaggggaggtccggaatctggctgcacgcacccataagtggkggggctggagccatcgaggatccttatatagcacctgaaccccaaatagtttttaattaacagtagctgttcgtttagtcttgcccgagtgcttttcaagattgcttctgtaggctaacgaggtaattagtctgataggtatttctggtccaggcatgtaactctgctgtcaaaggttatcgaggccaatgagcctgcccatgagaacagggctcagctgtgcttgctgctgcacaaatgcatagcaaaaacacaactgttaggctgctcagaggcaacttgcaaatcataggtgaggca

SEQ ID NO: 14466 - DNA, 599 bp, Chicken  19866894219778_1
  misc_feature (1)..(51): n is any nucleotide
nnnnnnnnnnnnnnnnnnnnnnnnnnnnnnnnnnnnnnnnnnnnnnnnnnngaaaatatagtatggattcagtattctttgagaggcataatatacataggagaagtgatcctggtgctgaagtaaaaaatggggttacttgagaccagaaatacccagaaaataattgaagataggaatcatggataaaaataaaggatcagtgtttacaatggagagtaattatcagtagaattacatagagatgcactgttccacagagacactttcagtatggaaggggggccagaatctgaaggsactgcagtttgtcaatgtagtgacgagtcagagaaacaactcacagcactgttactgggtgataaaatgacagatgaaatccagtgtactggaaagtaacacacatgaggaaaaccttaaatacgcatattgcactgtggtgagaggctgctattactcagaagagagattatggtgtgactgtggacacatctattggaacatcacagtgcttagcaatgagaagaatagcaagcaaaaagttaggaattatttggaaaggaagagagtaaagcagcaagcatcatttatttcactgt

SEQ ID NO: 14467 - DNA, 600 bp, Chicken  19866894219778_2
gtagtgacgagtcagagaaacaactcacagcactgttactgggtgataaaatgacagatgaaatccagtgtactggaaagtaacacacatgaggaaaaccttaaatacgcatattgcactgtggtgagaggctgctattactcagaagagagattatggtgtgactgtggacacatctattggaacatcacagtgcttagcaatgagaagaatagcaagcaaaaagttaggaattatttggaaaggaagagagtaaagcagcaagcatcatttatttcactgtgtaagtccttggtgagygcaagtctgtgagtgacataacgtgagcaattctggctaccccatctccaaagggatacgttagaaatcagcacaagacataaatgtttcatctaggaagagcagcaagcagctcaatgggaaataataaatgaaaacgtggagaagctaaacatgaaataattattaactatctctggccastattgatgatgatcagaactattgatgatggacagaacggaactattgatgatgaacagaactgcaatcaggaactcaggagcatcaaataacttaaaagaaacaaaataagctgat

SEQ ID NO: 14468 - DNA, 574 bp, Chicken  19866894219778_3
aacatcacagtgcttagcaatgagaagaatagcaagcaaaaagttaggaattatttggaaaggaagagagtaaagcagcaagcatcatttatttcactgtgtaagtccttggtgagygcaagtctgtgagtgacataacgtgagcaattctggctaccccatctccaaagggatacgttagaaatcagcacaagacataaatgtttcatctaggaagagcagcaagcagctcaatgggaaataataaatgaaaacgtggagaagctaaacatgaaataattattaactatctctggccastattgatgatgatcagaactattgatgatggacagaacggaactattgatgatgaacagaactgcaatcaggaactcaggagcatcaaataacttaaaagaaacaaaataagctgattttcacattacttatctttggatgacaaaagtatgtaggtcactctgaaagtaatgcctcctatttatttccatggaaactacaacagataaaaagagcgcaatagcccaataacaaattttgagcaagtaaattctcagctacaaagtgctgtttt

SEQ ID NO: 14469 - DNA, 600 bp, Chicken  19866894219779_1
tagaaagcataaggaattaaaagtggaagtttttccttaaagaaaatgaaatcatcaagaggtggtaaatctgaacatttcagggcattccttgaggaaaaaaaaagaaagaaaaaaaaagaaaaaaaaagaaaaaagaaaaagaaaaaagaaaaaaaaaagaaggaaaaaaaaagaaaaagaaaaaaagaaactaccagctgggaaaagcacagcaaaaccacctatttgccatgaatttttttaagctctgattcagtggaacagcagatgcaaaatcttgcttgtacacacatacaraatactaccaattttaggttaaagacttagctctgtattcaatcacaacctttctgcttcatgtaattttgttttcacctcatgcagtttcagattctgtgcataatgttaagatgctttatactagaaaatgtatgcaattaagaaatggctagcaacataaacaacatttacacaggaatgggagtagtcttatttcattgttcaaagtcagattcatctaccacgcagctaaatgtaatctaccgtggggcacatcattgagccattgatggagagaggccaagaaggattcagagc

SEQ ID NO: 14470 - DNA, 600 bp, Chicken  19866894219784_1
gaagctggactgaaggtgaaaatgtgcaccgtctgaattggcaaagaggtaacagagtcctttttagggtggtggtggatctcaacagttccactgctttgacagcacatttcagcctgtgaaagaagaggagttttcaaactaccccagaagggagctaaggcaggtcctgctgttacgctgacggaggtgactgtgtattctccatggaaagcagcatgcaggctgaggttgttgtgacttggttttgctcagaaatctgggcgtgcacaggtgcagcacaggacatcagccatcagygtgaggtaggagtccttctgccggaggcttgctcctaaaatcacacagagcctgagctggaagcaagaccacatgtgctgggccttgctgcctcagcacagatggaacccatgtggtgggtgggagctgtgcctcactcttctgtttccacgtgtataattccatacttcgcatagggcgtgctaatttaagtttgccatagttgcaggtcaacaataaacagtgcttaaaacaatctgtgggatgctaaagaagaaagatggagagcaaactatgtgtttaacttgtgcctgtggtagc

SEQ ID NO: 14471 - DNA, 599 bp, Chicken  19866894219788_1
  misc_feature (1)..(102): n is any nucleotide
nnnnnnnnnnnnnnnnnnnnnnnnnnnnnnnnnnnnnnnnnnnnnnnnnnnnnnnnnnnnnnnnnnnnnnnnnnnnnnnnnnnnnnnnnnnnnnnnnnnnnnccagcagctcagactgcccagtatcccatccaacccagccttgagcaccgccaagggatggggcattcatggcttctctgggcagcctgtgccaggaccttacaaccttctgagtgaaaaatttccccctgacatctaatctaaatctccactttttagtttaaaaccgctctgtcactatctacccatgtaaaaagrtgttttttaaaggcccctaccaacacaaacgattctgtgattcttgygtgaggagttgatgttagttctggagaagtggtgcagttgtctccaagactgyggttaaaggaaacaagaggcgaccatcctctcaaagatgcctcgacagattccttttgatctatgyctgtactgtttaatactgatgagtccatctcagttcatgattgtagaggtttctgaggttaagtgctgtgttcagatagtggcatggagaaagccatgacataattttacaattaytatatggagaaaacatg

SEQ ID NO: 14472 - DNA, 599 bp, Chicken  19866894219788_2
  misc_feature (1)..(55): n is any nucleotide
nnnnnnnnnnnnnnnnnnnnnnnnnnnnnnnnnnnnnnnnnnnnnnnnnnnnnnnccagcagctcagactgcccagtatcccatccaacccagccttgagcaccgccaagggatggggcattcatggcttctctgggcagcctgtgccaggaccttacaaccttctgagtgaaaaatttccccctgacatctaatctaaatctccactttttagtttaaaaccgctctgtcactatctacccatgtaaaaagrtgttttttaaaggcccctaccaacacaaacgattctgtgattcttgygtgaggagttgatgttagttctggagaagtggtgcagttgtctccaagactgyggttaaaggaaacaagaggcgaccatcctctcaaagatgcctcgacagattccttttgatctatgyctgtactgtttaatactgatgagtccatctcagttcatgattgtagaggtttctgaggttaagtgctgtgttcagatagtggcatggagaaagccatgacataattttacaattaytatatggagaaaacatgagatgagcttgttcctctgagtacagtgatccattttctctctcagt

SEQ ID NO: 14473 - DNA, 599 bp, Chicken  19866894219788_3
  misc_feature (1)..(2): n is any nucleotide
nnccagcagctcagactgcccagtatcccatccaacccagccttgagcaccgccaagggatggggcattcatggcttctctgggcagcctgtgccaggaccttacaaccttctgagtgaaaaatttccccctgacatctaatctaaatctccactttttagtttaaaaccgctctgtcactatctacccatgtaaaaagrtgttttttaaaggcccctaccaacacaaacgattctgtgattcttgygtgaggagttgatgttagttctggagaagtggtgcagttgtctccaagactgyggttaaaggaaacaagaggcgaccatcctctcaaagatgcctcgacagattccttttgatctatgyctgtactgtttaatactgatgagtccatctcagttcatgattgtagaggtttctgaggttaagtgctgtgttcagatagtggcatggagaaagccatgacataattttacaattaytatatggagaaaacatgagatgagcttgttcctctgagtacagtgatccattttctctctcagtgaagrggyacagcaggctcgcctgcatgtagcttctgggctagatatgctcgc

SEQ ID NO: 14474 - DNA, 600 bp, Chicken  19866894219788_4
attcatggcttctctgggcagcctgtgccaggaccttacaaccttctgagtgaaaaatttccccctgacatctaatctaaatctccactttttagtttaaaaccgctctgtcactatctacccatgtaaaaagrtgttttttaaaggcccctaccaacacaaacgattctgtgattcttgygtgaggagttgatgttagttctggagaagtggtgcagttgtctccaagactgyggttaaaggaaacaagaggcgaccatcctctcaaagatgcctcgacagattccttttgatctatgyctgtactgtttaatactgatgagtccatctcagttcatgattgtagaggtttctgaggttaagtgctgtgttcagatagtggcatggagaaagccatgacataattttacaattaytatatggagaaaacatgagatgagcttgttcctctgagtacagtgatccattttctctctcagtgaagrggyacagcaggctcgcctgcatgtagcttctgggctagatatgctcgcctatgacttctgacccctatgcatactttgaaagtgctgtaaattgaaggtggttaaatcacatagg

SEQ ID NO: 14475 - DNA, 600 bp, Chicken  19866894219788_5
tctacccatgtaaaaagrtgttttttaaaggcccctaccaacacaaacgattctgtgattcttgygtgaggagttgatgttagttctggagaagtggtgcagttgtctccaagactgyggttaaaggaaacaagaggcgaccatcctctcaaagatgcctcgacagattccttttgatctatgyctgtactgtttaatactgatgagtccatctcagttcatgattgtagaggtttctgaggttaagtgctgtgttcagatagtggcatggagaaagccatgacataattttacaattaytatatggagaaaacatgagatgagcttgttcctctgagtacagtgatccattttctctctcagtgaagrggyacagcaggctcgcctgcatgtagcttctgggctagatatgctcgcctatgacttctgacccctatgcatactttgaaagtgctgtaaattgaaggtggttaaatcacataggcacatcacattcataacaaaaagtctgttaagagaaagagagtagtatatgaagatgaagaggaagccctattctgtacattcactgcttctatcttctccgtttatatcctctca

SEQ ID NO: 14476 - DNA, 600 bp, Chicken  19866894219788_6
ggagttgatgttagttctggagaagtggtgcagttgtctccaagactgyggttaaaggaaacaagaggcgaccatcctctcaaagatgcctcgacagattccttttgatctatgyctgtactgtttaatactgatgagtccatctcagttcatgattgtagaggtttctgaggttaagtgctgtgttcagatagtggcatggagaaagccatgacataattttacaattaytatatggagaaaacatgagatgagcttgttcctctgagtacagtgatccattttctctctcagtgaagrggyacagcaggctcgcctgcatgtagcttctgggctagatatgctcgcctatgacttctgacccctatgcatactttgaaagtgctgtaaattgaaggtggttaaatcacataggcacatcacattcataacaaaaagtctgttaagagaaagagagtagtatatgaagatgaagaggaagccctattctgtacattcactgcttctatcttctccgtttatatcctctcaagcaactctctactatgggtccctctatctttgtttttgggaacacatatagactcaacatgtcttgct

SEQ ID NO: 14477 - DNA, 600 bp, Chicken  19866894219788_7
gttgatgttagttctggagaagtggtgcagttgtctccaagactgyggttaaaggaaacaagaggcgaccatcctctcaaagatgcctcgacagattccttttgatctatgyctgtactgtttaatactgatgagtccatctcagttcatgattgtagaggtttctgaggttaagtgctgtgttcagatagtggcatggagaaagccatgacataattttacaattaytatatggagaaaacatgagatgagcttgttcctctgagtacagtgatccattttctctctcagtgaagrggyacagcaggctcgcctgcatgtagcttctgggctagatatgctcgcctatgacttctgacccctatgcatactttgaaagtgctgtaaattgaaggtggttaaatcacataggcacatcacattcataacaaaaagtctgttaagagaaagagagtagtatatgaagatgaagaggaagccctattctgtacattcactgcttctatcttctccgtttatatcctctcaagcaactctctactatgggtccctctatctttgtttttgggaacacatatagactcaacatgtcttgcttct

SEQ ID NO: 14478 - DNA, 599 bp, Chicken  19866894219793_1
  misc_feature (1)..(25): n is any nucleotide
nnnnnnnnnnnnnnnnnnnnnnnnnatcccattgcattgaatagcatatacaggtttaagagaccccataaatacacagtggaacaggaattacattttcttcccacgttgcacaagacaaatactaaacatgtgtgcatgtgtgcacatgtgggatccaattaaccctcagaaactctccaactgtccagaataaagacagaaaaatagcctgattttcaacgtatgtggcagtgacttgaggtgataaaagatctagcagtaaacaagaatcagaacatagctaaccacagtcaaaakgcccattacaaaccactgtaatttgtatgtcagagagttaactgtcttgagtgtgatgccaagattgttgctggttttgtttagcgctgttttggttgtcttcacgcagcactgcagcccagggtgtaatccaatccataacccctgtgtagaactgcttagagtcataggaaaaccacacaaagtgcagcggaaacaagaaaatgtcaacatgttagatgactttatcatttttctgtcagtgaacttattagctagatacttattttgcactgcaacagctatgaaagtacagaaaa

SEQ ID NO: 14479 - DNA, 600 bp, Chicken  19866894219793_2
cattatgttcaaagttccatttctcattaatgaaatttttagtgctctcaatctgtgctataatgtcataccatcaaagatagagaagggtctcttatctatgacaccatcaaacagaaaacacaccacagcttactatctagattgttcacaaaattagcaggctctaaagatgtttctcataagaaaaaaactctctgtttttctctaactctgttacaccccattttcactccccacggtgtcaggagtgacttctctaatacattctcctatctcccacacctgccccaaacccartgcattaggactacagctccttccctttcggctgtttcctcaaaatcaccatgttgccttccagattcctcctgactgccatttacatcccctccatatgcccccacctgggaaggtcttcacttgtcctcatctccaacagagtcttggctaattaaagctccgaagccatgcatacagcttccagtggcagaaataaaggacttcttgaatccactcatgacagtgactacaactaccacctgctgatgggtgggggtttctaagggaaaggctgctccctaccacaggatgcctggc

SEQ ID NO: 14480 - DNA, 599 bp, Chicken  19866894219795_1
  misc_feature (1)..(9): n is any nucleotide
nnnnnnnnngcaatgttcagtgctctatttcaatcttatcctgagatgattctcacagagagatttgaaatctgtacagcgttaggatttcacacacctgcactgagcagctcaaatagctgatgccctaaagtgtcatcctcagctcaaccaatattcccagcattgcactcttggtcatttgggagcagttatctcaagaaccaacagttgccactttgaaccaacagggacatgaactcttcatatatcaaacacagccagcccttcaatagcatggcttttaattaaagtccagcrtgttagaggttgcatcacattgctcgtaatcattgaagtctcaggggaacattttgtctctttgattattacataaaacttgagttatccactggatgtgacctcgactcataggacaagagataatggccttaggttgtgccaggggaggttcaggttggatgttaggaacagtttcttcttagaaagagtggtgatgcactggcactgctacccagggagtggtggagtcaccrttcctggaggtgtttgagaaccatrgagatgtggcactgagggatgtggttgtgggcatggcg

SEQ ID NO: 14481 - DNA, 600 bp, Chicken  19866894219795_2
gaactcttcatatatcaaacacagccagcccttcaatagcatggcttttaattaaagtccagcrtgttagaggttgcatcacattgctcgtaatcattgaagtctcaggggaacattttgtctctttgattattacataaaacttgagttatccactggatgtgacctcgactcataggacaagagataatggccttaggttgtgccaggggaggttcaggttggatgttaggaacagtttcttcttagaaagagtggtgatgcactggcactgctacccagggagtggtggagtcaccrttcctggaggtgtttgagaaccatrgagatgtggcactgagggatgtggttgtgggcatggcgggggtgggttgacagttagacttggtgatctcagaggccttttccaaccttaatgattctatgagtccaaatacagagggtgtaccgcctgcagatctgaagaccctccagaagtcagaatcctttcccaatgagacttctataccaaaagagttcctgtgctcactggaaatacatatacgtgggcgggcacatctgacgtgctatctactgagccccagggcttcccttacacag

SEQ ID NO: 14482 - DNA, 600 bp, Chicken  19866894219795_3
cagcccttcaatagcatggcttttaattaaagtccagcrtgttagaggttgcatcacattgctcgtaatcattgaagtctcaggggaacattttgtctctttgattattacataaaacttgagttatccactggatgtgacctcgactcataggacaagagataatggccttaggttgtgccaggggaggttcaggttggatgttaggaacagtttcttcttagaaagagtggtgatgcactggcactgctacccagggagtggtggagtcaccrttcctggaggtgtttgagaaccatrgagatgtggcactgagggatgtggttgtgggcatggcgggggtgggttgacagttagacttggtgatctcagaggccttttccaaccttaatgattctatgagtccaaatacagagggtgtaccgcctgcagatctgaagaccctccagaagtcagaatcctttcccaatgagacttctataccaaaagagttcctgtgctcactggaaatacatatacgtgggcgggcacatctgacgtgctatctactgagccccagggcttcccttacacagctggacatcagaaacgatcgcgctg

SEQ ID NO: 14483 - DNA, 600 bp, Chicken  19866894219800_1
acagtaaacaaataacacgggaacgggcttcgagtgtctatgtacatacgtctataaaatgcatcgcatacgcacgcgtgcccacgttgttattgtgtaggttagctaaggggatttacctcctttttaatatttttgaagactgctttatgatcctgttgacccgctattagcaaaagcttagctttcaacaaaggtaattaaattataaaatcactgctgcaatcatcaaactactcataaaacaagaaatgaaaaaaaaaaaataccctgaaataaaaatcttgcaggcttctcctygtgtaatattgctccctgatgttaattacatttaaatgggagagtactattttggtatcattcatacgcctccaaaagtactttccagtttatcatacctgtcaaccccagtgcatcacaggctaatactttattaagaaaaaaatcattagggagctgctgatcccatttaagtacattgggcagaatgtaagactaattaaaaagcatatttttacattattaatttctgagtttcacacttaatgaatgtgaaatgacagggctactatttttatattcaggctctctgggctcttc

SEQ ID NO: 14484 - DNA, 600 bp, Chicken  19866894219822_1
gctccagctgctgcctggagggaagctgagagcagagcgtgctcatacatgggaccatattgtcagcactggatggggagagagattgcagaagggtggcaaaaaatatcaagatgttaaatttgaagtcaccagattgttttctgctcccttttttaactctacacaagacaacgagaatcagaagttccagtttggaaggacttgggctaaactcatctctgtgcaccactggtaaacatagaagccccctgggacgttatggggtggacatggggggacccagccctggcctggccyggctggtgctgagctgggacctggggcacatggagccattagttccattcgctagagtcaatgaatctcactccttgccacacagaaaataacgtgagctggagcaagagctctgctttagagtgctgggaaataaatacccagggtggtgcttgcatgactgccccttcgagtgtggctgtgatcagtggtgtgctgacagtggcaggtcactagtttccatcgagatttcacggttgatcggtgaatgtacagactagccacggggcaatttcttctccttatttaatcaaatggaaa

SEQ ID NO: 14485 - DNA, 600 bp, Chicken  19866894219823_1
tttagcatatagatagggtgcagattgtagggtagaatacaggaataaagtagagtttcagaaccttgggtgctaaagtagccatctgtctgtgttctcttccaccacagtccaagtgctgatacttttatggaagtgacataccttttttttttttttttaatattgagaccttgtaattcacgtggtgaaaatggcctcattctatctgtctgccactgtaactacaggcagtaacacttggataatcacttcacgttccagctttctgtattcatgcattatatatctgcagcacaycaccccaagccccagtttcagaagaacaagctgaggaagaggtgtccaaatayaactcattagcatgccagttacttttcttgcctgaaggctgctgatctcaattcaagcctctcttctaccattaataaacaatccctgaaaactgccaacatggggaatgcctcacgtaaaagaagatagcttagttctatctgggyaaatgcataacaaaatacatagttctattcaagtacaattcattcaacatataaggttactttttcctcccagcatcccagagggagyaatcaaatcata

SEQ ID NO: 14486 - DNA, 600 bp, Chicken  19866894219823_2
agtttcagaaccttgggtgctaaagtagccatctgtctgtgttctcttccaccacagtccaagtgctgatacttttatggaagtgacataccttttttttttttttttaatattgagaccttgtaattcacgtggtgaaaatggcctcattctatctgtctgccactgtaactacaggcagtaacacttggataatcacttcacgttccagctttctgtattcatgcattatatatctgcagcacaycaccccaagccccagtttcagaagaacaagctgaggaagaggtgtccaaatayaactcattagcatgccagttacttttcttgcctgaaggctgctgatctcaattcaagcctctcttctaccattaataaacaatccctgaaaactgccaacatggggaatgcctcacgtaaaagaagatagcttagttctatctgggyaaatgcataacaaaatacatagttctattcaagtacaattcattcaacatataaggttactttttcctcccagcatcccagagggagyaatcaaatcatagcagctaagagccctaaactgtcttaaacatcctcctttcttgttctcttttc

SEQ ID NO: 14487 - DNA, 600 bp, Chicken  19866894219823_3
cattctatctgtctgccactgtaactacaggcagtaacacttggataatcacttcacgttccagctttctgtattcatgcattatatatctgcagcacaycaccccaagccccagtttcagaagaacaagctgaggaagaggtgtccaaatayaactcattagcatgccagttacttttcttgcctgaaggctgctgatctcaattcaagcctctcttctaccattaataaacaatccctgaaaactgccaacatggggaatgcctcacgtaaaagaagatagcttagttctatctgggyaaatgcataacaaaatacatagttctattcaagtacaattcattcaacatataaggttactttttcctcccagcatcccagagggagyaatcaaatcatagcagctaagagccctaaactgtcttaaacatcctcctttcttgttctcttttctaaaacagtcatttcctaggaactcagtagagaagccttccttgttggaagttatcagtgacattcattacattccactgcattttgttcttatctcattaccttattcacgtgtgttataaggacctgtacagaccatgaaatgca

SEQ ID NO: 14488 - DNA, 600 bp, Chicken  19866894219823_4
tctgcagcacaycaccccaagccccagtttcagaagaacaagctgaggaagaggtgtccaaatayaactcattagcatgccagttacttttcttgcctgaaggctgctgatctcaattcaagcctctcttctaccattaataaacaatccctgaaaactgccaacatggggaatgcctcacgtaaaagaagatagcttagttctatctgggyaaatgcataacaaaatacatagttctattcaagtacaattcattcaacatataaggttactttttcctcccagcatcccagagggagyaatcaaatcatagcagctaagagccctaaactgtcttaaacatcctcctttcttgttctcttttctaaaacagtcatttcctaggaactcagtagagaagccttccttgttggaagttatcagtgacattcattacattccactgcattttgttcttatctcattaccttattcacgtgtgttataaggacctgtacagaccatgaaatgcagacttctgaattcatttaaaccaatgtagaaaagaacaaccttagtgcagtttgctgtggaagcaattgagcgtaaatctggtatcag

SEQ ID NO: 14489 - DNA, 600 bp, Chicken  19866894219825_1
aattaagctttatgctccctctgtgcagcacatatagacttaggaatagagtggtttaaacattatactggtgcgccagttgggaaatactagaaatctacttttctttctttccgcatgctctgtgcagattcaacacatgtttcaaatgcaagaactagaaaggatagtatagttctgccttactgctttgtctaaagtctaactgagtgaatgtggggtatgtcttccttaaaatgatttttctaaaatcaaggtagtggttgcatgcagatttcctaaaggggttggaacaataasagcatctccacttggcaacactttctatggtgaatgctcatgatgtatgtgacacctctgtccagttagattagtaccttttacatctccttgtgtaggacacagagcagccagttaaaatcaggagttcatagttttatcactattgaaaaatgtattataaataaagatattatttttcttctttttgaagccctgttttttaatatgctgtaacttgtggttttgtttgccagcatatctggtctgctctgaataagctattgcctaaggcagtacaacacttttcctaaagaagca

SEQ ID NO: 14490 - DNA, 600 bp, Chicken  19866894219826_1
aagtctgcactgtcacaatctcaacccttaggtaatagaaaattagaaaactacgttctgtagcttacttgagcagaactaagttacaagtcagttacataatcacttggcaattagaatcacaatagcaatgtcaatgtacttaacacatttcagtacgttacacaaatcccaaatatatttgaaaattgcagatacattataaaaacattttctaaaaatgttatttgtaatcaaatatgaataacaattcatagaatcatatcatagaaacagagaatggcctgggttgaaaaggascacaatgatcatcgagattcaacccccctgctatgtgcagggtcgccaaccaccagaccaggctgcccagagccacatccagcctggccttgaatgcctccagggatggggcatccacagcctccttgggcaacctgttccaattaagaagtacttttttgttactgactgtatgaaaaacatgcccacaaaattacattttcagttaactaggaggactacctgaaaaaatgttacctgcattaatgacaaacgcttccaatttctccccaaataatttcaactttaagacaaactcag

SEQ ID NO: 14491 - DNA, 600 bp, Chicken  19866894219832_1
cttaatgactgcgtgtttgagctcttctcagcctacaaggggggttgtacacagcctcctttccaggaatatctgctgtagttatggggcagcagagatgcttaataagtagcggtacggtttcatctgcaggatacagatgtgcaggtctctcacagaggcagtgtgcctcagagatgtgattcgggagcccaggtgtcctagcagccttctgtccttgggcaggagagactggagtttgttgaggggaatcaagatgttaaccatttgaattgctcacttgagatgccagaagcactycactgatggcagagagagcttcagcttttctttggcatttcaatcagtcaggaaatacagctgctgggaggaccactgcggaatcaaatggtgatgctgagccctggcagtgctgcggaagtctgaaattaaccttagtttcatttcagcacattatacagctattttatcttttgtacatatttttacatatgtctcatatgactggacagcatacagcctttctcttttctccctcctgccttcgactggacgttctcacgtgttttcttcaaagctgcactttttctctttgatctt

SEQ ID NO: 14492 - DNA, 554 bp, Chicken  19866894219838_1
tatgtgtgtgtatatgtaagtatgtgtatctatgtagcatgagaaattaacaaaagaaaataaaagaaaatctccaaaatagaaatagtctttttatactaaagttatctggaagaaaaagcaatgcgtgattgacagagcagggacacaatgagtgctgctcgcagttacattgtaggattggccctttttgctttttctcagcccgatcagagccatctttctctctcagctccgtaattggcacttatcgccaccatgtgcaagtgtctcatccattaaataaatatcagggtaacygcagaaaccacttaaacgttcacctagtcatttaactctctgtgatctgcgctttgtgagagttaccttcttaatatacacaatttacggcttaagagtgagcaacttcagaaaaagtggagggcggtttgtgcaaacccatttgtgacactgatgacaattgcactgagagagaagctatatcctaggtgaccttacagaagcagtgggggctgagtgatgtgttctgaaatttgagtaacaaaaggatgcta

SEQ ID NO: 14493 - DNA, 599 bp, Chicken  19866894219843_1
  misc_feature (1)..(15): n is any nucleotide
nnnnnnnnnnnnnnnctggctgtgatggtagtccaacagtagagggtagtccaatgattcttcaagagttcaatgatgtgatagacccatatgaaatgtttcttaaaaaaaaaaaaagagtatattgtggaagatgagagatgaacatatataagaaaatgttttcttacgctacaggccagcagttgaaccagaatgtaagttagcaccaagctctgttccatgagtaatccattagtgaaaccagcttcatcaagaaacattcccatgcagaaagggaaaggctggtgtgtgtactgyaggtgtgactgcaggtcaaggagtrctgtgcagtcagcaggcattggcatggcctcatgggagccatgggtgattgctctcagtgctttgggcttcaatgtagtgatacagagctcaggtcctgcccagtctggccaggctccttctgcacatgaatgaatttaacccctcattgttctccatctcacagaccttgctggtgtttttcttcctactaaacacgttttttattcttgttcaaattatttatcccaatacacctaaacttttgctcagtcccctgctgagttcctgaaaga

SEQ ID NO: 14494 - DNA, 600 bp, Chicken  19866894219843_2
tggtagtccaacagtagagggtagtccaatgattcttcaagagttcaatgatgtgatagacccatatgaaatgtttcttaaaaaaaaaaaaagagtatattgtggaagatgagagatgaacatatataagaaaatgttttcttacgctacaggccagcagttgaaccagaatgtaagttagcaccaagctctgttccatgagtaatccattagtgaaaccagcttcatcaagaaacattcccatgcagaaagggaaaggctggtgtgtgtactgyaggtgtgactgcaggtcaaggagtrctgtgcagtcagcaggcattggcatggcctcatgggagccatgggtgattgctctcagtgctttgggcttcaatgtagtgatacagagctcaggtcctgcccagtctggccaggctccttctgcacatgaatgaatttaacccctcattgttctccatctcacagaccttgctggtgtttttcttcctactaaacacgttttttattcttgttcaaattatttatcccaatacacctaaacttttgctcagtcccctgctgagttcctgaaagataatgaactaactgatttctgggtaa

SEQ ID NO: 14495 - DNA, 600 bp, Chicken  19866894219852_1
cagcatctcatacgttaacttacctgatgcagtgttttttggaggcaaacagtgagagctcttgagtcagagcttataaccacatcaacaggtaagcgtacaaacagtaaaggataaagctcctgagggaggtgtagcggaaatgctgagtcatggcctgaagcagtggctgagcacctggcgggaaagcagggccagcccaggggagctcaggtgcatgcaattttcctgagtgaccggaaggggaggagctgggatgcaccccttcccagacctcatttaagggttggcagtacaggyaggagcattttgctggagatccttgtgtgctggaggccttctgaaggtaagtagcttctttatttctgtgcttacagctgttgtatttgagcaaatcctcacttgttgcagcctaggtcattgccgtgctttacgttgtgttgtagaagggaatctggaatatgcttggaaagtgggcacacaagaacctaatgaggtttaactaggccaagtgcaaggcgttaagcttgggttggggcaatcccaggtataactacggtcgggaagaagaattccttgagagcagccctgtagaaaaag

SEQ ID NO: 14496 - DNA, 600 bp, Chicken  19866894219855_1
cagtgggttttggagatttttaaagtcataaagataaatccatttaagaaaatgataattttaaggaagcttgaaaatgattagaaaaaataatatagtttacaatgaacccctgacctattcaagatgatccatctgaggaagtataacacaacacctgggccaaaggatgctcttcaagctcagaaggtaaagcacgatccaatagtcaaacccagtctgggggttgccagctttttgaggagtacacagaggattggtgcaaatgaagagccagagtaaaatctgcacgaattagtrctgatttctttgctggcatctgtggcattgctaaatcagaatactatgtgcaatggtttctcctacagaagcagagctgtgactcactgtaaaacgtggcagagaaattctgtgaagtctcagaaaaggaggcatctatataaatgtcctcatctgccaaatctcatgtgttattgctgtttgcaatattttattctagtggttyaaatgcaagaagtaacaaatcccttattctttaagaygtagttctatcggtaagcccagatcaggcagaatggccttcatcacacagctgaaaga

SEQ ID NO: 14497 - DNA, 600 bp, Chicken  19866894219855_2
tagtcaaacccagtctgggggttgccagctttttgaggagtacacagaggattggtgcaaatgaagagccagagtaaaatctgcacgaattagtrctgatttctttgctggcatctgtggcattgctaaatcagaatactatgtgcaatggtttctcctacagaagcagagctgtgactcactgtaaaacgtggcagagaaattctgtgaagtctcagaaaaggaggcatctatataaatgtcctcatctgccaaatctcatgtgttattgctgtttgcaatattttattctagtggttyaaatgcaagaagtaacaaatcccttattctttaagaygtagttctatcggtaagcccagatcaggcagaatggccttcatcacacagctgaaagacggctacagaggccaaaaaattcagactaggtaaaaacactggctagtgggcaagaagcaatcattcattcagaaacatctagagctagtcagatgatctatctgtacaacaaataaagctgatgatttgttctgttttgttgaatgcatgattcatgattataagattactcatgagactcacaagagcatgatttgatctgat

SEQ ID NO: 14498 - DNA, 600 bp, Chicken  19866894219855_3
gagtacacagaggattggtgcaaatgaagagccagagtaaaatctgcacgaattagtrctgatttctttgctggcatctgtggcattgctaaatcagaatactatgtgcaatggtttctcctacagaagcagagctgtgactcactgtaaaacgtggcagagaaattctgtgaagtctcagaaaaggaggcatctatataaatgtcctcatctgccaaatctcatgtgttattgctgtttgcaatattttattctagtggttyaaatgcaagaagtaacaaatcccttattctttaagaygtagttctatcggtaagcccagatcaggcagaatggccttcatcacacagctgaaagacggctacagaggccaaaaaattcagactaggtaaaaacactggctagtgggcaagaagcaatcattcattcagaaacatctagagctagtcagatgatctatctgtacaacaaataaagctgatgatttgttctgttttgttgaatgcatgattcatgattataagattactcatgagactcacaagagcatgatttgatctgatccaaaaacaatctaaggaggaatagctgaaacattta

SEQ ID NO: 14499 - DNA, 599 bp, Chicken  19866894219856_1
  misc_feature (1)..(21): n is any nucleotide
nnnnnnnnnnnnnnnnnnnnngacaggtaaatgcatcataatggaggaaattctgattttagtttatatcagtccattatttgatatgatttggtggaaatcatttatcctggtgggttcagttcctacattacatgtttctaacaaatgcattcaatagagtaggaagtattgattctatacaaatgtttctaagacatttggagcacatggtcttaagaagtcattgtgtattttaaacagttctgtatatactcatgtgtcattgcacttctgaggctctgaaccatatcccattgraaaacttattaccaaatcttattgtactttaattaatgccaatttcctacaaaatgtacatataaattaaggtttcacattaaataagggcagaaaggactactcaataaaaaaataatacttttataacaggtgcattttccccaagatttgaaataaactaataaaacactccacaatatatcatataagcctttagatcattgaattcacattttagtgctttccagccagawatgtcattttctaaaaaaaaaaaaaaaacagtgatagtttccagaaaagggatttgattgtga

SEQ ID NO: 14500 - DNA, 600 bp, Chicken  19866894219856_2
taaacagttctgtatatactcatgtgtcattgcacttctgaggctctgaaccatatcccattgraaaacttattaccaaatcttattgtactttaattaatgccaatttcctacaaaatgtacatataaattaaggtttcacattaaataagggcagaaaggactactcaataaaaaaataatacttttataacaggtgcattttccccaagatttgaaataaactaataaaacactccacaatatatcatataagcctttagatcattgaattcacattttagtgctttccagccagawatgtcattttctaaaaaaaaaaaaaaaacagtgatagtttccagaaaagggatttgattgtgaaataacaagaataaatggaaagaaagggagagtaacttcaagaacggaagaaaagaaatttaggagaaatagaaagacacaatgttacttccagagatagaatcccagacgccaaaagaagagatgccctcagaaagagtcttttattctttgactttcattcaattactattcatatggtccagtgttaatctcttcagctccttgatggttttcagatttgttgaatctttagaa

SEQ ID NO: 14501 - DNA, 600 bp, Chicken  19866894219865_1
tgggttctgaagggaatgggaccaacggttttcatggtataagtaagtttaattgctaatgataaaccgaagcatgattgagggtacatggaagaataacagaggatatgaatagtggacaaagaaaaagggttaaagggaatgtgagtttatttgtacttgtatgagagcaacatccccccccgaccccccgcacggttccactgcgagcagaactctcagagattgtgccagagtcagagactactgttgtaaatagcattacttgcaaagggggaaagtggagaggatagggcgcgrgaagtgagaatagccttcgtctgcagagatctaagaaacccaaaattccagtgttagtactagaagtctccggaaaggaggacatgaaactgaaatgttacgttagtagtttatgtaattatgagactttggaaactgaaaagtttgagaaatatgcaagctgaggaaggcaaagatgagcaaggtgtaacagggatgtagaaccaaagagaggtgagcaatatgaagaaaaaactgattgaggtacagagatattaaggaacttaggaataacaacacctgttactgttacagtgtttc

SEQ ID NO: 14502 - DNA, 600 bp, Chicken  19866894219867_1
gtcaatgtttgttgtagtacaagtctttagttcacattttacatttaaataactatttcatgcttctacaaatgaatcctcgtttccccatttctttgcagacggcctacagtttcaaactttgctctaaaagtgagcacatctatgcagaaaaaggactctacttttgactgaaattcatatgggcctcaggtcacctgcacaaaaagcttattaaaagatcatttttgaacagcagtaataaatattaatgcactgtctggccacagcaaatacaatcactttattcatttcttcacrgaaagcttacatttattcatgcctcatcaacctaaaaatccttctagaatagttatcttttaaagcaccaaaagttttcttaccctaattaaagtgatgaaatgcttctctgaatcatttcattttgcaatacatgcctccaaccctatgaggatgccttacgaatattcttccttataagaagcaagaaaaaaaaaatagaagttataaattagattgactagtctcttggacacaaatcagcctcatctgaaactcagaaatgctactactatgttacaagataatgatttagaagtg

SEQ ID NO: 14503 - DNA, 600 bp, Chicken  19866894219872_1
agccctcatcctccaggtgaacccccggtgctcagagccatgctggggatagtgatctgtgcaggacatacattgcctcccacccccgaacagatggaaatatttctgttttccaaaattagtttccaaatgtgatggaatttcctttcagtaggaatcactgacaatctggtcctcattgtgaaactgaatggcaacttttcccaaactcccttctctggaattccttacccaaagcaaacacgcaaatttcagacacttgtgttgataggacagctctcagtattaccctgctgagasactgaggcaggggttctgagggactctcccaaggcttgccctttgctacgtggctgcttggattttcttaaaaacagttcttcagctgttaaagctaaagaaaatcatggggatggtttggacaatgcttctcacctcctccagcctgactggactgctcgggtaccctggtgcattgcactgtggttcgacacgcagacacatgcagccctgcacacatccctcctgcttagcacaacaccctctgtttgcaagrgactgtaaatccaagggttgtgcactcaaactacgctaacacaa

SEQ ID NO: 14504 - DNA, 600 bp, Chicken  19866894219872_2
cacttgtgttgataggacagctctcagtattaccctgctgagasactgaggcaggggttctgagggactctcccaaggcttgccctttgctacgtggctgcttggattttcttaaaaacagttcttcagctgttaaagctaaagaaaatcatggggatggtttggacaatgcttctcacctcctccagcctgactggactgctcgggtaccctggtgcattgcactgtggttcgacacgcagacacatgcagccctgcacacatccctcctgcttagcacaacaccctctgtttgcaagrgactgtaaatccaagggttgtgcactcaaactacgctaacacaatgacagtattttacggcaaggcaggacgtcaactatcttacttaagaatgacatattttgttttccatgtctgctgataccatctggacctctggggaagtatctggagcagcctggcaaattcccaatcacacatttgtaaagagttgttttcgaaaggccagcaaagcaactgtttgtgagggctgacttcagggtctgacttcactgtgagcagtggcttctcatcagtttggttaccagggttatgattttt

SEQ ID NO: 14505 - DNA, 600 bp, Chicken  19866894219873_1
aagcaaagcaaagccaaaccgaacccctgcgccctgggcaaaggtgcagctgcagatctcagaaggctcttttatggccccagaacagctgatctgtgcgctgaccctataaatcccactgccacctcactcctccagccaagctggctttgctctgagcaggcaaaaaaaataaaccaacaacccagaatggcaatgctgcagatacctgcacccatcccaggcgcttttgggtacagaagtgttgtaaagacactgattcaaaaagcccctctggaaggggagaggagcccagggtgytgggagcagggggagcagggatgggccakgcaccataaaccacatcagcaccccgacacacctgggctgggcggcacgggagggctgcagacatcacgatgcccttacacaagagcttctcctacagtcctaaattcctttgcttgctgtatggggtgtatgacaaaagcacacgtggagctttaatccgggagcagcacatgcatgggcacgcttctgtgcttccaagtgattgggaaaaggcagaggggggctctggggagcatttgcttcgctgctttgatcagcgttgggcagaag

SEQ ID NO: 14506 - DNA, 600 bp, Chicken  19866894219873_2
cgccctgggcaaaggtgcagctgcagatctcagaaggctcttttatggccccagaacagctgatctgtgcgctgaccctataaatcccactgccacctcactcctccagccaagctggctttgctctgagcaggcaaaaaaaataaaccaacaacccagaatggcaatgctgcagatacctgcacccatcccaggcgcttttgggtacagaagtgttgtaaagacactgattcaaaaagcccctctggaaggggagaggagcccagggtgytgggagcagggggagcagggatgggccakgcaccataaaccacatcagcaccccgacacacctgggctgggcggcacgggagggctgcagacatcacgatgcccttacacaagagcttctcctacagtcctaaattcctttgcttgctgtatggggtgtatgacaaaagcacacgtggagctttaatccgggagcagcacatgcatgggcacgcttctgtgcttccaagtgattgggaaaaggcagaggggggctctggggagcatttgcttcgctgctttgatcagcgttgggcagaagtcttcactcaaagcacaaccagagccctg

SEQ ID NO: 14507 - DNA, 599 bp, Chicken  19866894219877_1
  misc_feature (1)..(96): n is any nucleotide
nnnnnnnnnnnnnnnnnnnnnnnnnnnnnnnnnnnnnnnnnnnnnnnnnnnnnnnnnnnnnnnnnnnnnnnnnnnnnnnnnnnnnnnnnnnnnnnntttgttgttgttttctttttcctctctattgcagtggcccttgaatccacttctttgggttccaaagatttcataatgcccaacagctcatgagtgaattagaaaaccttggaaatgtctccaggatgtgctgacacgttcagcgttttttcaccttgctgatacatgagctgtggtcttcagggctgcaactctgcaagttcrtctgtcagcagatgcaacatgaatgtgyaataacatgcaggaatcctacaratgtattccaaattggtgtccttgtatcatgtattctacaacattttagatgctgtttcttctttaaaggactttaaagtaccagcagccattgtttttctgtcccttgcagtgccatcctgtcttcatatttgctgggagagcggctcaacctgctgggaaagctgggytgcatgctgagcctcgtgggcagcaccgtgatggtgatacacgccccagaggaagaggaggtcaccactctggatgaa

SEQ ID NO: 14508 - DNA, 599 bp, Chicken  19866894219877_2
  misc_feature (1)..(68): n is any nucleotide
nnnnnnnnnnnnnnnnnnnnnnnnnnnnnnnnnnnnnnnnnnnnnnnnnnnnnnnnnnnnnnnnnnnntttgttgttgttttctttttcctctctattgcagtggcccttgaatccacttctttgggttccaaagatttcataatgcccaacagctcatgagtgaattagaaaaccttggaaatgtctccaggatgtgctgacacgttcagcgttttttcaccttgctgatacatgagctgtggtcttcagggctgcaactctgcaagttcrtctgtcagcagatgcaacatgaatgtgyaataacatgcaggaatcctacaratgtattccaaattggtgtccttgtatcatgtattctacaacattttagatgctgtttcttctttaaaggactttaaagtaccagcagccattgtttttctgtcccttgcagtgccatcctgtcttcatatttgctgggagagcggctcaacctgctgggaaagctgggytgcatgctgagcctcgtgggcagcaccgtgatggtgatacacgccccagaggaagaggaggtcaccactctggatgaaatgttgtttaagctgaaagagccaggta

SEQ ID NO: 14509 - DNA, 599 bp, Chicken  19866894219877_3
  misc_feature (1)..(45): n is any nucleotide
nnnnnnnnnnnnnnnnnnnnnnnnnnnnnnnnnnnnnnnnnnnnntttgttgttgttttctttttcctctctattgcagtggcccttgaatccacttctttgggttccaaagatttcataatgcccaacagctcatgagtgaattagaaaaccttggaaatgtctccaggatgtgctgacacgttcagcgttttttcaccttgctgatacatgagctgtggtcttcagggctgcaactctgcaagttcrtctgtcagcagatgcaacatgaatgtgyaataacatgcaggaatcctacaratgtattccaaattggtgtccttgtatcatgtattctacaacattttagatgctgtttcttctttaaaggactttaaagtaccagcagccattgtttttctgtcccttgcagtgccatcctgtcttcatatttgctgggagagcggctcaacctgctgggaaagctgggytgcatgctgagcctcgtgggcagcaccgtgatggtgatacacgccccagaggaagaggaggtcaccactctggatgaaatgttgtttaagctgaaagagccaggtatgcaggaggtcgtgttttctccc

SEQ ID NO: 14510 - DNA, 600 bp, Chicken  19866894219877_4
atgtgctgacacgttcagcgttttttcaccttgctgatacatgagctgtggtcttcagggctgcaactctgcaagttcrtctgtcagcagatgcaacatgaatgtgyaataacatgcaggaatcctacaratgtattccaaattggtgtccttgtatcatgtattctacaacattttagatgctgtttcttctttaaaggactttaaagtaccagcagccattgtttttctgtcccttgcagtgccatcctgtcttcatatttgctgggagagcggctcaacctgctgggaaagctgggytgcatgctgagcctcgtgggcagcaccgtgatggtgatacacgccccagaggaagaggaggtcaccactctggatgaaatgttgtttaagctgaaagagccaggtatgcaggaggtcgtgttttctcccttggggttgggcagtagtattgctctggccctcgtgccagctcatgtttgagctcatttgtttctttccccttccaggttttcttgcttatgctgtggtccttttggctgtctgcttcctcctcatcttgtacctcgcacctcgctatggccggagcaacatcctcatcta

SEQ ID NO: 14511 - DNA, 600 bp, Chicken  19866894219877_5
aggtcgtgttttctcccttggggttgggcagtagtattgctctggccctcgtgccagctcatgtttgagctcatttgtttctttccccttccaggttttcttgcttatgctgtggtccttttggctgtctgcttcctcctcatcttgtacctcgcacctcgctatggccggagcaacatcctcatctacctcaccatctgctctgttatcggggccttctccgtgtcctcagtcaagggcctgggtattgccatcaagggcttctttgctggccagcctgtgctgcagcacccattgacrtggatcctggtcatcacgctggtggcatccatcactacacaaattaactacctcaataaggctctagacatttttaacacctctttggtgtttcccatctactatgtgctgttcaccaccatcgtcatcacaacttccatcattctctttaaagaatgggtggccatgactgtagtggacatcattgggacagtttgcggcttcctcaccatcattttgggagtgttttcactccatgccttcaaagacatggatgtcaatttagggaatctgccacaggttctccagagtgaacaggag

SEQ ID NO: 14512 - DNA, 599 bp, Chicken  19866894219879_1
  misc_feature (1)..(116): n is any nucleotide
nnnnnnnnnnnnnnnnnnnnnnnnnnnnnnnnnnnnnnnnnnnnnnnnnnnnnnnnnnnnnnnnnnnnnnnnnnnnnnnnnnnnnnnnnnnnnnnnnnnnnnnnnnnnnnnnnnnntctaccttccttactttgcatcactgcagtatctttccttaactattaaggcaagcaatgatgttccatccattgcttcttttcttaaaacttcagcaggatgaccaccctttcattccaacaacttcagacatctttgaagacctacatctcttatcagtccctttatctagattaaaagaastcttctgctcagtgtttcctaataggttacttttcccttatttctctccctctagttctgcctcagggccacttattcatttggtgtgccccaaattgcacactgcttctgttgaagcttcactaacgctgaatgcaagtgattattttacatgcctggcatatagtcttcccttacatacaatcccagcagggtatatggttttgccagccatgtaaggtgattggttcacgttgaggttatgagccatgcattttcttcacaccttttctgcaggacagctactttttaaaaacgtt

SEQ ID NO: 14513 - DNA, 600 bp, Chicken  19866894219884_1
ccaattaaccactatgctgactgaaattgctttgttattcattttattccaactgatgttaatactttggcagctgatgaggataataactgatggggcatattggaaattttgaaaggagatataaaatttatgtaatttaaagatgtggagaaagctgctatgctttacagtcttaaaatatggaaatgcctcagttatatacaaaaagtattcagagtacgagaacaaggaggtatttggaaacttgtgaatgaaaagaagatataaaataagaagcttgtgatatacaaacatgtwaaaaaaaacattaagagaaagatgtcttaaaaaagcaataaaaacacaatgatgagactttttcacttctacctctaatactatgttgtgcaacaatgcttgaacatctggaaacatttacatttggtgtcttaatcaaaacataacccttttctgcaacatgataagcatattctaactgggaaatgacatttcatttacactcatccttaaaatatttgttttattataattacaggcagaaatagcaattccagtctatgaaaaaaaaaataaaaaggctataaaaacatattttcc

SEQ ID NO: 14514 - DNA, 600 bp, Chicken  19866894219888_1
tggttgttgtcttccatatttcagtcttcatttttatatatcttaattgtaaattaggaaaggatcaccgagcacataattatggcacacgttcagtgctctacgcacataaatgttcatatgattggctctcttcaggtaatgtttgatgcaaactacaggtatttattggtttttgccttccagatgttcccctgcacacaaggagttctgtaggtattgtcaccccatgttggattacctcttaaacttcgtgaaaagaatgtgtgcttcatccattaaatgagtgttcaacacatscattttcctctgtgcagcacacatggcagctacaagtacakgcagtaggaaacaaaacttccagactttaggtcattttgaggaatttttgactgatgtttcctagtcttctcttctactggcttggttactctttgtaaacccagctaagactcagaacatttatccttgtttaattgctgcggactgacataacaaagaagggctctccttcttcctagccatgggctctttgttaagtaggtgctttgtttagaccagttatgctttacatcagttgagctctcctgtagcatattg

SEQ ID NO: 14515 - DNA, 600 bp, Chicken  19866894219888_2
cttaattgtaaattaggaaaggatcaccgagcacataattatggcacacgttcagtgctctacgcacataaatgttcatatgattggctctcttcaggtaatgtttgatgcaaactacaggtatttattggtttttgccttccagatgttcccctgcacacaaggagttctgtaggtattgtcaccccatgttggattacctcttaaacttcgtgaaaagaatgtgtgcttcatccattaaatgagtgttcaacacatscattttcctctgtgcagcacacatggcagctacaagtacakgcagtaggaaacaaaacttccagactttaggtcattttgaggaatttttgactgatgtttcctagtcttctcttctactggcttggttactctttgtaaacccagctaagactcagaacatttatccttgtttaattgctgcggactgacataacaaagaagggctctccttcttcctagccatgggctctttgttaagtaggtgctttgtttagaccagttatgctttacatcagttgagctctcctgtagcatattgaaggacactccacaccattaaatgttagccaaacgctggaa

SEQ ID NO: 14516 - DNA, 600 bp, Chicken  19866894219902_1
gcatggttaaatttgagaccaggattcttcttgatgagtgtaacagtgcagcagctcagacggagtaccagctaacagcagcactgctcctgcagggtgagcaaacggccacagaacctgccctgccttcagccttctctggtgagggagcagcctgactaggaaaggtaatcagtacttttctgctgtgtcagtggtagcttaattgggggctgagggggctgtgtatttggtatctcttcagcactgcagcctcccaccttctgcacaggagctcttcctcccaaacatttgttgtcrtgaagctctgggtctgctgctgagctgcaggagcagatgaatgcccatcgatggagcttggtaccctggggcagggacagaaatagcccctaggagggagagcrkctgctgctgaacgggagtgggaagaggagcagctatgacataaaaatggattggtgtctcttttcttagtaggtgtcttgcaaaggttttgtgaatgacgtggaggatgaattaaatgttctcatttgtgtttgaaggaggaatcttgttagaagaaaatacagaaatcacagtgtgctgctctggaccacactc

SEQ ID NO: 14517 - DNA, 539 bp, Chicken  19866894219902_2
acggccacagaacctgccctgccttcagccttctctggtgagggagcagcctgactaggaaaggtaatcagtacttttctgctgtgtcagtggtagcttaattgggggctgagggggctgtgtatttggtatctcttcagcactgcagcctcccaccttctgcacaggagctcttcctcccaaacatttgttgtcrtgaagctctgggtctgctgctgagctgcaggagcagatgaatgcccatcgatggagcttggtaccctggggcagggacagaaatagcccctaggagggagagcrkctgctgctgaacgggagtgggaagaggagcagctatgacataaaaatggattggtgtctcttttcttagtaggtgtcttgcaaaggttttgtgaatgacgtggaggatgaattaaatgttctcatttgtgtttgaaggaggaatcttgttagaagaaaatacagaaatcacagtgtgctgctctggaccacactccttgggcactgggtattttcaaagataagcagcaactcaactc

SEQ ID NO: 14518 - DNA, 538 bp, Chicken  19866894219902_3
cggccacagaacctgccctgccttcagccttctctggtgagggagcagcctgactaggaaaggtaatcagtacttttctgctgtgtcagtggtagcttaattgggggctgagggggctgtgtatttggtatctcttcagcactgcagcctcccaccttctgcacaggagctcttcctcccaaacatttgttgtcrtgaagctctgggtctgctgctgagctgcaggagcagatgaatgcccatcgatggagcttggtaccctggggcagggacagaaatagcccctaggagggagagcrkctgctgctgaacgggagtgggaagaggagcagctatgacataaaaatggattggtgtctcttttcttagtaggtgtcttgcaaaggttttgtgaatgacgtggaggatgaattaaatgttctcatttgtgtttgaaggaggaatcttgttagaagaaaatacagaaatcacagtgtgctgctctggaccacactccttgggcactgggtattttcaaagataagcagcaactcaactc

SEQ ID NO: 14519 - DNA, 600 bp, Chicken  19866894219912_1
tcctactgattttttctattgtttagttgctgctaaggaaaataatcccttgacattgcatggatcagacaattccaagttcaaaagagtcaagctcaaaagccttccaaaggcattaatttgtcctctattgattcaggggcacaccagcatttcattttctctagctaccctggtaatgtggaactgaccaaagggttaaacttaactgagtttgtttcagtagattctaatttttaaattaatttatgaattaaaacattgactttgtttgaaatcttttatcttaccattgtgacrgaagacatattttgtcatagatgttctcatcaggattataaatcttttcttcccttttgtttaaatccaccaaatttctgctcagtcccagcagtggagataaaaaagtgggatttgtactgccagcaagcagattgatccatacaggagaggcaattatgcagtttattcagaagttatttcatactagagtgtcctgatgggatgcacagttgatggtacctgcacttaggactccaaagcctcgtctgctgttttgaggagttctcagttaacatcttatagaatcaatattaaaat

SEQ ID NO: 14520 - DNA, 600 bp, Chicken  19866894219915_1
aaaccctgcatgaatttctgtctccattctggataagtttttgagttcaaatctgattttctagactggtgcacaaatcatgagattttgttcagaagtagtaacagcaaaaacattttttttcttcctttagacactgggacacttatcactcctaaagaggacgactctttgctgttggttttcatagagagtatttctaatatgtactccagaatcagacacgtaagttcccttctttagcaaatttttcttctaagattctcccccctctttcctacacatcaaagatatgacagyggtgctttacatttttaccaaatgcacatgcattatgagctcagtgtcgtcaactgcagtcagtttccttgctgctaagatttacatcttagtcatccttggaccacacagagcacagaaattaaaaccccagtgcttacttatttacagccagagaaatcactagcacaaatatactgagtcaaccgtgtgactgaagtcacttcctttttactgcacttcggtaaagtacaaataccagtaatccacaaattaatcattaacttttcaaacaaagatatgtggataacttaacattaa

SEQ ID NO: 14521 - DNA, 600 bp, Chicken  19866894219921_1
cgatgggacgctccggcctctgagctgagcctgcctcctccggagcgcgcctaaagaatgcagtgtttgtttctgagtcagcagggaagggagccgtgtggtgccagaaagcttggatgaggaaaatgagctgttgtggagatgtggggagcaccggggcctgcagggcaggagcagggccagggcacgggcatagctccagcaccccagggcctgcagcagggagccgtggtatggactcataggaccattcaggctgaaaaagaccactaggatccccaagtccaaccccagcccacycccaccatacccactgctcaatccctcagtgccgcatctccatggttctggaacacctycagggacagtgaccccaccactccttgggcagctgtaccactgcgtcactatcccttctgaggagagaattttcctaatatccagcctgaacctcgtctggcacaactgtcatcttatagcgtgcaggccagtggaacttctccttctcctcaaccaccacgccttaaggcaaactgcctgagaagacaggacaacatcagcctccaatgctaccggcatcgtccattcctgtctaggagc

SEQ ID NO: 14522 - DNA, 600 bp, Chicken  19866894219921_2
gcagtgtttgtttctgagtcagcagggaagggagccgtgtggtgccagaaagcttggatgaggaaaatgagctgttgtggagatgtggggagcaccggggcctgcagggcaggagcagggccagggcacgggcatagctccagcaccccagggcctgcagcagggagccgtggtatggactcataggaccattcaggctgaaaaagaccactaggatccccaagtccaaccccagcccacycccaccatacccactgctcaatccctcagtgccgcatctccatggttctggaacacctycagggacagtgaccccaccactccttgggcagctgtaccactgcgtcactatcccttctgaggagagaattttcctaatatccagcctgaacctcgtctggcacaactgtcatcttatagcgtgcaggccagtggaacttctccttctcctcaaccaccacgccttaaggcaaactgcctgagaagacaggacaacatcagcctccaatgctaccggcatcgtccattcctgtctaggagcagccaagaccccctcagcctatccctagtggaggaaaccacttgaagaagcatagagct

SEQ ID NO: 14523 - DNA, 599 bp, Chicken  19866894219923_1
  misc_feature (1)..(20): n is any nucleotide
nnnnnnnnnnnnnnnnnnnnattcgttttgaacggtaggccccaaacctaaaaactccccccaaaccaaccccattgtttgtttcttgtttagtattatgtatttttaaaatagcatgctaaccaattgctgagctggtttctttttgtccctccttgactgtatttttttgaactccagaaggttcctacattttcctcagtacagactgtgttttaacacataggggaactcagggctgctcaccacttcctgtcttgctcactccacccttcccagcgttctctgtggtaattttamkacttgtttatttcagtagataacgctgggatttcctgatgtgatttctggagagagatgcagagtggtccacttgcaggaagctgaaatgaaagaattcacactaaaaaataagggttaagcctgggcagtttgttgttggagcaacttattttttggcacgggcaggttttctatcactcagtgcaaaccatgaccagacaccactgtaatggacagagttgaggaaatagctgatgggcttgatgcagaaagtgctagccatgtatttggtcttgcttgaaagagaagaaatgcag

SEQ ID NO: 14524 - DNA, 599 bp, Chicken  19866894219923_2
  misc_feature (1)..(19): n is any nucleotide
nnnnnnnnnnnnnnnnnnnattcgttttgaacggtaggccccaaacctaaaaactccccccaaaccaaccccattgtttgtttcttgtttagtattatgtatttttaaaatagcatgctaaccaattgctgagctggtttctttttgtccctccttgactgtatttttttgaactccagaaggttcctacattttcctcagtacagactgtgttttaacacataggggaactcagggctgctcaccacttcctgtcttgctcactccacccttcccagcgttctctgtggtaattttamkacttgtttatttcagtagataacgctgggatttcctgatgtgatttctggagagagatgcagagtggtccacttgcaggaagctgaaatgaaagaattcacactaaaaaataagggttaagcctgggcagtttgttgttggagcaacttattttttggcacgggcaggttttctatcactcagtgcaaaccatgaccagacaccactgtaatggacagagttgaggaaatagctgatgggcttgatgcagaaagtgctagccatgtatttggtcttgcttgaaagagaagaaatgcagt

SEQ ID NO: 14525 - DNA, 600 bp, Chicken  19866894219925_1
ggcatgacaatgagtccaaacgaaagcactggaaacatgcacagtatgcacatcaaaatctaagcaccagctgctccactcatcacattcacagaaccacacagaatcacagcatgactgaggtgggaagggacctgtggaggtcattcgatccaagcccctgcttagtcaggtagccccagaccatgttcaggcagtttttgactatcttctcctatgctgtattatgtgctagttaaggcctactacaagacccaggaaatccttcccacacaagtcaagtaaggccagaacaacacygttttgcttgcactttgggaaaaggtcaggcagctatcatcatgtttaagccctgggcactgccaccaccttccttccgcatctgctgggaaagaaaacctctcattttgccaatagattgcacagatgttcacgaagggtcaacagctcctccggaggaagaaaaagcaatcaagatagcacttcagtggttacaaaaccttctccccttgtcctccatctttcactcattctctcaatgatcagcagcccaatcttttcccaaatctgatttttcaacatctcattttgcagtttcag

SEQ ID NO: 14526 - DNA, 600 bp, Chicken  19866894219937_1
tcccatgtctgcaaaggatccttacaccacgtaagtcttaacccagaaggcacagagccaacacatacctctctgtgagcctccaggtgactgtcatgtatcccctgcacttcacctgcagcatgccatggctgtgtttctgcccccccagcaggtgcccacaaagcctcagctggcccagggcaggaaaggtgaatcccctgggctcttcgtcttgaggctctcatagcaccttggttttcagtaattgatacaaagaaaacagacagctctgaggtgaatctgtgccagtatttttcmgaaaagcatttcaatgaacaaactaactgaactccattataacctgcacaatgctggggcagatgggaagcttctgcagtttgcagctgaacttccaggacaatgaactaaaaccgagcctcactcactgctttttatcctcatgtaattaatgcttctgcactggctgccctcagttgctattatttacatggtgcttcactttctgtagccagtacattgagtttcacctgtagattagaaagcaaagggaagttccttacacaatcctgctgtcttttcagcagaaaaggtttcaaa

SEQ ID NO: 14527 - DNA, 600 bp, Chicken  19866894219938_1
ccgttttattgctgccaataacagcttgactgagagacattaaactgtattttggtaggtttgtactatggacacttctttatagctgtttcctctctgtttcacaaatctgcattggaaaggggaggattaaaacaccccagtttagctacctacctgtaagtgtctacactctcttggtaagtgatggagatctagatagacagtcaagagaacagttcaccctgaataaaatgatgatttttttttcaccactgaagtactgaaaagatcttcattgtaactggagttcaggtatcycacaaataatcatctgygtttatgcatcttcctcygtgaactgaatcccttttgctcgatgctattgtgaaacaaacaaacaaaaatcttggcagaaatattttagtctgacaaatgtgcactacttctggattagaaattggctgtactttcttggagcatagccaggagagccatattcacagtctctgaggttagaagacaggccttactactgatatcagtagagacaatatttcagagctttggggctccctggtctgcagctgagagactctcacatctatccttggcttgtct

SEQ ID NO: 14528 - DNA, 600 bp, Chicken  19866894219938_2
ataacagcttgactgagagacattaaactgtattttggtaggtttgtactatggacacttctttatagctgtttcctctctgtttcacaaatctgcattggaaaggggaggattaaaacaccccagtttagctacctacctgtaagtgtctacactctcttggtaagtgatggagatctagatagacagtcaagagaacagttcaccctgaataaaatgatgatttttttttcaccactgaagtactgaaaagatcttcattgtaactggagttcaggtatcycacaaataatcatctgygtttatgcatcttcctcygtgaactgaatcccttttgctcgatgctattgtgaaacaaacaaacaaaaatcttggcagaaatattttagtctgacaaatgtgcactacttctggattagaaattggctgtactttcttggagcatagccaggagagccatattcacagtctctgaggttagaagacaggccttactactgatatcagtagagacaatatttcagagctttggggctccctggtctgcagctgagagactctcacatctatccttggcttgtctgtcatagaagcggagat

SEQ ID NO: 14529 - DNA, 600 bp, Chicken  19866894219938_3
gacattaaactgtattttggtaggtttgtactatggacacttctttatagctgtttcctctctgtttcacaaatctgcattggaaaggggaggattaaaacaccccagtttagctacctacctgtaagtgtctacactctcttggtaagtgatggagatctagatagacagtcaagagaacagttcaccctgaataaaatgatgatttttttttcaccactgaagtactgaaaagatcttcattgtaactggagttcaggtatcycacaaataatcatctgygtttatgcatcttcctcygtgaactgaatcccttttgctcgatgctattgtgaaacaaacaaacaaaaatcttggcagaaatattttagtctgacaaatgtgcactacttctggattagaaattggctgtactttcttggagcatagccaggagagccatattcacagtctctgaggttagaagacaggccttactactgatatcagtagagacaatatttcagagctttggggctccctggtctgcagctgagagactctcacatctatccttggcttgtctgtcatagaagcggagatactctatacccaaataca

SEQ ID NO: 14530 - DNA, 600 bp, Chicken  19866894219945_1
tgtgctccacagcaagcctgattcaaggcagagtaatcacccagaagcagtgggacagagggcagcaccgctgatgtcttccctttgtctgcagctgcagacacctcacttttccccacaccatctgggaccacgcagctcacctcgctctcccagctccccatgaaggtacttactttgtgacgccatagtcgataccaatagttgcaaggtatttgggaacgaatctcttctcacagtagcgttttataatgcagctctgggagaaagaaaaagggaatttcactgggaagagaccaygctgcaggactgggattctcattaatgctgaattcactgacagcctccagcaggctgctctgtctgtccctacgtccctaaatcaacaaaataatggcatcgttattcaccaagagcagcagctttctttgtgcaaaagraagatgaaaacaggatcccactcctgagcgtttgttatttcttagctgtttggaagagaaagctcagagctcaaggcctgaccttcaggccacattccacaaaagaactggaaactgttccaagtgactgaggtgatagtgataggacaagwgggaatgt

SEQ ID NO: 14531 - DNA, 600 bp, Chicken  19866894219945_2
cacctcgctctcccagctccccatgaaggtacttactttgtgacgccatagtcgataccaatagttgcaaggtatttgggaacgaatctcttctcacagtagcgttttataatgcagctctgggagaaagaaaaagggaatttcactgggaagagaccaygctgcaggactgggattctcattaatgctgaattcactgacagcctccagcaggctgctctgtctgtccctacgtccctaaatcaacaaaataatggcatcgttattcaccaagagcagcagctttctttgtgcaaaagraagatgaaaacaggatcccactcctgagcgtttgttatttcttagctgtttggaagagaaagctcagagctcaaggcctgaccttcaggccacattccacaaaagaactggaaactgttccaagtgactgaggtgatagtgataggacaagwgggaatgtttttaaattaaaagaggagagattttgactggatgtcaggaggaatgtttttactctgggggtggtgagacactggcacaggctgcccagagaagctatggatgctccattcctggtagtgcccaaagccaggttggatg

SEQ ID NO: 14532 - DNA, 600 bp, Chicken  19866894219945_3
gagaccaygctgcaggactgggattctcattaatgctgaattcactgacagcctccagcaggctgctctgtctgtccctacgtccctaaatcaacaaaataatggcatcgttattcaccaagagcagcagctttctttgtgcaaaagraagatgaaaacaggatcccactcctgagcgtttgttatttcttagctgtttggaagagaaagctcagagctcaaggcctgaccttcaggccacattccacaaaagaactggaaactgttccaagtgactgaggtgatagtgataggacaagwgggaatgtttttaaattaaaagaggagagattttgactggatgtcaggaggaatgtttttactctgggggtggtgagacactggcacaggctgcccagagaagctatggatgctccattcctggtagtgcccaaagccaggttggatggagctttgggcagcctgggttggtgactggcactcagcccacagcaggggttggaactgcatgagcttcccggtcccttccaacctaagccattctgattctgtgatgcgtaggggagaaaacagcagtcagagtgacctcttatcctggca

SEQ ID NO: 14533 - DNA, 599 bp, Chicken  19866894219948_1
  misc_feature (1)..(77): n is any nucleotide
nnnnnnnnnnnnnnnnnnnnnnnnnnnnnnnnnnnnnnnnnnnnnnnnnnnnnnnnnnnnnnnnnnnnnnnnnnnnnggcttgctctgcttgtgttagaattacagccttctgcacaccacttgctccatgggaaaatgtccagagctgcagagaatccagtgatgaaagtaaagctgggaagcaggtacagttccatagagatgaaagaagaatttgtgtctggctagaagcagatataaaaaggaaggagaaaggagagaaaggcagcagcatctgggagtgaaagtctaggattagrtatgccatatattgattaaatttttattaattttatctttccttgtgtgtgttcatttaaaatcttctaggtctctggacacttgtatctgcaataataattttaaatgagacataaamcatccagtccaactgttcatttgtttacactcatggggaatatttagttgatgtacgtgaacttttgccacttgttcttagataacacagggtgatagaatgaatacttattctatctgtcctttatatgctataaaacaatccctttaaactgaaagccaagcctaccttcttgggatt

SEQ ID NO: 14534 - DNA, 600 bp, Chicken  19866894219948_2
acttgctccatgggaaaatgtccagagctgcagagaatccagtgatgaaagtaaagctgggaagcaggtacagttccatagagatgaaagaagaatttgtgtctggctagaagcagatataaaaaggaaggagaaaggagagaaaggcagcagcatctgggagtgaaagtctaggattagrtatgccatatattgattaaatttttattaattttatctttccttgtgtgtgttcatttaaaatcttctaggtctctggacacttgtatctgcaataataattttaaatgagacataaamcatccagtccaactgttcatttgtttacactcatggggaatatttagttgatgtacgtgaacttttgccacttgttcttagataacacagggtgatagaatgaatacttattctatctgtcctttatatgctataaaacaatccctttaaactgaaagccaagcctaccttcttgggattccaggagatggacaaacatcttgtgattagtggctttcttgggaagctttggctttctatttgaaacctctgaaaaggctgtgactctttttttttttttcccccatgtatgctcactac

SEQ ID NO: 14535 - DNA, 599 bp, Chicken  19866894219949_1
  misc_feature (1)..(157): n is any nucleotide
nnnnnnnnnnnnnnnnnnnnnnnnnnnnnnnnnnnnnnnnnnnnnnnnnnnnnnnnnnnnnnnnnnnnnnnnnnnnnnnnnnnnnnnnnnnnnnnnnnnnnnnnnnnnnnnnnnnnnnnnnnnnnnnnnnnnnnnnnnnnnnnnnnnnnnnnnnnnnggttggaagggacctcaaggatcatgaagctccaacccacccccacctcaggcagggccaccaacctcgacatgtaatgccagcccaggctgcccagggccccatccaacctggccttgaacacctccagggatggacggggmgtccacagcctctctggggagatgatrccctcactctccatgctaagggttttacatagctttatcaaatctgacagtttgtgcccccagttctaatcagcctactttctytgccttgctgggttcatccagaccctttgtgttttgacacctctcatgtgttgtcttaagtagtgttgtccgcatattagatggttattctcaaggtgtttgtttgctccgtctctctscacttaactttccaccatgggatgaatggcagttagtgtcaaaatgacctcatgcttagaaattctgtg

SEQ ID NO: 14536 - DNA, 599 bp, Chicken  19866894219949_2
  misc_feature (1)..(130): n is any nucleotide
nnnnnnnnnnnnnnnnnnnnnnnnnnnnnnnnnnnnnnnnnnnnnnnnnnnnnnnnnnnnnnnnnnnnnnnnnnnnnnnnnnnnnnnnnnnnnnnnnnnnnnnnnnnnnnnnnnnnnnnnnnnnnnnnnnggttggaagggacctcaaggatcatgaagctccaacccacccccacctcaggcagggccaccaacctcgacatgtaatgccagcccaggctgcccagggccccatccaacctggccttgaacacctccagggatggacggggmgtccacagcctctctggggagatgatrccctcactctccatgctaagggttttacatagctttatcaaatctgacagtttgtgcccccagttctaatcagcctactttctytgccttgctgggttcatccagaccctttgtgttttgacacctctcatgtgttgtcttaagtagtgttgtccgcatattagatggttattctcaaggtgtttgtttgctccgtctctctscacttaactttccaccatgggatgaatggcagttagtgtcaaaatgacctcatgcttagaaattctgtgaacgtgttgactgtagtttggatatgc

SEQ ID NO: 14537 - DNA, 599 bp, Chicken  19866894219949_3
  misc_feature (1)..(46): n is any nucleotide
nnnnnnnnnnnnnnnnnnnnnnnnnnnnnnnnnnnnnnnnnnnnnnggttggaagggacctcaaggatcatgaagctccaacccacccccacctcaggcagggccaccaacctcgacatgtaatgccagcccaggctgcccagggccccatccaacctggccttgaacacctccagggatggacggggmgtccacagcctctctggggagatgatrccctcactctccatgctaagggttttacatagctttatcaaatctgacagtttgtgcccccagttctaatcagcctactttctytgccttgctgggttcatccagaccctttgtgttttgacacctctcatgtgttgtcttaagtagtgttgtccgcatattagatggttattctcaaggtgtttgtttgctccgtctctctscacttaactttccaccatgggatgaatggcagttagtgtcaaaatgacctcatgcttagaaattctgtgaacgtgttgactgtagtttggatatgcagagccttgcagaaatattactgtcatagtaggtattactgttggtgaagaacctctaatattttattccttttcctcggtgag

SEQ ID NO: 14538 - DNA, 600 bp, Chicken  19866894219949_4
gtaatgccagcccaggctgcccagggccccatccaacctggccttgaacacctccagggatggacggggmgtccacagcctctctggggagatgatrccctcactctccatgctaagggttttacatagctttatcaaatctgacagtttgtgcccccagttctaatcagcctactttctytgccttgctgggttcatccagaccctttgtgttttgacacctctcatgtgttgtcttaagtagtgttgtccgcatattagatggttattctcaaggtgtttgtttgctccgtctctctscacttaactttccaccatgggatgaatggcagttagtgtcaaaatgacctcatgcttagaaattctgtgaacgtgttgactgtagtttggatatgcagagccttgcagaaatattactgtcatagtaggtattactgttggtgaagaacctctaatattttattccttttcctcggtgagattacgtttaaagtatctcgtgaaaatttaccattcttctctacacattctgttttaacataaaaaaatatctaacttgtcctttaactgcagagtaagctgtttctgaatctcattttc

SEQ ID NO: 14539 - DNA, 600 bp, Chicken  19866894219961_1
aagcgagtgcttattcctgttccctctccacgcaaacccacatggatatgcctgtatgcgcatacacgtgcttactggtacctgcgggggcagctacaggtaagtggataagataatggctctccactgccttcagggtgaactatttagtgagcaccaatcttctagttattaattaggcctgaattatcagtttcattgtgaatttgttcattgtggttaatctcaacgattttgtgagttaccattccagaacatttttgaggtagcaagaaaaagagctgggtagccaggttttgytgttaggrgactgacaggcagaagcattaattggagtgcttggtttcagaggccgaggaggtgacacttcagggccctcagcaatacagctctcctgtgctcagggcaaggctcatctccattaggttggcagcttcaggtctyagcgctactccagtcaggctctggtgtctcaagctttgcagctgaggattaactgtgaaaaactggtcttcagaggcttgtcttaactgaaagtgtcagatcagttttgcaaagagcaaggctacttggatcgctgtcctctttcacatccctrat

SEQ ID NO: 14540 - DNA, 600 bp, Chicken  19866894219961_2
gcttattcctgttccctctccacgcaaacccacatggatatgcctgtatgcgcatacacgtgcttactggtacctgcgggggcagctacaggtaagtggataagataatggctctccactgccttcagggtgaactatttagtgagcaccaatcttctagttattaattaggcctgaattatcagtttcattgtgaatttgttcattgtggttaatctcaacgattttgtgagttaccattccagaacatttttgaggtagcaagaaaaagagctgggtagccaggttttgytgttaggrgactgacaggcagaagcattaattggagtgcttggtttcagaggccgaggaggtgacacttcagggccctcagcaatacagctctcctgtgctcagggcaaggctcatctccattaggttggcagcttcaggtctyagcgctactccagtcaggctctggtgtctcaagctttgcagctgaggattaactgtgaaaaactggtcttcagaggcttgtcttaactgaaagtgtcagatcagttttgcaaagagcaaggctacttggatcgctgtcctctttcacatccctratggagagct

SEQ ID NO: 14541 - DNA, 600 bp, Chicken  19866894219961_3
atttagtgagcaccaatcttctagttattaattaggcctgaattatcagtttcattgtgaatttgttcattgtggttaatctcaacgattttgtgagttaccattccagaacatttttgaggtagcaagaaaaagagctgggtagccaggttttgytgttaggrgactgacaggcagaagcattaattggagtgcttggtttcagaggccgaggaggtgacacttcagggccctcagcaatacagctctcctgtgctcagggcaaggctcatctccattaggttggcagcttcaggtctyagcgctactccagtcaggctctggtgtctcaagctttgcagctgaggattaactgtgaaaaactggtcttcagaggcttgtcttaactgaaagtgtcagatcagttttgcaaagagcaaggctacttggatcgctgtcctctttcacatccctratggagagctcttattcctttagcactgtaagatctgtacttgtagagattacctttttaaaaatctactcaaaatgagtaggatatttccttcccagctacctcccaaaaagagggcaggattcatcygttaggctttttgtggg

SEQ ID NO: 14542 - DNA, 600 bp, Chicken  19866894219961_4
gytgttaggrgactgacaggcagaagcattaattggagtgcttggtttcagaggccgaggaggtgacacttcagggccctcagcaatacagctctcctgtgctcagggcaaggctcatctccattaggttggcagcttcaggtctyagcgctactccagtcaggctctggtgtctcaagctttgcagctgaggattaactgtgaaaaactggtcttcagaggcttgtcttaactgaaagtgtcagatcagttttgcaaagagcaaggctacttggatcgctgtcctctttcacatccctratggagagctcttattcctttagcactgtaagatctgtacttgtagagattacctttttaaaaatctactcaaaatgagtaggatatttccttcccagctacctcccaaaaagagggcaggattcatcygttaggctttttgtgggtatgagttgtcaggaaacaaagacaaattccaaacaagttttctctagcctagaggtcagtccatgggagagcatttttacctgcaagagaagaacatgaatccaaaagacaggcaaatagatctgaaggagagaaagagagcttggctttgtc

SEQ ID NO: 14543 - DNA, 600 bp, Chicken  19866894219961_5
tggcagcttcaggtctyagcgctactccagtcaggctctggtgtctcaagctttgcagctgaggattaactgtgaaaaactggtcttcagaggcttgtcttaactgaaagtgtcagatcagttttgcaaagagcaaggctacttggatcgctgtcctctttcacatccctratggagagctcttattcctttagcactgtaagatctgtacttgtagagattacctttttaaaaatctactcaaaatgagtaggatatttccttcccagctacctcccaaaaagagggcaggattcatcygttaggctttttgtgggtatgagttgtcaggaaacaaagacaaattccaaacaagttttctctagcctagaggtcagtccatgggagagcatttttacctgcaagagaagaacatgaatccaaaagacaggcaaatagatctgaaggagagaaagagagcttggctttgtctaaggttgttaggatgcttcaggaatatgaagatgcacagtttaaatgccacacttttttcaaagcgtattctcaaaatgctttttctaaagcacagggttcttttgcagtatttttcaggtcttttcc

SEQ ID NO: 14544 - DNA, 600 bp, Chicken  19866894219963_1
aggtagagcaaaaatatagggggaaaaggtctaggatcagcagagccttcagaagttcctgttttattggatgaataatgagatttggtgggagctgttggaactgtaccgcatcagaaaggtattccttagtctcctgcaggcatggttaggcacttaacttattcacccacgttcttaaatctcttcctaaagcacacactttaaaaatctctatcaggagaataaataaaagcaagcaagcgagagttaagaggaatatagatgatctggggaggctgtgagacaacagtaacaagyttgcaacagtgggtaagaaggagtcctaaacatggggaccaagatgcctgtagagaacagtgctttttctcaagcagttgaaggratggtctaacagctctattgccaagaaaggctgaaggctgttatttcattttgaaggaaggatgaaaaagaagctttgatgtgtctaaacctaacttgttttatgtctccacatatatcattgtctgcaaggaaatgtgtragctaaaagtgatttttaatatccttggaggatcgaggagaggatgatgaagtgccacaggccagaattaccag

SEQ ID NO: 14545 - DNA, 600 bp, Chicken  19866894219963_2
tggtgggagctgttggaactgtaccgcatcagaaaggtattccttagtctcctgcaggcatggttaggcacttaacttattcacccacgttcttaaatctcttcctaaagcacacactttaaaaatctctatcaggagaataaataaaagcaagcaagcgagagttaagaggaatatagatgatctggggaggctgtgagacaacagtaacaagyttgcaacagtgggtaagaaggagtcctaaacatggggaccaagatgcctgtagagaacagtgctttttctcaagcagttgaaggratggtctaacagctctattgccaagaaaggctgaaggctgttatttcattttgaaggaaggatgaaaaagaagctttgatgtgtctaaacctaacttgttttatgtctccacatatatcattgtctgcaaggaaatgtgtragctaaaagtgatttttaatatccttggaggatcgaggagaggatgatgaagtgccacaggccagaattaccagaggagcatttatatgagataaaaagatgtacaaatatgactataaggcaaaactcacaactttttaccacgagagttgttggaca

SEQ ID NO: 14546 - DNA, 600 bp, Chicken  19866894219963_3
aaataaaagcaagcaagcgagagttaagaggaatatagatgatctggggaggctgtgagacaacagtaacaagyttgcaacagtgggtaagaaggagtcctaaacatggggaccaagatgcctgtagagaacagtgctttttctcaagcagttgaaggratggtctaacagctctattgccaagaaaggctgaaggctgttatttcattttgaaggaaggatgaaaaagaagctttgatgtgtctaaacctaacttgttttatgtctccacatatatcattgtctgcaaggaaatgtgtragctaaaagtgatttttaatatccttggaggatcgaggagaggatgatgaagtgccacaggccagaattaccagaggagcatttatatgagataaaaagatgtacaaatatgactataaggcaaaactcacaactttttaccacgagagttgttggacacaggcgtgggtactcagacaggttttgaaatctccatccttggagtttttcaaagctgagcaggtcctgagaaacctgacataactttgacgtgcgttgcgcaggttggagtagatgacccctagaagttccttccaacct

SEQ ID NO: 14547 - DNA, 599 bp, Chicken  19866894219964_1
  misc_feature (1)..(113): n is any nucleotide
nnnnnnnnnnnnnnnnnnnnnnnnnnnnnnnnnnnnnnnnnnnnnnnnnnnnnnnnnnnnnnnnnnnnnnnnnnnnnnnnnnnnnnnnnnnnnnnnnnnnnnnnnnnnnnnnnacttggaccccaaaaacttttagggctgcaatgtcatgttttcctttgtctgggaatcaaaagatgggttttcaatcaagcaattaacaaaaaccccatatatgattcttcacctgttgaaaacatagaaaccaattcattcaataaaattaccatcttcatctttaccaacacatttgtacatagracatttgtgtacaaagttacttgcctgaaatggtttcactgaaactccagctttattcttcttttttaccacttctatcagtttgcccacaacctgatccaccacgtaatcaacatgcctaccacccttaatgaggaaagaaaaaaagaaaacacactgaatttcctaacagattttaaactaaccaaattcctttacatttgaggttggaaatcaatgcactttgttagataatgaaggatattttgcttttaaattactcttttatgtcattcagtcttcattacagtgaggaggat

SEQ ID NO: 14548 - DNA, 600 bp, Chicken  19866894219964_2
gaaggatattttgcttttaaattactcttttatgtcattcagtcttcattacagtgaggaggatggatgtgacacggaacagaagaagcagtaggcttttcttcactgtactgtggtgggctgcttacagcttataactggatatacaaccttaggggtgtgcatagcagatctgaagatgagtctgtaacactgacatggtacctgcaacaccacacggctgttcatgggtatctttctgacaggcacataaataactttcaatggaaaatgttacacattctttcagcaaattaaacyctcctatactataaggacttgaatcataaaaacagttcagaagcttgctctcagatatagagcaaccatttctattccttcccaaaagtcacctcaactttttaataactttatttacaggaatccttgaataaatgctattatcattctctgctagtctgaggtgaacagagtgaactacacacaacaagccacaagatctagaaaactaaaaaagaacagagcaagattaccttaaaaagatgagcagtcctacttaaaactcaycaaagctgaaattgatacctagtcctatgtaat

SEQ ID NO: 14549 - DNA, 600 bp, Chicken  19866894219964_3
aaaatgttacacattctttcagcaaattaaacyctcctatactataaggacttgaatcataaaaacagttcagaagcttgctctcagatatagagcaaccatttctattccttcccaaaagtcacctcaactttttaataactttatttacaggaatccttgaataaatgctattatcattctctgctagtctgaggtgaacagagtgaactacacacaacaagccacaagatctagaaaactaaaaaagaacagagcaagattaccttaaaaagatgagcagtcctacttaaaactcaycaaagctgaaattgatacctagtcctatgtaatgtagcaacaagaaataaatacagagcatgctgataactccaagctgacacaccaagaccataggaagggacagtaacttgtagctacaaaaccaygttgccacctgtcctgtggagacaaccgtggagtccagtaacatttccagctattgcaaggaaagctattgctattgatgtaattgagtctaactaggaaagagctaagcatttgaacaaaaaagataatgttccactcccacgcttctaatttatgcatttccagaagttg

SEQ ID NO: 14550 - DNA, 600 bp, Chicken  19866894219964_4
aactttttaataactttatttacaggaatccttgaataaatgctattatcattctctgctagtctgaggtgaacagagtgaactacacacaacaagccacaagatctagaaaactaaaaaagaacagagcaagattaccttaaaaagatgagcagtcctacttaaaactcaycaaagctgaaattgatacctagtcctatgtaatgtagcaacaagaaataaatacagagcatgctgataactccaagctgacacaccaagaccataggaagggacagtaacttgtagctacaaaaccaygttgccacctgtcctgtggagacaaccgtggagtccagtaacatttccagctattgcaaggaaagctattgctattgatgtaattgagtctaactaggaaagagctaagcatttgaacaaaaaagataatgttccactcccacgcttctaatttatgcatttccagaagttgccctcaggcttctatcatgttctctagctacagttctcttcagatgcaaactttaaagcagttacaaaaagaacccaaaacatactgttataagacaaaccattttgagatgaaggcacttggaaatt

SEQ ID NO: 14551 - DNA, 600 bp, Chicken  19866894219965_1
ggccaccctgcacatagcaggggagttgaaactcaatgatcattatgggccttttcaacccaggccattctatgttccagcacggcttggcagcgtagagctatttcagtgtggaaacggggagggaaatgagggctgcatctcttatgtggggtgggctgggagcacgcattcattctttgtctggcgcgtgtctgacagcaagagcagaacatcaaaccccagttcttcgccttccgctggctgacactgctcttgtcccaagagttcctgctgccagatgtcatccggatctgggaytccctctttgctgacgataaacgcttcgatttcctgctgttggtgtgttgtgccatgytgacgtaagtatggaaacggccactgtgctctttcctttccctcctctamtgaaacccataggcctaggaaccttctataggcgtgtgttaatgcacctgatgaataggccacaggcatttgtcacagtgctaagtgggaggtgttctcagaaatctccataaaggcacattgaagtccatttttttgaagttcctctgtaaagagctgagagtagctggagtcatttccatctttcagact

SEQ ID NO: 14552 - DNA, 600 bp, Chicken  19866894219965_2
cccaggccattctatgttccagcacggcttggcagcgtagagctatttcagtgtggaaacggggagggaaatgagggctgcatctcttatgtggggtgggctgggagcacgcattcattctttgtctggcgcgtgtctgacagcaagagcagaacatcaaaccccagttcttcgccttccgctggctgacactgctcttgtcccaagagttcctgctgccagatgtcatccggatctgggaytccctctttgctgacgataaacgcttcgatttcctgctgttggtgtgttgtgccatgytgacgtaagtatggaaacggccactgtgctctttcctttccctcctctamtgaaacccataggcctaggaaccttctataggcgtgtgttaatgcacctgatgaataggccacaggcatttgtcacagtgctaagtgggaggtgttctcagaaatctccataaaggcacattgaagtccatttttttgaagttcctctgtaaagagctgagagtagctggagtcatttccatctttcagactaatccgggatcagttgctggaaggagacttcactctcaacatgaggctgctacaggta

SEQ ID NO: 14553 - DNA, 600 bp, Chicken  19866894219965_3
gtgtggaaacggggagggaaatgagggctgcatctcttatgtggggtgggctgggagcacgcattcattctttgtctggcgcgtgtctgacagcaagagcagaacatcaaaccccagttcttcgccttccgctggctgacactgctcttgtcccaagagttcctgctgccagatgtcatccggatctgggaytccctctttgctgacgataaacgcttcgatttcctgctgttggtgtgttgtgccatgytgacgtaagtatggaaacggccactgtgctctttcctttccctcctctamtgaaacccataggcctaggaaccttctataggcgtgtgttaatgcacctgatgaataggccacaggcatttgtcacagtgctaagtgggaggtgttctcagaaatctccataaaggcacattgaagtccatttttttgaagttcctctgtaaagagctgagagtagctggagtcatttccatctttcagactaatccgggatcagttgctggaaggagacttcactctcaacatgaggctgctacaggtaaggattaaatattgcaggcgtaggttgcaatgtaaagagccttgaaatag

SEQ ID NO: 14554 - DNA, 600 bp, Chicken  19866894219969_1
ttagaaggtacagagtgcatgaaaacaatgacaagctgtaaatatttctttggttttctgtgaatataaagaaagatatcttatttatttgatggactacatgtgtataaggttattgttaatccaagagtaaatgctttttcatagactatagctattctagaagaaatatatataaagacagtatatttattctaggtctagttcatatttagggcaaattatgaaggatccatccatagacttcttgacttactgtttttttttcatactcaatcttttacaccaaatgcttttaaraagtgttgttttcctatgaaatctcttgactgcaagtgcaaggctcctcagcacaatgaatttactccagtccacagatccggtgtttcttacagccctgatgtcctccttggctgtttgtattccagcactaattgcctgytggagttcagagagctcattagctccttcataagtaattttatgctgcagaagactttaattgttcatagattagtagagccagggcagtggcatcaactctttcacacatttcatattttattcactgtttaatgtatttttgcactgttatgaatg

SEQ ID NO: 14555 - DNA, 600 bp, Chicken  19866894219969_2
catagactatagctattctagaagaaatatatataaagacagtatatttattctaggtctagttcatatttagggcaaattatgaaggatccatccatagacttcttgacttactgtttttttttcatactcaatcttttacaccaaatgcttttaaraagtgttgttttcctatgaaatctcttgactgcaagtgcaaggctcctcagcacaatgaatttactccagtccacagatccggtgtttcttacagccctgatgtcctccttggctgtttgtattccagcactaattgcctgytggagttcagagagctcattagctccttcataagtaattttatgctgcagaagactttaattgttcatagattagtagagccagggcagtggcatcaactctttcacacatttcatattttattcactgtttaatgtatttttgcactgttatgaatgtaccatctacttcttaagcaaactctagtcatggaaaaactctggaagaatgaattctctcatctccttggtgagtgtgtgtgatattttgctatttcaagttggagatttagagcatgtcttttggcaaggcagagttcag

SEQ ID NO: 14556 - DNA, 600 bp, Chicken  19866894219970_1
tagtgtgcaagaaaatatcatcaaattagattaactagattattgagaaaaatattcccttaggaatctatattatggaaaagagacaacttttctgaacactaaagatactttattctagccaaatatgagtcagaacattcaaaactaagtgcacaaatatgacgcatgtacagaattgcaaagacccttttcctgtaaatggtgcgtatatgcctttgttttttacttctatttgcatttccaggcagtagtatctccacagaaaacacagtgaaacacaaggatacttccctttaygctgtggaggtggtatcaaaggatatcagtttgactgcagtaacatgaaattttcccttggwagatgacatcctttctccttgaagaattttatctgatcacamtctcccttctaactcagttcctacctgtgcaccaacacatcacagattgactttctgtccctgtycctgtcccctcctgctccatctaaatttttgtagtgtttcttcagtggtttcctgtggatgaccagcaatcaccttgaattaaaatcactcatgttacctactgaagttctccacagtacctctttctcac

SEQ ID NO: 14557 - DNA, 600 bp, Chicken  19866894219970_2
ggaatctatattatggaaaagagacaacttttctgaacactaaagatactttattctagccaaatatgagtcagaacattcaaaactaagtgcacaaatatgacgcatgtacagaattgcaaagacccttttcctgtaaatggtgcgtatatgcctttgttttttacttctatttgcatttccaggcagtagtatctccacagaaaacacagtgaaacacaaggatacttccctttaygctgtggaggtggtatcaaaggatatcagtttgactgcagtaacatgaaattttcccttggwagatgacatcctttctccttgaagaattttatctgatcacamtctcccttctaactcagttcctacctgtgcaccaacacatcacagattgactttctgtccctgtycctgtcccctcctgctccatctaaatttttgtagtgtttcttcagtggtttcctgtggatgaccagcaatcaccttgaattaaaatcactcatgttacctactgaagttctccacagtacctctttctcacagctggagacatcagtggtgttttatatgacacttaggacagtggctatgctaaggttttct

SEQ ID NO: 14558 - DNA, 600 bp, Chicken  19866894219970_3
aagatactttattctagccaaatatgagtcagaacattcaaaactaagtgcacaaatatgacgcatgtacagaattgcaaagacccttttcctgtaaatggtgcgtatatgcctttgttttttacttctatttgcatttccaggcagtagtatctccacagaaaacacagtgaaacacaaggatacttccctttaygctgtggaggtggtatcaaaggatatcagtttgactgcagtaacatgaaattttcccttggwagatgacatcctttctccttgaagaattttatctgatcacamtctcccttctaactcagttcctacctgtgcaccaacacatcacagattgactttctgtccctgtycctgtcccctcctgctccatctaaatttttgtagtgtttcttcagtggtttcctgtggatgaccagcaatcaccttgaattaaaatcactcatgttacctactgaagttctccacagtacctctttctcacagctggagacatcagtggtgttttatatgacacttaggacagtggctatgctaaggttttctttgccagcagccactctatatttcataattccaattctctcc

SEQ ID NO: 14559 - DNA, 600 bp, Chicken  19866894219970_4
tgtacagaattgcaaagacccttttcctgtaaatggtgcgtatatgcctttgttttttacttctatttgcatttccaggcagtagtatctccacagaaaacacagtgaaacacaaggatacttccctttaygctgtggaggtggtatcaaaggatatcagtttgactgcagtaacatgaaattttcccttggwagatgacatcctttctccttgaagaattttatctgatcacamtctcccttctaactcagttcctacctgtgcaccaacacatcacagattgactttctgtccctgtycctgtcccctcctgctccatctaaatttttgtagtgtttcttcagtggtttcctgtggatgaccagcaatcaccttgaattaaaatcactcatgttacctactgaagttctccacagtacctctttctcacagctggagacatcagtggtgttttatatgacacttaggacagtggctatgctaaggttttctttgccagcagccactctatatttcataattccaattctctcctacgcatactttcaagaagtggccttcagcctaacaggtgtggcatggtgtcattcggagttacc

SEQ ID NO: 14560 - DNA, 600 bp, Chicken  19866894219980_1
gcattgccaaatttgctctaccttttttttttcccccttcttgtggaacttacaggaatgtggtagcttagatactcccagttatctggtaaacatggtcatttgaatagaatttaagcccaggaggaaaggcaggagaataaacagataaggtataaatataaacacatcatgacatgctaactgttggctcttataaaaccaggacaaaatcttgcctcttgagataatggttttggacttgggctgaacagcctgtgtgtgcagagatagggctttcagagcttggtaactgtgtgracagaacacaaggctcaactatgatcaaagattatcacaaatactgtaattactgagcaacctcaggatcgtaaatcaagcctttggcaatatctgttgccattttgctctgtttctgttcactgtatggtttcagtccacgttttgtgaacatttcagcagagaatctgagctaaaaaaaaacagaaaaggctgcaggtggctgagttacagggaaccacagacaaatctcaccccaaatctcacccaaattgctgttgcacaaaaaaagtctcttgcactaaaatgttattctcatct

SEQ ID NO: 14561 - DNA, 600 bp, Chicken  19866894219993_1
tttggatggacaatttgagtagtcccagtaaaaataggaaatggatctctctgacaagcaggcaacgagaaactgagtcagtaatccattgccacaatcatccaaaagccttcatgagcaatcagagatatattgttgaaaaggcacaacctcttgctctgtaaccacaaaatcagtgtaatgactaggcccagatccataacaatctggttagcttgggtctaatttgtaacttcgtagaatggcacaaatcctggatacccgtatcctatctcacatacaatcctgtgcatactcacrtagtagtatttatacgcacattgatatggctgaaccttctactgagtggaagaaggatgatttaatcccttgaaaggcttccaaacctttgtgtgggagtgactgtcacgtttatcgatgaacacaagactgcggcctcaggaagacccagaacctgaggagctctaatggggattgatacgctgaacattcccagtaagcctggttgtgattttactccaatttgtatttgtctactttcagaagctgatatctcaagagtcactgagaagcagcctcttaaagacagctgctttcaaa

SEQ ID NO: 14562 - DNA, 600 bp, Chicken  19866894220001_1
ataacctctgttttgaccagaaagaggatccatcatgaggcgaagatcccaaattggaccagctttctcaaagagtggtaccaattcatcttcatacaagtctcggggaatcttaccaacaaaaacctataaaggaagaggacacttaacaaaagctttttcaaaaatctaaacttatttttagtacttcaaagttctcagaagggaagcaatctgcatcagaaactatcacaacagaaacacttcactagcaattacatttattttaacttctactaaagccttctaaaaatcccaacrttagtactggactttgcctgggtttgtaatttacatctaagaggctgtacctttccaccactgaagaggtaaatacttcttacctggtcacaagaccttacaaggctacctaggcaggaatcctgcaatattccagaccaagcacctccttactcttgcagtattttcatataattccctaatccaatcttgattagaaagatacagagagaggaaaaaaataacaacacaaaacactagacatcctcaataagttgccttaatgcacattttcactattaacctatcttatttctcctc

SEQ ID NO: 14563 - DNA, 600 bp, Chicken  19866894220002_1
gagaaagaagcagtagctcagtggatgaaatcattaagcacttaccatccgctatatcatttctaaaggagcttctgctctctgaaggcatttagcatcagacatagcttaacagtcattaaacaggtaaatctatcaaaaatgtttaatttaaaaacgattcttggaagctttacatgcagcttgctcaactcccacacaaacatatttcactaataaaatctattcccatcaagaaaccagtgatcaagtaatcaccaaaaccttcatttctctgcttactatattttttcttcctcytttccaaatctgygtttgtttgttcttctcagttctactgcttcttctaattagcatcagattaatccaccctactgaaaaagtaatagtacaaaaagacagctaatttttcaggtagggataaaatttatgaaggttgggcataaaaacatgtcttaatctgaagctataaattaaagtcagaatgcatacaacaacctttatctcacttttactggaacttaagacaaagttcttcctatttccaaaaatcattttacatgcatgcacacactggctacctttaaaatcacacttttt

SEQ ID NO: 14564 - DNA, 600 bp, Chicken  19866894220002_2
tagctcagtggatgaaatcattaagcacttaccatccgctatatcatttctaaaggagcttctgctctctgaaggcatttagcatcagacatagcttaacagtcattaaacaggtaaatctatcaaaaatgtttaatttaaaaacgattcttggaagctttacatgcagcttgctcaactcccacacaaacatatttcactaataaaatctattcccatcaagaaaccagtgatcaagtaatcaccaaaaccttcatttctctgcttactatattttttcttcctcytttccaaatctgygtttgtttgttcttctcagttctactgcttcttctaattagcatcagattaatccaccctactgaaaaagtaatagtacaaaaagacagctaatttttcaggtagggataaaatttatgaaggttgggcataaaaacatgtcttaatctgaagctataaattaaagtcagaatgcatacaacaacctttatctcacttttactggaacttaagacaaagttcttcctatttccaaaaatcattttacatgcatgcacacactggctacctttaaaatcacacttttttccttcagaagta

SEQ ID NO: 14565 - DNA, 600 bp, Chicken  19866894220006_1
aagttatttgatgaagcttttgtcaaaaatttattgtcttatgattatattttgctttgtcttatgattatattttgcttctcagcaggagaaacaaggcagctctgggagcaagtacattctgtgccacctgatgtatttttatgcgtttattttcccttaagtacatttctattccttgaagatgtgctttgagagtttgccatttcagcattctgcttgtctcctctaattcaattgtaagcttttctgggcaagatctatacatggattctgctttccagttccattccacagcarttctgcaaaggaatctttttaaaagttatcataatgagagagggaacttaattatccatggggatctgacatgtgagaatagcatatcctggtctcccagaccttcagcagttctgttcctttcagtactcttacctccatgtgctcccatcagtcagaaatgatgagtgcagtagcagattttgcttagagttcctattagrtggaaagaggggagttgttttgcatctctttttttaaattcactttatcattttcacatctgcttctctttcaggtgtgaacagaaaagttacctat

SEQ ID NO: 14566 - DNA, 600 bp, Chicken  19866894220006_2
catttcagcattctgcttgtctcctctaattcaattgtaagcttttctgggcaagatctatacatggattctgctttccagttccattccacagcarttctgcaaaggaatctttttaaaagttatcataatgagagagggaacttaattatccatggggatctgacatgtgagaatagcatatcctggtctcccagaccttcagcagttctgttcctttcagtactcttacctccatgtgctcccatcagtcagaaatgatgagtgcagtagcagattttgcttagagttcctattagrtggaaagaggggagttgttttgcatctctttttttaaattcactttatcattttcacatctgcttctctttcaggtgtgaacagaaaagttacctattccctcgcagactccgcagatggttacttctcagttgaccggtcatcgggaatcattattttggagcatccacttgatagagagctacagtcttcctataacattagtgtaaaggcctctgatcagagtattgtgctgaccctgtcctcatttgctactgtgaccattacagtactagatattaatgacaatccccctgtatt

SEQ ID NO: 14567 - DNA, 600 bp, Chicken  19866894220007_1
caaaagaggatgatcatttctttgcaattgtgatgaggaaagattgcagctgttattcctcctgtagaagcgaaatgtgcaaactcaacgaaaaaagggagacaaatctgtaagagccgtgtttttttttcttttgtattttgctgagctgttttctttacttttaaagtgaacagccatgacatgcctggaaggtatgaaggaacatacgattttccacccattttctaccaaggtcgcctcattctttctccatttccatctggactcagttctgcagtttttactgtgcctgcattycagtgtgtgtcatctctgcagcaccctgaggaggaccatctgagggatggctcatagcacacataagaacatggggtttaacccacctaagcaacctcccagggctgtgcttcagccatagggttcttttcccccatacctatgggtacccaggcctcaagcatccaccacacaacctcaaatgcagacagaggagacctgtgggtgtctatccggggacaygggcatctttcagtattcacagataccctaaaaaacacttctaagtagaatctgcagagccaagtgatgggccccttt

SEQ ID NO: 14568 - DNA, 600 bp, Chicken  19866894220007_2
attttctaccaaggtcgcctcattctttctccatttccatctggactcagttctgcagtttttactgtgcctgcattycagtgtgtgtcatctctgcagcaccctgaggaggaccatctgagggatggctcatagcacacataagaacatggggtttaacccacctaagcaacctcccagggctgtgcttcagccatagggttcttttcccccatacctatgggtacccaggcctcaagcatccaccacacaacctcaaatgcagacagaggagacctgtgggtgtctatccggggacaygggcatctttcagtattcacagataccctaaaaaacacttctaagtagaatctgcagagccaagtgatgggcccctttcttatattggcaaagaagctaccactgcagctagacctattgatctcatggggttatttggtccatgctgctccttccaagtatgaggaacacgtggtgtaacccacagactgtccctgggccatcagaacaggggcaccatcatcagaagaactgtgtgggttcctgttccttctcatattatgttgtagctgtgctgtaacatactcatggagttgagtc

SEQ ID NO: 14569 - DNA, 599 bp, Chicken  19866894220010_1
  misc_feature (1)..(102): n is any nucleotide
nnnnnnnnnnnnnnnnnnnnnnnnnnnnnnnnnnnnnnnnnnnnnnnnnnnnnnnnnnnnnnnnnnnnnnnnnnnnnnnnnnnnnnnnnnnnnnnnnnnnnnaacactgagcctgcagcaggattggcaggagccttattcaccgcagttgtcttcgtcgtgactctgtgatgctgaacttcctctctctgtctctgcaggtcccttgcaaccatgatgaaacctagaaggatgcagatgcttctgattctggtggttctgttgttccttctgatccacttctactttctaacctgcagyaacactgcctccctggaattaaaaccttctccagtccacattctcattctctcctcctggcggtcaggttcatccttcactggccagcttttcagtcagcaccccagtgtcttctacctgatggagcctgcgtggcacgtatgggttacaatgtaccagaacagtgccaaggtcttgcatatggcagtgcgggacctggtcaggtcagtctttctctgtgacatgtctgtttttgatgcctacatgtctagccagaagaaaaagtctgatttatttcagtgggagaaaagccgagcctt

SEQ ID NO: 14570 - DNA, 600 bp, Chicken  19866894220012_1
ttaaaacactcacttctcactatcaaaatcaaatttaagaaaatggagattatattattcaatggcacaggctgatctataaagcattgaaaaagctatcctctgcgctgaagtgctttttaaggcttcactttcaattgttaacaatttaggtaacataaccacagatttggttggctcctctttgtgtgagcttactatcatttaaacatcatcacaagaacattcactgtttttgtgattatttcagtcatcagactatctactattagtagacagtgtattacaacgctgaatggragaaacaaaatggatgagacatgatggttatatacttttatgtacgctacacataaactgcaacatcacatcccaaaactaaaatcatataccagcagtgcagaaacaaattgctactgttcttgtacactgccctggtgtttatactttcatataaattagtatactccccacatagggtttagcagcctatttctcactaagccaagatttctatgtcacagaattgcacagtctatttgcattatattcctatttcaggatggaaaatccattgctgtgcaagcagtgcagttaacg

SEQ ID NO: 14571 - DNA, 599 bp, Chicken  19866894220013_1
  misc_feature (1)..(43): n is any nucleotide
nnnnnnnnnnnnnnnnnnnnnnnnnnnnnnnnnnnnnnnnnnnttggaaatgtttgttggaaaaactgttgtagaatacccatcttcactttgaaatccacaaggatggattagatgtgttcgttacgtggtcatggagtatgcaattagcactctggctggatatttattatgtatctggtgaggaagtgctttctgctgccatttttattctaataaacaatgctttaatatggataatcctcttttaacattaattggaacacagagctaatgcttgcacatcttcagtttggaaamtgatgggacagctgttgtacgccgctgcagtatcagcaaagcaaaactggagggaagygtgaaggaatcacgcattataagcatgaatgtatgggttttgtgctttgtccagtcacatttccagtttcatacgtgctgatatagtcattataagggctttaattggcaaagagcttgccagcytgcctttgccagctctgctgaaatcctggccaaacttctcaagagtgcagtaatctgcagttggctgagagcggcggatataaatagatgatacggtgctgaattacaattgatta

SEQ ID NO: 14572 - DNA, 600 bp, Chicken  19866894220013_2
ggaaaaactgttgtagaatacccatcttcactttgaaatccacaaggatggattagatgtgttcgttacgtggtcatggagtatgcaattagcactctggctggatatttattatgtatctggtgaggaagtgctttctgctgccatttttattctaataaacaatgctttaatatggataatcctcttttaacattaattggaacacagagctaatgcttgcacatcttcagtttggaaamtgatgggacagctgttgtacgccgctgcagtatcagcaaagcaaaactggagggaagygtgaaggaatcacgcattataagcatgaatgtatgggttttgtgctttgtccagtcacatttccagtttcatacgtgctgatatagtcattataagggctttaattggcaaagagcttgccagcytgcctttgccagctctgctgaaatcctggccaaacttctcaagagtgcagtaatctgcagttggctgagagcggcggatataaatagatgatacggtgctgaattacaattgattattgaaattcagctagtatgtaatagatagccataaaaaggcaacattgtttccctaata

SEQ ID NO: 14573 - DNA, 600 bp, Chicken  19866894220013_3
aggaagtgctttctgctgccatttttattctaataaacaatgctttaatatggataatcctcttttaacattaattggaacacagagctaatgcttgcacatcttcagtttggaaamtgatgggacagctgttgtacgccgctgcagtatcagcaaagcaaaactggagggaagygtgaaggaatcacgcattataagcatgaatgtatgggttttgtgctttgtccagtcacatttccagtttcatacgtgctgatatagtcattataagggctttaattggcaaagagcttgccagcytgcctttgccagctctgctgaaatcctggccaaacttctcaagagtgcagtaatctgcagttggctgagagcggcggatataaatagatgatacggtgctgaattacaattgattattgaaattcagctagtatgtaatagatagccataaaaaggcaacattgtttccctaatatggggcttgaaatgaatgcggtccttttttttaatttagcaaagttagtgtttatcacaaagtcataaaatctagcctatattttttgtgattctttgcaaacaaaaatcttcttctgttcttaa

SEQ ID NO: 14574 - DNA, 600 bp, Chicken  19866894220014_1
atatgtttcttgatagtgcctatttggattaaaaacagagcctgccagccatggccaggagatgcagtgctgaacatatgtgcccatggagggactgaatacagcagctgtggtgagaccagcttcccttcataaaacacagttattactgacgtgtccagagtgcttgggagatctaagtctatatgatggccacgataaggcattgtagtgcttctaggaattcttctgcaaaacagaaacacagttcaaactgtgttagatcaagacaactaaggccaggacttcacgggacttccrctaaggaaagctttgctgatctgcagcagcrtacatcatctgaggaaacggatctttttaaaaatatggattttttattggatttcctaagcatctttccttcaattctatttttttgtaagcaaaaattaaatttccatctcttcgataagtaagtgttgatttaattacaaagtactattggcacctcttaaaaaatgtaaccctaatttcacagtgttgaagtatactattttcatgttgttttctttaaaaatctgatgagattctaaagcttttagtgacacataaaagactgaa

SEQ ID NO: 14575 - DNA, 600 bp, Chicken  19866894220014_2
aaaacagagcctgccagccatggccaggagatgcagtgctgaacatatgtgcccatggagggactgaatacagcagctgtggtgagaccagcttcccttcataaaacacagttattactgacgtgtccagagtgcttgggagatctaagtctatatgatggccacgataaggcattgtagtgcttctaggaattcttctgcaaaacagaaacacagttcaaactgtgttagatcaagacaactaaggccaggacttcacgggacttccrctaaggaaagctttgctgatctgcagcagcrtacatcatctgaggaaacggatctttttaaaaatatggattttttattggatttcctaagcatctttccttcaattctatttttttgtaagcaaaaattaaatttccatctcttcgataagtaagtgttgatttaattacaaagtactattggcacctcttaaaaaatgtaaccctaatttcacagtgttgaagtatactattttcatgttgttttctttaaaaatctgatgagattctaaagcttttagtgacacataaaagactgaaaataaaacagaaaacatcttcaaatactcaa

SEQ ID NO: 14576 - DNA, 600 bp, Chicken  19866894220025_1
gttgtctgatggtatttgtaaagcagccgaagacaagtggctatttggtaatctcagcttttaaataataataaaaaaggcattagccttcagggttttgaaaaacagtttaaaaagcctgtgtaggatacagatcacatcctctcacaaagtgttctctaatgattttcacaaatcagtcctgtcatttctgattactgccttgattttaggagatgtggacatcgccgttttgagggttctccttaattctttttcttttttaaaagaccaatttttaaaacttgtatgaagttaatytacctaggttagctctcagaaaattaagtctgtgttcacagagcaaggtgcaagtttggggagggtaagctgtgttcatcctacagatgagagttaatagctgttctaagcaccgcgtgcatctcagtctacagtgtgggggtgaagtgtactgaggatctatattacaaagatgaaacagagtgaattactctgtgtttttcaatttccttcatttcagctcttacagacagtgtcagatgttacattctgccaggaagctctttcagaaattcaagcttcagacattgctttccatgt

SEQ ID NO: 14577 - DNA, 599 bp, Chicken  19866894220027_1
  misc_feature (1)..(173): n is any nucleotide
nnnnnnnnnnnnnnnnnnnnnnnnnnnnnnnnnnnnnnnnnnnnnnnnnnnnnnnnnnnnnnnnnnnnnnnnnnnnnnnnnnnnnnnnnnnnnnnnnnnnnnnnnnnnnnnnnnnnnnnnnnnnnnnnnnnnnnnnnnnnnnnnnnnnnnnnnnnnnnnnnnnnnnnnnnnnncgcactgacgccccccgcccccacactgaggcacagacagagcagggcagggactccatagcctttattgcaccctgaggggtcggggggctgcgctcactgtgcgcagtggaacagatcgacagcratgctgggggggtctgcaggcgggtgggcggccagcagctcagccacgtccctgtggcggtggtatctgtccccacgcagcaggtagatgccatcagctgtgcacatggccccgtccacrccatcatarggcagaggttgcggctcatccgcatgccgtgggctctttgtcaagtccacgcgctgcatgcggtcccctgtggacacagcaccgtcacccagcgccacggggacccccgtcctgcccccacccggccccacacatccactgcccacctgtgatgacatagagctctgcgg

SEQ ID NO: 14578 - DNA, 599 bp, Chicken  19866894220027_2
  misc_feature (1)..(53): n is any nucleotide
nnnnnnnnnnnnnnnnnnnnnnnnnnnnnnnnnnnnnnnnnnnnnnnnnnnnncgcactgacgccccccgcccccacactgaggcacagacagagcagggcagggactccatagcctttattgcaccctgaggggtcggggggctgcgctcactgtgcgcagtggaacagatcgacagcratgctgggggggtctgcaggcgggtgggcggccagcagctcagccacgtccctgtggcggtggtatctgtccccacgcagcaggtagatgccatcagctgtgcacatggccccgtccacrccatcatarggcagaggttgcggctcatccgcatgccgtgggctctttgtcaagtccacgcgctgcatgcggtcccctgtggacacagcaccgtcacccagcgccacggggacccccgtcctgcccccacccggccccacacatccactgcccacctgtgatgacatagagctctgcggatccggggcaagtgaaggcggcatcggctttggggacccccagctcctcctgcagagcccgtgggtacccctctaccagctggtggccgcctctacccgagacgtagatggagacctgcg

SEQ ID NO: 14579 - DNA, 599 bp, Chicken  19866894220027_3
  misc_feature (1)..(44): n is any nucleotide
nnnnnnnnnnnnnnnnnnnnnnnnnnnnnnnnnnnnnnnnnnnncgcactgacgccccccgcccccacactgaggcacagacagagcagggcagggactccatagcctttattgcaccctgaggggtcggggggctgcgctcactgtgcgcagtggaacagatcgacagcratgctgggggggtctgcaggcgggtgggcggccagcagctcagccacgtccctgtggcggtggtatctgtccccacgcagcaggtagatgccatcagctgtgcacatggccccgtccacrccatcatarggcagaggttgcggctcatccgcatgccgtgggctctttgtcaagtccacgcgctgcatgcggtcccctgtggacacagcaccgtcacccagcgccacggggacccccgtcctgcccccacccggccccacacatccactgcccacctgtgatgacatagagctctgcggatccggggcaagtgaaggcggcatcggctttggggacccccagctcctcctgcagagcccgtgggtacccctctaccagctggtggccgcctctacccgagacgtagatggagacctgcgagccctgca

SEQ ID NO: 14580 - DNA, 600 bp, Chicken  19866894220030_1
ttcatcatctatttgtgtctgcgtccccgctccctgcccgctcacatggatgcagtcttgctgccctggacagcggaaccagcagagattcctacaaagcctttacagtcagtgggactccttttcagatccctttcctgattcagtgttgggctcagcatcccagaaatgataaaaaagtaaaatcgaatgccttaagtacgtagctgaatagctggggatatagggaatatttgtgcccggggctcatgttagctgtgggcaaagcagggcgttggctgaagcctcatgccaggggtrgcagatgaggcagcagcactgcctggtcactgctcctggcattcatccacctygctaggatgaacttcagctgctgctgtgcttctgagcagtgtgctaccaaaccgccctgctctgatgtaattgtgcctatgggactgaggaaactctacatctgaccaatgatcagattaacaaaggcaagcagcaaaaatgtcatcaccaaggctggaatatattgccagatttgctccaagtgcagcttatgtcatcacagagcctggtgccagagctgcggccattagcgtgatgctgcagaac

SEQ ID NO: 14581 - DNA, 600 bp, Chicken  19866894220030_2
agtcttgctgccctggacagcggaaccagcagagattcctacaaagcctttacagtcagtgggactccttttcagatccctttcctgattcagtgttgggctcagcatcccagaaatgataaaaaagtaaaatcgaatgccttaagtacgtagctgaatagctggggatatagggaatatttgtgcccggggctcatgttagctgtgggcaaagcagggcgttggctgaagcctcatgccaggggtrgcagatgaggcagcagcactgcctggtcactgctcctggcattcatccacctygctaggatgaacttcagctgctgctgtgcttctgagcagtgtgctaccaaaccgccctgctctgatgtaattgtgcctatgggactgaggaaactctacatctgaccaatgatcagattaacaaaggcaagcagcaaaaatgtcatcaccaaggctggaatatattgccagatttgctccaagtgcagcttatgtcatcacagagcctggtgccagagctgcggccattagcgtgatgctgcagaactgtccgtcagcaggctttgctccaggttttgccaggtcgataaaggaattgaa

SEQ ID NO: 14582 - DNA, 600 bp, Chicken  19866894220034_1
tccttttttttaaatagggcgctttcagcctgataaccagaggacatcagaaatgaatggggcttgccttcctggcagacttttcaattattcaggtgatacagagctggcaatatctccttatgtttaacaaggaaaatgagcacagaagtcaggcagcaatgttgtaggcacagaaagaagtcgtgcaaaacagccattaatattcaaacggcagcgagatctgaactacaagcaaatagccataaaaaccattaatgcccacacataccaacactggtgatcttctgggagaccagrtcttgtagcaaagcctcgattgcagggttatgtctggaatacagctcgtaccggttgatgccaatgtggaattttaaccagtttgggtaggagtctatggaggtttccccagttggcaaaaactcttcgttctcttcattatgcctaccaccaaaaacaaacaagggagaggggraaaaaaagcaaagccataaatgaggagaaagaaatgacgttacaatttgtagcgggcaccaagaaatggggctggggacggagggccctgcgggtgggggaagccggattggcacctccactctt

SEQ ID NO: 14583 - DNA, 600 bp, Chicken  19866894220034_2
gaaagaagtcgtgcaaaacagccattaatattcaaacggcagcgagatctgaactacaagcaaatagccataaaaaccattaatgcccacacataccaacactggtgatcttctgggagaccagrtcttgtagcaaagcctcgattgcagggttatgtctggaatacagctcgtaccggttgatgccaatgtggaattttaaccagtttgggtaggagtctatggaggtttccccagttggcaaaaactcttcgttctcttcattatgcctaccaccaaaaacaaacaagggagaggggraaaaaaagcaaagccataaatgaggagaaagaaatgacgttacaatttgtagcgggcaccaagaaatggggctggggacggagggccctgcgggtgggggaagccggattggcacctccactcttcatgcctgatttgaaacccattaaagtcaggagcaaaattgacagtgacataaccgagcactcacacaggcccttctacagccgaaatgtggagctgcagggtttatgttgcgtttagattgcgtaaggtcgcaaacctctcttacaagttggacccaaagaaaagcatcatcct

SEQ ID NO: 14584 - DNA, 600 bp, Chicken  19866894220034_3
aaagaagtcgtgcaaaacagccattaatattcaaacggcagcgagatctgaactacaagcaaatagccataaaaaccattaatgcccacacataccaacactggtgatcttctgggagaccagrtcttgtagcaaagcctcgattgcagggttatgtctggaatacagctcgtaccggttgatgccaatgtggaattttaaccagtttgggtaggagtctatggaggtttccccagttggcaaaaactcttcgttctcttcattatgcctaccaccaaaaacaaacaagggagaggggrraaaaaagcaaagccataaatgaggagaaagaaatgacgttacaatttgtagcgggcaccaagaaatggggctggggacggagggccctgcgggtgggggaagccggattggcacctccactcttcatgcctgatttgaaacccattaaagtcaggagcaaaattgacagtgacataaccgagcactcacacaggcccttctacagccgaaatgtggagctgcagggtttatgttgcgtttagattgcgtaaggtcgcaaacctctcttacaagttggacccaaagaaaagcatcatcctc

SEQ ID NO: 14585 - DNA, 600 bp, Chicken  19866894220034_4
gtgggggaagccggattggcacctccactcttcatgcctgatttgaaacccattaaagtcaggagcaaaattgacagtgacataaccgagcactcacacaggcccttctacagccgaaatgtggagctgcagggtttatgttgcgtttagattgcgtaaggtcgcaaacctctcttacaagttggacccaaagaaaagcatcatcctcaagttttatttaacagagctggggctggaagtcagtgcggcagaaacctgacctgccagacccaatgttcccactccttccttttaatcagrgagaatgagaagaaaccagctcagctgaacctgctgctaaagagtaatttggggtggctcaccccttccttagcagcaccacgctgatatggaaaaggactgtgagaacgacacgtgagtgctacatttcatgtttgcatggggtgctcggggggaaagcacacagcagcagctgcgttgtggccatcagggacagcttcgccctgcgcctatggcacacagccacgtttctcccaccccaaggtcccccgtgcttttagccatcattcgatgttctgacatttgtggccctttttcttt

SEQ ID NO: 14586 - DNA, 599 bp, Chicken  19866894220035_1
  misc_feature (1)..(16): n is any nucleotide
nnnnnnnnnnnnnnnnctgcagggaattttgaaggattctgaactatgttttgtcctcacacagaattacagaatgtcctgggttggaaggcacctcaaggaacgtgaatctctaaactcccctgtcacaggcaggaccaccaacttccacatttaatactagaccaggctgcccagggccccatccaacctggccttgaacatctccaaggacagggcatccacaacatctttgggcagcctgttctggcaccttaccactttcatagtaaagaacttccccctgacatccaaccaatrttttcccgccttcaacttaaaaccatttccccttgtcctgctgttatataccctttcaaagagttgactcccctcctgtttataggctccctttatgtactgaaaggctgcagttaaggccagctatcaagattggatcactgtggttcagattttcagactccttgcctactcctatgtcttctattactagtatacatccaagggttttgtacccagcagtccctggtacttgtgactatgacattacttggtctgcttgcaaggcctaaaatgtgtgaaggggataaggatcttta

SEQ ID NO: 14587 - DNA, 600 bp, Chicken  19866894220036_1
cagtgcacactcctacctgagccagaaagaaagagaaaggaaaggaagctcaggctgagagtcaaagggagaataaagaaaagctcctttcgctccagggcagctcagcagtatctcaggatggttttcctcttccagtctggagcagcagtggccccagctttgtcatctctcccctggccctgaaggcaacaactgatgcccacgttcacaggcaatgcaacctccttcggaggtcagcaaacagggtgtttcataccttcagcccttcccttggtgttggcccctgcactttcctgygtgccttggttgcagctgagctgcttggctgcaacccagcrccaaacccagggcttgtgcagagcaaggagtggaggaggaaagaaagggctgagaggggtaaaggagagcatgtatcttgtggcaggagggcagagcactggcagcgtgtccagcagccccagtggtgacagcgacacaccgcccatctcacacacagcctgagcaccctgacactgcaagcatccgtagtgctgcagcactgagcagggaccagaacggagaccccagcagcagtgctcccatggcatcaccccgagg

SEQ ID NO: 14588 - DNA, 600 bp, Chicken  19866894220036_2
aaggaagctcaggctgagagtcaaagggagaataaagaaaagctcctttcgctccagggcagctcagcagtatctcaggatggttttcctcttccagtctggagcagcagtggccccagctttgtcatctctcccctggccctgaaggcaacaactgatgcccacgttcacaggcaatgcaacctccttcggaggtcagcaaacagggtgtttcataccttcagcccttcccttggtgttggcccctgcactttcctgygtgccttggttgcagctgagctgcttggctgcaacccagcrccaaacccagggcttgtgcagagcaaggagtggaggaggaaagaaagggctgagaggggtaaaggagagcatgtatcttgtggcaggagggcagagcactggcagcgtgtccagcagccccagtggtgacagcgacacaccgcccatctcacacacagcctgagcaccctgacactgcaagcatccgtagtgctgcagcactgagcagggaccagaacggagaccccagcagcagtgctcccatggcatcaccccgaggctgaggggagaatctcaccctgagttccctcttcagccccg

SEQ ID NO: 14589 - DNA, 599 bp, Chicken  19866894220052_1
  misc_feature (1)..(60): n is any nucleotide
nnnnnnnnnnnnnnnnnnnnnnnnnnnnnnnnnnnnnnnnnnnnnnnnnnnnnnnnnnnntgtccctgattatggaagtatgtagggaatgtcttgtgggcgtcttgcagtttctttttccatgcattactgtgatccaaatgctaaatattatgcagtgatgtatcctctgaagttggcctaaggctagcctaagaagtttaatgctttcctttgatgtctgcttgggccccatactgaacatgaatgtgaaatccttcaacacaaaaggctttggcaatgccagcacagaatttaggraaaaaaaaatccacttgtatgtgcttgacttcctcagctgggttgggtggttagctgtagagtacacttacaagctcttcactgtcttttgagacaggagttgtgtggttctcaagcaaacttcactctcagtcattatgcatccgtgcacactgtgcatgcctggcaagcaggctgctggrcttgttggtacagtagtctctgatccttatggcatattgaaagcatcaaactttgctctgtgctacaactgtgggatcttaaaggttatgagactttggtgctagctttcagataag

SEQ ID NO: 14590 - DNA, 600 bp, Chicken  19866894220052_2
aaggctagcctaagaagtttaatgctttcctttgatgtctgcttgggccccatactgaacatgaatgtgaaatccttcaacacaaaaggctttggcaatgccagcacagaatttaggraaaaaaaaatccacttgtatgtgcttgacttcctcagctgggttgggtggttagctgtagagtacacttacaagctcttcactgtcttttgagacaggagttgtgtggttctcaagcaaacttcactctcagtcattatgcatccgtgcacactgtgcatgcctggcaagcaggctgctggrcttgttggtacagtagtctctgatccttatggcatattgaaagcatcaaactttgctctgtgctacaactgtgggatcttaaaggttatgagactttggtgctagctttcagataagtcatgtatgaatttagttgcttcaaagcattcccmtgcaccttgtataggtgtgtgtggcaggctctgtggcaagcagcaattgttggactttccttttgtctttcycctctgggcacatgaggaaggtggtgtgtgacgttcctagagccttgcttctcatgcagcagcgctgccaggtcag

SEQ ID NO: 14591 - DNA, 600 bp, Chicken  19866894220052_3
cagctgggttgggtggttagctgtagagtacacttacaagctcttcactgtcttttgagacaggagttgtgtggttctcaagcaaacttcactctcagtcattatgcatccgtgcacactgtgcatgcctggcaagcaggctgctggrcttgttggtacagtagtctctgatccttatggcatattgaaagcatcaaactttgctctgtgctacaactgtgggatcttaaaggttatgagactttggtgctagctttcagataagtcatgtatgaatttagttgcttcaaagcattcccmtgcaccttgtataggtgtgtgtggcaggctctgtggcaagcagcaattgttggactttccttttgtctttcycctctgggcacatgaggaaggtggtgtgtgacgttcctagagccttgcttctcatgcagcagcgctgccaggtcagcatttgtttgtcagttcaccttgaagacatgaagttacttgctggggggggagggagagcacgcacacaagctgaagaataaccctaaaatggtgatgtgtctgtttcaaaacttacatctaattaaaaagagttccaaagctagtcaaggg

SEQ ID NO: 14592 - DNA, 543 bp, Chicken  19866894220052_4
ggttctcaagcaaacttcactctcagtcattatgcatccgtgcacactgtgcatgcctggcaagcaggctgctggrcttgttggtacagtagtctctgatccttatggcatattgaaagcatcaaactttgctctgtgctacaactgtgggatcttaaaggttatgagactttggtgctagctttcagataagtcatgtatgaatttagttgcttcaaagcattcccmtgcaccttgtataggtgtgtgtggcaggctctgtggcaagcagcaattgttggactttccttttgtctttcycctctgggcacatgaggaaggtggtgtgtgacgttcctagagccttgcttctcatgcagcagcgctgccaggtcagcatttgtttgtcagttcaccttgaagacatgaagttacttgctggggggggagggagagcacgcacacaagctgaagaataaccctaaaatggtgatgtgtctgtttcaaaacttacatctaattaaaaagagttccaaagctagtcaagggaaaaatcctacattt

SEQ ID NO: 14593 - DNA, 600 bp, Chicken  19866894220059_1
taattcttgagaacataatggacgatactggtggtaggtggatggttggattagatgatcttagaggtcttttccaactgtaatgattctgtgattctatgtccggatgaagtgattacatgaagaagactcatccaacatggataaggacttgacaccgagctccttggtatcagtcccaccctggaatcaatgtaccctccccacaggatggtaaaagataaatggcttcaaaatggcccataatgggcaagaggcaactttctgctccagctacgtgtgaggctcctattcatcacrtgggaaacaggtgtagagctcaaacagagactgaatggcagtgggacagataaatgttaacaggaccaaaatcagcaagtgttgcactgagcgccgcagtgtgattaataaaacaaacacatgaaaaaagatctctgtttcaacacatggccagaaatgtggagtgccgtgctatcggggctgccttgccctctgaatacctgtctctctgtttgggttcacactaaaatattccaacatgctctcaaaaaaaaaaaaaaaaawtttttttttttaatttttatttttacaaatgctcaa

SEQ ID NO: 14594 - DNA, 600 bp, Chicken  19866894220059_2
ctgctccagctacgtgtgaggctcctattcatcacrtgggaaacaggtgtagagctcaaacagagactgaatggcagtgggacagataaatgttaacaggaccaaaatcagcaagtgttgcactgagcgccgcagtgtgattaataaaacaaacacatgaaaaaagatctctgtttcaacacatggccagaaatgtggagtgccgtgctatcggggctgccttgccctctgaatacctgtctctctgtttgggttcacactaaaatattccaacatgctctcaaaaaaaaaaaaaaaaawtttttttttttaatttttatttttacaaatgctcaaactttcctgtcacaaattattcttggcttggttacaacagctgcctatggccgtttcttgacttaaaaaaaagaaagaatagaaagaaaaatggtttatgagatatttcggttacatggctttggtttggttttcttatttatttttttttccaccatagcacgcggtgaaagttcaggagttctcacctctttccaccccaaagctcaacctccagcagctctggcatgacctcaccttcacagactgcgcacttggaaagca

SEQ ID NO: 14595 - DNA, 600 bp, Chicken  19866894220066_1
aaagtctgctgtaaaaccagtctttaaggaatgtgatattaataccaatttctgtattggtcccaggtgccaaacagtccacagggctgctcatggattgggttgtaacctaaatttctaatcttttgacttcagtgtttcaaaacatgttggaaataggcaaagaggctgcaagcaataggatttgggacaggatatccttcttcagaggctggggagtgaaagcacgaagtgagaaagactaaaagcaaatactgctgctccttccctcccaccagttaacttcccccccaaaatagygagcaattatccagattgctgttgaatgtgggactggagatgtagaaatagaaacagcaccatattaggtagaaagtggaattgaaaggatttggtatattcaatcagaaaactatatatagtcccacggggagggactgagacgtatgccttctggaaatggcaactcctgcagtctcagattttgttactgagtcaggacttaggattgtagtagtgattgcagagtgtgtacatgtacagtgttcattaccagtgtcaggttccctttgacaccatcatgctgtgcagcagcaagga

SEQ ID NO: 14596 - DNA, 599 bp, Chicken  19866894220075_1
  misc_feature (1)..(206): n is any nucleotide
nnnnnnnnnnnnnnnnnnnnnnnnnnnnnnnnnnnnnnnnnnnnnnnnnnnnnnnnnnnnnnnnnnnnnnnnnnnnnnnnnnnnnnnnnnnnnnnnnnnnnnnnnnnnnnnnnnnnnnnnnnnnnnnnnnnnnnnnnnnnnnnnnnnnnnnnnnnnnnnnnnnnnnnnnnnnnnnnnnnnnnnnnnnnnnnnnnnnnnnnnnnnnnataatatgactaaatactagaaaaactctttttatgactaaattctgtctcttcctcaagtattacaagtcagctctaagccttttgttattamattttaactgttttctatttttcccctacttttcccaagtatatattcatagcttattttctcaacgttctagctgaaattatatgcattatatttagaatcagtgatacgcattacttttcactatatgttgtcaaatggtttgtctatgcatgtcatgcatagatgcaagtacgtgcatcctatgtacccacatttacagacgtgccaaagctgtttatkttatgtatggtttttaataattatatgtatatttcattatataaatattatatataacataaatattatatatttta

SEQ ID NO: 14597 - DNA, 600 bp, Chicken  19866894220075_2
ctagaaaaactctttttatgactaaattctgtctcttcctcaagtattacaagtcagctctaagccttttgttattamattttaactgttttctatttttcccctacttttcccaagtatatattcatagcttattttctcaacgttctagctgaaattatatgcattatatttagaatcagtgatacgcattacttttcactatatgttgtcaaatggtttgtctatgcatgtcatgcatagatgcaagtacgtgcatcctatgtacccacatttacagacgtgccaaagctgtttatkttatgtatggtttttaataattatatgtatatttcattatataaatattatatataacataaatattatatattttatagaaatatataattatagaaatatataatttacagaaatattacaaaatatttcaatttaaaggactttttttttttttttttttttttgcatggagtactggtttcagtaagatttactgagtgaaaagcgatagacactgctaaaatgtataagacttgcaaatgaaatgctgtcttactgcatttctcttttctaaaatctctgtgtctgaactgagaa

SEQ ID NO: 14598 - DNA, 600 bp, Chicken  19866894220082_1
gtaggtgatatggactgtggtatcaagtgcaccctcagcaagtctgcagactacatggtgccgttgacacaatagagggaaaggataccatgaggtgagcccatgccaacctcatgaaattcaacaaggccgtgtccaaggtcctgcacctgggttggggcactctcatgcacagatataggttgggcagagaacggcttgagagctgccctgaggaggaggatttggggggtgtcagttgatgaagactgagcaagagccatcagtatacacctacagccaagaaggccaactgtatcstgggctgtgtcatgagaagtgtggccagcagctcgagggaggtgattctgcccctctactctgctcttgtgagacccaacctggagtactgcttccagttctggggcccccmatacgaggatgtggagctgctggaacaggtccacaggaggaccatgaagatgatgagagggctggagcacctcccctacagggacaggctgagacatctgggggaccttatagtggccttccagcacctgaagagggcctacaagaaaactgargagtgactttttatacaggcaggtagcaacagga

SEQ ID NO: 14599 - DNA, 600 bp, Chicken  19866894220082_2
catgaaattcaacaaggccgtgtccaaggtcctgcacctgggttggggcactctcatgcacagatataggttgggcagagaacggcttgagagctgccctgaggaggaggatttggggggtgtcagttgatgaagactgagcaagagccatcagtatacacctacagccaagaaggccaactgtatcstgggctgtgtcatgagaagtgtggccagcagctcgagggaggtgattctgcccctctactctgctcttgtgagacccaacctggagtactgcttccagttctggggcccccmatacgaggatgtggagctgctggaacaggtccacaggaggaccatgaagatgatgagagggctggagcacctcccctacagggacaggctgagacatctgggggaccttatagtggccttccagcacctgaagagggcctacaagaaaactgargagtgactttttatacaggcaggtagcaacaggatgaggggaaatgtttttaaactggatgaaggtagatttagactagatactgggaagaaattctttactgtgagagtagtgagtcactggaacagcttgctcaatgagactga

SEQ ID NO: 14600 - DNA, 600 bp, Chicken  19866894220082_3
tatacacctacagccaagaaggccaactgtatcstgggctgtgtcatgagaagtgtggccagcagctcgagggaggtgattctgcccctctactctgctcttgtgagacccaacctggagtactgcttccagttctggggcccccmatacgaggatgtggagctgctggaacaggtccacaggaggaccatgaagatgatgagagggctggagcacctcccctacagggacaggctgagacatctgggggaccttatagtggccttccagcacctgaagagggcctacaagaaaactgargagtgactttttatacaggcaggtagcaacaggatgaggggaaatgtttttaaactggatgaaggtagatttagactagatactgggaagaaattctttactgtgagagtagtgagtcactggaacagcttgctcaatgagactgagaatgccccctccctggaatcattcaaggccaggctggatgggactgcagggcagggcccaacagctgccctgggacaycttggggacagcckggggaggggattggagggcagggagaggtgaggatagaaggatgaggaatggccctgcagg

SEQ ID NO: 14601 - DNA, 443 bp, Chicken  19866894220082_4
agggacaggctgagacatctgggggaccttatagtggccttccagcacctgaagagggcctacaagaaaactgargagtgactttttatacaggcaggtagcaacaggatgaggggaaatgtttttaaactggatgaaggtagatttagactagatactgggaagaaattctttactgtgagagtagtgagtcactggaacagcttgctcaatgagactgagaatgccccctccctggaatcattcaaggccaggctggatgggactgcagggcagggcccaacagctgccctgggacaycttggggacagcckggggaggggattggagggcagggagaggtgaggatagaaggatgaggaatggccctgcaggctagttaaggcctggcagccagaggccagcccagggcagtgccataaagctctgtgtgctgaggttga

SEQ ID NO: 14602 - DNA, 429 bp, Chicken  19866894220082_5
acatctgggggaccttatagtggccttccagcacctgaagagggcctacaagaaaactgargagtgactttttatacaggcaggtagcaacaggatgaggggaaatgtttttaaactggatgaaggtagatttagactagatactgggaagaaattctttactgtgagagtagtgagtcactggaacagcttgctcaatgagactgagaatgccccctccctggaatcattcaaggccaggctggatgggactgcagggcagggcccaacagctgccctgggacaycttggggacagcckggggaggggattggagggcagggagaggtgaggatagaaggatgaggaatggccctgcaggctagttaaggcctggcagccagaggccagcccagggcagtgccataaagctctgtgtgctgaggttga

SEQ ID NO: 14603 - DNA, 600 bp, Chicken  19866894220091_1
tccttctgcatgcttgacactgttcgactccatacaccacaattatcagcttgctacagcttcatacagaataattcatactatacttcttgccatttttgtcacattctatgtaactgaatgcagcctggaaacaaactcctatttttaaaggttactattaacacaaaattctcaacgtttcatgctcatttcaaggcaagaacacttcccattctactgcaaatacagcaaaatgcccctatctggattttcactggctatggattgcattcagatctaacatctgagccacatgcytctgcgatgactcaggcaggaggctgggtgaaggactgtgcagwtycagggcactgcctctgggaataatgcaaaggcaccagatcctgaaatttcatctttaaaaagaaaaaggctgtcaaggtttctagccatcacagataccaataacaacacataaacaactgcaggttgtatgtatttcccaagcatcaaaactaaggaaacaaaaccagtcagcagtgaggaacagaactgcagtctttgcctaagcagggttaccatttaccatttggattagaaaaaaagggtcagtttaag

SEQ ID NO: 14604 - DNA, 600 bp, Chicken  19866894220091_2
atcagcttgctacagcttcatacagaataattcatactatacttcttgccatttttgtcacattctatgtaactgaatgcagcctggaaacaaactcctatttttaaaggttactattaacacaaaattctcaacgtttcatgctcatttcaaggcaagaacacttcccattctactgcaaatacagcaaaatgcccctatctggattttcactggctatggattgcattcagatctaacatctgagccacatgcytctgcgatgactcaggcaggaggctgggtgaaggactgtgcagwtycagggcactgcctctgggaataatgcaaaggcaccagatcctgaaatttcatctttaaaaagaaaaaggctgtcaaggtttctagccatcacagataccaataacaacacataaacaactgcaggttgtatgtatttcccaagcatcaaaactaaggaaacaaaaccagtcagcagtgaggaacagaactgcagtctttgcctaagcagggttaccatttaccatttggattagaaaaaaagggtcagtttaagcccttataattatwctgctagaaatctaacagttatccctaaag

SEQ ID NO: 14605 - DNA, 600 bp, Chicken  19866894220091_3
cagcttgctacagcttcatacagaataattcatactatacttcttgccatttttgtcacattctatgtaactgaatgcagcctggaaacaaactcctatttttaaaggttactattaacacaaaattctcaacgtttcatgctcatttcaaggcaagaacacttcccattctactgcaaatacagcaaaatgcccctatctggattttcactggctatggattgcattcagatctaacatctgagccacatgcytctgcgatgactcaggcaggaggctgggtgaaggactgtgcagwtycagggcactgcctctgggaataatgcaaaggcaccagatcctgaaatttcatctttaaaaagaaaaaggctgtcaaggtttctagccatcacagataccaataacaacacataaacaactgcaggttgtatgtatttcccaagcatcaaaactaaggaaacaaaaccagtcagcagtgaggaacagaactgcagtctttgcctaagcagggttaccatttaccatttggattagaaaaaaagggtcagtttaagcccttataattatwctgctagaaatctaacagttatccctaaagta

SEQ ID NO: 14606 - DNA, 600 bp, Chicken  19866894220091_4
ggcaggaggctgggtgaaggactgtgcagwtycagggcactgcctctgggaataatgcaaaggcaccagatcctgaaatttcatctttaaaaagaaaaaggctgtcaaggtttctagccatcacagataccaataacaacacataaacaactgcaggttgtatgtatttcccaagcatcaaaactaaggaaacaaaaccagtcagcagtgaggaacagaactgcagtctttgcctaagcagggttaccatttaccatttggattagaaaaaaagggtcagtttaagcccttataattatwctgctagaaatctaacagttatccctaaagtattagaaatatcatccttttctcattcaagtttggtagtttgaaagrtttcacgtaaatctgaagttcacacatggagttatctatttattactgatcatcatccctgaaggtgctcaagaaaggtgtaacgtggtactaaggaacatgggttagtgggtaatattggtgataggtagacrgttggactagatgatcctagaggtcttttccaaccttaatgattctacaattctatatattatagatgagaactgaattagctgctta

SEQ ID NO: 14607 - DNA, 600 bp, Chicken  19866894220091_5
tttcatctttaaaaagaaaaaggctgtcaaggtttctagccatcacagataccaataacaacacataaacaactgcaggttgtatgtatttcccaagcatcaaaactaaggaaacaaaaccagtcagcagtgaggaacagaactgcagtctttgcctaagcagggttaccatttaccatttggattagaaaaaaagggtcagtttaagcccttataattatwctgctagaaatctaacagttatccctaaagtattagaaatatcatccttttctcattcaagtttggtagtttgaaagrtttcacgtaaatctgaagttcacacatggagttatctatttattactgatcatcatccctgaaggtgctcaagaaaggtgtaacgtggtactaaggaacatgggttagtgggtaatattggtgataggtagacrgttggactagatgatcctagaggtcttttccaaccttaatgattctacaattctatatattatagatgagaactgaattagctgcttaagctgaagcctcttttttcatgggggtttgccccaagctctctaaaagcagtgtgcagctcaggacacttgcacagat

SEQ ID NO: 14608 - DNA, 600 bp, Chicken  19866894220091_6
gaacagaactgcagtctttgcctaagcagggttaccatttaccatttggattagaaaaaaagggtcagtttaagcccttataattatwctgctagaaatctaacagttatccctaaagtattagaaatatcatccttttctcattcaagtttggtagtttgaaagrtttcacgtaaatctgaagttcacacatggagttatctatttattactgatcatcatccctgaaggtgctcaagaaaggtgtaacgtggtactaaggaacatgggttagtgggtaatattggtgataggtagacrgttggactagatgatcctagaggtcttttccaaccttaatgattctacaattctatatattatagatgagaactgaattagctgcttaagctgaagcctcttttttcatgggggtttgccccaagctctctaaaagcagtgtgcagctcaggacacttgcacagatttgttctgttgctgttgtcccacagaagtttgcgagcagacactactattgtttttcctgacacaagagcatctgtcttcttgggaggaattcagcctgcctgaggaccaagactggcaagacaaagaaaggct

SEQ ID NO: 14609 - DNA, 600 bp, Chicken  19866894220092_1
aataaggtttttatacttactggcaccatatcctccccttgtacacatgctggtgtgcattctccttttccacacacttctgttccttttggagaacccaacatacagaaggctgagctccttttgcaagcagcagctcagaaaccaatagttctactggtccattggcatataaatatgaatcagagatgagtgtgctgggggaagagatttattaactaatttgtcattagcagtttggaggatctgactcctctctctccagcactctcctggttccctgctgttgtagctgttccyctgttgccatcctggcagccttgtgtttctttcccatagcccaggttcttaccctcactgtgttctctgggggtcttggcttatatctgttataacccagcattgatcccctacaaaacaygcaatgaagcatctacagggtggaatttactgcctcctctgtcattagcaatccttatgtgcagcagactcattaaaatcaggaaaaaacaagaagtttaagggtcattttttcatgcctgcatctgcaacacgccatgaatagattatgtgaaaattgagggttaggtgtgttgagtc

SEQ ID NO: 14610 - DNA, 600 bp, Chicken  19866894220092_2
ttttgcaagcagcagctcagaaaccaatagttctactggtccattggcatataaatatgaatcagagatgagtgtgctgggggaagagatttattaactaatttgtcattagcagtttggaggatctgactcctctctctccagcactctcctggttccctgctgttgtagctgttccyctgttgccatcctggcagccttgtgtttctttcccatagcccaggttcttaccctcactgtgttctctgggggtcttggcttatatctgttataacccagcattgatcccctacaaaacaygcaatgaagcatctacagggtggaatttactgcctcctctgtcattagcaatccttatgtgcagcagactcattaaaatcaggaaaaaacaagaagtttaagggtcattttttcatgcctgcatctgcaacacgccatgaatagattatgtgaaaattgagggttaggtgtgttgagtcctttttctcattaaacacttgttacacatatcatatcaatggggagatgtcaaagccacagcctgcagcatcccaatgaatcattttatgttcatcctggataaygtctaatgactttgat

SEQ ID NO: 14611 - DNA, 600 bp, Chicken  19866894220092_3
atcccctacaaaacaygcaatgaagcatctacagggtggaatttactgcctcctctgtcattagcaatccttatgtgcagcagactcattaaaatcaggaaaaaacaagaagtttaagggtcattttttcatgcctgcatctgcaacacgccatgaatagattatgtgaaaattgagggttaggtgtgttgagtcctttttctcattaaacacttgttacacatatcatatcaatggggagatgtcaaagccacagcctgcagcatcccaatgaatcattttatgttcatcctggataaygtctaatgactttgatggtgtcttgcagtgcgtgtgcgctaaagatcccttgcattctgattccagattaatttcarcgattgcatattctgacacctaattgtattgacttgaaaataggatcattgggatgtggaaaccgctgcacggctttgcagaaagattccattacgcaatagggcatttcaatccactctgaattatttagccgactccaggcacgaccgtccatttctcagcagtctggacagctcttttttatagccctacgaatatctggcagggaggagagcaggaggt

SEQ ID NO: 14612 - DNA, 600 bp, Chicken  19866894220092_4
cagcagactcattaaaatcaggaaaaaacaagaagtttaagggtcattttttcatgcctgcatctgcaacacgccatgaatagattatgtgaaaattgagggttaggtgtgttgagtcctttttctcattaaacacttgttacacatatcatatcaatggggagatgtcaaagccacagcctgcagcatcccaatgaatcattttatgttcatcctggataaygtctaatgactttgatggtgtcttgcagtgcgtgtgcgctaaagatcccttgcattctgattccagattaatttcarcgattgcatattctgacacctaattgtattgacttgaaaataggatcattgggatgtggaaaccgctgcacggctttgcagaaagattccattacgcaatagggcatttcaatccactctgaattatttagccgactccaggcacgaccgtccatttctcagcagtctggacagctcttttttatagccctacgaatatctggcagggaggagagcaggaggtcgctraaaccgtagcagtgcctgcagctgctgtgcagcacgccacctccataggcctgggatgggatgggcttaagc

SEQ ID NO: 14613 - DNA, 542 bp, Chicken  19866894220092_5
atgactttgatggtgtcttgcagtgcgtgtgcgctaaagatcccttgcattctgattccagattaatttcarcgattgcatattctgacacctaattgtattgacttgaaaataggatcattgggatgtggaaaccgctgcacggctttgcagaaagattccattacgcaatagggcatttcaatccactctgaattatttagccgactccaggcacgaccgtccatttctcagcagtctggacagctcttttttatagccctacgaatatctggcagggaggagagcaggaggtcgctraaaccgtagcagtgcctgcagctgctgtgcagcacgccacctccataggcctgggatgggatgggcttaagcaaacccagagcagcccctggggtcaccttctggctggtgccttgaaataagcaaggtgaggggctggaacccttctgccttctgatcaactggctgcaaatagagcactaagcacaatgcggagggactttcagaacagggctcttcaagctgatgcctcccagtctgtg

SEQ ID NO: 14614 - DNA, 580 bp, Chicken  19866894220097_1
tgtgacagtccagatggaggaggagctctctgtcttcaccaggggtgtatcctgcatagcatcccagacttccagatcagggtaaagtgccctgaggataactgatctgccaattaaaggcagatgtaaagaaagcgttgaggacctcagccttctccttatcttcagtggtcacattccccactgcatcaaataaaggatgaaaattctccttggttcttctcttaccattgatatatttgtaaaaggatttcttattctctttttctgcagtggccaatctgagttcaagttgggctyttgccctgctaacttccaccctgcataccttagcaatttccatgtaatctccccaagtagcctgtcccttcttccagaggacatagactctctttttcttccggagtctcaacaatagttcccggttcatccacaccggtcttcttcccctatggcttgccttatggcattcaggaacagcctattcttgtgcctttaagatttccaccttgaggagcatccaggcttcctggacccctttacacttaaggagcaactcccaagggacccctgcaacaag

SEQ ID NO: 14615 - DNA, 600 bp, Chicken  19866894220104_1
taaggcctttgacacagtctaccaccacatctttttctccatatggggaagataaagatttaacgtgtggattgtttgatggattagaaactggttgcgagattgtacccagggagtggtggtcaatggctcaatgactatgtggggatcagggacgagtggtatccctcaggggtcagtcctggaacagactctttagcagggtctgttgtgatagaacaagggaaaatggttacaaactacaagagggaagatttagattgggtgtaaggaagttttttacactaaggctggtgaggscctggcacaggttgcccagagaggcagtgggtgcctcatccctgcagacattcaaggtcaggctggaccaggctctgagcacctgatggagctgtagacgtccctgttgattgcaggggagttggactagatgacctttaagggccccttccaactcaaatgattctgtaattctatgattgcagttcttcacctgctccatcactctccattctcccagcctttctcttttcctcctctgcgttccctctgggtgaccttatttacacatttttgcatatgtaatgttctgctgatgac

SEQ ID NO: 14616 - DNA, 600 bp, Chicken  19866894220104_2
gattctgtaattctatgattgcagttcttcacctgctccatcactctccattctcccagcctttctcttttcctcctctgcgttccctctgggtgaccttatttacacatttttgcatatgtaatgttctgctgatgactcagaatgatcactttgctccctgcctgtcctgtgctgtccaaattaattcactctgtctttctgacagcactttgtggatacccacttactggcttcagctcaacacaatcaatgcagagtttttaatcgtctcttgctttctcttctctcctaccttcmttgacgtttctgagctttcctaccatcctcccgacacctggctcctctctgacttggcatccctctaaacagcagggccctgccaaaaactagccagtccttcctgcagaatatttccaagatccagctcctcctccctgtctacctgaaatcctctagagcgcycaggttttctgagcagtcagatgactgccaagcctccctgttccctcttaaaaactctatcatgctacattgctaccagcagcaacatacttgatgtctactgctgttatccagcatttgccttcatgactrtta

SEQ ID NO: 14617 - DNA, 600 bp, Chicken  19866894220104_3
tgtcctgtgctgtccaaattaattcactctgtctttctgacagcactttgtggatacccacttactggcttcagctcaacacaatcaatgcagagtttttaatcgtctcttgctttctcttctctcctaccttcmttgacgtttctgagctttcctaccatcctcccgacacctggctcctctctgacttggcatccctctaaacagcagggccctgccaaaaactagccagtccttcctgcagaatatttccaagatccagctcctcctccctgtctacctgaaatcctctagagcgcycaggttttctgagcagtcagatgactgccaagcctccctgttccctcttaaaaactctatcatgctacattgctaccagcagcaacatacttgatgtctactgctgttatccagcatttgccttcatgactrttagtgctccttagcttgtgtatggctttttgttgcatttaaatgtgtccttgggacgtatatacactgctgagcatgggactctcccttggtggcattctttcagcgtgcttagcaagatgagaccatggcttgtgtttgctcctgtgatagagcctgtaatgaggg

SEQ ID NO: 14618 - DNA, 600 bp, Chicken  19866894220104_4
tcmttgacgtttctgagctttcctaccatcctcccgacacctggctcctctctgacttggcatccctctaaacagcagggccctgccaaaaactagccagtccttcctgcagaatatttccaagatccagctcctcctccctgtctacctgaaatcctctagagcgcycaggttttctgagcagtcagatgactgccaagcctccctgttccctcttaaaaactctatcatgctacattgctaccagcagcaacatacttgatgtctactgctgttatccagcatttgccttcatgactrttagtgctccttagcttgtgtatggctttttgttgcatttaaatgtgtccttgggacgtatatacactgctgagcatgggactctcccttggtggcattctttcagcgtgcttagcaagatgagaccatggcttgtgtttgctcctgtgatagagcctgtaatgagggtgcaaaggcatattacttggaaacctaaattattaagacttgttatttgagtttctgggaacagtgaatgtaatactggttttagtgcttgcaaatattgtttgtaagcttccatttcccaggcacgttaca

SEQ ID NO: 14619 - DNA, 600 bp, Chicken  19866894220108_1
atataaaattgtagtggatttgttgtaggggggtgatagtttagcttcagaagataaaatgctccttttggtgtttatcactgactgtgtggtgttctggtctggtttgtagactattttctaggatgactgatttctcaagtagttgtctgcagtcagagagatgtgtggggctaaagcaggagcttcatctgatgataacgcattttgccaattgggtgtcgataaacataagaacagtagtaggagctgtagggctgtacctaagctgtaccaatgcttttaaatacagtctcatawtatgaataacactggagtgctcctgagccagtcagcctgaaagtacagcaagcactgcagcatctgttggagaacacccaatggcacyggcttgaaaggcaagttttagataatgctcaaggggctgcagtgctgtaagcactcgtcttccctctgccctcatcactgtatgtgattgcaagatgtttgtggtaaggtagtgcccagaggctttatacctaacttctagtgcttatggtaggagcataaattgagactctaaggctcactttgaatttggtggagagagaaatgcatttt

SEQ ID NO: 14620 - DNA, 600 bp, Chicken  19866894220108_2
gtggtgttctggtctggtttgtagactattttctaggatgactgatttctcaagtagttgtctgcagtcagagagatgtgtggggctaaagcaggagcttcatctgatgataacgcattttgccaattgggtgtcgataaacataagaacagtagtaggagctgtagggctgtacctaagctgtaccaatgcttttaaatacagtctcatawtatgaataacactggagtgctcctgagccagtcagcctgaaagtacagcaagcactgcagcatctgttggagaacacccaatggcacyggcttgaaaggcaagttttagataatgctcaaggggctgcagtgctgtaagcactcgtcttccctctgccctcatcactgtatgtgattgcaagatgtttgtggtaaggtagtgcccagaggctttatacctaacttctagtgcttatggtaggagcataaattgagactctaaggctcactttgaatttggtggagagagaaatgcattttttgaagcagtttatcatctttcatttaatataaaaggaacctggrctgactagcctcctattctagacatctcaattctgtctagaaa

SEQ ID NO: 14621 - DNA, 600 bp, Chicken  19866894220108_3
cagcaagcactgcagcatctgttggagaacacccaatggcacyggcttgaaaggcaagttttagataatgctcaaggggctgcagtgctgtaagcactcgtcttccctctgccctcatcactgtatgtgattgcaagatgtttgtggtaaggtagtgcccagaggctttatacctaacttctagtgcttatggtaggagcataaattgagactctaaggctcactttgaatttggtggagagagaaatgcattttttgaagcagtttatcatctttcatttaatataaaaggaacctggrctgactagcctcctattctagacatctcaattctgtctagaaatatctttgatgaaggcttttggatagatgtgcttcttggagccattccttgagtctctgtggagtagaaggcagagcctgttcctgcccagagatgctcacgggcttcagactgggaactgagaatagayggctttgagcaggtgctctgtagtgaaaaggaggagagggaggatggattgcagctttgagcaattttgtatagtaaggagaaaagaagactttacttaattgcacgctgtgtaaagggcttccata

SEQ ID NO: 14622 - DNA, 600 bp, Chicken  19866894220108_4
ctaacttctagtgcttatggtaggagcataaattgagactctaaggctcactttgaatttggtggagagagaaatgcattttttgaagcagtttatcatctttcatttaatataaaaggaacctggrctgactagcctcctattctagacatctcaattctgtctagaaatatctttgatgaaggcttttggatagatgtgcttcttggagccattccttgagtctctgtggagtagaaggcagagcctgttcctgcccagagatgctcacgggcttcagactgggaactgagaatagayggctttgagcaggtgctctgtagtgaaaaggaggagagggaggatggattgcagctttgagcaattttgtatagtaaggagaaaagaagactttacttaattgcacgctgtgtaaagggcttccatactccagagacttggtaatattacaatgaggagatcctgacctggaggtgatttatttcagctatttttctttcatccatttttacagaaaatacttcttgaaaatggttctgtcaaaaaacccaggcatccatttcatagtttatacagacaaaaccactgttggcacaacac

SEQ ID NO: 14623 - DNA, 600 bp, Chicken  19866894220115_1
gacagaaaagtaagtggcttgtcttaatgtcatttattcgggcagctccagtaagttactctttcattgtattttttcttcttaatttaaccatgttaaattatgtttttttatgtgtatgtgttaaagtttcctgatagcattgctaatgtagttgtattattacttcagtaggtacgaaactaccttactcgattgagggaacttgttagaagatttctcttccttatttagaagagaattaaaaacacttaaaagcaggagatgcagaaagctgtcttctagcagctctcaagttgygttttgaaacagtgggtttttgtgattaatttagcgttagtttaactgtgccataatgtgtgatatttgaagttctgtggttcaactttccaaagttgtttttgttatttttggacttctttaggctactgcatctttccatgaatattcagcagctcctctttttcttaataacaaccaagttagttttgctggaaatgaaaaagtttataaaccaacataatcccatatgcacttgagttatcaagttcagattgtattaagtactgttatacaggtctagtataatatgttgttgaa

SEQ ID NO: 14624 - DNA, 600 bp, Chicken  19866894220115_2
gaattcaattaagatactgaaatgtgagtgtaattagcttgcaaacgcaagaacttgtatgaagagttgtctagttgtcctcatttccttaatttgttggagttttttttaaagaacatagatgttataattagctattgttgcatggcatttcatgcttggtctcagaactggagcttctgctgagctgaaattgaagctttacttttcagtccaggggtatggattactaatgacctattctgagataatcaaataaaaacatatcaattttatgaaataacaacgtggttttttttmctgcttgttgcattgcatgtgtttattgatactgtaaattagggacttagtgtaatttgtagaacctgtaacattgtaaataaatatttttatgttgaaatcaagacaaactactgcaattaagacatgcataattagcatttcataatttgcacttccttaatgaaatatattactaatgaactatatcattagtgattaatgaaaaatgttccaagctaacaacaaaatgtctgcaaggtgccttccttttcttacaaactttcttcctgatgcttcttaatctctactttatgaagt

SEQ ID NO: 14625 - DNA, 600 bp, Chicken  19866894220116_1
ggttacagacacttctgtgagatgaaaacttctcccttgccaggatacagtgtgcataaatccaaccactcctgtgctagagcagacaagaccagagtctgcctcaagcagctccatttctttctctaactaggaaaatgcacacttgaggaagagctgtcgttaagtagccctcctgaatcccattgaaaaggaaataataaaaaactaccggggcaaaatgacagcaaagcatatgatatgggcagacagccttctggaatccttctggaaaaaagaaatttagccagcatgacctgyaagtcatcaagaaaaacatactgaagggaattatgatctcatttgtatagggacttttctcactccttccaagctattcttgataaataagatgataaataagcagttgtcagtaaaaagagtgctaagtgaggaggaaaattaaaagtgaaaataaggcacacgtcttacaaggccaaactaccaacataaggaaataaatatctaaaccaacatgaacattttgtcctcagtggcaagatgcaggcgtaatagttaaaattactggaaaaaaaggactttgtattccaaatgctcaag

SEQ ID NO: 14626 - DNA, 600 bp, Chicken  19866894220117_1
ttattgaggttggtttgaattctaagctccctcttgtcatccttcccggattttatacatttattccttcttgtataacccaagatattaatgaaaatcttgaacattgggtggcttgcttaaaagttccttaggagaagtatccctagtattaaactaataatccttcagttagttatttgctcttctgtagtattttatttagatcacatttcaattggattttagctactattttttcaagttttctcaattcgtctttgtgagttctgttacactattaatatttacttttttttwaaacatttttcaaagtgctgtcttctcacagtaactttaaaattacttttcacatttaaatctttgaattgatcagaattaactctgaactgactttcttcttatttaccttctctgtataaatccagattcttcactgcttctttccaaagaaattttggacagcctgtgctagcattactaattagcattattaatctggtaaattttgtccttgttgacctgtgctcttctatttactaactatttaaaagatttctaatttgcttattcttgatttagtggtcagattaaaaatac

SEQ ID NO: 14627 - DNA, 600 bp, Chicken  19866894220122_1
gcttggagagcactgctctcttaaatgagttaatgaaagacacccaaaaacacccttcgtgactgtggttatgtactgagcagtcagtaaacccccgctaagatttattgggtaaaatccatgggagtggtggaaaatgaggaaagaaagagcagtctatatgtctgttgccagaactttaatgccttcctatcagctccagtgcttttctggctgccacttgtaagatgctttggatattccctgaagtttgtccccctcagccagcaccatgggttttgttgctacccatcttaacamgwcctcctgcttgatcttcacatcgtctctcttccgacttccactcttctctgtgatagaacagctctccttcaacagaaagggctgtgtaatttttttctttcatttaacactttttgctatgtttcgctggttcacytgagytcaggcgtcacctcgttttggcttggaagggatgtcccatctccaagaatcattrccctccatgaaaactgatacactcaacgttaagttaggcactcactgcccactgagctaaattattccactggccatgttgtaaggagctttcttcttgtg

SEQ ID NO: 14628 - DNA, 600 bp, Chicken  19866894220122_2
ttggagagcactgctctcttaaatgagttaatgaaagacacccaaaaacacccttcgtgactgtggttatgtactgagcagtcagtaaacccccgctaagatttattgggtaaaatccatgggagtggtggaaaatgaggaaagaaagagcagtctatatgtctgttgccagaactttaatgccttcctatcagctccagtgcttttctggctgccacttgtaagatgctttggatattccctgaagtttgtccccctcagccagcaccatgggttttgttgctacccatcttaacamgwcctcctgcttgatcttcacatcgtctctcttccgacttccactcttctctgtgatagaacagctctccttcaacagaaagggctgtgtaatttttttctttcatttaacactttttgctatgtttcgctggttcacytgagytcaggcgtcacctcgttttggcttggaagggatgtcccatctccaagaatcattrccctccatgaaaactgatacactcaacgttaagttaggcactcactgcccactgagctaaattattccactggccatgttgtaaggagctttcttcttgtgcc

SEQ ID NO: 14629 - DNA, 600 bp, Chicken  19866894220122_3
aggaaagaaagagcagtctatatgtctgttgccagaactttaatgccttcctatcagctccagtgcttttctggctgccacttgtaagatgctttggatattccctgaagtttgtccccctcagccagcaccatgggttttgttgctacccatcttaacamgwcctcctgcttgatcttcacatcgtctctcttccgacttccactcttctctgtgatagaacagctctccttcaacagaaagggctgtgtaatttttttctttcatttaacactttttgctatgtttcgctggttcacytgagytcaggcgtcacctcgttttggcttggaagggatgtcccatctccaagaatcattrccctccatgaaaactgatacactcaacgttaagttaggcactcactgcccactgagctaaattattccactggccatgttgtaaggagctttcttcttgtgcctatacacagctcctgagaggtacctaatacttcttggtaatgctctggacctccatctgcttgttcactattagtcctatgtcacacctactagcactttgcagatatctcagatgctcaggatacctcccttatca

SEQ ID NO: 14630 - DNA, 600 bp, Chicken  19866894220122_4
agaaagagcagtctatatgtctgttgccagaactttaatgccttcctatcagctccagtgcttttctggctgccacttgtaagatgctttggatattccctgaagtttgtccccctcagccagcaccatgggttttgttgctacccatcttaacamgwcctcctgcttgatcttcacatcgtctctcttccgacttccactcttctctgtgatagaacagctctccttcaacagaaagggctgtgtaatttttttctttcatttaacactttttgctatgtttcgctggttcacytgagytcaggcgtcacctcgttttggcttggaagggatgtcccatctccaagaatcattrccctccatgaaaactgatacactcaacgttaagttaggcactcactgcccactgagctaaattattccactggccatgttgtaaggagctttcttcttgtgcctatacacagctcctgagaggtacctaatacttcttggtaatgctctggacctccatctgcttgttcactattagtcctatgtcacacctactagcactttgcagatatctcagatgctcaggatacctcccttatcacagga

SEQ ID NO: 14631 - DNA, 600 bp, Chicken  19866894220122_5
cagtgcttttctggctgccacttgtaagatgctttggatattccctgaagtttgtccccctcagccagcaccatgggttttgttgctacccatcttaacamgwcctcctgcttgatcttcacatcgtctctcttccgacttccactcttctctgtgatagaacagctctccttcaacagaaagggctgtgtaatttttttctttcatttaacactttttgctatgtttcgctggttcacytgagytcaggcgtcacctcgttttggcttggaagggatgtcccatctccaagaatcattrccctccatgaaaactgatacactcaacgttaagttaggcactcactgcccactgagctaaattattccactggccatgttgtaaggagctttcttcttgtgcctatacacagctcctgagaggtacctaatacttcttggtaatgctctggacctccatctgcttgttcactattagtcctatgtcacacctactagcactttgcagatatctcagatgctcaggatacctcccttatcacaggagccctgtgtttagtagtagaatccagatctagaccttggctgatgatggtggtgt

SEQ ID NO: 14632 - DNA, 599 bp, Chicken  19866894220126_1
  misc_feature (1)..(13): n is any nucleotide
nnnnnnnnnnnnnattacgtgtgtattacgtgtgtgattacggctcacattaaaattgacagcaatattttgcaacattcgcagcacttcatggaaaaaggaaaggaaatttcccttaacgtgccctttctcactctttacagactccacaccagtacattggacattttggattctctggctgatctcttttggaaaaattgctgatggtaatttttagacacctgttatttttcactgattctttgcaaataagaatgcattttttaaactaaaacacgttagcttggttaaagagcyattttccccatttttgcacaaataccattgtgttgaaaatagagtcctagggcactggttctctgcttgcctttgtaaatcgactatgctttttgttgttggtgttgttgtattccctccctcttccctgtcttcttaatatttctatggctagaagacaaaactgagctggttattgagacagtatcatttatttgtgttctttaagcaggctgcagcagagccagaagataatgggcacctcatttattcaggctttgaatgatcatatttaattcccagtgacagctgtcttcatt

SEQ ID NO: 14633 - DNA, 600 bp, Chicken  19866894220128_1
aaactcaatagcccttgaaaagatttgtcctgtcttaaatgaagtgactcaacacaaagttgatacgcatgcttattctcctctccttcccagccctgtaacaacatagaacaaatttttcaaggatatactacatgaagtctgcattctgaaagatttgttataaatgggttcttataagacaaatcgtgtagaataaattgttttcctaaagagccaaatgcagctctttcagtgaagtatagacagaagttattgatcagagagcgctgtttggttttgttttaatttctggagtcrtacaattcataagcactatctcattctatgaccatttgtttcttcctgaactctcttcatattttgtgaggctaagagggtctgaactaartgaatcaatttcaacacattttcagaaaaagtattccagggaaaaaacatcggttggagttatgtgcgttgttaatactttctatcctgaaagacaaggcttggaagaggacaaagggggaccattgaggttcttgctctcttccctcctccccaccctgggactgttgtaaatgcctgatcaaactgtctgaggatgtgttattttct

SEQ ID NO: 14634 - DNA, 600 bp, Chicken  19866894220128_2
agccctgtaacaacatagaacaaatttttcaaggatatactacatgaagtctgcattctgaaagatttgttataaatgggttcttataagacaaatcgtgtagaataaattgttttcctaaagagccaaatgcagctctttcagtgaagtatagacagaagttattgatcagagagcgctgtttggttttgttttaatttctggagtcrtacaattcataagcactatctcattctatgaccatttgtttcttcctgaactctcttcatattttgtgaggctaagagggtctgaactaartgaatcaatttcaacacattttcagaaaaagtattccagggaaaaaacatcggttggagttatgtgcgttgttaatactttctatcctgaaagacaaggcttggaagaggacaaagggggaccattgaggttcttgctctcttccctcctccccaccctgggactgttgtaaatgcctgatcaaactgtctgaggatgtgttattttctgtctgtgtctaagagcacaggataaccaatgaggcttctcccattagtatatttctttatccctctttagaagtattgttttttatctagt

SEQ ID NO: 14635 - DNA, 600 bp, Chicken  19866894220129_1
attttttcaccaagaatcagggcagtgttcaccaagaatggggaagagttattgtctaatgcttctttaatagtattataaataatactcattatattttgcattgttcatttttctatgtgtctttcttaaagtcagatgtaaacagctaccaattatccatcagagcttagaacagtaattaagtcaaattgtttaacctttttttggtgattggagctctgacctgtgttctaggaatgagtcactctgagcagtagggaatgaaggttgtgccggatataaatatacagtattgamtcattatcttccttttttcattatatcaaaaattcattcatattttagatatttctttttcatttctacaaactctaatcacattgttcagctgcctttgactccgtgacatattcagttgcacagagatttgcaaggtaatatgtacaggtacaggaagttgtcatttgctggcactgtgtgcccagtatggatcttgttgtaaaggaagagcagtgtcacatactctcagttgcacactacattgtttttgaaatttttacttctttgtggttgtttttctaactgtttaatccaaag

SEQ ID NO: 14636 - DNA, 600 bp, Chicken  19866894220130_1
actgtcagaggtttctctgtgtcactgtgaccttgggtatgtctacttgtgatgattctgcaccgaatactacaagggaaccagcatacaacagatggagtgacagaacagggtgctacaagcaggaacccatgctttctgaacctgtgtgtgaaccatgactattttctgcatagcgggtgctatgcttcctgcatagcaggaaacaggacgaggcttggaaccacacagagctagaccacaagtgtctcaagaggaggaataagcaagtaggggagcctgggcacacggtagtggacrtatgcttgtaactcccatgacctatgagagtatctgagtgatattatttcagggagtttactgcgtagggatgcataggtgtttttagggagacattatcatttttaaagtgttttgaatgatgcttgttctgttgtatttctgatcctgagccattattaactactggttaataatattaattaatcagtaaatagttttgagaatgatgtgatttagatcacatagattgaaaatattttccttgaaacagttattgacaacatgataaatgacagttatgcagagtaatatggatat

SEQ ID NO: 14637 - DNA, 599 bp, Chicken  19866894220132_1
  misc_feature (1)..(161): n is any nucleotide
nnnnnnnnnnnnnnnnnnnnnnnnnnnnnnnnnnnnnnnnnnnnnnnnnnnnnnnnnnnnnnnnnnnnnnnnnnnnnnnnnnnnnnnnnnnnnnnnnnnnnnnnnnnnnnnnnnnnnnnnnnnnnnnnnnnnnnnnnnnnnnnnnnnnnnnnnnnnnnnnnaatatctttaaaaatgaagttataaagcagactttatagtaaccattagcaatccaggaaaactttgattacgtattcaaatacagttaggttgtcacaaatctagtttatctccagtctcagtgaaatacttcataaygaggggtgcatctcttctactcctaattacttatagatctgttaactgttgtgcactgtgtaaggttcattctcatyggatcatgcttctgctctcctgttgacagttcctgtgttcctattcaagcattgctctgcccctggatcccctgtgttagatgtaagtggctggtgcwgtgcctgctgtgcctggagcagggtgcttggagcagtagggttgttgtggcactgttcagcagcaagggatgtgtgcttctctggctgtaggctcatactgcaatctgttgtagtgtggtcatt

SEQ ID NO: 14638 - DNA, 599 bp, Chicken  19866894220132_2
  misc_feature (1)..(84): n is any nucleotide
nnnnnnnnnnnnnnnnnnnnnnnnnnnnnnnnnnnnnnnnnnnnnnnnnnnnnnnnnnnnnnnnnnnnnnnnnnnnnnnnnnnnaatatctttaaaaatgaagttataaagcagactttatagtaaccattagcaatccaggaaaactttgattacgtattcaaatacagttaggttgtcacaaatctagtttatctccagtctcagtgaaatacttcataaygaggggtgcatctcttctactcctaattacttatagatctgttaactgttgtgcactgtgtaaggttcattctcatyggatcatgcttctgctctcctgttgacagttcctgtgttcctattcaagcattgctctgcccctggatcccctgtgttagatgtaagtggctggtgcwgtgcctgctgtgcctggagcagggtgcttggagcagtagggttgttgtggcactgttcagcagcaagggatgtgtgcttctctggctgtaggctcatactgcaatctgttgtagtgtggtcatttaggataatcttgtctgatttaaggaagctggagaggaagcagtggggacagtgcctctgccacatgacccattgag

SEQ ID NO: 14639 - DNA, 600 bp, Chicken  19866894220132_3
tgaagttataaagcagactttatagtaaccattagcaatccaggaaaactttgattacgtattcaaatacagttaggttgtcacaaatctagtttatctccagtctcagtgaaatacttcataaygaggggtgcatctcttctactcctaattacttatagatctgttaactgttgtgcactgtgtaaggttcattctcatyggatcatgcttctgctctcctgttgacagttcctgtgttcctattcaagcattgctctgcccctggatcccctgtgttagatgtaagtggctggtgcwgtgcctgctgtgcctggagcagggtgcttggagcagtagggttgttgtggcactgttcagcagcaagggatgtgtgcttctctggctgtaggctcatactgcaatctgttgtagtgtggtcatttaggataatcttgtctgatttaaggaagctggagaggaagcagtggggacagtgcctctgccacatgacccattgagtgttttgcactaagcacttatggtttccattctgaaacacttaaactaaataagggtggtgatgtggcattctgtgaacaggcccaagatctgttagtc

SEQ ID NO: 14640 - DNA, 600 bp, Chicken  19866894220137_1
gtgttcagcgctggagtcattccagggtagataaaatctgctgcttctttttccatgcaaagaacaaaaaacaaacaaaaaaaaaacacaacaaacccataaaaaatataaaacctcatttatactcttccactcctcctcaggcaaaaggttttggccactgttgagagacaggatttctttgttttgacccagaatgactttcccaatgcattttccaggtgatgggaattccttcctcctccctgccgccctcccacccgctccttcattaaagtcggtacagaaaccctgctgcasactggaagtgctcaacgaatgtggaggttggccatcmctgtagtgtttggttatcatctttgaaccgattaaaarcagataacgaggaggatcgttgaaattaacaaagaagaggagaaaaacagcagatgcrtccaaacgcagaaggaaatgcatccatcactttctgatccgctgccagggagcagggatctctttaagagcgtaattaaagaatatctttaatcaagtggcatggcaaagggaagggatgtttgaggggagctgtcagagctcagagccgcagccccagcagccggg

SEQ ID NO: 14641 - DNA, 600 bp, Chicken  19866894220137_2
ctgctgcttctttttccatgcaaagaacaaaaaacaaacaaaaaaaaaacacaacaaacccataaaaaatataaaacctcatttatactcttccactcctcctcaggcaaaaggttttggccactgttgagagacaggatttctttgttttgacccagaatgactttcccaatgcattttccaggtgatgggaattccttcctcctccctgccgccctcccacccgctccttcattaaagtcggtacagaaaccctgctgcasactggaagtgctcaacgaatgtggaggttggccatcmctgtagtgtttggttatcatctttgaaccgattaaaarcagataacgaggaggatcgttgaaattaacaaagaagaggagaaaaacagcagatgcrtccaaacgcagaaggaaatgcatccatcactttctgatccgctgccagggagcagggatctctttaagagcgtaattaaagaatatctttaatcaagtggcatggcaaagggaagggatgtttgaggggagctgtcagagctcagagccgcagccccagcagccgggctgtggttgggagcacaggggggctcggggctcccag

SEQ ID NO: 14642 - DNA, 600 bp, Chicken  19866894220137_3
caaaaaaaaaacacaacaaacccataaaaaatataaaacctcatttatactcttccactcctcctcaggcaaaaggttttggccactgttgagagacaggatttctttgttttgacccagaatgactttcccaatgcattttccaggtgatgggaattccttcctcctccctgccgccctcccacccgctccttcattaaagtcggtacagaaaccctgctgcasactggaagtgctcaacgaatgtggaggttggccatcmctgtagtgtttggttatcatctttgaaccgattaaaarcagataacgaggaggatcgttgaaattaacaaagaagaggagaaaaacagcagatgcrtccaaacgcagaaggaaatgcatccatcactttctgatccgctgccagggagcagggatctctttaagagcgtaattaaagaatatctttaatcaagtggcatggcaaagggaagggatgtttgaggggagctgtcagagctcagagccgcagccccagcagccgggctgtggttgggagcacaggggggctcggggctcccagacatcaaggcactcacatggagccaagctgcctccgcg

SEQ ID NO: 14643 - DNA, 600 bp, Chicken  19866894220137_4
tcctcctcaggcaaaaggttttggccactgttgagagacaggatttctttgttttgacccagaatgactttcccaatgcattttccaggtgatgggaattccttcctcctccctgccgccctcccacccgctccttcattaaagtcggtacagaaaccctgctgcasactggaagtgctcaacgaatgtggaggttggccatcmctgtagtgtttggttatcatctttgaaccgattaaaarcagataacgaggaggatcgttgaaattaacaaagaagaggagaaaaacagcagatgcrtccaaacgcagaaggaaatgcatccatcactttctgatccgctgccagggagcagggatctctttaagagcgtaattaaagaatatctttaatcaagtggcatggcaaagggaagggatgtttgaggggagctgtcagagctcagagccgcagccccagcagccgggctgtggttgggagcacaggggggctcggggctcccagacatcaaggcactcacatggagccaagctgcctccgcgctcaggttcgcccaaataccttttccatgaactaatcaaataggcatttatcagccaa

SEQ ID NO: 14644 - DNA, 600 bp, Chicken  19866894220140_1
tggaaaccagcctcaacaaacgcagagaaatgctgctgttccagaattatatgcaagatgtatctgatgtttccatcatatgtaagtctcatttctgttgtatatgcattgaaagctatcacatggggattgctgactgtcaccaaaggtattattattattatttaggttgagcacagatatgctgctaaaaatcatattttttttgtatgtcaaggtaatagattttgttatggaagtctgttatggggagctccacagcacaggattgctgagatttccaaactgctaactgcgcaytgagtttgcgttaattgaagtcatacagctgagacaaacttctgaatgcagtcctgagtagggtcaaccactctttttcttcaaacaagatcccaatgtttttgaaatctatgctgtcttccaggacaaattgtactacactagtgaccaagccattgctgccatagaaaagctgtccatcctgggttagcaatctgggagctgctaatggtcacaaagaagcaaccattgtcagggaaagcagtgctttgaaaggagtttgaagacaaccacttcttccattaccaagccactgtcaga

SEQ ID NO: 14645 - DNA, 600 bp, Chicken  19866894220158_1
ggtaagctatttttctgctctcgcaagaagccgattaatcggttagtttccaaatgagcagtcttatcatttacctgcttaggggaacaaagtgccaatagcagtgctgtttcaagaccgcttaaaatattttcagtatgctatgttcttgtttactgctttctgattgttcagacttgtacatgaactgactcaggctacctataagtaatcttctagctcttctagaaatgttcttctatatactaaaaaaaaccaaaactatttaagtgggcaggagttgaatcaaactatttgtaygtgagaatggagagttgtctttttcaatagagcaagttatgaaagagtatgaaacaactgaggactttaaaagggaattcactgtaaaaatgtgcatttgaatgttcgttgtataaggtaattcaaacttatttactgtcagtkcagtaccattgtgtttctcttctcaaattacaggtgagcgttcttacagaccaggtagaagctcaaggagagaaaatacgggacttagaaatctgtcttgaggggcatcagttgaaactgaatgctacagaagaaatgcttcaacaggtaaagatc

SEQ ID NO: 14646 - DNA, 600 bp, Chicken  19866894220158_2
gttcttgtttactgctttctgattgttcagacttgtacatgaactgactcaggctacctataagtaatcttctagctcttctagaaatgttcttctatatactaaaaaaaaccaaaactatttaagtgggcaggagttgaatcaaactatttgtaygtgagaatggagagttgtctttttcaatagagcaagttatgaaagagtatgaaacaactgaggactttaaaagggaattcactgtaaaaatgtgcatttgaatgttcgttgtataaggtaattcaaacttatttactgtcagtkcagtaccattgtgtttctcttctcaaattacaggtgagcgttcttacagaccaggtagaagctcaaggagagaaaatacgggacttagaaatctgtcttgaggggcatcagttgaaactgaatgctacagaagaaatgcttcaacaggtaaagatctggattggaaagctttttgcataatctcctttgagaaagacgagaacatactttctccgtttgcctgcatgtgggagtgcctctggtagcaagagaaaacagaaagagaattgcctctttttattgttctcttgctactttgca

SEQ ID NO: 14647 - DNA, 413 bp, Chicken  19866894220158_3
cattgtgtttctcttctcaaattacaggtgagcgttcttacagaccaggtagaagctcaaggagagaaaatacgggacttagaaatctgtcttgaggggcatcagttgaaactgaatgctacagaagaaatgcttcaacaggtaaagatctggattggaaagctttttgcataatctcctttgagaaagacgagaacatactttctccgtttgcctgcatgtgggagtgcctctggtagcaagagaaaacagaaagagaattgcctctttttattgttctcttgctactttgcacactaygttttttgcaataaatatttctttgttttcctgttgcagaaatgttttattggctggttgcataatgctgtacgtggcagcatgtaaaatgaaacgattgtgcattatttgta

SEQ ID NO: 14648 - DNA, 600 bp, Chicken  19866894220161_1
atcccactgatagtctgttttgataaatgtgtggtgattacagaaaataatgctctcaattccagatggttgcggatttagtcatgggagaggtctctgtatacctagccaattattgattccctcacctgccttttcctttacatgtatatagtgtggtcgtcaacatttctagcagaattttagctatcaatttgtaaatctgtagaggcagtgtaaatctgcgttgggtttcaatatgttttcctctaaacatctgtgagctgttttagctaacattgtttgttcccacacaacttsgcaaatttgtagtctccatctaagaggaaaaaaacattcattcaagagctggaattgtatttttgtgtttaaccagagatctaagggatgctggcaaggctgatcctacaaaagctaaacttgttaatactgtgtaaattgatatttgtatactttttgttatttaagaggaatttctcattgaaactctcatttggagttgttgaggtcagtgggtatgtcaatctgtaattacttgctgaagtctgaaagatggctttgagtattttagtgytggtatggatcagagctgctaagttg

SEQ ID NO: 14649 - DNA, 600 bp, Chicken  19866894220161_2
aacattgtttgttcccacacaacttsgcaaatttgtagtctccatctaagaggaaaaaaacattcattcaagagctggaattgtatttttgtgtttaaccagagatctaagggatgctggcaaggctgatcctacaaaagctaaacttgttaatactgtgtaaattgatatttgtatactttttgttatttaagaggaatttctcattgaaactctcatttggagttgttgaggtcagtgggtatgtcaatctgtaattacttgctgaagtctgaaagatggctttgagtattttagtgytggtatggatcagagctgctaagttgagcagtggtgtgatgcttcgttactgctattttgtttctatacttcagatgttttatacaagagcacctcatgggtttgcatattttgaagtcccatttgaggaccygggactctcatatgtgcagccaaattttgttgttcccaaacatatccgctttatcatacttcaaattatggcatctttaactgtggtagcttcagatctgtggaaagaacaaacagtctctcccatgagatagtcagactgcttgagctaattttagtgtttcttat

SEQ ID NO: 14650 - DNA, 600 bp, Chicken  19866894220161_3
acaaaagctaaacttgttaatactgtgtaaattgatatttgtatactttttgttatttaagaggaatttctcattgaaactctcatttggagttgttgaggtcagtgggtatgtcaatctgtaattacttgctgaagtctgaaagatggctttgagtattttagtgytggtatggatcagagctgctaagttgagcagtggtgtgatgcttcgttactgctattttgtttctatacttcagatgttttatacaagagcacctcatgggtttgcatattttgaagtcccatttgaggaccygggactctcatatgtgcagccaaattttgttgttcccaaacatatccgctttatcatacttcaaattatggcatctttaactgtggtagcttcagatctgtggaaagaacaaacagtctctcccatgagatagtcagactgcttgagctaattttagtgtttcttataaaactagcagttaggagtgctgttgcagagcatttcagcagaaatgttgagctgaagtggtacatgctgttgcagaaggagtcagttttgttcccctcctcctcatgtctgctctgccacatttcagcatat

SEQ ID NO: 14651 - DNA, 600 bp, Chicken  19866894220162_1
gactagaagcttttcttgctcaataactgttgtctgtgtcacagtgacaaatgctatcatttcattgtgtggtttttttgttttgtttcttacctgtgcagttaatgtgggactctgtaatacttgtagctgtaaaactgcctgcctcaaaaaaggtggagagaaataacttatgccctgtgaatcaaacactgtcttaattctggcatgccctcagacattacatcaccactcagccttttcttttgacattacgttggtataggagagtttcaggaatgcaccactcacggcactgcrggctgctccaaaccctataaagttactgccttcattgtgttcaagtctgtgtactaaatagccctaggttgggacaacagagttttgacacagcagaattattacatgaacgtaacccttccaagagcagaattagctgcataggtgccagaggtcttatatggctgtacactgcttttataaagaaacagaacttttcttttgtattcctgtgtcatctgatgtaaggaccatttatctttggaaataatacttatcagtgtctagcttgaaaaagaaaaaagacaaatyctttttcta

SEQ ID NO: 14652 - DNA, 600 bp, Chicken  19866894220162_2
ggcactgcrggctgctccaaaccctataaagttactgccttcattgtgttcaagtctgtgtactaaatagccctaggttgggacaacagagttttgacacagcagaattattacatgaacgtaacccttccaagagcagaattagctgcataggtgccagaggtcttatatggctgtacactgcttttataaagaaacagaacttttcttttgtattcctgtgtcatctgatgtaaggaccatttatctttggaaataatacttatcagtgtctagcttgaaaaagaaaaaagacaaatyctttttctaagaagtgcattttgtttcctctacatagaagacttcttaatgaagagtagcttactgcagtcattactacttaatatatatgcaaagcagtcaaygtgcaaacattttgctatccttagataaaaagaaaactagcatatttgtctgtctgtctgaagttggcatctttaaagaattagtgatgaggtgatattttgtttttactttatctaattggcaggttaaatcacaggtatatgcataaagtcacatacgttatgcatctggctatgggatttagttattccccat

SEQ ID NO: 14653 - DNA, 545 bp, Chicken  19866894220162_3
gaattattacatgaacgtaacccttccaagagcagaattagctgcataggtgccagaggtcttatatggctgtacactgcttttataaagaaacagaacttttcttttgtattcctgtgtcatctgatgtaaggaccatttatctttggaaataatacttatcagtgtctagcttgaaaaagaaaaaagacaaatyctttttctaagaagtgcattttgtttcctctacatagaagacttcttaatgaagagtagcttactgcagtcattactacttaatatatatgcaaagcagtcaaygtgcaaacattttgctatccttagataaaaagaaaactagcatatttgtctgtctgtctgaagttggcatctttaaagaattagtgatgaggtgatattttgtttttactttatctaattggcaggttaaatcacaggtatatgcataaagtcacatacgttatgcatctggctatgggatttagttattccccatcactgtgggtgatagacatttgggaggctcttcagagtctgggccttgg

SEQ ID NO: 14654 - DNA, 600 bp, Chicken  19866894220177_1
cactgaaacctcacttctcacatcattaatctcctcagcctccaaacagcacaaaagccttgcagagcgttggtgtcacccacagcccagccaggagccttgtgcccagctgagttctgagtttggtactcttgcacctcaacactggaggccgggcccagcttactcctgactgtttcaacccatcctgcccattgtgctgctggaggaacaacctcatgcttgcaccgatggctgtatctccatgattcaagagaagtgcagcctatcatagaatcgtaagggttggaaaagaccacraggatccccaagtccaaccatcaacccatccccaccatgcccactgggcacctccctccatgcctggtagcatccagagctaaaatattcttaacaaggcgatgctttccaactgttaaggttggaaaagacctccaagatcaccaagtccaaccatcaactcatcaaccagaggcagaacgggtagaaataaagacacaacaattcatctcctatcgagatcataagaataaaacaaaacaaacaggaaaaaaaaaagtcacaaatcccaaagcaaaatctgacaaacatttttttttt

SEQ ID NO: 14655 - DNA, 599 bp, Chicken  19866894220179_1
  misc_feature (1)..(207): n is any nucleotide
nnnnnnnnnnnnnnnnnnnnnnnnnnnnnnnnnnnnnnnnnnnnnnnnnnnnnnnnnnnnnnnnnnnnnnnnnnnnnnnnnnnnnnnnnnnnnnnnnnnnnnnnnnnnnnnnnnnnnnnnnnnnnnnnnnnnnnnnnnnnnnnnnnnnnnnnnnnnnnnnnnnnnnnnnnnnnnnnnnnnnnnnnnnnnnnnnnnnnnnnnnnnnnnagagccttgttacaacgatgacatctgctgccctgtatttactgctattgtggtcacctatgggagcagtgcttggaaagaactgtggtgctrctgcgctatgtgctgcaccagcacagcgtactttggtgccccagagtcacatctggrgtgatttgtgtcgccgatgttttccttgagggaagtgagccaggagatggcaaaggacagagaattgattttccaaaggtaactgagttatctctgagtcactgacaagaagcaggaggtgccccaggacacagtagttctgtggggtgccagggatgcagcagtacaggctgcacatccctgctttgatttcctggaagctgggcttgctatctgaagggttgctttggttctttccgagg

SEQ ID NO: 14656 - DNA, 599 bp, Chicken  19866894220179_2
  misc_feature (1)..(150): n is any nucleotide
nnnnnnnnnnnnnnnnnnnnnnnnnnnnnnnnnnnnnnnnnnnnnnnnnnnnnnnnnnnnnnnnnnnnnnnnnnnnnnnnnnnnnnnnnnnnnnnnnnnnnnnnnnnnnnnnnnnnnnnnnnnnnnnnnnnnnnnnnnnnnnnnnnnnnnagagccttgttacaacgatgacatctgctgccctgtatttactgctattgtggtcacctatgggagcagtgcttggaaagaactgtggtgctrctgcgctatgtgctgcaccagcacagcgtactttggtgccccagagtcacatctggrgtgatttgtgtcgccgatgttttccttgagggaagtgagccaggagatggcaaaggacagagaattgattttccaaaggtaactgagttatctctgagtcactgacaagaagcaggaggtgccccaggacacagtagttctgtggggtgccagggatgcagcagtacaggctgcacatccctgctttgatttcctggaagctgggcttgctatctgaagggttgctttggttctttccgaggcagaccacctccagcaatgtaatgtcattgtccttttgggtttttctgtcctttgtc

SEQ ID NO: 14657 - DNA, 600 bp, Chicken  19866894220183_1
aaacggccttggaaccgaaagtacaaattctaaccctctgtggcattcatgtttgaaaactggtagaaatgcaactttcagcaaaagaagatcaccgatctttttttgctggcggtcactgtgagagtaattggatttcagacagttatttaaaaagaaaagcaagtaacccaacattgaagttcatttttgcctgtaggatttatctattcctctatattctgtagagaaacagagtagtcttaacatatgattcttcattatatgaagtcttctcaatactcaagaggaatgttagtyttcttaaggatacctactgtatttctgagtttctctatccctcacatatattatttgcataatacacgaacttagatctgagccataccctttatgtgaaagcatgggctttaaaaatatatatcataaaagcatattattctggatagtttgcagacttctgtgagatggagagggaatgctgagcagctttgaatttgccaaacagactttgagttttccaccgtagcctgtggggttatccatccgtccatttacttcgtactgctgaatgtttaacagtagtaccgagcacagtag

SEQ ID NO: 14658 - DNA, 600 bp, Chicken  19866894220183_2
ttcctggcattctgagatgttggtgaaccagacttgttttttttttttatgagatttgtgaaagggttgctgtcagaatcacagctgggtagctgcaggaattccagttatctaagggcaaaaaacgaataagtgggatcagacatttaaaacgtgcctggaagatgcttattccagctcttcttaaaaatgttctttcagaaatggcctaacatgaggttaaaatagctgcaggatagctatagtttctcagtgagtgagaaagatacacctttctttttcttcacttctaatgtattyrtattttgttttaactctgcagtgagaatgactgcctgtaggagagaattccttgtaactgcactgttttctctcagcttttactgattttcaaaccttgatctgtacatttatattttaacagtaatttacagcagcatctttagatgtagtctggccgggctttttgttttgtctggcttagattttgtctaaatgagagttgaataattgtaagaaatccagtaagcatgaaaaactcatattggaaggataaaatataaatgattattgcctaaggagtgatttaaccatgtgatg

SEQ ID NO: 14659 - DNA, 600 bp, Chicken  19866894220183_3
tcctggcattctgagatgttggtgaaccagacttgttttttttttttatgagatttgtgaaagggttgctgtcagaatcacagctgggtagctgcaggaattccagttatctaagggcaaaaaacgaataagtgggatcagacatttaaaacgtgcctggaagatgcttattccagctcttcttaaaaatgttctttcagaaatggcctaacatgaggttaaaatagctgcaggatagctatagtttctcagtgagtgagaaagatacacctttctttttcttcacttctaatgtattyrtattttgttttaactctgcagtgagaatgactgcctgtaggagagaattccttgtaactgcactgttttctctcagcttttactgattttcaaaccttgatctgtacatttatattttaacagtaatttacagcagcatctttagatgtagtctggccgggctttttgttttgtctggcttagattttgtctaaatgagagttgaataattgtaagaaatccagtaagcatgaaaaactcatattggaaggataaaatataaatgattattgcctaaggagtgatttaaccatgtgatgt

SEQ ID NO: 14660 - DNA, 600 bp, Chicken  19866894220183_4
gatctgtacatttatattttaacagtaatttacagcagcatctttagatgtagtctggccgggctttttgttttgtctggcttagattttgtctaaatgagagttgaataattgtaagaaatccagtaagcatgaaaaactcatattggaaggataaaatataaatgattattgcctaaggagtgatttaaccatgtgatgtgtggtctgaaggcgttcgtgctagtgtgtctaagttgaaagcatctgttacaagtgtgtaaaaataatgtgtcctgaataatgcagcatctgattgtyttgggakagttatggttattttccaaatgatttttatctttgtcgtaggttatcggtacacctcagagaccttcagtgccaaatactatcctggtaggaagtccacatacacctaacacacattttgtatcacaaaaccagactgcagattcttcgccgtggtctgctgggtgagcaaaataaaagttacaaaggatcaataaattacttagaacttctgctctmaatgtttgctgtgatagtgtatgtgctcctcatgctagcagtgtgggaaacacagtctgtttaccttcgaatcag

SEQ ID NO: 14661 - DNA, 600 bp, Chicken  19866894220183_5
acatttatattttaacagtaatttacagcagcatctttagatgtagtctggccgggctttttgttttgtctggcttagattttgtctaaatgagagttgaataattgtaagaaatccagtaagcatgaaaaactcatattggaaggataaaatataaatgattattgcctaaggagtgatttaaccatgtgatgtgtggtctgaaggcgttcgtgctagtgtgtctaagttgaaagcatctgttacaagtgtgtaaaaataatgtgtcctgaataatgcagcatctgattgtyttgggakagttatggttattttccaaatgatttttatctttgtcgtaggttatcggtacacctcagagaccttcagtgccaaatactatcctggtaggaagtccacatacacctaacacacattttgtatcacaaaaccagactgcagattcttcgccgtggtctgctgggtgagcaaaataaaagttacaaaggatcaataaattacttagaacttctgctctmaatgtttgctgtgatagtgtatgtgctcctcatgctagcagtgtgggaaacacagtctgtttaccttcgaatcaggagcact

SEQ ID NO: 14662 - DNA, 427 bp, Chicken  19866894220183_6
gtgtgtctaagttgaaagcatctgttacaagtgtgtaaaaataatgtgtcctgaataatgcagcatctgattgtyttgggakagttatggttattttccaaatgatttttatctttgtcgtaggttatcggtacacctcagagaccttcagtgccaaatactatcctggtaggaagtccacatacacctaacacacattttgtatcacaaaaccagactgcagattcttcgccgtggtctgctgggtgagcaaaataaaagttacaaaggatcaataaattacttagaacttctgctctmaatgtttgctgtgatagtgtatgtgctcctcatgctagcagtgtgggaaacacagtctgtttaccttcgaatcaggagcacttaaacatttaagtgtactgtactaaaatcagatacagtcacacaa

SEQ ID NO: 14663 - DNA, 600 bp, Chicken  19866894220193_1
ctctgaacagctgtcctgtatttgtgctgttgaagatctgtaaaaccttaacttgttctgaagtgtcctaaaaaaagcaaacaaagtgatttctttgaacagagtgaattcttttgtttctgtctcaaactgttgggcttgtaaatcccattttagtcctgtcagttacttcaacaagtcgatagcgttcttgtagcagtcatctgacaggatgcttgtccatgcaggtggatgggcataactgttatcactgaaagtcatttctgaatgcagaaggaatagtgggtatttagttttackaasagtctttgtacgtttagtgtttcatatatgcagattgcaacaatattttgtrcagttagawagtgcacttttctctcattgcaatgctgccaaatgagattaatgttataggcattattaatgtgtttcctattttatgaaagacagaattctgcgtggattttttctggtcagtcaacttaccacggaggctattcagtgaaatgcttcttcagtaagacctcttaaaaaactatgtaagtcatctgagaagcaaatttatgagcaggcctaggagccttactgtaaatgctcgtg

SEQ ID NO: 14664 - DNA, 600 bp, Chicken  19866894220193_2
tgaacagctgtcctgtatttgtgctgttgaagatctgtaaaaccttaacttgttctgaagtgtcctaaaaaaagcaaacaaagtgatttctttgaacagagtgaattcttttgtttctgtctcaaactgttgggcttgtaaatcccattttagtcctgtcagttacttcaacaagtcgatagcgttcttgtagcagtcatctgacaggatgcttgtccatgcaggtggatgggcataactgttatcactgaaagtcatttctgaatgcagaaggaatagtgggtatttagttttackaasagtctttgtacgtttagtgtttcatatatgcagattgcaacaatattttgtrcagttagawagtgcacttttctctcattgcaatgctgccaaatgagattaatgttataggcattattaatgtgtttcctattttatgaaagacagaattctgcgtggattttttctggtcagtcaacttaccacggaggctattcagtgaaatgcttcttcagtaagacctcttaaaaaactatgtaagtcatctgagaagcaaatttatgagcaggcctaggagccttactgtaaatgctcgtgtct

SEQ ID NO: 14665 - DNA, 600 bp, Chicken  19866894220193_3
ttctgaagtgtcctaaaaaaagcaaacaaagtgatttctttgaacagagtgaattcttttgtttctgtctcaaactgttgggcttgtaaatcccattttagtcctgtcagttacttcaacaagtcgatagcgttcttgtagcagtcatctgacaggatgcttgtccatgcaggtggatgggcataactgttatcactgaaagtcatttctgaatgcagaaggaatagtgggtatttagttttackaasagtctttgtacgtttagtgtttcatatatgcagattgcaacaatattttgtrcagttagawagtgcacttttctctcattgcaatgctgccaaatgagattaatgttataggcattattaatgtgtttcctattttatgaaagacagaattctgcgtggattttttctggtcagtcaacttaccacggaggctattcagtgaaatgcttcttcagtaagacctcttaaaaaactatgtaagtcatctgagaagcaaatttatgagcaggcctaggagccttactgtaaatgctcgtgtctcacaagtaacaccttctgcatgatctgatactaatttattaactagcccttg

SEQ ID NO: 14666 - DNA, 600 bp, Chicken  19866894220193_4
gtcctaaaaaaagcaaacaaagtgatttctttgaacagagtgaattcttttgtttctgtctcaaactgttgggcttgtaaatcccattttagtcctgtcagttacttcaacaagtcgatagcgttcttgtagcagtcatctgacaggatgcttgtccatgcaggtggatgggcataactgttatcactgaaagtcatttctgaatgcagaaggaatagtgggtatttagttttackaasagtctttgtacgtttagtgtttcatatatgcagattgcaacaatattttgtrcagttagawagtgcacttttctctcattgcaatgctgccaaatgagattaatgttataggcattattaatgtgtttcctattttatgaaagacagaattctgcgtggattttttctggtcagtcaacttaccacggaggctattcagtgaaatgcttcttcagtaagacctcttaaaaaactatgtaagtcatctgagaagcaaatttatgagcaggcctaggagccttactgtaaatgctcgtgtctcacaagtaacaccttctgcatgatctgatactaatttattaactagcccttgtgttttatg

SEQ ID NO: 14667 - DNA, 599 bp, Chicken  19866894220195_1
  misc_feature (1)..(18): n is any nucleotide
nnnnnnnnnnnnnnnnnncaaacattacatgcaagtcaactatctctttcgagcacttatatctcatcatgaagctttatagcaaagtcagtgctaattctctaaatattaatcagtggataacacaaagcaaccttaaattaattcagggataagataataaacatcattaatgcaaaacaaaaatagggttggtcccagcaaatcaaaaggcacagaacagcaaaatgacctttgcctagttgcattaacacaaatgtagtcatttataattatttaatttccctttgcagatatagytttatttcttctttcctttgtgtttttttcttctggaacatgaaaaaaaaccttactcttagaccagcagggccagggggaccagcagagccaggttcaccattgctgcctctcttgccttcctcaccacttggaccaggagggccaggggggccagcagcaccctatttcagccaagaggaaaagaataaattagagctgagctataggtactatgagactatattcattgaaacaacactcacaaattgccatacttacaggctcacccttgttaccactttctcccttggcaccag

SEQ ID NO: 14668 - DNA, 600 bp, Chicken  19866894220196_1
tgtccctgcttgttaaggggtttggaatggatgacctttatgggtctcttccaaccttaaccattctgtaattctgtaataccgtttgaaagcaaagttacagacacttggctttctgccttgcggatcaattcagtttaacctgctacatttatggtacaagaaatactacacaagaacaggatctagcttgtcattttaagtgcaaatagatcatattaagaaaattttatgctaaccgtccaaattaattgagcattttctagcacacttacagttccattcaaaaacttgcccctrtatctgtgatttaggtggataagctctgcttctccttcctggattccatttacccaaccaccaacatacatagatccagtgtctttatagatgtatgtaccttgtccgtgcctagggagaaaaaaaawattgttttatyttatggaatatgaagaacataggatattgttaaacttaaggtattaaaaatatattttttaattggctgaaatggctcaaattgggctaaattgcaaataccatccagtagcacttgatttgctgcagtcagccacactttgaaaawaaccatcatattgt

SEQ ID NO: 14669 - DNA, 600 bp, Chicken  19866894220196_2
caattcagtttaacctgctacatttatggtacaagaaatactacacaagaacaggatctagcttgtcattttaagtgcaaatagatcatattaagaaaattttatgctaaccgtccaaattaattgagcattttctagcacacttacagttccattcaaaaacttgcccctrtatctgtgatttaggtggataagctctgcttctccttcctggattccatttacccaaccaccaacatacatagatccagtgtctttatagatgtatgtaccttgtccgtgcctagggagaaaaaaaawattgttttatyttatggaatatgaagaacataggatattgttaaacttaaggtattaaaaatatattttttaattggctgaaatggctcaaattgggctaaattgcaaataccatccagtagcacttgatttgctgcagtcagccacactttgaaaawaaccatcatattgtgatgctacagagaatgacttcaaacatcactgtaagaatgaaaccaacctattgtcgttaaaccattctccagcatagctgtctccatttgcataggtatattctccatagccatgtctctgatcatc

SEQ ID NO: 14670 - DNA, 600 bp, Chicken  19866894220196_3
aacctgctacatttatggtacaagaaatactacacaagaacaggatctagcttgtcattttaagtgcaaatagatcatattaagaaaattttatgctaaccgtccaaattaattgagcattttctagcacacttacagttccattcaaaaacttgcccctrtatctgtgatttaggtggataagctctgcttctccttcctggattccatttacccaaccaccaacatacatagatccagtgtctttatagatgtatgtaccttgtccgtgcctagggagaaaaaaaawattgttttatyttatggaatatgaagaacataggatattgttaaacttaaggtattaaaaatatattttttaattggctgaaatggctcaaattgggctaaattgcaaataccatccagtagcacttgatttgctgcagtcagccacactttgaaaawaaccatcatattgtgatgctacagagaatgacttcaaacatcactgtaagaatgaaaccaacctattgtcgttaaaccattctccagcatagctgtctccatttgcataggtatattctccatagccatgtctctgatcatctacccagcttc

SEQ ID NO: 14671 - DNA, 600 bp, Chicken  19866894220196_4
aaaacttgcccctrtatctgtgatttaggtggataagctctgcttctccttcctggattccatttacccaaccaccaacatacatagatccagtgtctttatagatgtatgtaccttgtccgtgcctagggagaaaaaaaawattgttttatyttatggaatatgaagaacataggatattgttaaacttaaggtattaaaaatatattttttaattggctgaaatggctcaaattgggctaaattgcaaataccatccagtagcacttgatttgctgcagtcagccacactttgaaaawaaccatcatattgtgatgctacagagaatgacttcaaacatcactgtaagaatgaaaccaacctattgtcgttaaaccattctccagcatagctgtctccatttgcataggtatattctccatagccatgtctctgatcatctacccagcttcctttaatgagaacacatcaataacacagttagatgtggtatatttaatcatgtgatacagtggtcagtttgtaaaattaccatacattaatttagttgagtggagaatacacctcattagagaaggaaaactacgacaccgttatgt

SEQ ID NO: 14672 - DNA, 599 bp, Chicken  19866894220205_1
  misc_feature (1)..(155): n is any nucleotide
nnnnnnnnnnnnnnnnnnnnnnnnnnnnnnnnnnnnnnnnnnnnnnnnnnnnnnnnnnnnnnnnnnnnnnnnnnnnnnnnnnnnnnnnnnnnnnnnnnnnnnnnnnnnnnnnnnnnnnnnnnnnnnnnnnnnnnnnnnnnnnnnnnnnnnnnnnncttgcacaggtgtaaatgatcgcataaaatgcaaagcactgatctgacaccaaaaatctctgattaccatttctgtcttcatcagttttatggaactattaaaagaaccccagtccaacagggagctcattcctcattatccagsttactagctttttttaatctcttttcctacttttagcaagtttttctttcttttttattcccaattgacatcaagagagagaatgcaacagcttaaatggtattgctttggactgatctactaacaaaaacattatgtttygtgatagtaagaatgatagagcatttttttttccagccaaaacatctctgtaagtgccccagcatcatcaactgatggcagcacagctctgggaataaacagactttagctaatggcaggaattgacaggggaaacatcaaacaggtatttcttcttc

SEQ ID NO: 14673 - DNA, 599 bp, Chicken  19866894220205_2
  misc_feature (1)..(14): n is any nucleotide
nnnnnnnnnnnnnncttgcacaggtgtaaatgatcgcataaaatgcaaagcactgatctgacaccaaaaatctctgattaccatttctgtcttcatcagttttatggaactattaaaagaaccccagtccaacagggagctcattcctcattatccagsttactagctttttttaatctcttttcctacttttagcaagtttttctttcttttttattcccaattgacatcaagagagagaatgcaacagcttaaatggtattgctttggactgatctactaacaaaaacattatgtttygtgatagtaagaatgatagagcatttttttttccagccaaaacatctctgtaagtgccccagcatcatcaactgatggcagcacagctctgggaataaacagactttagctaatggcaggaattgacaggggaaacatcaaacaggtatttcttcttcatagacagtgaaacatgattgaagttaaatgccacatcctactagcactggagccagttaaattttattcctcatgtctatttattcttctcttaaaaaaaaaaaaactcatctagtttcatttaatacccatgttttctt

SEQ ID NO: 14674 - DNA, 600 bp, Chicken  19866894220206_1
ctgggagagggaaacatgcgacatatttattgctgttttcctgtaagacatgggatcaaaagtccatagttagtaactgtaaatttcaatagttttcagaactggaagctgtaattcaaaaaattttctgtaatgatttataacagaaaccattataagagatgcatgggattcttggcttctacatctgagagttgaaaatgagatgttctgtaaaaggctagttttatctccaaattactgcataaaaaggaaatgcaaatatgttgaatgaaataagataactgaatcatttgtatrttaaaaaataataataaaaaaagygttcattgattttggtttgtcataatgtaagcctggaaaagaaatctattaatctgcaaagactcagtatgttccatcctattgagtagtttaatatgtaacccatggttcagtacttcatcagtgagggaagatgtatgaaagtctgaaagtaccaaagtcttgatacttaatggaggagatgtgtttgtgtattcacaagagacctacctcaaagggcactgcagccactgtgcctttcacagcttcaggttcagaggaaattacatcagcagg

SEQ ID NO: 14675 - DNA, 600 bp, Chicken  19866894220206_2
atttattgctgttttcctgtaagacatgggatcaaaagtccatagttagtaactgtaaatttcaatagttttcagaactggaagctgtaattcaaaaaattttctgtaatgatttataacagaaaccattataagagatgcatgggattcttggcttctacatctgagagttgaaaatgagatgttctgtaaaaggctagttttatctccaaattactgcataaaaaggaaatgcaaatatgttgaatgaaataagataactgaatcatttgtatrttaaaaaataataataaaaaaagygttcattgattttggtttgtcataatgtaagcctggaaaagaaatctattaatctgcaaagactcagtatgttccatcctattgagtagtttaatatgtaacccatggttcagtacttcatcagtgagggaagatgtatgaaagtctgaaagtaccaaagtcttgatacttaatggaggagatgtgtttgtgtattcacaagagacctacctcaaagggcactgcagccactgtgcctttcacagcttcaggttcagaggaaattacatcagcagggaacatgctcaggaccctcgtagc

SEQ ID NO: 14676 - DNA, 426 bp, Chicken  19866894220206_3
attttggtttgtcataatgtaagcctggaaaagaaatctattaatctgcaaagactcagtatgttccatcctattgagtagtttaatatgtaacccatggttcagtacttcatcagtgagggaagatgtatgaaagtctgaaagtaccaaagtcttgatacttaatggaggagatgtgtttgtgtattcacaagagacctacctcaaagggcactgcagccactgtgcctttcacagcttcaggttcagaggaaattacatcagcagggaacatgctcaggaccctcgtagctgacatgwatttcaacttcaactctttgtggcctgaccactccaaagctcttcctgttatgctggtcccacacctgagctgttattttcctttctggtcctttcccatgagtggaggtggcacttccagagtca

SEQ ID NO: 14677 - DNA, 600 bp, Chicken  19866894220207_1
ataaatgaattataatgtgacttttgtctctaaagtaacacaagagttgatagtgctttacatatacacatacatgcacgtaagtatttatatacgaacatcatattctgacaaagagaaaaaaaaatctatgaaaatagcatcattcccactcatagtaaagcaggctagtcaggtcttgaaatcaacgtaaagcttctgaaggtactgactacatggctccacctgctctatgtttctgttcatatacaacatatgtactgctaaacaatccacactttttattaagtacaatattcwgaaaagggaaaaattacagagggaatttwaaaatcttcaaaaaatactgtagaatttcaagaaatctcttctgtaggagtttaattttcataaaataaactcagggtgactaaaaacaatgacagcaaaaaaagaaatgcatttaccatcytcaattctccctgcagtggttaaattttcagagcccagtaaatgtagatgattttataaactatatggtgtgacaaaactcaatgaatattagatgaaaaagaaaccataactcaacagatatttactataaagtccctaagtagatag

SEQ ID NO: 14678 - DNA, 600 bp, Chicken  19866894220207_2
ctaaagtaacacaagagttgatagtgctttacatatacacatacatgcacgtaagtatttatatacgaacatcatattctgacaaagagaaaaaaaaatctatgaaaatagcatcattcccactcatagtaaagcaggctagtcaggtcttgaaatcaacgtaaagcttctgaaggtactgactacatggctccacctgctctatgtttctgttcatatacaacatatgtactgctaaacaatccacactttttattaagtacaatattcwgaaaagggaaaaattacagagggaatttwaaaatcttcaaaaaatactgtagaatttcaagaaatctcttctgtaggagtttaattttcataaaataaactcagggtgactaaaaacaatgacagcaaaaaaagaaatgcatttaccatcytcaattctccctgcagtggttaaattttcagagcccagtaaatgtagatgattttataaactatatggtgtgacaaaactcaatgaatattagatgaaaaagaaaccataactcaacagatatttactataaagtccctaagtagatagataatagcaataccttttagaccttcagc

SEQ ID NO: 14679 - DNA, 600 bp, Chicken  19866894220207_3
ctcatagtaaagcaggctagtcaggtcttgaaatcaacgtaaagcttctgaaggtactgactacatggctccacctgctctatgtttctgttcatatacaacatatgtactgctaaacaatccacactttttattaagtacaatattcwgaaaagggaaaaattacagagggaatttwaaaatcttcaaaaaatactgtagaatttcaagaaatctcttctgtaggagtttaattttcataaaataaactcagggtgactaaaaacaatgacagcaaaaaaagaaatgcatttaccatcytcaattctccctgcagtggttaaattttcagagcccagtaaatgtagatgattttataaactatatggtgtgacaaaactcaatgaatattagatgaaaaagaaaccataactcaacagatatttactataaagtccctaagtagatagataatagcaataccttttagaccttcagcatttacttctgcttggcatacttcctttcttttattcagcattgaaaataccaaagagaggctacagttcaaaatcttactgtactccacagcaaattggtattacaaccccaaacactttc

SEQ ID NO: 14680 - DNA, 599 bp, Chicken  19866894220209_1
  misc_feature (1)..(132): n is any nucleotide
nnnnnnnnnnnnnnnnnnnnnnnnnnnnnnnnnnnnnnnnnnnnnnnnnnnnnnnnnnnnnnnnnnnnnnnnnnnnnnnnnnnnnnnnnnnnnnnnnnnnnnnnnnnnnnnnnnnnnnnnnnnnnnnnnnnnattttgccccacagttaaatgaagtttgcttaagtgtttgaagacttagagcttagggctgcaagctgtttgagcctgagtttgcatttgctcattcccatgtatttacctgttgttaggaaataaggttaattactagaatagaggaaatgcagtaaactgaactgwcagacgttatggtgagcacgggatggctcatgcagctgtgaaatggccacacacccttcctctgttccctytggaaggtgatacagcttttccaactgctttccacaggcactttagtcttctccccagtattttttggctcctcgctcacctaaaggttctcttttcctaacttagtgcattacgttagctctaatagcagtttggggcacatggccccaaaccagttcagctgcatttgaccctaatgctgttcacaaggtaacatcttggtgatgctcggtgggaaaagctgtgct

SEQ ID NO: 14681 - DNA, 599 bp, Chicken  19866894220209_2
  misc_feature (1)..(61): n is any nucleotide
nnnnnnnnnnnnnnnnnnnnnnnnnnnnnnnnnnnnnnnnnnnnnnnnnnnnnnnnnnnnnattttgccccacagttaaatgaagtttgcttaagtgtttgaagacttagagcttagggctgcaagctgtttgagcctgagtttgcatttgctcattcccatgtatttacctgttgttaggaaataaggttaattactagaatagaggaaatgcagtaaactgaactgwcagacgttatggtgagcacgggatggctcatgcagctgtgaaatggccacacacccttcctctgttccctytggaaggtgatacagcttttccaactgctttccacaggcactttagtcttctccccagtattttttggctcctcgctcacctaaaggttctcttttcctaacttagtgcattacgttagctctaatagcagtttggggcacatggccccaaaccagttcagctgcatttgaccctaatgctgttcacaaggtaacatcttggtgatgctcggtgggaaaagctgtgctcttgcatgctattaaacagcatttaattcctttgggacattccttaactcagagtcatctgctcttgagta

SEQ ID NO: 14682 - DNA, 600 bp, Chicken  19866894220209_3
ccagttcagctgcatttgaccctaatgctgttcacaaggtaacatcttggtgatgctcggtgggaaaagctgtgctcttgcatgctattaaacagcatttaattcctttgggacattccttaactcagagtcatctgctcttgagtaagtccaatcactcaacctgcttcttaacagctctctttcaccaggcccagcttgctggctgctggagggcagagctttgcccagtggccagcactgaggacagcctcagctcatcccaagcagtcagagagcagtcagagagacccgagcacmagtacagagggtgctcagagggtctctgcctgttctcttacctctcattgccccacctagcgtgttccagatgggtggggagaagctttgaattccacacagccctagtgattagggtgtaaaggcatgcacgtaggcatcgttcctgggtggagggttcatgctgctctcagggaaagtgggtccaaagtgctgttagctgcagtgggagctgcacacttcaaatgagcaaaagaggtaatacttagttgctgcgctttattaataaactttgcaaatgcagcagctgtatctaattcc

SEQ ID NO: 14683 - DNA, 600 bp, Chicken  19866894220209_4
catcccaaacaggttgtccttctgtccgttcatcacatctgctgctggttgcagcctggtacacagagtgccaggagtaagtgtgccttaacgtgacaggcagctgcttcgccatcagctgagtcactactgcaggaggaggcaagggacaagagggaagcacggtgctgaggtgagctggtggcgagaggagctgcaactcagtcttagacaaacacaaagcagacagcacgccatatttgaggcttgcaagccaaaggttgcactccttctctcctccccctctcccttatccttccrcttaatgttggcgtccagtatcatcaaaatgagagctgggggagggctgaatgtgcgctggacgtgcctgaatccttaggttgccttccagaggctaaagtggcacaattggcctgygctaatgatttataacttgcgctgcaactcttgtgtgagtttctctcgaggcagctgactgctgtgtgcttctctctgcagaacggctctgagttgcattaagtgattcagtattcccaccaggcactgtttgtcaagccttggcagctggtgccaaatagaactggctaagccccttgttag

SEQ ID NO: 14684 - DNA, 600 bp, Chicken  19866894220209_5
gctgagtcactactgcaggaggaggcaagggacaagagggaagcacggtgctgaggtgagctggtggcgagaggagctgcaactcagtcttagacaaacacaaagcagacagcacgccatatttgaggcttgcaagccaaaggttgcactccttctctcctccccctctcccttatccttccrcttaatgttggcgtccagtatcatcaaaatgagagctgggggagggctgaatgtgcgctggacgtgcctgaatccttaggttgccttccagaggctaaagtggcacaattggcctgygctaatgatttataacttgcgctgcaactcttgtgtgagtttctctcgaggcagctgactgctgtgtgcttctctctgcagaacggctctgagttgcattaagtgattcagtattcccaccaggcactgtttgtcaagccttggcagctggtgccaaatagaactggctaagccccttgttaggtggctgtgtctttgcgctgagcttctgtacgctctgcctgctgttgactgatttttgccttgaaagagctgaaaaacagatcttatttttatctgcctctgttgcagtttcttctg

SEQ ID NO: 14685 - DNA, 600 bp, Chicken  19866894220219_1
atgaattgttaacaagcagtgccacggcttgctgttataaaagatactgttgtgtaggaatcgttaaaactacggacatgcttgattaatatgtgaattctaaggtaatataccatacttcaatgtacaataaacttactaaataattatgaatcagttgtgcaaatgggtattataaagagcttgaaaatggaacataaagccaactataacagagtaatcaaatactcttggtcttctagttctagttcagctaacataacaaaacaaaacaatataggaaaatatgtgaattagagyacaatatgaagtctttgtcttaaatggatattcagtgcttacactttggtgccatcagtaagtggtcaatttagctagctattagggctaatttatccagctcttctgtagataaaggaagaaattcttcagaggctggctgaagactgaagactaagttaggaattccgggtggaacctcggagaatgtatctctctctgtcaactacccagaaaactcatggggcttaggtagctgaaatacccaactaatttatgtttcaaaagccggatgttgtggttactcccctacatgtcaac

SEQ ID NO: 14686 - DNA, 600 bp, Chicken  19866894220228_1
ctacaactatagtgatgtatagcagacacataacagatttttttttttttttatattcccttaagcagacaagctttaaggcaggtgcctctgcatcccagatataattagcagtctgtagaaagaactgcacagctgggaaattctgtaatgtagattttagtacacagaaatatgtgtttggtcataacatatctgaaggaaggttgttccacaagtacatgaaagatactcagcttagtgatgctaaaatgtatctcaaactgttcaggatatttcatatggatctaaggattattrgcaagaatttgttccaccaactaacatttgccttctcagctcttttgcatgcaaaatgcagtcattgattacctttattgttttttcttgagctgctggagttctagtacattgaactcaggcacaaactgatggagtcggttgaaaaaggaggttggataacacctctctagaataatttctcatcatctagaaacttaagtcattttggaggaagtcctcaaattcttttgctatttctctgaagcactgaacagatgaaagcatcactttactgctcagaatattctcacccaggcc

SEQ ID NO: 14687 - DNA, 600 bp, Chicken  19866894220231_1
tcctacataaatgcattcatcatttttttatctcatctctggtgatcggtgccccctccgtgcgttccgtgtgcagaagcacagacatcgcaaatgaagctgctacctgttttagtgagacgagacgcgaatgattaccttaccgcggtcctctttcccatgtatttcagacattttcagaaaaatgatcatagcctaaatggaaggtctccacttcatgcaaagcaaaaatgtaaatatttcctatttctttaatctcatgtagtaaagcaaaacagagagggaaaatgagtaagcccrttgcttaattcctgtgcagttttcttctcagggaagtaatttccctcagatgaaggagaaattaaagtgtgcttagaagtcaagaaggaacagaatattaactactttttaattaagaaaaataattatgtaagtagtgatacagaaaagctgttagaaataacaaaataacaggatgtcagtttctgcagtagaagtagaaggaaattttcatggttttcttcaatggaacaaatgtagaaataataacttctacagcttttggctttatcctgtgactagcatctcatactgcccagg

SEQ ID NO: 14688 - DNA, 600 bp, Chicken  19866894220234_1
actcactgtcttttactaacagaggaaattagtgctaattaagagtgggctcttagtttgggcaaactatagtaactgagcctacttttgtggatgatgctctccttttccttttatgtgcttatgttaattaagggccttaaattctcaataaatccagaaaaaaatggttagattgtcagaattatttctgataaatgccaggcactactgtcatatgtttcaagtccacgggtcttagaaagctatggaaaagaactgtattacaagactaccatatatctggggaattgagttgaraatacctgttccagctttcattataggatgaaaggagcagagacagaaaacgagggtcaaattgaggacatagaaggctggtaatggagtgagaaggactgagcttgaaatcccatttatctatctcagtgctgtgatattcagtgatgctttgtataaaatattagtgtcagaaaagattcaaatggtttcatgagatgactgacatatactggacaccacagtgagagaggaagtgctaacacatgttttgttctctgaaagtgagactataactatggattttatttcctctatggt

SEQ ID NO: 14689 - DNA, 600 bp, Chicken  19866894220241_1
ttgtcctaaccacaatagttttgtattttttgtttatgcagcaatctccattcaaaggtttcaaagatgcagctgtaactgaaagctttctccatttcattctccccatttcatttatgaggcaatttaattgcaatgaggttaacaagcagtaggcttatggcagaacagctctcctgattgccaggactgtgctctaaccactcatccttgctgctttccacagttcatgacagcttacacagaaaagaagcatcaaggatttctgtgtagccagtgttcagtcattcagtagacagyctaataattcttaggtagattatactcagccataatcatctctagagtaattaggagaacagacttagtcatgtaagtgaacataatatgggcaatgtaagtggtgtgttataggatataattttaaattcctattaaattgcacctgcgcttttcttttgctctctttctgcttctgagaagcgagctgtgaacgtggttcatccttgatgtaattccagagcaaggaatttgggttgttatgtttaggcaaacttattacacttaaactggtataaactcctcagcttttcagtattg

SEQ ID NO: 14690 - DNA, 531 bp, Chicken  19866894220243_1
tccgttaattgatgcagcctggccaagctgcttcttcctattctatctcagggttctttggtttagcacaatttaaaccttcttcagggctatacttcactcatgcaaactgttattacacaagggatttaattgtgccagtgacgctggggaatatacctgagcacctaaccatcacaaaaatccagatgctctacatctgcagcggctcttcaatgctaatgcaaggcacaaagaggtgctagagctaatctgaggactggtccccacgtcatatgttgcttgccaaaatcagaacayaccaaattgaaacttttcacacttaactgtttctatgctgtcccaagttctaggtatgtaaagtaaaacacatacatgtctcattggttttggtgggaactcagagcgctaaggaacataaagagatgttcagctttttgaatgatggaaccctaatctgctgcctgcagagaagaaaaacaaattctgggaacacttgcatttagcacagtattggtctgagatcctttg

SEQ ID NO: 14691 - DNA, 600 bp, Chicken  19866894220244_1
tcaggagcccttggcaaacttttcttctgtgtgtttgtccacctgttttcatattcctgtaacttagcattctcagcatccaaaattaggagaccatttattcaccatttctgctgttaacagatattcaaaggccctgttctctttcggggagagccaggtactttccccttcaagccttcagaagatgtaaaaatgattctgagtgtaatgaagttcggaaatcctttgtgtgagctttgtctccgacaatatgtaatgatggaaacaggctagtgtcaatgttgcttctcgctgcaygatcatttggtctttgcattagttttctctactgacacccagttctagactttctaacctttccagacctgaattagaaatataatgaaaatgactttttgcttgaagccacatttatkttcctgcttcycattctgcatatgcattcatgcctgccatcacaactaaaaagcaattgaaattccttactttacaagaacagcagtagcagtcatcatcaatttcaccaagaggcaaaactagatgtgttttatgaggcaggggatatagatgccactgaccagttttcagatcagtcaa

SEQ ID NO: 14692 - DNA, 600 bp, Chicken  19866894220244_2
acagatattcaaaggccctgttctctttcggggagagccaggtactttccccttcaagccttcagaagatgtaaaaatgattctgagtgtaatgaagttcggaaatcctttgtgtgagctttgtctccgacaatatgtaatgatggaaacaggctagtgtcaatgttgcttctcgctgcaygatcatttggtctttgcattagttttctctactgacacccagttctagactttctaacctttccagacctgaattagaaatataatgaaaatgactttttgcttgaagccacatttatkttcctgcttcycattctgcatatgcattcatgcctgccatcacaactaaaaagcaattgaaattccttactttacaagaacagcagtagcagtcatcatcaatttcaccaagaggcaaaactagatgtgttttatgaggcaggggatatagatgccactgaccagttttcagatcagtcaagaaaggtactagtcacagtttggtaataaagaaggagtagcttacctttctgaggatagaggcttactggaaaactcccaaaggaggcaatcgtcaagtaaagatgcttccccttcagc

SEQ ID NO: 14693 - DNA, 600 bp, Chicken  19866894220244_3
aaggccctgttctctttcggggagagccaggtactttccccttcaagccttcagaagatgtaaaaatgattctgagtgtaatgaagttcggaaatcctttgtgtgagctttgtctccgacaatatgtaatgatggaaacaggctagtgtcaatgttgcttctcgctgcaygatcatttggtctttgcattagttttctctactgacacccagttctagactttctaacctttccagacctgaattagaaatataatgaaaatgactttttgcttgaagccacatttatkttcctgcttcycattctgcatatgcattcatgcctgccatcacaactaaaaagcaattgaaattccttactttacaagaacagcagtagcagtcatcatcaatttcaccaagaggcaaaactagatgtgttttatgaggcaggggatatagatgccactgaccagttttcagatcagtcaagaaaggtactagtcacagtttggtaataaagaaggagtagcttacctttctgaggatagaggcttactggaaaactcccaaaggaggcaatcgtcaagtaaagatgcttccccttcagctgccaggccta

SEQ ID NO: 14694 - DNA, 600 bp, Chicken  19866894220245_1
cctgcaggttggtcagcaaacccctaattctctttggaggtacactttgcaagaagcctacatagagcaggagatcctttgcaagcattctgcttgtatttccatttgatagcagttcattttgtcctgtagccagtctgggaggcagggaggtgctggccagcttagagcaagccatgtgatgggctcagcattgcaggggaagagagttcttggtcttccctgccagtaggctgctttattctcggagccagcagtccatgtaatttatcatacatattgactttactccttttggaycctacctttctctggtaaaaggctctgtaggtctgcagtgaaaccatagcagttcctatcagctgaggagagctgatagatctttataaaaacttagattttttaaaatcaatcttttcttgatgtagcaatgaaaacagtggattaacacagttaatatgggtatgctataaaatctgctgttttttaatagagaaaaagatggtctgatttagtagcatttatacataatacaaagattcaagcaatatagagataatggtaaccttaaatctactttatttagtggttatctggtct

SEQ ID NO: 14695 - DNA, 600 bp, Chicken  19866894220246_1
agagggaccactcacttgtcgacgggggtgagagcaaatggcatcttcaccacctgctcataggcgtagacgcaggagaaatgcacctccagctgaaagctccgggagatcacacccctgtgtgcttccctccctgtctcaatgatgttggagtatgacacatgggagctgttttgctggaatgacaaagaaaccatacctaagcccaagtacagagtacagcacactctaatgaattaagtgatgtactgactataggcaggtctgcagagctcagaggatcctgccagaaagctgaargctcttattctaaagagcacactgagacttccatgctctgctgcacaagataagatgtgstgccagcagtggtttggtggaggcagaagagctttctaacagcccccagggaagcctcccaaggggaaagagagcttcacggtgccagataaaaaaggaaaagcctccagggctgtccccgctcagcatatctgtttctctcttggcttcagagctattcaaagaggctctgtgctgratcctcacctgaattactgatccacaggcagtgtggttttcccctgtgagagtggctgcaaa

SEQ ID NO: 14696 - DNA, 600 bp, Chicken  19866894220246_2
taggcgtagacgcaggagaaatgcacctccagctgaaagctccgggagatcacacccctgtgtgcttccctccctgtctcaatgatgttggagtatgacacatgggagctgttttgctggaatgacaaagaaaccatacctaagcccaagtacagagtacagcacactctaatgaattaagtgatgtactgactataggcaggtctgcagagctcagaggatcctgccagaaagctgaargctcttattctaaagagcacactgagacttccatgctctgctgcacaagataagatgtgstgccagcagtggtttggtggaggcagaagagctttctaacagcccccagggaagcctcccaaggggaaagagagcttcacggtgccagataaaaaaggaaaagcctccagggctgtccccgctcagcatatctgtttctctcttggcttcagagctattcaaagaggctctgtgctgratcctcacctgaattactgatccacaggcagtgtggttttcccctgtgagagtggctgcaaaaaacatctcaccctcctcttccctttctgaaaccttgcatgcctggttcttcaagtggac

SEQ ID NO: 14697 - DNA, 600 bp, Chicken  19866894220246_3
aagtgatgtactgactataggcaggtctgcagagctcagaggatcctgccagaaagctgaargctcttattctaaagagcacactgagacttccatgctctgctgcacaagataagatgtgstgccagcagtggtttggtggaggcagaagagctttctaacagcccccagggaagcctcccaaggggaaagagagcttcacggtgccagataaaaaaggaaaagcctccagggctgtccccgctcagcatatctgtttctctcttggcttcagagctattcaaagaggctctgtgctgratcctcacctgaattactgatccacaggcagtgtggttttcccctgtgagagtggctgcaaaaaacatctcaccctcctcttccctttctgaaaccttgcatgcctggttcttcaagtggacaasttcccgggggattttcaacagctcaaacacctcctttctcaccatcatcttcatgtgctcttcctcacaggccaacttcagtaccacatctgggggaaaaagccatctgcaatagcaataaggaagatgcctgaaggagccctaagtcagctatgggacaacacagtcctaccaa

SEQ ID NO: 14698 - DNA, 600 bp, Chicken  19866894220246_4
cagcagtggtttggtggaggcagaagagctttctaacagcccccagggaagcctcccaaggggaaagagagcttcacggtgccagataaaaaaggaaaagcctccagggctgtccccgctcagcatatctgtttctctcttggcttcagagctattcaaagaggctctgtgctgratcctcacctgaattactgatccacaggcagtgtggttttcccctgtgagagtggctgcaaaaaacatctcaccctcctcttccctttctgaaaccttgcatgcctggttcttcaagtggacaasttcccgggggattttcaacagctcaaacacctcctttctcaccatcatcttcatgtgctcttcctcacaggccaacttcagtaccacatctgggggaaaaagccatctgcaatagcaataaggaagatgcctgaaggagccctaagtcagctatgggacaacacagtcctaccaagctcaacagacccacattccaacctcgtgggaggctgctggtaggggtcttcagagacacagagggaaagcaagagacaaacctttggaattgagctgaagttaatgaggatctgacatttattg

SEQ ID NO: 14699 - DNA, 600 bp, Chicken  19866894220252_1
taagtggtgcatgtctttctttgctattggtattcagtaaagtctgtcttagataccactaagggtgtcagaggccaagcaacacagctgccttgttctccagaaaaccattgatattttgagtgtagtgatcaatgcatttactgtttgtagtatctcatccagttaacatgggggcataagggtgaatttttggaattagcagattggatttaacttataattggacattcctgccttttaaaaatatcactaaaattaaactgaaagcaaagcttgacagtactatacttgtaattrctactgtcactagagatacatacagccccacatgagaacatccagccttttacaaaatatcctgcagcaatcttttcatcatgttcgtctcggtatttaagaagaaaagtgaattccagaaaatgcacacaggaaggattatctgctaaggcagcattagatgtttctgtcttcatcctaatcccaaccctaactctttcatccctttggaggttgtacctgtctcggtcctcctggtctctttccacagctctagttcagctccaaccacaggtgggatgatcaggttcctgcctggta

SEQ ID NO: 14700 - DNA, 599 bp, Chicken  19866894220255_1
  misc_feature (1)..(13): n is any nucleotide
nnnnnnnnnnnnncttgaagtggtggcatttgagatttaggctttccttggtcatcggtgatctcttcagtgatgcctgagatggctgtcagctcctcgcccatctcaggcagcagatgcctgcagggcatccccgggccgagctttccagcactgccatacacagatggtgaaatattccccttcccgcgataagcaatgcgtgtagcacgtcctcctcgttttgggcattggcctatcaaaggtgctcagggccaggctggatgggacctaagctgggcggggcagccggcccgtggmtgtcccccttttacttctcacacagtgagaacccaagctgctgtttaaagccgcacagctccgctctaggacggagatcccgaagaacccaacggacggcgcccaacggccgcagcccgtccgcgcgccgcgccgtcacctaggcgacgtgcggggggcggggctaagaggcgaggcggggcccgattggttcccttcccccgccgcgcgcccagccgggatgaggcggaggggaaggagagggggggcgaagagaaaagagggagccgaggctataaataaaccgcgcttcctgattg

SEQ ID NO: 14701 - DNA, 600 bp, Chicken  19866894220257_1
taattgataaatcataaaacaggttgagtagaagatggaaaaatacttaagctggatggattctactgaattaaaccacgctattatattgcctagcatcctgcttaataaaactgatatgctgttttgtgctagacattttcagcggtagatgacttctcagagaagaatgcatttaatctgctggggaacctgatgctggacagaacgagtatgttgatctaagccctgcaggctgcggagaagacaggtcccatgaggctgattcctctgcagctgggtgctgctactattggtagyagtgattgccaactgaactaactggcattgggttagacctctgtatttatcatcattgtggatacagattgctgtaatcgctaccagtgtgagcctcagctggcacaattaatacttactggcctcccctggtgaaaccaaaatatcagagcacgatgagaaatgtggaaaaaatcatgagcacaagctacagcacccaacacctgtcagtgtgcaatgctgaagcacttccctgctttctatttcctacmagcatgtaattaatgcctgtgttaattaacgtgagggggcagcgctggc

SEQ ID NO: 14702 - DNA, 600 bp, Chicken  19866894220257_2
tcccatgaggctgattcctctgcagctgggtgctgctactattggtagyagtgattgccaactgaactaactggcattgggttagacctctgtatttatcatcattgtggatacagattgctgtaatcgctaccagtgtgagcctcagctggcacaattaatacttactggcctcccctggtgaaaccaaaatatcagagcacgatgagaaatgtggaaaaaatcatgagcacaagctacagcacccaacacctgtcagtgtgcaatgctgaagcacttccctgctttctatttcctacmagcatgtaattaatgcctgtgttaattaacgtgagggggcagcgctggccaagtgatcctggaggtaattaaagctcttgcctgttcttagctgatgagctgagtgaacccgacctgaggaggcactcagcacctggaaggagccagatatcctgataatgtgctaaaaggcccttaaagccaacacccggcagcttcatgggaaatgctcatgacaaatgttagcacagacgtgcactttttatctggctggggttaggttaccccattaattcacgctcagaagacaatgcgtgggcc

SEQ ID NO: 14703 - DNA, 600 bp, Chicken  19866894220259_1
gtgctgatataggaatgcttagtctttctgaattgcagagattattttactctttcaatagtccagggccagcaggagcattttgtcacacctgctgtccctgactcagtagatcctacagcctgaaatgagccttttctccagaattccagggcacaccgtcacagtaaaacattcagtgctgatgctcacccaccttgcaactatgggcatctgggacatgcaggacccccgacaccggctgctcctgttactgctcttcacagcctcagaaatgagttgcaagcatccaagggaaaygctgctctgtgctggaggaaggaatggaagcaagcgctttycctgcaaaagacacaatcatttctcacagcagacctgagctcagtgtggcaagactgtycccacrcaccttcctgccctctgctgggctcagacaccycccagcaccttccccttagcttacagggtaggtcagtacttgcattgtagcaatgaatcctctccacgtttcaacagagagcagcagcagcaggcacaccagagcaacctcgagttcagggaagaaatctgcaacaaacaaacaagcaagcacaggcagag

SEQ ID NO: 14704 - DNA, 600 bp, Chicken  19866894220259_2
ttattttactctttcaatagtccagggccagcaggagcattttgtcacacctgctgtccctgactcagtagatcctacagcctgaaatgagccttttctccagaattccagggcacaccgtcacagtaaaacattcagtgctgatgctcacccaccttgcaactatgggcatctgggacatgcaggacccccgacaccggctgctcctgttactgctcttcacagcctcagaaatgagttgcaagcatccaagggaaaygctgctctgtgctggaggaaggaatggaagcaagcgctttycctgcaaaagacacaatcatttctcacagcagacctgagctcagtgtggcaagactgtycccacrcaccttcctgccctctgctgggctcagacaccycccagcaccttccccttagcttacagggtaggtcagtacttgcattgtagcaatgaatcctctccacgtttcaacagagagcagcagcagcaggcacaccagagcaacctcgagttcagggaagaaatctgcaacaaacaaacaagcaagcacaggcagaggagaggaagcagcccacggatacttgcagtgcagctgggga

SEQ ID NO: 14705 - DNA, 600 bp, Chicken  19866894220259_3
ctgactcagtagatcctacagcctgaaatgagccttttctccagaattccagggcacaccgtcacagtaaaacattcagtgctgatgctcacccaccttgcaactatgggcatctgggacatgcaggacccccgacaccggctgctcctgttactgctcttcacagcctcagaaatgagttgcaagcatccaagggaaaygctgctctgtgctggaggaaggaatggaagcaagcgctttycctgcaaaagacacaatcatttctcacagcagacctgagctcagtgtggcaagactgtycccacrcaccttcctgccctctgctgggctcagacaccycccagcaccttccccttagcttacagggtaggtcagtacttgcattgtagcaatgaatcctctccacgtttcaacagagagcagcagcagcaggcacaccagagcaacctcgagttcagggaagaaatctgcaacaaacaaacaagcaagcacaggcagaggagaggaagcagcccacggatacttgcagtgcagctggggatgcccttgcagagctgctggccaggcccagctggatcatggatggataggaagagaaag

SEQ ID NO: 14706 - DNA, 600 bp, Chicken  19866894220259_4
cagtagatcctacagcctgaaatgagccttttctccagaattccagggcacaccgtcacagtaaaacattcagtgctgatgctcacccaccttgcaactatgggcatctgggacatgcaggacccccgacaccggctgctcctgttactgctcttcacagcctcagaaatgagttgcaagcatccaagggaaaygctgctctgtgctggaggaaggaatggaagcaagcgctttycctgcaaaagacacaatcatttctcacagcagacctgagctcagtgtggcaagactgtycccacrcaccttcctgccctctgctgggctcagacaccycccagcaccttccccttagcttacagggtaggtcagtacttgcattgtagcaatgaatcctctccacgtttcaacagagagcagcagcagcaggcacaccagagcaacctcgagttcagggaagaaatctgcaacaaacaaacaagcaagcacaggcagaggagaggaagcagcccacggatacttgcagtgcagctggggatgcccttgcagagctgctggccaggcccagctggatcatggatggataggaagagaaaggcttca

SEQ ID NO: 14707 - DNA, 600 bp, Chicken  19866894220259_5
tccagaattccagggcacaccgtcacagtaaaacattcagtgctgatgctcacccaccttgcaactatgggcatctgggacatgcaggacccccgacaccggctgctcctgttactgctcttcacagcctcagaaatgagttgcaagcatccaagggaaaygctgctctgtgctggaggaaggaatggaagcaagcgctttycctgcaaaagacacaatcatttctcacagcagacctgagctcagtgtggcaagactgtycccacrcaccttcctgccctctgctgggctcagacaccycccagcaccttccccttagcttacagggtaggtcagtacttgcattgtagcaatgaatcctctccacgtttcaacagagagcagcagcagcaggcacaccagagcaacctcgagttcagggaagaaatctgcaacaaacaaacaagcaagcacaggcagaggagaggaagcagcccacggatacttgcagtgcagctggggatgcccttgcagagctgctggccaggcccagctggatcatggatggataggaagagaaaggcttcacgtagagacagtaagttgcaaggacaagccagc

SEQ ID NO: 14708 - DNA, 600 bp, Chicken  19866894220261_1
tgtttcatcaattggagttgaggaagcagaagtcttgggatgatctgcgattgggtttcagttttcctggccctacacactgaaccagaacctaatgacagccatacaaaggttggttgagggtctaccttggttgtcccagaagactcctgttctataaatgacatgaagaaaacagcatggcttttagatatctttttagatgcccagtatgctttgaggagaagaaatcatcaccaacaatgataatatacctttacaattgatataagttcagttcaactgcagtgaactcctacrtttttgttccttaaatctgggggaaatagactgacatcgctcagcagccattcactatttcagcacagaatgctaactcagggaggccaaagtctgtatctgttactctgccccagatggcaatttgatggcagcggtgaccttgctggctggaggcttatgctccacctccacccatggccaccagggctgacctagaaacttggagaagcatgcggtcacggataatctatttgaaggccaaggacactggaggatatgttggcatcagcagagtgccctgctcctaccacagtagag

SEQ ID NO: 14709 - DNA, 600 bp, Chicken  19866894220264_1
ataataatatttagggaggtaaaatggaactgccataaagctctgcagacactgaactattttataaataatgtcttttatgtgactattgaagttattttgtgtggagttaaatctctcctgttcttacacagaagatatataatgatataactgatttcatctgtccagctgagatggcctttttctgttcaacaaagaatattagaactgatgatatggcttttaatctatgttagcaaatctgacaattgctgtgcacaaaaaacagtattcaggtttctctccattcatgctcarctgaatatgtatgattcttcccaaaccatgtagacagccttcatctgtgattaccctgtggtctctcatctttgccagtctaacaggttccctacttatcatcctaatcccatgttcacagttatttatagtaagcttcatcaggcctgtgctggctactgaagacacagctaacagtgaaggctcataaaccattgcctagcagttgtgtatagtagaatctccctagtctccaagatctttgtcaccacttttagttacaatgtttagtaaatatatcctgcaaactaaacatggatt

SEQ ID NO: 14710 - DNA, 600 bp, Chicken  19866894220264_2
gtctctcatctttgccagtctaacaggttccctacttatcatcctaatcccatgttcacagttatttatagtaagcttcatcaggcctgtgctggctactgaagacacagctaacagtgaaggctcataaaccattgcctagcagttgtgtatagtagaatctccctagtctccaagatctttgtcaccacttttagttacaatgtttagtaaatatatcctgcaaactaaacatggatttctactatatagctaacatagcactagttttctgatgaacttcaatgatccccatgttcraattcataaagactgagtctttatgacactcccagagctcttattttgccatatactctatccactgggagactgcattagaaaaaaccgcttccttactsagccataatcaaatgctcaaacccatattttactaaatcttgatgctgaaagtctaggtggtgcaaactccaaagtgatccttccataaaggaatagtaagtcattaataaaacgcaacttgcccaccacatagtgcaggagagatgtattctaagactgttaccttaataacacaaacacagaaagtagtaatttacc

SEQ ID NO: 14711 - DNA, 600 bp, Chicken  19866894220264_3
aagacacagctaacagtgaaggctcataaaccattgcctagcagttgtgtatagtagaatctccctagtctccaagatctttgtcaccacttttagttacaatgtttagtaaatatatcctgcaaactaaacatggatttctactatatagctaacatagcactagttttctgatgaacttcaatgatccccatgttcraattcataaagactgagtctttatgacactcccagagctcttattttgccatatactctatccactgggagactgcattagaaaaaaccgcttccttactsagccataatcaaatgctcaaacccatattttactaaatcttgatgctgaaagtctaggtggtgcaaactccaaagtgatccttccataaaggaatagtaagtcattaataaaacgcaacttgcccaccacatagtgcaggagagatgtattctaagactgttaccttaataacacaaacacagaaagtagtaatttacctgtagcagaatgaaggagaaatgtattttattactgttaatttaaagcagaagtacaggatcatacttgggtggaaccaccattcaacttctgaggacayg

SEQ ID NO: 14712 - DNA, 600 bp, Chicken  19866894220264_4
sagccataatcaaatgctcaaacccatattttactaaatcttgatgctgaaagtctaggtggtgcaaactccaaagtgatccttccataaaggaatagtaagtcattaataaaacgcaacttgcccaccacatagtgcaggagagatgtattctaagactgttaccttaataacacaaacacagaaagtagtaatttacctgtagcagaatgaaggagaaatgtattttattactgttaatttaaagcagaagtacaggatcatacttgggtggaaccaccattcaacttctgaggacaygacagggaacttatacggagctagtcatgaaatcttcaatgaaaacctcccagacacctaccctaagcttttaatgtgatattcatcccaatgcaaggagacaaaaagaaaaggctgtacatcacttagtccccagataagtacaacaccaagagcttagccttcacacatagtggctgatgtcaggctgaatgaatatccttaaaagatcaatgcagaacattttgatggagcccttaaaaatattaataataatgatccagggaaaagtggaaatgaaaggtcagaattctaaataat

SEQ ID NO: 14713 - DNA, 600 bp, Chicken  19866894220268_1
cttacatttctggaaaactccaatttatctaatcatgattgtgtgctgtgtctacctgtgtgaggggagaataagatctgggaaaagataagtagcagccattctgcaaatggatagcaatattaaagatcaggaaggctacctaaagttcaacaggatctacgggacaaaagtgatgagtaatgcaatgtaatgtttcagctcaccaaggtttcttgtaagactgacgcaccagtggtgactggggacattacgggtcttgtagtcctggtttcctcagaacagagcatgcttctgttkctgtgggtgtttatcttttttcacagttctgtccatcctgttattatattttgatgtcattgatgaacttctgctaagttcaacattgagatacaagcctctgaagtgatagggttcccagacgctcctgagaggaaggactattcaggggctttgtaccagttatgacatgttctacaatgagctgagcagtcagcacaagtgacctaggcagctaaccagtattcatacagctccaaggcagccacagcaggtgtgcctgatcatcagggtttgtgagggaatttcataggagaccca

SEQ ID NO: 14714 - DNA, 600 bp, Chicken  19866894220268_2
ttaatgaagggcagaggttctccacattctggagtctgcttctaatgtaagacatctgctatagcaagacatgccactcttatttgggcttggaaattgagctatagatcaagggaaaataagagagtattccctagaaagtaatgaggaagatgatcaggatttatgggtgtgaggggagaggtaccaaagagatttttgcactctgaatctccttatgaaaaaagtagttctgcctttttctgatcttctatttaaccttcaaattttactgaacaaatttaaagaagctaaacctcytgagtcatcagacaactgcgatgaagcagagtttggaaacacccaaagctttaaacttggcatcaaaacagatactactccgttctgtttgtatattgaatacttcttaatttttgttgtccaaacaggaagcctcccagctacacactgagtcagcacaataaccctttctgctttctgttgttttactctgtcccaatgggagtaaaatacagctccctgtctctgtacatggaatctcacttgggaagaaaacactttgctaatgtctcaggtkctttcaaatcactagcaagtcat

SEQ ID NO: 14715 - DNA, 600 bp, Chicken  19866894220268_3
aaatttaaagaagctaaacctcytgagtcatcagacaactgcgatgaagcagagtttggaaacacccaaagctttaaacttggcatcaaaacagatactactccgttctgtttgtatattgaatacttcttaatttttgttgtccaaacaggaagcctcccagctacacactgagtcagcacaataaccctttctgctttctgttgttttactctgtcccaatgggagtaaaatacagctccctgtctctgtacatggaatctcacttgggaagaaaacactttgctaatgtctcaggtkctttcaaatcactagcaagtcatactggggcaccagagaggctaaattgctcctcttgttagggcaattttttctcaaagcactctattatcacatggcttagctggcatgcctcacggacttccaggtattcaccttctgaatcagatgcagcaggctaagtaacaccagtcttagcaggccagtgctctggtaagcttcaggagcaaagacttgaagagaaatgagaccataatgaaatgctgaacatgataaactgtcagaaaggaaccatatttagaaggaaaaaaagtcagagaa

SEQ ID NO: 14716 - DNA, 600 bp, Chicken  19866894220274_1
tcattaacggattaattaggtgggctttcaaagagatgctgacagtcctgacgttcttcatttcaagttattatgacctcatggtttcatctccagtatttcacttctaaaacgttgctttcccacgtttgggcaatttctgtgtcaaagctttaattttcctttgctgttatgatctgatattacttcttcctccaatcctaaaaaaggggaaagttgacattttcagtaaaatttctcagtcttctgtgcaaggtcatgcagcatttgccttttttttttttcccagagtagctgagkgtttaacgaaaagtgaactctggtcctcacttgttactggaaaagcatccatggtaataaaaatgacaggggaaattgctgattgtatgttgttatttctcctttaggattaagcagtgcgctactgaaactggagacttaatgatggcttgttctctctgcattattgggtactgccttttcaatcaatctctaggtctttgagataggagagtgcataggtgttacctttccccatgcaggctgctcaaggaggagggaagggacttgcacaaagtccagtacaaatcctggacctgt

SEQ ID NO: 14717 - DNA, 600 bp, Chicken  19866894220277_1
aatcataacctaggcacacacagattcttccttctcagctctaggcacaaagacacgtgagtaaaagaagtacggaggagcagatgtcacagatgaggcatctccaatggaatgtcatttagtagttatctgtacagccattagtacagtggggccacaactggaagaagtgaccccaaattgaagtgaccaaaaactgaagtttgatttggggttttattttaaagcacgcaaataataactgctctattaatgacaaaaagtgttcctatggaactaaacatctcctgcagtccagakcactttactgcaagacttctctatgttgcaatatccttatgtgccatttatttgctatctaaaaaatatatatatactgaagcctaatacgtatttatatctacttgtttagaaaaaataaaagcatgagaaaagcctkccacaaaggagaagagaaagggaacggagagggtggcagacaagaacaggacacaaaaaaacaccttttccaaagattgttcaaggcraaagggacatgtcatgttaaacagtagtcaatagctgcatacaatcagtaaacaaattcagctctatgaaaaa

SEQ ID NO: 14718 - DNA, 600 bp, Chicken  19866894220277_2
attagtacagtggggccacaactggaagaagtgaccccaaattgaagtgaccaaaaactgaagtttgatttggggttttattttaaagcacgcaaataataactgctctattaatgacaaaaagtgttcctatggaactaaacatctcctgcagtccagakcactttactgcaagacttctctatgttgcaatatccttatgtgccatttatttgctatctaaaaaatatatatatactgaagcctaatacgtatttatatctacttgtttagaaaaaataaaagcatgagaaaagcctkccacaaaggagaagagaaagggaacggagagggtggcagacaagaacaggacacaaaaaaacaccttttccaaagattgttcaaggcraaagggacatgtcatgttaaacagtagtcaatagctgcatacaatcagtaaacaaattcagctctatgaaaaaagaactacatcaccatttagtggttgcaatttagattattctagcgtgtaatactttaattgtataaaacaaagctgatgtcacaaacacaaaagaacttcttgcaaagcaagcaccacaagtaatttctatgctgcca

SEQ ID NO: 14719 - DNA, 600 bp, Chicken  19866894220277_3
cacgcaaataataactgctctattaatgacaaaaagtgttcctatggaactaaacatctcctgcagtccagakcactttactgcaagacttctctatgttgcaatatccttatgtgccatttatttgctatctaaaaaatatatatatactgaagcctaatacgtatttatatctacttgtttagaaaaaataaaagcatgagaaaagcctkccacaaaggagaagagaaagggaacggagagggtggcagacaagaacaggacacaaaaaaacaccttttccaaagattgttcaaggcraaagggacatgtcatgttaaacagtagtcaatagctgcatacaatcagtaaacaaattcagctctatgaaaaaagaactacatcaccatttagtggttgcaatttagattattctagcgtgtaatactttaattgtataaaacaaagctgatgtcacaaacacaaaagaacttcttgcaaagcaagcaccacaagtaatttctatgctgccactgatggctgacaagtgatgagcactttgttcgaatgtatgtacttatgcatctaaggcaacaggtggcttataaaaagaaaacagag

SEQ ID NO: 14720 - DNA, 599 bp, Chicken  19866894220283_1
  misc_feature (1)..(103): n is any nucleotide
nnnnnnnnnnnnnnnnnnnnnnnnnnnnnnnnnnnnnnnnnnnnnnnnnnnnnnnnnnnnnnnnnnnnnnnnnnnnnnnnnnnnnnnnnnnnnnnnnnnnnnnctctttttattttttatgttttttgaacaagcatattttggcaattatttgggaatttgtattctccactgatgtctaaaattccattatttgtatttcatcgtgatgatggagtccagcactgtgtcccagaaccaaacttttgggactctattagagttatttttgcggaatgggtggagacaacattgttgggytccttggagtaaagcatgtaaaaacattttttgttacttttctgaatagtagtttggtgctaaagatccatgtactaaaccagtctgctctgacacagaatacaacagaggaagcctcaccatatcgctaattttgctgagatggaaagccagaagtcaaatcagtaacaggattcacagtgctacggttctctgaggttgttgttccaaaccagtaattgaatttgagccattgcatgcgtcttctytcccacttctccagctttgtaccttgaagctacctaactgatttaatttca

SEQ ID NO: 14721 - DNA, 600 bp, Chicken  19866894220283_2
ggactctattagagttatttttgcggaatgggtggagacaacattgttgggytccttggagtaaagcatgtaaaaacattttttgttacttttctgaatagtagtttggtgctaaagatccatgtactaaaccagtctgctctgacacagaatacaacagaggaagcctcaccatatcgctaattttgctgagatggaaagccagaagtcaaatcagtaacaggattcacagtgctacggttctctgaggttgttgttccaaaccagtaattgaatttgagccattgcatgcgtcttctytcccacttctccagctttgtaccttgaagctacctaactgatttaatttcacaggtagccataggaggtggaagggaaaggacctttttccccagcaaactcataacaccaacacaacatggctgaaattgcttcttcaggtctgacttgccaagcatggaaggcacttctatacttgaaaagccaaaccatctacagctgttgatgctgataagttgttgtataagtatggataagtatatcagctgttgggctgataagtatggtgggaagtggtagtttggagtcatctgctccaca

SEQ ID NO: 14722 - DNA, 522 bp, Chicken  19866894220296_1
aagtggttagctacatcagttttctttggttattatgttcaatcttgaacaaatgagggggaaattctgtcggtgctcctcacatgcagtcatttaattgagtattcttttcgggtaaatctcatacagtgctcctttgaaatatgagtggtgacgccaattaccacaggcatatttcctttagttagagaataagacaccgatgaaatctgttgtaattcctatatcccttcctatttagtacctactgcttattttttatttcagaggataagtatgaatcctttgctcctactcagwctttcattattattccattaagtcaaattacaatataattcaagaatatccaaattgatgaatgatggtactgcctttcaaaactaaagaatcacaaaacaagcagcttccatcatctataatctttgcttattccagttgaagacaacagaaatttaggaatttagaaaccagctgcaactgatgaattccttgcaataagggatattttacaatgcaaat

SEQ ID NO: 14723 - DNA, 599 bp, Chicken  19866894220297_1
  misc_feature (1)..(123): n is any nucleotide
nnnnnnnnnnnnnnnnnnnnnnnnnnnnnnnnnnnnnnnnnnnnnnnnnnnnnnnnnnnnnnnnnnnnnnnnnnnnnnnnnnnnnnnnnnnnnnnnnnnnnnnnnnnnnnnnnnnnnnnnnnncagcctgttccagtgctccttcaccctcaccatgaagttcttttgcatattgatgcagaacttcctaagcttctgtttatagcagtttccccttgtcctgtctcacagaccactgaaaagaggctggccatgtccctttgtctcctacacttaagatatttataaacattaataagrttgcctctcagtcctcttttctaggctgaacagactcaggtcactcagcctttccttgcaggggaggtgctccaggccctttatcatctttgtggccctctgctggactctttccaggagatcactgtcttttttgtaccgggagcccagaactggacacagtactccaggtaaggactaaccagggcagaatagaggcggaagattatctccactgacctgctagtcacactccttttaatgcactacgggatcccattgacattcttggccagtagggcacactgctggctcatggc

SEQ ID NO: 14724 - DNA, 600 bp, Chicken  19866894220298_1
ctgcaccagaaaaaggtgtgtgctgatccttgattcatccaccaccttctccctaatttggtaaaaacagggcacattttggggtggagacagctgcttgttttggttgctctttaaagcgatcctccgcaacgaatccaactcgatccaaatgcctggcttcaaacaaaacattaagttcagacttcttccagcaccgactgtgccaaatcagtttctaatccctccttcagttgtttcttcagagcacagttacagctgcaccagcatgagcagcaccctcccactcagccctgccgygctggtacaactgcttgcagggaaacaaacgagggagttgattgaagttaaaaataaaccagcattttgttttggttttaaggattacttttcaactcaggtcagatccccaatctattgggcagctgtacaaacagttgtatcagcacgaggtgccagaaccgttgatagttatcctcacgcctgaagccaacgtttacgttcccagctcacctctccttcaggactgctgcagaacaggattgcttgcaaaagtgaacacgtagggtattttagtactgcaccgagggtctatttaat

SEQ ID NO: 14725 - DNA, 600 bp, Chicken  19866894220300_1
aagaaataatgaaacttaattggagcatcactacaaacttagaccaagttcaataaccaacagatacaagcaggatatgtaccattataaaaccaaccaaaacatttcacagctatgtaattgtgtagcattttgtgttatactaaactatattccatagttactcccacttctggtttactctgttctgttaccctagagtgaagctgaaatgtcaggaacgtaactagcaaaatttcctccttccaggagtacttctgatcaaacgccatgtgatttggtatagtcaaacacacagayctccaagcccaaccacatgtcctctctcttttagatcctccagcctcctacatggatattcagggtcatcttcaccaaaatgatggtgcgtctgaaaaatacacctccattcagaasttaaaataagttgttttatgatgacatttgtcttaatatcatttctgaatgctttcccaaacctctgcacagaagttgtttggcatctgtaattaccttaaacactggtagctacgggtagacaaatatgcctctgatactggccaacagcgtggaaatatgctgtgaaaagctgccttttaa

SEQ ID NO: 14726 - DNA, 600 bp, Chicken  19866894220300_2
taattgtgtagcattttgtgttatactaaactatattccatagttactcccacttctggtttactctgttctgttaccctagagtgaagctgaaatgtcaggaacgtaactagcaaaatttcctccttccaggagtacttctgatcaaacgccatgtgatttggtatagtcaaacacacagayctccaagcccaaccacatgtcctctctcttttagatcctccagcctcctacatggatattcagggtcatcttcaccaaaatgatggtgcgtctgaaaaatacacctccattcagaasttaaaataagttgttttatgatgacatttgtcttaatatcatttctgaatgctttcccaaacctctgcacagaagttgtttggcatctgtaattaccttaaacactggtagctacgggtagacaaatatgcctctgatactggccaacagcgtggaaatatgctgtgaaaagctgccttttaattgacttctgatcagccctgacagagagaaagcatttgaggcctaggggatataggaaaaggagaagtagaaagcaaggaacagagtttggatgccagtacattttcaaaaaaaaaa

SEQ ID NO: 14727 - DNA, 600 bp, Chicken  19866894220313_1
atgggagaagggcggtggatgtcatctacctggacttcgggcaaggcccctgacatggtccctcaccgcaaccttctctctaaattggagaagtgtggatggagtgttcagtggattaggaattgtctggctggacgcagccaaagggttgtgatcaatggttctctgtcagggtggaggccagtcacaagcggtgtcctccagggcttggtcttgggaccagagttcttcaacatctttatcagtgacatagacaacagaatacagtgaaccctcagcaagtttgcaaacacctagctstgtggtgcagtcagtacagtggagagaagcgaaaccatccagagagacctggacaggctgagaagtgggcccatgtgggcctaacgagattcaacaatgccaagtgtagggtgttgcacttgagccagggcaatcctgggtatttatagagactgagggaagaactcctagagagcagcccttcggaggacttgggaatcctggtagatgagaagctggacatgagccagcagtgtgcgcctgcagcccagaaggccaactgtgttccaggctgcattaaaaaaggggtggcagcaggga

SEQ ID NO: 14728 - DNA, 600 bp, Chicken  19866894220319_1
tttatatgatccgcatgtcagggatgcagacttaaacagaaggaactttgcaatttagacatctcctgtgtagataaaaataattttttagcaaatggtttcattgtgtaaggacaggtaatctcagcgacacatgtcagctgtctcctgctctccgctgactgttacagatggcgctgtcactgggagagtgaatagttatgctgagttaacctcatgtgccactttgtattacaggccctgtctgtagttcacaacttttctggactttagctggaggacagcagatggttgtccctrtgactgctggccccaggtgtgcagcaccaggcacaggagctgaggctgcctctcctgcccatgcaggaacagcactgatacaaggcgaggtagaggggtgaagtggacgtggataaggataaggataaggaagaggagaatcaaggaggatgagcaataggggttttatcaaaaggcatcacaaagaagaagcctgaggaaatctgggagaggaatactggcagcttcrttgctgcttgaagagaggtcctgagagtaaatgaggctctagactggttgctggtagctgaccagtaggga

SEQ ID NO: 14729 - DNA, 600 bp, Chicken  19866894220319_2
tattacaggccctgtctgtagttcacaacttttctggactttagctggaggacagcagatggttgtccctrtgactgctggccccaggtgtgcagcaccaggcacaggagctgaggctgcctctcctgcccatgcaggaacagcactgatacaaggcgaggtagaggggtgaagtggacgtggataaggataaggataaggaagaggagaatcaaggaggatgagcaataggggttttatcaaaaggcatcacaaagaagaagcctgaggaaatctgggagaggaatactggcagcttcrttgctgcttgaagagaggtcctgagagtaaatgaggctctagactggttgctggtagctgaccagtagggaggtgactctgagagatggcatggaggggcatgggaaagactgggacaagaaaccaggctttaagtgtagaacagcactgctatggggtaacacatggaaaggaagccaagacactgagtctgtacaaggcagcagatttgggcagtgagaaccagcactgaaatgaacataagagtacactatatgtttaagtatgggatgaggaatgcactgtttggagaggataaaa

SEQ ID NO: 14730 - DNA, 600 bp, Chicken  19866894220339_1
tcattaactctattttgtctgcattcttttgaattcctctgtatgaaaaacagttctcaattgcaccagtaatccttaatttcctgcactctttgaagcagttgtctaatcttgaacgtaaaggtcagcaggttcataacctaaatgacagaacaggtaacaacaagtagcatgctataaatcacagtactttcagactacagcatgctgtatctggctacaaggtacctgtaaatagttgtgttgaaaatattacgtttcacattttgcgattgttttctgatctgaaagggtaaataygcaaactatttccatagataattaaggtgatatacttaaaaagaacaggcaatttaatcagtgtgtttacaagtcttaatatatgtgactaaaacttccttaaacattcacagttaaaaatatgaaaaagccaatcccttcatggaatggagtagctgtgtatgggaatgaattcgtggttaatgataatcgtaccagataaacaggatatatttcttaatgatgccactttaaaaaaaaaattatactcatataccagttccacaaatccataaattgtctgaggtttgactatgaaat

SEQ ID NO: 14731 - DNA, 600 bp, Chicken  19866894220339_2
gtttatcaaagcaataattcctatatctgatatctaatcatcatcaatgttattaaaaataacaatcttataatgcccaagagagatgatatgctaggtcatggggaagcagaaagtgtagaaccatcattcctggcaaagagaagctccaaattcccagttgtaaagtggggagtcagggagggtttggcatacttgctgatgccagtgcttgtagtctgagcagctggcaagattctgcatcatttttcaccctcaagttaataaatctgtatagatgttgtgcttgtgatttagtgwtgaggggcccaggagttcataatttatgagtcttagcagaagagctgcaaaattaatctttacaatagcaacacctgttctttcactcagcttttaataaattacatgtggataatatttaccacattctttgactaccttcagataatagcagccaggtgtaaagatagtttttggtagtgggaaaacaatgcaaaaagagaagatatgtgagtcaccttgagttcttttaaattaataccttgtggttactgttctacaagaaaaagaatggaaaaactttttttggggtagcggtgc

SEQ ID NO: 14732 - DNA, 599 bp, Chicken  19866894220344_1
  misc_feature (1)..(6): n is any nucleotide
nnnnnnagagagacagagagagaaagagagagaaagagagagaaagagagagaaagagagagaaagagagagaaaggatcccaacccaaaatgtgttagagcttcgttttctgagtaacgagactaatcatgtttcctctacttggggtctctctcttctcttccttttcttctaggtcctctggatccacactgacatagaaatatcccatgatggagaaaataatgcacacagcaaagagtagaacagtgaacaagacaaattcagcccactaggaaagagagaaagaaacaaaacarcaagtcaggtaacgccagtctcacaatccagaggatttctctgcgtgtccacatgcttttcaaagtgctgggtgaaagcttgccagcacctaagatttctcacaaggtagaaactttctcatcctgttttctggtaaaccacatatacgtaatgcagttatgtaaatatgaatatagtgatatacctcaaaacaaaccagttaccttgggctagtttcattaaacctcttcttacaaatctgccctgactggcatatacstgcctgagctttttgcccacaagatacctttgagacagg

SEQ ID NO: 14733 - DNA, 600 bp, Chicken  19866894220344_2
aaattcagcccactaggaaagagagaaagaaacaaaacarcaagtcaggtaacgccagtctcacaatccagaggatttctctgcgtgtccacatgcttttcaaagtgctgggtgaaagcttgccagcacctaagatttctcacaaggtagaaactttctcatcctgttttctggtaaaccacatatacgtaatgcagttatgtaaatatgaatatagtgatatacctcaaaacaaaccagttaccttgggctagtttcattaaacctcttcttacaaatctgccctgactggcatatacstgcctgagctttttgcccacaagatacctttgagacaggcagtttgctgtgagccagaaacaagctccagttcacaccttcacatcatcatcccagaagcttggcagcttggaagaaacaacttctgcaccacagcctccccacgcagagcccaatatcacaggggtgcartaggcagctggccctgacggagtcccaggctggacacccatggggctggctggatgaaggcaagcagcttttggtatgcaacagcaacacatagctggcattgtgtccaggctccaggtccaaataaag

SEQ ID NO: 14734 - DNA, 600 bp, Chicken  19866894220344_3
tggtaaaccacatatacgtaatgcagttatgtaaatatgaatatagtgatatacctcaaaacaaaccagttaccttgggctagtttcattaaacctcttcttacaaatctgccctgactggcatatacstgcctgagctttttgcccacaagatacctttgagacaggcagtttgctgtgagccagaaacaagctccagttcacaccttcacatcatcatcccagaagcttggcagcttggaagaaacaacttctgcaccacagcctccccacgcagagcccaatatcacaggggtgcartaggcagctggccctgacggagtcccaggctggacacccatggggctggctggatgaaggcaagcagcttttggtatgcaacagcaacacatagctggcattgtgtccaggctccaggtccaaataaagtctgcttgcctaacgctgagttctagcactattagcacagcacaagtcacagtattacttacagccattgaaaggcacagggaagaccattgctccagagggcaatgctgagggctacgcagagccctggctgggagacagctggggcatgcaggagcctggggcttggta

SEQ ID NO: 14735 - DNA, 599 bp, Chicken  19866894220345_1
  misc_feature (1)..(67): n is any nucleotide
nnnnnnnnnnnnnnnnnnnnnnnnnnnnnnnnnnnnnnnnnnnnnnnnnnnnnnnnnnnnnnnnnnnttggagacacaatactttcaagagctgaggaactcacacttttaacttaccccaaagccataaaatcataccaagagatagcacttaaaccagtaatttgaaaaaattgactatacaactagcctagtatgttaactcaagtatctcctgaataaagccaaaaccagtggatagtatatgtctatcttctttctgtaacttactccaggaaatgtcaactccttaaaaaaaarctataggttcctgcaggaggaatactacaattgagaagtcactcttatcaatgtccagacactacaccaacaagtaatttctagttcagtatcaataggctttcatttcgttcttttactttgtgttttaaatgaagtgagagtaatgccaatataattcaccagcaacagtaatatgcttggtgccttgagaaggaaagcaaggcttcttcwatgaatattgaatttgatgagaagtttgaagcttcataactatcaataccttaagattaggaggtaatcctttctggatgcctccc

SEQ ID NO: 14736 - DNA, 600 bp, Chicken  19866894220345_2
cctgaataaagccaaaaccagtggatagtatatgtctatcttctttctgtaacttactccaggaaatgtcaactccttaaaaaaaarctataggttcctgcaggaggaatactacaattgagaagtcactcttatcaatgtccagacactacaccaacaagtaatttctagttcagtatcaataggctttcatttcgttcttttactttgtgttttaaatgaagtgagagtaatgccaatataattcaccagcaacagtaatatgcttggtgccttgagaaggaaagcaaggcttcttcwatgaatattgaatttgatgagaagtttgaagcttcataactatcaataccttaagattaggaggtaatcctttctggatgcctcccagcatagaaatactgacaaaccctcactatgaaatgaatctattcagaaggtaatggcccattttaccatcaagacatatttactcaaaaatatgagtatttttggtatattccctaaaaaatttctcaaatataaaaccactactctgttaagccccagactcacatgaaagcttacgtagcaggctgaaagctcacctgcttaagataytac

SEQ ID NO: 14737 - DNA, 600 bp, Chicken  19866894220345_3
tcwatgaatattgaatttgatgagaagtttgaagcttcataactatcaataccttaagattaggaggtaatcctttctggatgcctcccagcatagaaatactgacaaaccctcactatgaaatgaatctattcagaaggtaatggcccattttaccatcaagacatatttactcaaaaatatgagtatttttggtatattccctaaaaaatttctcaaatataaaaccactactctgttaagccccagactcacatgaaagcttacgtagcaggctgaaagctcacctgcttaagataytacagggctttaaattctccctaggcacagtggaaggcaatttacagaagtagttattttcaattcagagatggcaatgagcacagcccccattgctccaacgttcatatctcatttctaattagattgcacaaagctagattataacaagaagcaaaacctttacctagagcagactttaagaaaacaaacaagccaaaggaaagctttacaattactccatgtttgtttgttcataagcctgcagtatggagagcagcttagcaaatattctgtttaagacttaacatttcttttttt

SEQ ID NO: 14738 - DNA, 600 bp, Chicken  19866894220346_1
ccaaccccctgctatgtgcagggtcgccagcatcggaccgggctgcccacagagccacatccagcctggccttgaatgccatgggctcccatggatgtggagagcaaagaaggtttccatgcgtagcatggagccaatgatgcgctgaagttggggtttaaacccaggcaagcagctgtgctggagcagccctgcaaatgctggctgtgcctcagtttcccctttgctttgcagccacgagccagagcagggagggagcaattcagcagaagcaatccgatgagccactcgttttgctcrtgctgctgacatcttgctgagggttccctttcaaggggaggatttctgtttttcaaggctctgcatatctccatcatcccccattggccctggagcaaacacactcagctgctgggggtcccacctctaacatttcccatagtccttacaaacactgctcacaccgatctcttcacatcacgcaggtgggttttcccagcaggattttgctctcagcacccccagctcggtccaggcaaggccctgttgcatgcccttgcagcgcgggtgcagctattgaatcaacagctttgctgctgc

SEQ ID NO: 14739 - DNA, 600 bp, Chicken  19866894220347_1
atacccactgtatctcagcacagtaacagcctgttaaaattctctttgctatcgtatctttggaaatatgaaaggaaaatctttcaacagcctcattccctctgactccaatctagatcatgttgagagggataggtgccagataaatgcattggtggtaacaaagataagaaggatgtgcataccatcaacagttacatcgcctgaattatgttctaagccagacgcggtgacaataacaggacagtgttaatagggtgagtggttaaattacctgcctggtatctttcaaagagatcragttgcatttcattgctggaaaattcctaatcaagacaaagtgcattatctcagaatctcccrtctgacaatacaacacagtgggcatctcacaagaagaggttaatttaagtggtgcctttgtgcacttcacaaaaggggctgggttgaaaacaggacgtcaaagtaatctctctgctgaaaaatagaaggatcatccaagaacttttcaatgttttgggtctatctgctcttggaatatctttaagacaaaagatttgtgcctaaggtgcaattcaacatttttgctttgatttctat

SEQ ID NO: 14740 - DNA, 600 bp, Chicken  19866894220347_2
aaatatgaaaggaaaatctttcaacagcctcattccctctgactccaatctagatcatgttgagagggataggtgccagataaatgcattggtggtaacaaagataagaaggatgtgcataccatcaacagttacatcgcctgaattatgttctaagccagacgcggtgacaataacaggacagtgttaatagggtgagtggttaaattacctgcctggtatctttcaaagagatcragttgcatttcattgctggaaaattcctaatcaagacaaagtgcattatctcagaatctcccrtctgacaatacaacacagtgggcatctcacaagaagaggttaatttaagtggtgcctttgtgcacttcacaaaaggggctgggttgaaaacaggacgtcaaagtaatctctctgctgaaaaatagaaggatcatccaagaacttttcaatgttttgggtctatctgctcttggaatatctttaagacaaaagatttgtgcctaaggtgcaattcaacatttttgctttgatttctatttcttcatattcccatcaaaggcacctgactctctcttcaacccacagctggcacattggttt

SEQ ID NO: 14741 - DNA, 600 bp, Chicken  19866894220354_1
tctgtccttaggcttggggccagctggtgccccccaacatgccatacatgcagggatggattgcagctacctggggaatggccccagcacttctgagcatgccatataagaggaaaggagggattaaggcaccgtaagtcccactaacgtgacacccacaagtcattcccaagggccaccacaacctcattttgctacagtaaatatatctggcattacctatcctggaaatgcacatgactagtccattggaaaaggcgtctgctgatggcagcatgacaagcaatatccataactgcmtgtaatcttgcacagacattcaattgctccaatccagctccattgaagatgaagagacttctattatcttgagatccttctgccaccgttattgcaaactgatgctgacacacggcccgggcacgctcagagcaacgtgcttattaaaacacgcattttgtcacggctggcaagacagtggaaccagggcagagggatggttgatagttgggcaggcagtgacaagatggatggacctccagctcaaggcaggatgtggatgagtgggttggggcactcagtgttgggctttcccctccc

SEQ ID NO: 14742 - DNA, 600 bp, Chicken  19866894220354_2
tacttctaaatctgccaagcaaagaggactcatttatgccctcagtaagagcaaatagatttcatggaagtacaaaaatcccatattttaatagcttcattcttatatcacttcttaaacactccagaaatttgtcttttacttgattaaagccaaataatactcacaagagtgacgcgctcagtgccaactgcagaactacttttgtgggtgatttctccaaacccggcgctttgaccttgagtggctccaactcctctgcagcgagctcaaaagccatggggtgcaggagcacagctyctcacgtggctttctccctaggcttttgctcagttcccagcaagatttggcctctctctgcttggtgtaggacatctgcatgtgcttgggacttgcaacgtgcaagaggtgtgtgctcagcactgtgcttgctgagggcatccctgcatcatgcagatatggggctttgtttcccgacaaaccaaccctaacccacagtactggagagacagttcaaccatacaccaggaacaacccaggagtgtctcaacttgctcaaaacaatttgttcaacccctttgtgggaggaagggaggaaca

SEQ ID NO: 14743 - DNA, 600 bp, Chicken  19866894220358_1
tgtaaaatgaaatgatggtctcttgaactgtattggaacattttttatattttcatagcttatatttctatgtttgggtgaattgtttgaatgatacaaataggaattttcctttattagttgctgtagacccagtaaatgtcttgattgagaagacaagcatctaacatctattcattcattaagttattgcgatagtggaagaagagcgtgtcagtaaccttctgagccaaggtcttcactgggaacagggaaaggtacacgacttaggcaagatgaagagcagctcattgggagtgrtttcatgaagggatcggtcagaacttaccagaaatgactcaaaataaaacgtcctttgaattcgtgtagatctagttgaaaatatgaaaagcttatgatttatctgtatttgtgtacacataatgcagatgtgtagacttgtcagtgaattgagatagctatagtgaattgtaaagctaagcatatttattgtgagaggaactgaagattctatgtagtgttttacaatattgatttttttttcagtgattctggagcacatatctttaccaattatatatgtttgtgggatttaaaaaa

SEQ ID NO: 14744 - DNA, 600 bp, Chicken  19866894220358_2
gtagacttgtcagtgaattgagatagctatagtgaattgtaaagctaagcatatttattgtgagaggaactgaagattctatgtagtgttttacaatattgatttttttttcagtgattctggagcacatatctttaccaattatatatgtttgtgggatttaaaaaataaattagggagctttgaaaacaaactcaattctacaatgcaaaaaatatctacagtaagaacatgctcattcttgacatgattttaaataattttcttcccatatttgttcatcataagagctatttgtgygtaatcaagggttcagcttttctacagctcatcatgtgttcctaatcaaccctgtcgaggaatcaggctgcagaatttatgacgttgccatcatttctatggtaataagatagttgatgagcacagtgttattayttctttgtaggatcagggataagaaagactggactgtgggaggcataattaacagggacacaactatctctagwtggagaaaaaggcagcgtgggaaattatgggcaattaaaggtgttttgcataagggttccattccaatttgcctcagtgcaaagtttgcaa

SEQ ID NO: 14745 - DNA, 600 bp, Chicken  19866894220358_3
taccaattatatatgtttgtgggatttaaaaaataaattagggagctttgaaaacaaactcaattctacaatgcaaaaaatatctacagtaagaacatgctcattcttgacatgattttaaataattttcttcccatatttgttcatcataagagctatttgtgygtaatcaagggttcagcttttctacagctcatcatgtgttcctaatcaaccctgtcgaggaatcaggctgcagaatttatgacgttgccatcatttctatggtaataagatagttgatgagcacagtgttattayttctttgtaggatcagggataagaaagactggactgtgggaggcataattaacagggacacaactatctctagwtggagaaaaaggcagcgtgggaaattatgggcaattaaaggtgttttgcataagggttccattccaatttgcctcagtgcaaagtttgcaattattttataaacttactggtaccttaagtaatactcctagaaatactaattattggtgaatgtttcagtatcttgcccattaaatattatgttatgctctcttgattcttcctgtggtaactactaattgttaa

SEQ ID NO: 14746 - DNA, 600 bp, Chicken  19866894220358_4
aaaaaatatctacagtaagaacatgctcattcttgacatgattttaaataattttcttcccatatttgttcatcataagagctatttgtgygtaatcaagggttcagcttttctacagctcatcatgtgttcctaatcaaccctgtcgaggaatcaggctgcagaatttatgacgttgccatcatttctatggtaataagatagttgatgagcacagtgttattayttctttgtaggatcagggataagaaagactggactgtgggaggcataattaacagggacacaactatctctagwtggagaaaaaggcagcgtgggaaattatgggcaattaaaggtgttttgcataagggttccattccaatttgcctcagtgcaaagtttgcaattattttataaacttactggtaccttaagtaatactcctagaaatactaattattggtgaatgtttcagtatcttgcccattaaatattatgttatgctctcttgattcttcctgtggtaactactaattgttaactttcaagacaggaggacacttgttactttaaaatcttcaaaacctatgtttgtgatcctcatgcttccagtct

SEQ ID NO: 14747 - DNA, 600 bp, Chicken  19866894220358_5
gacattatctctgtcacattggcacatgtgtctccccagtgaaatgtggtggtgcgtggtggaactggttccttgtgcttcaggcattttctaagacttagacagcattgaagggatctcaggttgatcttcatgcttgaaaacttgaaagcaaaaggaaaagcatttccaaatgagactactgtgcttgtatctgaactcgttatttgattaatgctggttgtttgggcctccttgctacctgctagcgagcagtgtgctttacgtctataactgtgactttctgccttctttccacaycttttccaaagcaagcaagagggaaaggtagacgcatatggcttactttaaggataaaaatatttaatatcattggcttagcttgtggagtgttgttacagtgtctggtgcatttctgtgtaagttttgtgcttctggcacttttaatgactcccaaagctctgccttgtttcaggacatagagggcccaggtcttccattcatgtggcatgatagatctcccttcctttgccgtgctgtgcttagtgcagagggaccgtccttggaaaggaaagattttgtcctaagtagacaaatgat

SEQ ID NO: 14748 - DNA, 600 bp, Chicken  19866894220362_1
acagcccagatcagtgtgaagagcagaggggagaacagaggtggccaagaaaaagaggaaccttgctgctgggtcctgtgatgctagctcactggttttgctcggggtcagagcactgcagttagagagctgtggaaaagagtgaaatgggtcaatgcagcaaatagggaaactcaattaaccgctgggcggtcagtgtcagtgacacagggaaagtaaagggaagtaaggagctgtgggagagctgcgggcttgctggaggaacaagattctacaaggcttttacatggcctctgatgwctgcatctatcatccctgttwttccttggacctagctgtttttgagggtgaagaacagttcattgcgggggctgcaggcagggcaacaagctcagaagggaatygcatctagattcttctgcatagttgaccacagcatgggagcatggagctttcaggctgacttcattttgcacagagatgcgtctgatcactgtcatgatagaagttgttctggaaggaggcaggagctgggaggagaggtcacatctgtgctttgcctcctgctctgtaaaggacagcrcagatctttctcctggt

SEQ ID NO: 14749 - DNA, 600 bp, Chicken  19866894220362_2
agcagaggggagaacagaggtggccaagaaaaagaggaaccttgctgctgggtcctgtgatgctagctcactggttttgctcggggtcagagcactgcagttagagagctgtggaaaagagtgaaatgggtcaatgcagcaaatagggaaactcaattaaccgctgggcggtcagtgtcagtgacacagggaaagtaaagggaagtaaggagctgtgggagagctgcgggcttgctggaggaacaagattctacaaggcttttacatggcctctgatgwctgcatctatcatccctgttwttccttggacctagctgtttttgagggtgaagaacagttcattgcgggggctgcaggcagggcaacaagctcagaagggaatygcatctagattcttctgcatagttgaccacagcatgggagcatggagctttcaggctgacttcattttgcacagagatgcgtctgatcactgtcatgatagaagttgttctggaaggaggcaggagctgggaggagaggtcacatctgtgctttgcctcctgctctgtaaaggacagcrcagatctttctcctggtgctcagagaggacgaccctct

SEQ ID NO: 14750 - DNA, 600 bp, Chicken  19866894220362_3
gggtcagagcactgcagttagagagctgtggaaaagagtgaaatgggtcaatgcagcaaatagggaaactcaattaaccgctgggcggtcagtgtcagtgacacagggaaagtaaagggaagtaaggagctgtgggagagctgcgggcttgctggaggaacaagattctacaaggcttttacatggcctctgatgwctgcatctatcatccctgttwttccttggacctagctgtttttgagggtgaagaacagttcattgcgggggctgcaggcagggcaacaagctcagaagggaatygcatctagattcttctgcatagttgaccacagcatgggagcatggagctttcaggctgacttcattttgcacagagatgcgtctgatcactgtcatgatagaagttgttctggaaggaggcaggagctgggaggagaggtcacatctgtgctttgcctcctgctctgtaaaggacagcrcagatctttctcctggtgctcagagaggacgaccctctgtgctgtgattctgagtgcaaggggccacccaaacggatggctgttccaagggaacaaggctaaatgcctcttccctcagtga

SEQ ID NO: 14751 - DNA, 600 bp, Chicken  19866894220362_4
tacatggcctctgatgwctgcatctatcatccctgttwttccttggacctagctgtttttgagggtgaagaacagttcattgcgggggctgcaggcagggcaacaagctcagaagggaatygcatctagattcttctgcatagttgaccacagcatgggagcatggagctttcaggctgacttcattttgcacagagatgcgtctgatcactgtcatgatagaagttgttctggaaggaggcaggagctgggaggagaggtcacatctgtgctttgcctcctgctctgtaaaggacagcrcagatctttctcctggtgctcagagaggacgaccctctgtgctgtgattctgagtgcaaggggccacccaaacggatggctgttccaagggaacaaggctaaatgcctcttccctcagtgaagcataatgcagtgtctgcagtggtattgcaagcatctggcttggcctggagaaaaaaaaaaaagaatgcaaaccacttcttcaagaattttttggcttggctcagttccacttgtgttataggcatatttaacgtgccttgtgctggacgtataaaggagatagctttatagaaacac

SEQ ID NO: 14752 - DNA, 600 bp, Chicken  19866894220376_1
tggacaggccctgggcaacctgatctatttgtggatatccctgttcactgcaggggagttggactacatggccttgagagtcccttccaactctaaggattctatgataagattggcaaaaacatggacatagaaaagacccaaattgaaacaaatcattctagcccaaagccatctaatagccttcacatgggcttgcattcacacatttatgtaccacttaggtggtaaaacatcttcaccaaagttgatagaacgttgtttaaaataggccctaaggtgtggctttaaaatcaattwaattaaaatggtacaaaaagttgtgttaattcctctgagatgccattagtgtttcagcttcgtgttctagccatgtacgagtaattgtacatgcaagcctaaacctgtggccaacatcagacagagtgattaatcccagggaaatccagcaagaaatgagtatgtttattatctgttgtataactcatcccctactaatagttatatgtattttcattaggtacagtgcatgatcctattaatacttgatcaaggaaaatggaacttctgatatcagcaggaacccagtcttgtaattgc

SEQ ID NO: 14753 - DNA, 600 bp, Chicken  19866894220379_1
ctggtgctgttgaatggctgctctctccataaatgctttgctgcctaaagcctaaatcacacagggtgtttaaagagagaagaaaatgtctattaattggcaaagcctttgcagcctagggcttgcatgcagctgtaacacttaggtgaagcaaagcctccagggtgtttgtagaaggatggagaatgcagttttccttctgtggcaaatgtgttaggtaagtatacaagaatacggggaaagggaagggcatctttgcatgctcagtgcaaaaatccctcattgtgcctccctggcatkatcaattgtctygatgtttgattttttttattgctttgtcaactcagtgttgttaaatccaaaccagcacaattagtaagagcagttctgcaaagatatccatcccttaaatgggcctgttactactcctaccgtagctcctctttaaatctctttgagacaagaagaccgagcctgtattctagaagcagaagacatggatttcatcttgcatacaactagaaattgttcccctgaatgagtcggtgacattctggttcctgttagatggagaaaaggaagccttccttgcttgcaggg

SEQ ID NO: 14754 - DNA, 600 bp, Chicken  19866894220379_10
gcaaaagacaaaaccataccaaaccatgcaatgagtcagtgacagaaatgctaagaagcccagactcattgctgctttttccgtcttattaggtaaactacaccgcctttcttctgccttcctcagctggcacttgacagactttgaaatgcatatctatraagtgctggttgtccagcttctactcaggcagagaagctgagaacaataagtccagcaccggggctgaccaggcaacacgtaaccagatggataaatcctgtgtaactgctacacrgcatttaaaagcactttttttcraccacttttgagttccttcttcccacagaactcaagaagttgctgagtctgagaacacctagcagcagtttgtcctacaaggtggaatctgwtcatgctgttcatttaatcttctttttctctttcctaaggctcgtttcctctccctttcccaacctatatccaaatctcgcattgcccccttcagtaatgacaaattgttctagtccatcacactcctgatccatgctgttcctccactattccaggccacaggacycacactgtgcgctccacaacagtgaaagaactgggagctga

SEQ ID NO: 14755 - DNA, 600 bp, Chicken  19866894220379_11
gtaaactacaccgcctttcttctgccttcctcagctggcacttgacagactttgaaatgcatatctatraagtgctggttgtccagcttctactcaggcagagaagctgagaacaataagtccagcaccggggctgaccaggcaacacgtaaccagatggataaatcctgtgtaactgctacacrgcatttaaaagcactttttttcraccacttttgagttccttcttcccacagaactcaagaagttgctgagtctgagaacacctagcagcagtttgtcctacaaggtggaatctgwtcatgctgttcatttaatcttctttttctctttcctaaggctcgtttcctctccctttcccaacctatatccaaatctcgcattgcccccttcagtaatgacaaattgttctagtccatcacactcctgatccatgctgttcctccactattccaggccacaggacycacactgtgcgctccacaacagtgaaagaactgggagctgaggggtatcagtgaccagcactgccagggtcagcaggcagctctcatgcagggcctgacaaggagtttagcagccagcagcctcttcacctca

SEQ ID NO: 14756 - DNA, 600 bp, Chicken  19866894220379_12
ctgtgtaactgctacacrgcatttaaaagcactttttttcraccacttttgagttccttcttcccacagaactcaagaagttgctgagtctgagaacacctagcagcagtttgtcctacaaggtggaatctgwtcatgctgttcatttaatcttctttttctctttcctaaggctcgtttcctctccctttcccaacctatatccaaatctcgcattgcccccttcagtaatgacaaattgttctagtccatcacactcctgatccatgctgttcctccactattccaggccacaggacycacactgtgcgctccacaacagtgaaagaactgggagctgaggggtatcagtgaccagcactgccagggtcagcaggcagctctcatgcagggcctgacaaggagtttagcagccagcagcctcttcacctcagctatcccacagtacagctgggagggtggtaatcacccagcttggaggctggagagggaggcagaaaaacttaaaggttagcaagaacctggagggtggtagaagtcagaacatctggtcagctggtgtactctaagcaagcagacacactgaggcagatgtgcatg

SEQ ID NO: 14757 - DNA, 600 bp, Chicken  19866894220379_13
agcaatctgctgcattaaaaaaaaacagaagcagataaatacgataaatattaaacacgaagaataaatttacatgtaataaaagttggctaagctttgtaaaactcaattctattagctcacttctgtgaggtacttagtgcaaattggaggttgatcaagcccacacaattcacatcaagacgtacagatcttctcaaaatgcagttctcggagatcttagatttctaacagggctggtggcatcctggcctgcatcagaaagagtgtggccagtaggactaaggaagagattgtccytttgtatgaggcaccggtgagacagcgcctcaaataccgtgtttggttttgggcccctcactacgaggatgctgaattgcctgaacgtgtgcaggaaagagcaacaaagctggtgaagggactggaaaacaaggcatatgagggtgggcagagggaactggtgttgtttagtctggagaagaggaggctgagggaaggccacgtcactccctacaatgacctgaaatgagggggcagcagggaaagcgttggtctctttttcttttctcaagaggcacatgatagcgtgtgaggaaacag

SEQ ID NO: 14758 - DNA, 600 bp, Chicken  19866894220379_2
aatggctgctctctccataaatgctttgctgcctaaagcctaaatcacacagggtgtttaaagagagaagaaaatgtctattaattggcaaagcctttgcagcctagggcttgcatgcagctgtaacacttaggtgaagcaaagcctccagggtgtttgtagaaggatggagaatgcagttttccttctgtggcaaatgtgttaggtaagtatacaagaatacggggaaagggaagggcatctttgcatgctcagtgcaaaaatccctcattgtgcctccctggcatkatcaattgtctygatgtttgattttttttattgctttgtcaactcagtgttgttaaatccaaaccagcacaattagtaagagcagttctgcaaagatatccatcccttaaatgggcctgttactactcctaccgtagctcctctttaaatctctttgagacaagaagaccgagcctgtattctagaagcagaagacatggatttcatcttgcatacaactagaaattgttcccctgaatgagtcggtgacattctggttcctgttagatggagaaaaggaagccttccttgcttgcagggcagaccataggg

SEQ ID NO: 14759 - DNA, 600 bp, Chicken  19866894220379_3
agaaactactgggctgaaaggaggactcatagtgcacccacatccttaattacggaggtgtgtgcctcctggcttgcatttctccaccgagcacggtgtgctgggtctaagtgctagttagaagctttcacacgtgccagaaagctgccttggtttggtgccatggaatagacacgttcattctctgagcgctggggcccgaccaaggatggcagcaaacatttatgagcacaggtgttactggcaggtgttttgtttccgaggaagctgccttctggctgagctgctgccagcccatckacccgcctcccccatcgccacacaacctcacctcccccagggacctgcaggcaggcctatttgcaaacagcaagcacaggcaatgaacacatcaggtaattaaatggcagatcaattcgacttaacttctcctgggaaagcagcccttgggagacagaagaatgaggcatcaggagacaaaagcagagagaaaaattgagaggtatgggacagaaggagtacagctgaggagcagagatggaaatgcagcaggcagagggagtatgcatgatgtggtgcaaagccacagctgtggggaag

SEQ ID NO: 14760 - DNA, 600 bp, Chicken  19866894220379_4
agacgtgtcatgagggcaggaactttctgctactaatatgaaaaacagacagtggaactgacaggcaggaggaaaggaaattaaacaggctgctatcgctccgaccagctgagtggaacatcaggggaaaaaacaacaacatgaactcctaattggtttccagtttctatctttaataatcagagatagtggtagtacgaacccactttgtaatgctggctcaggccttcaagtgtcattggtgtggtaccagaaactagagagccttttcttctgaaaaatcagatgattcttattttycccttctttgaaaaaaagaatctggaatttacgtatttatttctttttttgctctgcaacagaggtgctggaaatataattctgtatttaaaagaaagatgaacttgatgatcgtcatctggctttgggagagggagcctcaagaacaatacaatcagagaaattctgcaagccagcaacacaaagggaccttccccccgtgtggccttcacccgcccggagtcccctgcagcaraagtgttctcagccagcatgcatccctcagctgggaagggtgaaaacatctccctccctgtcccc

SEQ ID NO: 14761 - DNA, 600 bp, Chicken  19866894220379_5
tcattggtgtggtaccagaaactagagagccttttcttctgaaaaatcagatgattcttattttycccttctttgaaaaaaagaatctggaatttacgtatttatttctttttttgctctgcaacagaggtgctggaaatataattctgtatttaaaagaaagatgaacttgatgatcgtcatctggctttgggagagggagcctcaagaacaatacaatcagagaaattctgcaagccagcaacacaaagggaccttccccccgtgtggccttcacccgcccggagtcccctgcagcaraagtgttctcagccagcatgcatccctcagctgggaagggtgaaaacatctccctccctgtccccaacccctgctgcaggacctgcccttaccctagggtgtgcttctcacattcctcttgcagcgctgcgggagccagccgtgtgtggggcatctcaatgtcakggcttgaagctgctgtgccaaagaacaaatgagtgtatgtcrcagtgactctctagggaagccttgtctccccacttctttggctgaggctctgtagtgtcatgatatgttcctataaattccctccttgcatgg

SEQ ID NO: 14762 - DNA, 600 bp, Chicken  19866894220379_6
gaacttgatgatcgtcatctggctttgggagagggagcctcaagaacaatacaatcagagaaattctgcaagccagcaacacaaagggaccttccccccgtgtggccttcacccgcccggagtcccctgcagcaraagtgttctcagccagcatgcatccctcagctgggaagggtgaaaacatctccctccctgtccccaacccctgctgcaggacctgcccttaccctagggtgtgcttctcacattcctcttgcagcgctgcgggagccagccgtgtgtggggcatctcaatgtcakggcttgaagctgctgtgccaaagaacaaatgagtgtatgtcrcagtgactctctagggaagccttgtctccccacttctttggctgaggctctgtagtgtcatgatatgttcctataaattccctccttgcatggcttccatccaagcaaatcaaggctatttacatacacccaccatatttacgagaatgctgtgaagaagcaaaagacaaaaccataccaaaccatgcaatgagtcagtgacagaaatgctaagaagcccagactcattgctgctttttccgtcttattaggtaaact

SEQ ID NO: 14763 - DNA, 600 bp, Chicken  19866894220379_7
agaacaatacaatcagagaaattctgcaagccagcaacacaaagggaccttccccccgtgtggccttcacccgcccggagtcccctgcagcaraagtgttctcagccagcatgcatccctcagctgggaagggtgaaaacatctccctccctgtccccaacccctgctgcaggacctgcccttaccctagggtgtgcttctcacattcctcttgcagcgctgcgggagccagccgtgtgtggggcatctcaatgtcakggcttgaagctgctgtgccaaagaacaaatgagtgtatgtcrcagtgactctctagggaagccttgtctccccacttctttggctgaggctctgtagtgtcatgatatgttcctataaattccctccttgcatggcttccatccaagcaaatcaaggctatttacatacacccaccatatttacgagaatgctgtgaagaagcaaaagacaaaaccataccaaaccatgcaatgagtcagtgacagaaatgctaagaagcccagactcattgctgctttttccgtcttattaggtaaactacaccgcctttcttctgccttcctcagctggcacttgacaga

SEQ ID NO: 14764 - DNA, 600 bp, Chicken  19866894220379_8
cttgtctccccacttctttggctgaggctctgtagtgtcatgatatgttcctataaattccctccttgcatggcttccatccaagcaaatcaaggctatttacatacacccaccatatttacgagaatgctgtgaagaagcaaaagacaaaaccataccaaaccatgcaatgagtcagtgacagaaatgctaagaagcccagactcattgctgctttttccgtcttattaggtaaactacaccgcctttcttctgccttcctcagctggcacttgacagactttgaaatgcatatctatraagtgctggttgtccagcttctactcaggcagagaagctgagaacaataagtccagcaccggggctgaccaggcaacacgtaaccagatggataaatcctgtgtaactgctacacrgcatttaaaagcactttttttcraccacttttgagttccttcttcccacagaactcaagaagttgctgagtctgagaacacctagcagcagtttgtcctacaaggtggaatctgwtcatgctgttcatttaatcttctttttctctttcctaaggctcgtttcctctccctttcccaacctata

SEQ ID NO: 14765 - DNA, 600 bp, Chicken  19866894220379_9
atttacgagaatgctgtgaagaagcaaaagacaaaaccataccaaaccatgcaatgagtcagtgacagaaatgctaagaagcccagactcattgctgctttttccgtcttattaggtaaactacaccgcctttcttctgccttcctcagctggcacttgacagactttgaaatgcatatctatraagtgctggttgtccagcttctactcaggcagagaagctgagaacaataagtccagcaccggggctgaccaggcaacacgtaaccagatggataaatcctgtgtaactgctacacrgcatttaaaagcactttttttcraccacttttgagttccttcttcccacagaactcaagaagttgctgagtctgagaacacctagcagcagtttgtcctacaaggtggaatctgwtcatgctgttcatttaatcttctttttctctttcctaaggctcgtttcctctccctttcccaacctatatccaaatctcgcattgcccccttcagtaatgacaaattgttctagtccatcacactcctgatccatgctgttcctccactattccaggccacaggacycacactgtgcgctccaca

SEQ ID NO: 14766 - DNA, 600 bp, Chicken  19866894220380_1
ggaaataatttaaaactgaataatgcataaaaaacaccgaaggcaatctgaattagccatagcaagagctggccagttgtcttcattgctttggtggagcaatttcattattttctgtgcagcatctagctgatggcactgcagacatagcaattagtacggctttgggcccttctggtgggcagggctgagcacacagaatcgtatctttgtattgtttctgctgggttttaggtgtgtgtattcaacagaagaaatcctatcggtctggatttggctatctccctttctcagactccrtttctgtccttaaaggccttgagctttctctgctttgttccactgttccctttctctcggcactcagtgtcagcaagctcttggagaaagaagcttgtttgtccccctgtatgtgaaatgcagccgtggtcctatctggatgccaggactgctactaatcacccccagcctggcatgtgctgcagagcagggagtgcagcgtggctgtgtgctgacctttctggaaaggcaggatgtactcttggtggcaggcaaagttagaggatatctttccttctttcttcttctactgaggattac

SEQ ID NO: 14767 - DNA, 600 bp, Chicken  19866894220383_1
actcctggccacaggatttgaaaggataaaagctttttgtgtgtctaaagtgcatttagactgatgcataaaagaagaatgtcttgaaaggctattatcatagaatcttggaatggtttgggttggaaggggcctgtaagatcacctagttccctgctacaagcagggacacctgtcgctaggccatgttgctgaaagtgccatccagcctggccttgaatgcttccaggaagggggcatccacaacctcactgggcaacctgttccagtgtctcaccaccctcacagtaaagaatttcktcctcrtatstactctaaatctaccgtctgccagtttaaagccattactgaatgtgatgcaacacrtctggctgaggaaatcggtgagctggaaattgctaaaaggtgggagagtgttcttcaggagagagtttcttctcttctgtaggtaacagttattatggagagaatcctggtatagatggrgatttgtctgaccgagtattgtttttttgaaaggtcttcaagttaycaccatttycagcaaccaaaataaggtttgaaatgtgaatcatgagtaagccctgtcaaatctgtgca

SEQ ID NO: 14768 - DNA, 600 bp, Chicken  19866894220383_2
ggccacaggatttgaaaggataaaagctttttgtgtgtctaaagtgcatttagactgatgcataaaagaagaatgtcttgaaaggctattatcatagaatcttggaatggtttgggttggaaggggcctgtaagatcacctagttccctgctacaagcagggacacctgtcgctaggccatgttgctgaaagtgccatccagcctggccttgaatgcttccaggaagggggcatccacaacctcactgggcaacctgttccagtgtctcaccaccctcacagtaaagaatttcktcctcrtatstactctaaatctaccgtctgccagtttaaagccattactgaatgtgatgcaacacrtctggctgaggaaatcggtgagctggaaattgctaaaaggtgggagagtgttcttcaggagagagtttcttctcttctgtaggtaacagttattatggagagaatcctggtatagatggrgatttgtctgaccgagtattgtttttttgaaaggtcttcaagttaycaccatttycagcaaccaaaataaggtttgaaatgtgaatcatgagtaagccctgtcaaatctgtgcatcttca

SEQ ID NO: 14769 - DNA, 600 bp, Chicken  19866894220383_3
acaggatttgaaaggataaaagctttttgtgtgtctaaagtgcatttagactgatgcataaaagaagaatgtcttgaaaggctattatcatagaatcttggaatggtttgggttggaaggggcctgtaagatcacctagttccctgctacaagcagggacacctgtcgctaggccatgttgctgaaagtgccatccagcctggccttgaatgcttccaggaagggggcatccacaacctcactgggcaacctgttccagtgtctcaccaccctcacagtaaagaatttcktcctcrtatstactctaaatctaccgtctgccagtttaaagccattactgaatgtgatgcaacacrtctggctgaggaaatcggtgagctggaaattgctaaaaggtgggagagtgttcttcaggagagagtttcttctcttctgtaggtaacagttattatggagagaatcctggtatagatggrgatttgtctgaccgagtattgtttttttgaaaggtcttcaagttaycaccatttycagcaaccaaaataaggtttgaaatgtgaatcatgagtaagccctgtcaaatctgtgcatcttcacaac

SEQ ID NO: 14770 - DNA, 600 bp, Chicken  19866894220383_4
cataaaagaagaatgtcttgaaaggctattatcatagaatcttggaatggtttgggttggaaggggcctgtaagatcacctagttccctgctacaagcagggacacctgtcgctaggccatgttgctgaaagtgccatccagcctggccttgaatgcttccaggaagggggcatccacaacctcactgggcaacctgttccagtgtctcaccaccctcacagtaaagaatttcktcctcrtatstactctaaatctaccgtctgccagtttaaagccattactgaatgtgatgcaacacrtctggctgaggaaatcggtgagctggaaattgctaaaaggtgggagagtgttcttcaggagagagtttcttctcttctgtaggtaacagttattatggagagaatcctggtatagatggrgatttgtctgaccgagtattgtttttttgaaaggtcttcaagttaycaccatttycagcaaccaaaataaggtttgaaatgtgaatcatgagtaagccctgtcaaatctgtgcatcttcacaaccttttcagataattagaaaaaaaaagttaacggtgttttttaaatttccctctact

SEQ ID NO: 14771 - DNA, 514 bp, Chicken  19866894220383_5
tgttgctgaaagtgccatccagcctggccttgaatgcttccaggaagggggcatccacaacctcactgggcaacctgttccagtgtctcaccaccctcacagtaaagaatttcktcctcrtatstactctaaatctaccgtctgccagtttaaagccattactgaatgtgatgcaacacrtctggctgaggaaatcggtgagctggaaattgctaaaaggtgggagagtgttcttcaggagagagtttcttctcttctgtaggtaacagttattatggagagaatcctggtatagatggrgatttgtctgaccgagtattgtttttttgaaaggtcttcaagttaycaccatttycagcaaccaaaataaggtttgaaatgtgaatcatgagtaagccctgtcaaatctgtgcatcttcacaaccttttcagataattagaaaaaaaaagttaacggtgttttttaaatttccctctactcgtacttttctgccatctcaagctttacagtcaa

SEQ ID NO: 14772 - DNA, 468 bp, Chicken  19866894220383_6
gggggcatccacaacctcactgggcaacctgttccagtgtctcaccaccctcacagtaaagaatttcktcctcrtatstactctaaatctaccgtctgccagtttaaagccattactgaatgtgatgcaacacrtctggctgaggaaatcggtgagctggaaattgctaaaaggtgggagagtgttcttcaggagagagtttcttctcttctgtaggtaacagttattatggagagaatcctggtatagatggrgatttgtctgaccgagtattgtttttttgaaaggtcttcaagttaycaccatttycagcaaccaaaataaggtttgaaatgtgaatcatgagtaagccctgtcaaatctgtgcatcttcacaaccttttcagataattagaaaaaaaaagttaacggtgttttttaaatttccctctactcgtacttttctgccatctcaagctttacagtcaa

SEQ ID NO: 14773 - DNA, 459 bp, Chicken  19866894220383_7
cacaacctcactgggcaacctgttccagtgtctcaccaccctcacagtaaagaatttcktcctcrtatstactctaaatctaccgtctgccagtttaaagccattactgaatgtgatgcaacacrtctggctgaggaaatcggtgagctggaaattgctaaaaggtgggagagtgttcttcaggagagagtttcttctcttctgtaggtaacagttattatggagagaatcctggtatagatggrgatttgtctgaccgagtattgtttttttgaaaggtcttcaagttaycaccatttycagcaaccaaaataaggtttgaaatgtgaatcatgagtaagccctgtcaaatctgtgcatcttcacaaccttttcagataattagaaaaaaaaagttaacggtgttttttaaatttccctctactcgtacttttctgccatctcaagctttacagtcaa

SEQ ID NO: 14774 - DNA, 600 bp, Chicken  19866894220393_1
gctcaaatactgtcagtgtatgttaggctagttaattctgttgtctaaaattaaatgtattttattttgttttcatcatgtttctcaggtgctttgtgagagacagcatagaaagggacaaaataaacagtgatgctttatagatctgtgtgctgtgttgtaatgactttacagtgctgcaccaaggtaggcacatgatgtttcagagctgaagacaatcatcctaaagacaatgtggtaccaagtattgaagacagctgataaaggcatcctcgtgaatgcagagcttaccctgaaagmacttcaattatctatactactgtatattggcattaaataacctgaggaggttatccagaagccaaatctcccttcataatctgaacagcatcaatcccgtatacatytggcacatgacacttctcactctgtcaaaagcagcaactacttcaatgattgctcctktgcttgactgaagatatgtcacaggttgtactgaactgcccctcatawaagagcacaagaagataaaggaattttcctctgactcaatgcctctgctctcctacaacatcacaatctcagtgatgcatttgtcac

SEQ ID NO: 14775 - DNA, 600 bp, Chicken  19866894220393_2
atagaaagggacaaaataaacagtgatgctttatagatctgtgtgctgtgttgtaatgactttacagtgctgcaccaaggtaggcacatgatgtttcagagctgaagacaatcatcctaaagacaatgtggtaccaagtattgaagacagctgataaaggcatcctcgtgaatgcagagcttaccctgaaagmacttcaattatctatactactgtatattggcattaaataacctgaggaggttatccagaagccaaatctcccttcataatctgaacagcatcaatcccgtatacatytggcacatgacacttctcactctgtcaaaagcagcaactacttcaatgattgctcctktgcttgactgaagatatgtcacaggttgtactgaactgcccctcatawaagagcacaagaagataaaggaattttcctctgactcaatgcctctgctctcctacaacatcacaatctcagtgatgcatttgtcaccttaaaccttttaaactttttctcccccacccctacactggactggtgttacagtttagtgatccactctgacatattgcacagaaaacatctgtgagtggagtttc

SEQ ID NO: 14776 - DNA, 600 bp, Chicken  19866894220393_3
actttacagtgctgcaccaaggtaggcacatgatgtttcagagctgaagacaatcatcctaaagacaatgtggtaccaagtattgaagacagctgataaaggcatcctcgtgaatgcagagcttaccctgaaagmacttcaattatctatactactgtatattggcattaaataacctgaggaggttatccagaagccaaatctcccttcataatctgaacagcatcaatcccgtatacatytggcacatgacacttctcactctgtcaaaagcagcaactacttcaatgattgctcctktgcttgactgaagatatgtcacaggttgtactgaactgcccctcatawaagagcacaagaagataaaggaattttcctctgactcaatgcctctgctctcctacaacatcacaatctcagtgatgcatttgtcaccttaaaccttttaaactttttctcccccacccctacactggactggtgttacagtttagtgatccactctgacatattgcacagaaaacatctgtgagtggagtttctcaggcttctgctcacttctggctgctccataggaaaacttttctgggctctccacac

SEQ ID NO: 14777 - DNA, 600 bp, Chicken  19866894220393_4
gacaatcatcctaaagacaatgtggtaccaagtattgaagacagctgataaaggcatcctcgtgaatgcagagcttaccctgaaagmacttcaattatctatactactgtatattggcattaaataacctgaggaggttatccagaagccaaatctcccttcataatctgaacagcatcaatcccgtatacatytggcacatgacacttctcactctgtcaaaagcagcaactacttcaatgattgctcctktgcttgactgaagatatgtcacaggttgtactgaactgcccctcatawaagagcacaagaagataaaggaattttcctctgactcaatgcctctgctctcctacaacatcacaatctcagtgatgcatttgtcaccttaaaccttttaaactttttctcccccacccctacactggactggtgttacagtttagtgatccactctgacatattgcacagaaaacatctgtgagtggagtttctcaggcttctgctcacttctggctgctccataggaaaacttttctgggctctccacactctagatgcacctcactgactctgatatactaaaacacagagggtctc

SEQ ID NO: 14778 - DNA, 600 bp, Chicken  19866894220394_1
agacatacgagtacagtaatttaacatcagggacactgtataaaagggagagtaaagagacagcaagtttcaaagtgcacaaagtgctgacatgcatcacatacactgtgactgtaaaagtggagtatttagaatactttggcacacacacatttgggaaggtgcatgcaaaactctatggatcttcttggcaaacaatacaacacttagtctgcagttgctgctgccatcaatttcttgatctgctatgagcttcgtttttttcaggcaaaagctcttttctccctggattttcctttyaggcccttcttagtatgaagcaaagatgttacactcacaggagttttggtatccttgctagtgctgcaatgaaaaagcacctgaacatctctatacaactcacagtactcagtttttcaatcattattgatatttatgtttctaaatattaagcattactgccctgcaagtgtaaccctttctttcaattggatctttgcaaaaccagatttgtatttcagtgaaaataaagccttttcttgcccaagctgatacagttgttttttccaaaactttgtaggagggtctctttcacatgta

SEQ ID NO: 14779 - DNA, 600 bp, Chicken  19866894220396_1
ggttaacaagtaaaaacaaattaggttacaaatatgtatttgtaactctctctatatgtatgtaatttgtaacctataaatatacacatatgtatgtatacatatacatatacatgtacatatacatgttgtttattgaaaataatatataatttgttcaataaacaactctctgtgttaacaacaagttcctatgttgacaaaaatcagtgcttgatagcaaggaaacttgaaaagaagagagagaaagagagagaaagaaaaaggaaacaggtggcttgtcccaggcctgccaagaayattttggggctttgagaacatgtacttctctacttggctgagtgctgtttctgtctcatccactgaaagatttcttgtctttcacctagcttaattctaccaactgcatataacttgctctctgctcattttctctgttcttcagcaaggtgtcttatcatcaattgttcacctttctttgtgtcaatttttttctgcttgtggataccaggtgccaatagatttttgctctccttttgttctcaccttccccatcctccccacttctcttcccaactaatcaaaaattagcattttcaa

SEQ ID NO: 14780 - DNA, 600 bp, Chicken  19866894220401_1
aagccttacctcctgacagaaactattcctctcatcccttcttatggtatgtttaaaacaataaatgaccgaggccaaaagacatttttatgggccatgtgaggtaattgcacagcacagagtataacttacattttccaaaaactgggtgatcttttctgcagtggtcagtgcgattatcttcattttaaaggttaacagtatctccaaagcaacaaaaacaagaattttgcaggatccactaataactttgtcccaaaccctagaaaaagaaatgaaaaaggaatcgctaagcattaytgtagtccttatctgcttatatatctgctagaacactgtttgtacaattatcctctccagattgtttttctgactagcaacaagtatattgaattattcaggtcacagtcaataaaaggcattttatcagttcctcaatctgtactgagtgatggcaagcaaatgtattaacatggcgtgtccttgtttagaaatggaactgcttacaagctcaagtgcaaaaagcaaatcatgttttaacagcctgaactgtgacaactattccawatagtatggtamgggtgagaatttttcctagcg

SEQ ID NO: 14781 - DNA, 600 bp, Chicken  19866894220401_2
aaaagaaatgaaaaaggaatcgctaagcattaytgtagtccttatctgcttatatatctgctagaacactgtttgtacaattatcctctccagattgtttttctgactagcaacaagtatattgaattattcaggtcacagtcaataaaaggcattttatcagttcctcaatctgtactgagtgatggcaagcaaatgtattaacatggcgtgtccttgtttagaaatggaactgcttacaagctcaagtgcaaaaagcaaatcatgttttaacagcctgaactgtgacaactattccawatagtatggtamgggtgagaatttttcctagcgcaaaaaaaggaaacaatttgctagcatgcttaataatgagactctacaaatagtcaggtaactgaacattcagaagaatgaaatcctgaatcacaatcactacatctcaagcagctaaatattacgagtcatttctctaagagatatatttataccagcaagatacagtccataatgtttaatagttgttctttgcaccaaatttaagtgtagcaactcattccactgcgtgcagactctcaaaactacaaagcaaagtcctaccac

SEQ ID NO: 14782 - DNA, 600 bp, Chicken  19866894220401_3
aaaggaatcgctaagcattaytgtagtccttatctgcttatatatctgctagaacactgtttgtacaattatcctctccagattgtttttctgactagcaacaagtatattgaattattcaggtcacagtcaataaaaggcattttatcagttcctcaatctgtactgagtgatggcaagcaaatgtattaacatggcgtgtccttgtttagaaatggaactgcttacaagctcaagtgcaaaaagcaaatcatgttttaacagcctgaactgtgacaactattccawatagtatggtamgggtgagaatttttcctagcgcaaaaaaaggaaacaatttgctagcatgcttaataatgagactctacaaatagtcaggtaactgaacattcagaagaatgaaatcctgaatcacaatcactacatctcaagcagctaaatattacgagtcatttctctaagagatatatttataccagcaagatacagtccataatgtttaatagttgttctttgcaccaaatttaagtgtagcaactcattccactgcgtgcagactctcaaaactacaaagcaaagtcctaccacctgtaagagcta

SEQ ID NO: 14783 - DNA, 600 bp, Chicken  19866894220401_4
gaaacaatttgctagcatgcttaataatgagactctacaaatagtcaggtaactgaacattcagaagaatgaaatcctgaatcacaatcactacatctcaagcagctaaatattacgagtcatttctctaagagatatatttataccagcaagatacagtccataatgtttaatagttgttctttgcaccaaatttaagtgtagcaactcattccactgcgtgcagactctcaaaactacaaagcaaagtcctaccacctgtaagagctaggcctggaccttacagttttagggaaaccrgaagaccaggctttcacagaatgcatattcyttagcatcagaacctctataactactgaaagagattcacagtactaaaacagcctgcaacaatttgaagccacccttcatccaacagctctatttcaggcccaactcaacagaaacgggatggaagatcatccaaaaccggtgtgagaccatctgtcagatggcagctttaatgttcctgcattattgtcagttcttcacgtttaagagccatgtcagaaagactttctgaggattaccttccttaaatccatccagatacttgtgaga

SEQ ID NO: 14784 - DNA, 600 bp, Chicken  19866894220401_5
actctacaaatagtcaggtaactgaacattcagaagaatgaaatcctgaatcacaatcactacatctcaagcagctaaatattacgagtcatttctctaagagatatatttataccagcaagatacagtccataatgtttaatagttgttctttgcaccaaatttaagtgtagcaactcattccactgcgtgcagactctcaaaactacaaagcaaagtcctaccacctgtaagagctaggcctggaccttacagttttagggaaaccrgaagaccaggctttcacagaatgcatattcyttagcatcagaacctctataactactgaaagagattcacagtactaaaacagcctgcaacaatttgaagccacccttcatccaacagctctatttcaggcccaactcaacagaaacgggatggaagatcatccaaaaccggtgtgagaccatctgtcagatggcagctttaatgttcctgcattattgtcagttcttcacgtttaagagccatgtcagaaagactttctgaggattaccttccttaaatccatccagatacttgtgagaagtgtttctcctttcaaataaaaccatggga

SEQ ID NO: 14785 - DNA, 600 bp, Chicken  19866894220402_1
tggatctccctctcaactggaatcttctcccaaaactttaccaaagtagtagtctctatgttcccatcttgtctcaaaagccagtggctgttggtatgtttcctgtaacagcaactattgctgctcattgctctgagtttactgtctttgttgctgtaaatatcaggaaagcagggatgggaagctggagtccaatattttcacatccagtctcttccatgaatccttgttaggatagcagtacaccaggtaagaactgcaacatttccttgttcgcttaaagaaaaaaaagtgctcttytggagttcaaaattacttggaattgaactaaaaaaagccttggcaggtgtgcaatcagatattaatttctcctgtgtaaattgactttgctaggggtgaatctgaagtcagatgctcttcgtgacctttttttccttagtgttttatttatctatatataattattcttgaaatgttttaaatgattcatccattctcgtacaatgagtcatttttagcctaactagcctacttaaaaatatttttaactaagggctacataatgaatgtatgattcctagaagtttctagatagatctg

SEQ ID NO: 14786 - DNA, 599 bp, Chicken  19866894220404_1
  misc_feature (1)..(110): n is any nucleotide
nnnnnnnnnnnnnnnnnnnnnnnnnnnnnnnnnnnnnnnnnnnnnnnnnnnnnnnnnnnnnnnnnnnnnnnnnnnnnnnnnnnnnnnnnnnnnnnnnnnnnnnnnnnnnntgagagatctttttctcctctggttgccgttttccattttccaactgttctaaacactgggaacattcaattagtttgcatgtttatttcttctctaagagataggtaattcattaatctgtcactacagacatgccccagagaagtgtgatgttctctaaagtttaatttttgcaagggaagggcaggrggagattttagcttcctttgctgtttgcctaatcatattaaaatctgtatgtgggtagtttaatgaggaatttattctggaagacmtatccaaaatttgtcactgggtcccttagaattgttggaccatttttatcattgtcataattatttccttcctccatgctgacacaaagaataagaaatggttcacagagtttataaataattgatagggagattaaggcatatataatttaaaagcttatcttcgcagtattatcagcctggtggcatagcagtgttacctgcctgctgtgc

SEQ ID NO: 14787 - DNA, 599 bp, Chicken  19866894220404_2
  misc_feature (1)..(24): n is any nucleotide
nnnnnnnnnnnnnnnnnnnnnnnntgagagatctttttctcctctggttgccgttttccattttccaactgttctaaacactgggaacattcaattagtttgcatgtttatttcttctctaagagataggtaattcattaatctgtcactacagacatgccccagagaagtgtgatgttctctaaagtttaatttttgcaagggaagggcaggrggagattttagcttcctttgctgtttgcctaatcatattaaaatctgtatgtgggtagtttaatgaggaatttattctggaagacmtatccaaaatttgtcactgggtcccttagaattgttggaccatttttatcattgtcataattatttccttcctccatgctgacacaaagaataagaaatggttcacagagtttataaataattgatagggagattaaggcatatataatttaaaagcttatcttcgcagtattatcagcctggtggcatagcagtgttacctgcctgctgtgcaggaacaccaagagtaagacccagaatgcctctgcctgttttctctttcctgagaaaagagcattgttctttaagaaaaatatctg

SEQ ID NO: 14788 - DNA, 600 bp, Chicken  19866894220404_3
gttggaccatttttatcattgtcataattatttccttcctccatgctgacacaaagaataagaaatggttcacagagtttataaataattgatagggagattaaggcatatataatttaaaagcttatcttcgcagtattatcagcctggtggcatagcagtgttacctgcctgctgtgcaggaacaccaagagtaagacccagaatgcctctgcctgttttctctttcctgagaaaagagcattgttctttaagaaaaatatctgtgctccaagttggccagcactgtcttgccagttkctgcatgatcaattggggtgagaggaagaaatcacagttatgggaaaagctgagtgggttttctcattgaatggaagtagatgaggttctgttggtaatctcagaattaggtatgtgctgctacttctgtgagtttgaaccaacagtgctggaaagggttgtgttgattttatttatttatttattttctacagctaagatgtaaggaggaaacaaaagcatatttttttcttcagcaagcaattttcagcaagggtggggtggttgtgtgtgcatattaaaaatgagttcaccttaaga

SEQ ID NO: 14789 - DNA, 599 bp, Chicken  19866894220405_1
  misc_feature (1)..(140): n is any nucleotide
nnnnnnnnnnnnnnnnnnnnnnnnnnnnnnnnnnnnnnnnnnnnnnnnnnnnnnnnnnnnnnnnnnnnnnnnnnnnnnnnnnnnnnnnnnnnnnnnnnnnnnnnnnnnnnnnnnnnnnnnnnnnnnnnnnnnnnnnnnnntgggcctgagtgattttttctttctcttttttttttcttttttctttttaatcttggatgccagaaggtcatatataaaataattcttggagtgaagatcaagaaagctggaaaagttggtgcctttcctattgaactaattaacactgctttcttaackaggtgcagtgaaagaaaccgtgcagatgagaatgcactatttactctaggttttcaacactggatgtgtagtaacagctccaccagcttcagatgcacctggctgcctctcagtcagtgagttcccacctttgctgtggttactcctgcaattgtttcatgcccaggccataaattagagcaagaacatgatctgtatgaagtaggttttaagaagtacatggttttaattaattggataattttactgatttgcactgtggcatcacaaggagtggcatcagtgagagtgagatagaa

SEQ ID NO: 14790 - DNA, 599 bp, Chicken  19866894220414_1
  misc_feature (1)..(78): n is any nucleotide
nnnnnnnnnnnnnnnnnnnnnnnnnnnnnnnnnnnnnnnnnnnnnnnnnnnnnnnnnnnnnnnnnnnnnnnnnnnnnnccgtgcatggggcactgcggtgtgcttcagtctgcgtgtggagaggagaggaaaggcctcggggagagatctctgggctttgaggacagcaagacccacgtgctcattgctacttataacatggatccaagtggttattttttgtggctctggagagttaggaatcaaaataggaatatgcagagatggtggtggttttggtggttcttccgtggctgtctytgtgctggtgaggccgtgctggctggcgtttggctaagcagggccttctctgagtgggcggctcttgttgcctctttcragagggaaggttgagccttctgtgcccccagaacccccacccccaagacattgctgacgtgctggcggatgggcattactcctgccccaaaccagtcacatttcaggtaaaagctgagagttgcttcttgccctccttccctggagccactgcagggtccgtggtggcaggatgatggcagtgtgccctcatgcaccacaggcctccccagcaccatttg

SEQ ID NO: 14791 - DNA, 600 bp, Chicken  19866894220414_2
cgtgcatggggcactgcggtgtgcttcagtctgcgtgtggagaggagaggaaaggcctcggggagagatctctgggctttgaggacagcaagacccacgtgctcattgctacttataacatggatccaagtggttattttttgtggctctggagagttaggaatcaaaataggaatatgcagagatggtggtggttttggtggttcttccgtggctgtctytgtgctggtgaggccgtgctggctggcgtttggctaagcagggccttctctgagtgggcggctcttgttgcctctttcragagggaaggttgagccttctgtgcccccagaacccccacccccaagacattgctgacgtgctggcggatgggcattactcctgccccaaaccagtcacatttcaggtaaaagctgagagttgcttcttgccctccttccctggagccactgcagggtccgtggtggcaggatgatggcagtgtgccctcatgcaccacaggcctccccagcaccatttgtccttgcccacgcgtcccggtcgctgcagcctcttctgctgtggggcttcccctcttttggttcatctttcactggtgtc

SEQ ID NO: 14792 - DNA, 599 bp, Chicken  19866894220416_1
  misc_feature (1)..(16): n is any nucleotide
nnnnnnnnnnnnnnnntttgctatgtatttgcctggggaacagcatagcaacggaaaatgagaaagacagaaagagcagagaaaccatcagactgtttattttatatcactatatctgtatcttagtggggcctgcctttgtgctgagccacgtggtttgttcatctctggagtgttagaatgagcctgggggtgcagagggtgggtaggaatgcccaccatccacaagctctgggtaccttcaatagctcctcacagaccaccatgagctcctcaggctgctggtgggacaacggcagygagtcccacracaaccctcctggatgctcatttctattccatggtacttccccagggatttacaatgttttgactctggacttttcaccgaggygtgtagatgatgcaggctggatcattggagcacaggaaaggggaaaacaataatcccagagagctgaagaagacagttgtatttatcccctccatttggggctccctggcagcagctgcagcaggtggcacctgctcttcctcctgtgctccctggagaaaccctgacatttttttcctcccattctcatctcatgtttgaattt

SEQ ID NO: 14793 - DNA, 599 bp, Chicken  19866894220416_2
  misc_feature (1)..(6): n is any nucleotide
nnnnnntttgctatgtatttgcctggggaacagcatagcaacggaaaatgagaaagacagaaagagcagagaaaccatcagactgtttattttatatcactatatctgtatcttagtggggcctgcctttgtgctgagccacgtggtttgttcatctctggagtgttagaatgagcctgggggtgcagagggtgggtaggaatgcccaccatccacaagctctgggtaccttcaatagctcctcacagaccaccatgagctcctcaggctgctggtgggacaacggcagygagtcccacracaaccctcctggatgctcatttctattccatggtacttccccagggatttacaatgttttgactctggacttttcaccgaggygtgtagatgatgcaggctggatcattggagcacaggaaaggggaaaacaataatcccagagagctgaagaagacagttgtatttatcccctccatttggggctccctggcagcagctgcagcaggtggcacctgctcttcctcctgtgctccctggagaaaccctgacatttttttcctcccattctcatctcatgtttgaattttcattttgct

SEQ ID NO: 14794 - DNA, 600 bp, Chicken  19866894220416_3
gtttattttatatcactatatctgtatcttagtggggcctgcctttgtgctgagccacgtggtttgttcatctctggagtgttagaatgagcctgggggtgcagagggtgggtaggaatgcccaccatccacaagctctgggtaccttcaatagctcctcacagaccaccatgagctcctcaggctgctggtgggacaacggcagygagtcccacracaaccctcctggatgctcatttctattccatggtacttccccagggatttacaatgttttgactctggacttttcaccgaggygtgtagatgatgcaggctggatcattggagcacaggaaaggggaaaacaataatcccagagagctgaagaagacagttgtatttatcccctccatttggggctccctggcagcagctgcagcaggtggcacctgctcttcctcctgtgctccctggagaaaccctgacatttttttcctcccattctcatctcatgtttgaattttcattttgctctgaagtgtcattctcctcgttctctcagcctctttccaatgatttcttaaatgataatgcaggctgaacctgtagaacagaggc

SEQ ID NO: 14795 - DNA, 599 bp, Chicken  19866894220420_1
  misc_feature (1)..(101): n is any nucleotide
nnnnnnnnnnnnnnnnnnnnnnnnnnnnnnnnnnnnnnnnnnnnnnnnnnnnnnnnnnnnnnnnnnnnnnnnnnnnnnnnnnnnnnnnnnnnnnnnnnnnntgagacctctggatgtagcctaacccctccccatccccttcacagcagagctagcttcacagtgagggtgggttgctcagggttgtaactagtccagcctgagcatctgataggtgtcaagttgcttaaacctcagtgatgtgacaatcaattcaatcagtcataataggttaatacttctcaaataagaacttacagyagtttgagtactatcatctcatatccagtaaaggtggtcaagtatgacatgctttgatttcttttaaaatattaaatgtattacattaggaataaaaataagggtttacgaagtaaactattccaaagtgaagagctatcaggtggaaggctatgtggatgtagacgtagtattgcttggcttgttttcaccagttctttccaacagaacctctccttattctagtgaaaaatggacagtgtttagtgagtgatgaaggtggtcatatttatatccccactgaatagatttgaggaact

SEQ ID NO: 14796 - DNA, 600 bp, Chicken  19866894220429_1
gtaatgatgggtttgaatccccatcatactgaggagagaattgtacttggttgccacaggttgagcactctcgtttgctgaataaaaaaactcagcagcattattttaggagggaatggccacaacatttcctgaaaggcccagtcctgttagcattcatgaagcacattcgtaacataacttctggttgaaaccactgaagagactgaaagagtacctggatcctcatgcttaaataagctagaaattgatattgacatgcttggagtgtggggcagggtgcaagtgcacttctgggcmaaatgggggcacctcagaagtgatggcataggaaaacgaacaggtttaggaatttttctttgtaacactgaacttgcatgtttaccttccataacagccctgctttaggcatcccttttttcatcaatggaccttttagccagcagtcaaggagaatattttttaatttgattgtaggttctgaggaraataggtggcacagtcttgttgtgcagcctgaaacactcataccacagtgagacttaagctgtaacttggtacataacattcagacacaatcacttacagatcaattcagtt

SEQ ID NO: 14797 - DNA, 600 bp, Chicken  19866894220429_2
tgaaaccactgaagagactgaaagagtacctggatcctcatgcttaaataagctagaaattgatattgacatgcttggagtgtggggcagggtgcaagtgcacttctgggcmaaatgggggcacctcagaagtgatggcataggaaaacgaacaggtttaggaatttttctttgtaacactgaacttgcatgtttaccttccataacagccctgctttaggcatcccttttttcatcaatggaccttttagccagcagtcaaggagaatattttttaatttgattgtaggttctgaggaraataggtggcacagtcttgttgtgcagcctgaaacactcataccacagtgagacttaagctgtaacttggtacataacattcagacacaatcacttacagatcaattcagttacaacatagcttgcttttgcatctcacattagctgtaagccttgcaggaataacaaaaaggttggtagatgacagagtttcattttaaaatgtccacccatgtccaaaaataaaataatgataaaataatcctgatagtctaatatcaagtgactagattctatttccaaatggttgtaaaactgggg

SEQ ID NO: 14798 - DNA, 600 bp, Chicken  19866894220436_1
tggtctaatgtgattaagctggctgtttttggtaatgatagatacagtccaaatggcaaaaaaatgataagtagatatgatacgtttttactgttgtatacttagcagaatatgccccccaaaggtttctgttccctgcttccattttctaccgaatgtcagacatttgtaacttttggcacctatagtacaatccttgagacacacgatgcccttaggtctcaggaacattgcgatcttttatttttaccctttgactcttctgctacttttaaacaaacaaacaaacaaacaaactcygcttgttttttgttgagtggataaacrcagtttattccatttgtactgacaaaacaaaatgtgaagaagatgcacaacactatgcagtgtagtactgtacaagcgtgccatgcagcttgtataggcaaaatacaatttctcctaagtatctgaatggcattgagttgggacagataaggaattcctctcagctatttttcttgaggattgttggtgaatggttagaaaatataaccttattgcttaccttccacaaagacaaatattcgccaagaagtgaaagggccaataaaggaaaat

SEQ ID NO: 14799 - DNA, 600 bp, Chicken  19866894220436_2
tttggtaatgatagatacagtccaaatggcaaaaaaatgataagtagatatgatacgtttttactgttgtatacttagcagaatatgccccccaaaggtttctgttccctgcttccattttctaccgaatgtcagacatttgtaacttttggcacctatagtacaatccttgagacacacgatgcccttaggtctcaggaacattgcgatcttttatttttaccctttgactcttctgctacttttaaacaaacaaacaaacaaacaaactcygcttgttttttgttgagtggataaacrcagtttattccatttgtactgacaaaacaaaatgtgaagaagatgcacaacactatgcagtgtagtactgtacaagcgtgccatgcagcttgtataggcaaaatacaatttctcctaagtatctgaatggcattgagttgggacagataaggaattcctctcagctatttttcttgaggattgttggtgaatggttagaaaatataaccttattgcttaccttccacaaagacaaatattcgccaagaagtgaaagggccaataaaggaaaatgtgtgctctatagtgctgaaacaagct

SEQ ID NO: 14800 - DNA, 600 bp, Chicken  19866894220449_1
tacagggaggaggaggagttctactatcttattatttgcacgcacgcggcttagagcaagactgatttacatcaaccttcttgttgtctccctgcccttcatgcagcagtgcctgacatccctgtgaggttgtggtcctatacacaagctgaatggagggttgtgaatttacatcaccatcccatggcctttgaggggcaattgctctttgatactcgacagcacctgggcttgtgaggtcttttccacatggggtcctgccttttccccaaggtagcatcttcagttctggcttttctrtgctctatccagattaaacagctgggacattccagcagttagagtaactgtgaatgagctccctagagaagcccatcgtgtctgaatttctttgtagaatggtgcacactttagggccagatctgtgtatttctcccagcttcagtcctggaaaatcactatttaatccagctggggccagcagagcrtacaaaggaaacaataatcctcttgaagctgtctgtgtctgacttgctacagtccatgattgtatgctgatgagtagaatacccttgatcttcagctttaatgctaattcct

SEQ ID NO: 14801 - DNA, 600 bp, Chicken  19866894220449_2
ctttgaggggcaattgctctttgatactcgacagcacctgggcttgtgaggtcttttccacatggggtcctgccttttccccaaggtagcatcttcagttctggcttttctrtgctctatccagattaaacagctgggacattccagcagttagagtaactgtgaatgagctccctagagaagcccatcgtgtctgaatttctttgtagaatggtgcacactttagggccagatctgtgtatttctcccagcttcagtcctggaaaatcactatttaatccagctggggccagcagagcrtacaaaggaaacaataatcctcttgaagctgtctgtgtctgacttgctacagtccatgattgtatgctgatgagtagaatacccttgatcttcagctttaatgctaattccttccctcatcatttcaactgttcctttctaacactggatttcctacttcagcaacaggaggggaagtctggctaatycaattatagatgagagtggggctcatcctcagtttcctcytcactattaaagaacttccctttactggtaaaaggggcratgtgaagcttgttgttatcacaactggatgtc

SEQ ID NO: 14802 - DNA, 600 bp, Chicken  19866894220449_3
cgtgtctgaatttctttgtagaatggtgcacactttagggccagatctgtgtatttctcccagcttcagtcctggaaaatcactatttaatccagctggggccagcagagcrtacaaaggaaacaataatcctcttgaagctgtctgtgtctgacttgctacagtccatgattgtatgctgatgagtagaatacccttgatcttcagctttaatgctaattccttccctcatcatttcaactgttcctttctaacactggatttcctacttcagcaacaggaggggaagtctggctaatycaattatagatgagagtggggctcatcctcagtttcctcytcactattaaagaacttccctttactggtaaaaggggcratgtgaagcttgttgttatcacaactggatgtcagcatcgtcatgtcacattcacctagggatagcatttctcatgcataacatttatctttgtttccattaacatttctattgtgatttactgttgtgtttggaatttccaataaaaattctgagcaacaacactcaagccttcagcctggaaaggaactgctcatggaaggggagaagattgttacagg

SEQ ID NO: 14803 - DNA, 600 bp, Chicken  19866894220449_4
ccagatctgtgtatttctcccagcttcagtcctggaaaatcactatttaatccagctggggccagcagagcrtacaaaggaaacaataatcctcttgaagctgtctgtgtctgacttgctacagtccatgattgtatgctgatgagtagaatacccttgatcttcagctttaatgctaattccttccctcatcatttcaactgttcctttctaacactggatttcctacttcagcaacaggaggggaagtctggctaatycaattatagatgagagtggggctcatcctcagtttcctcytcactattaaagaacttccctttactggtaaaaggggcratgtgaagcttgttgttatcacaactggatgtcagcatcgtcatgtcacattcacctagggatagcatttctcatgcataacatttatctttgtttccattaacatttctattgtgatttactgttgtgtttggaatttccaataaaaattctgagcaacaacactcaagccttcagcctggaaaggaactgctcatggaaggggagaagattgttacaggccaggtatatcctgttttcttaaggcccatcctagaaagc

SEQ ID NO: 14804 - DNA, 600 bp, Chicken  19866894220449_5
tcactatttaatccagctggggccagcagagcrtacaaaggaaacaataatcctcttgaagctgtctgtgtctgacttgctacagtccatgattgtatgctgatgagtagaatacccttgatcttcagctttaatgctaattccttccctcatcatttcaactgttcctttctaacactggatttcctacttcagcaacaggaggggaagtctggctaatycaattatagatgagagtggggctcatcctcagtttcctcytcactattaaagaacttccctttactggtaaaaggggcratgtgaagcttgttgttatcacaactggatgtcagcatcgtcatgtcacattcacctagggatagcatttctcatgcataacatttatctttgtttccattaacatttctattgtgatttactgttgtgtttggaatttccaataaaaattctgagcaacaacactcaagccttcagcctggaaaggaactgctcatggaaggggagaagattgttacaggccaggtatatcctgttttcttaaggcccatcctagaaagccacacaccttctgatggtgcttcacatctttggaaaatg

SEQ ID NO: 14805 - DNA, 600 bp, Chicken  19866894220452_1
tgtaaacctctctttttctgtgcttctgatttcacagcatgagttgccagctgaaggataatattttctaattcatatggcagttttatacctctgttcagatattctacttggtgaaaatgctaacaagacgattttcatttttaaatcgggaaagtattttctgtggttgcctggagaaatgtctcttttctacttaaagtactgaaggaaataaaccttgctattctgagtagcaacatttattattttaagcatgtgttgggtggtgtgttagaacactttaataaaaattatgtkaagtcttatattttcattgtcttgaagactacgctgaggacagaaggtaagcttgctttttctttccagttctcaaaatctaacatgctaacatacacttattacttagtggtggtcacatagcttgcacttctaggactaaggtaaaattaatctgcaagtgtaattctctatcaagcccaagtccttcaactttatgcttagagatattaaaattcatagttttatgctttcccaaactgcaatgtataaagtgcttatgtagtttcttctttattgttcagagaattttattggtgc

SEQ ID NO: 14806 - DNA, 600 bp, Chicken  19866894220460_1
gctctgggacccggaggaccccatcccatgcagagcccccaggcatgccttacccagctcgtgggcagtggtgaaagctgagggcagcccatcgtcctcaatgacggagcagctgcgcttggggtcgcacatggtgcccacgtcggccatgcccagcgtgtcacaggtggtggcaccacacaggtcctgtgggcacaggggtaaggggttaaccctggggttggtacttggccctattcccaccgcagtccctgtacccccagaggacccgtccccaggctgctgggcaggtgtcagccrtggggaatgggggccatgcagccccagggtgtggaggaaacagaatcacagtatcattctccatgcccactgaccacgtccctcagtgccacgtctccatggttctggaacacctccagggacagtgactcagtggcatctttgcatgtgacccttttgttacacacagcatcctcctgtgccttcagtgtcagcgtttcctccaggcagggtggagcccatttcggtgcagaggagccagcttggctccgtccttctgtgagctcaaggtctggatccaggcaggtcagtggaaagacc

SEQ ID NO: 14807 - DNA, 600 bp, Chicken  19866894220485_1
tagatatagaaacacagacccatgaaggttggaaaagacctctaagatcatttagtccaaccatcaacccatcacgaccatgcccactaagccaagtcacctgactaagtcaaatgactaaaccatatcgctcaaatatgaagggcacacataacacatctgggaatttaccagagtcctgataagtgcagatgggtagcaaggcagcctgaaaggctgaaagagtacagaaagtcctgtacatacttgtacccaattttcctgaactcaaaggaactgaactgtaggaaaactctacartttaaacaaataacagagtcagagggttttttgagaagctcccacaggcttgaaagtggagtccagtccttggtgcagtcagtaggtgaaaaaaagaaaaaaaacaacttaacacacagttatcatgacttacaccagcttagcatctctcatccagacttcaatgggaacatgaccaggctacttgccagcacgttggctttgctgcagtaggagtgacgttcaggtatgcgtgaccactcaccatcagatttctctacaatgacaagctttgaagtcggagcactttgctctccttcc

SEQ ID NO: 14808 - DNA, 599 bp, Chicken  19866894220493_1
  misc_feature (1)..(40): n is any nucleotide
nnnnnnnnnnnnnnnnnnnnnnnnnnnnnnnnnnnnnnnnatcctttgaataacgcgacacccgagctaatgggcccactgcaaccttggcgaagaagtggatccattcaactttactttaatcaccacttcttttgcagtcctccacagctgctgaaattacagatgtgaacaacgtaacattgatcagttgtgcctctggctgctccatattgcagaaattgctgaataccccaaaactgttcagcagcctttccccgtgaactgattttttttgtgttctgaattcactcgtggacraagttactatagtaactatttgagatgtattgcaacatacctacttaatcagccggttgtccaaaataatgratgtggagaggtaatgaaggtcaggttttggaactccatgtctagtgaaaaatgttaactgtaactttgttttcttcattttatgataaccagrggttctgaaacttaaattgttgtcttgtagatcaryattactgtaaatttccaaccagttactttactcttcctggggctaaggatacaaaacataccctgaaataggttggaatttggagttcatgtaakat

SEQ ID NO: 14809 - DNA, 600 bp, Chicken  19866894220493_2
ggcccactgcaaccttggcgaagaagtggatccattcaactttactttaatcaccacttcttttgcagtcctccacagctgctgaaattacagatgtgaacaacgtaacattgatcagttgtgcctctggctgctccatattgcagaaattgctgaataccccaaaactgttcagcagcctttccccgtgaactgattttttttgtgttctgaattcactcgtggacraagttactatagtaactatttgagatgtattgcaacatacctacttaatcagccggttgtccaaaataatgratgtggagaggtaatgaaggtcaggttttggaactccatgtctagtgaaaaatgttaactgtaactttgttttcttcattttatgataaccagrggttctgaaacttaaattgttgtcttgtagatcaryattactgtaaatttccaaccagttactttactcttcctggggctaaggatacaaaacataccctgaaataggttggaatttggagttcatgtaakattgtgaaaagtaagctgaagtgattgtgaagttgtgtgaacagtctcattcctgaaaggctaatggtaactgaa

SEQ ID NO: 14810 - DNA, 600 bp, Chicken  19866894220493_3
tgtgaacaacgtaacattgatcagttgtgcctctggctgctccatattgcagaaattgctgaataccccaaaactgttcagcagcctttccccgtgaactgattttttttgtgttctgaattcactcgtggacraagttactatagtaactatttgagatgtattgcaacatacctacttaatcagccggttgtccaaaataatgratgtggagaggtaatgaaggtcaggttttggaactccatgtctagtgaaaaatgttaactgtaactttgttttcttcattttatgataaccagrggttctgaaacttaaattgttgtcttgtagatcaryattactgtaaatttccaaccagttactttactcttcctggggctaaggatacaaaacataccctgaaataggttggaatttggagttcatgtaakattgtgaaaagtaagctgaagtgattgtgaagttgtgtgaacagtctcattcctgaaaggctaatggtaactgaaattggattccatccatacagggtttaggaatacagaacgtaaccgatagagactgtgaacattaagtggtgtatgacaggagttaggttccgta

SEQ ID NO: 14811 - DNA, 600 bp, Chicken  19866894220493_4
gctgctccatattgcagaaattgctgaataccccaaaactgttcagcagcctttccccgtgaactgattttttttgtgttctgaattcactcgtggacraagttactatagtaactatttgagatgtattgcaacatacctacttaatcagccggttgtccaaaataatgratgtggagaggtaatgaaggtcaggttttggaactccatgtctagtgaaaaatgttaactgtaactttgttttcttcattttatgataaccagrggttctgaaacttaaattgttgtcttgtagatcaryattactgtaaatttccaaccagttactttactcttcctggggctaaggatacaaaacataccctgaaataggttggaatttggagttcatgtaakattgtgaaaagtaagctgaagtgattgtgaagttgtgtgaacagtctcattcctgaaaggctaatggtaactgaaattggattccatccatacagggtttaggaatacagaacgtaaccgatagagactgtgaacattaagtggtgtatgacaggagttaggttccgtaacactaatatgaaatacattatttggagaagtgtc

SEQ ID NO: 14812 - DNA, 600 bp, Chicken  19866894220493_5
ctgctccatattgcagaaattgctgaataccccaaaactgttcagcagcctttccccgtgaactgattttttttgtgttctgaattcactcgtggacraagttactatagtaactatttgagatgtattgcaacatacctacttaatcagccggttgtccaaaataatgratgtggagaggtaatgaaggtcaggttttggaactccatgtctagtgaaaaatgttaactgtaactttgttttcttcattttatgataaccagrggttctgaaacttaaattgttgtcttgtagatcaryattactgtaaatttccaaccagttactttactcttcctggggctaaggatacaaaacataccctgaaataggttggaatttggagttcatgtaakattgtgaaaagtaagctgaagtgattgtgaagttgtgtgaacagtctcattcctgaaaggctaatggtaactgaaattggattccatccatacagggtttaggaatacagaacgtaaccgatagagactgtgaacattaagtggtgtatgacaggagttaggttccgtaacactaatatgaaatacattatttggagaagtgtca

SEQ ID NO: 14813 - DNA, 600 bp, Chicken  19866894220493_6
acraagttactatagtaactatttgagatgtattgcaacatacctacttaatcagccggttgtccaaaataatgratgtggagaggtaatgaaggtcaggttttggaactccatgtctagtgaaaaatgttaactgtaactttgttttcttcattttatgataaccagrggttctgaaacttaaattgttgtcttgtagatcaryattactgtaaatttccaaccagttactttactcttcctggggctaaggatacaaaacataccctgaaataggttggaatttggagttcatgtaakattgtgaaaagtaagctgaagtgattgtgaagttgtgtgaacagtctcattcctgaaaggctaatggtaactgaaattggattccatccatacagggtttaggaatacagaacgtaaccgatagagactgtgaacattaagtggtgtatgacaggagttaggttccgtaacactaatatgaaatacattatttggagaagtgtcaaaactaactaatctctcacttctgatccttgctttacagaagtgcagagggtaaaatagactgaaaatagcaaaataaaggtatctgcttctaat

SEQ ID NO: 14814 - DNA, 547 bp, Chicken  19866894220495_1
cttccctgcgtgctgagctcacggctggtgcaggcatggcagtgtgacagacaccgccgctactccccagcagcttgtactcctaattaatagcggcgttctgcacccatgtgttaatccgtggcagcctgtcttggggttgttatttttgctgtctttaattttcgagtctcgtttcaatcttgtgtaatatcttatctttaaacgtggcaaatattggcttgtattgtggtcgggatgtatggcagaaaatgagtattaagtaaaaatgataaggtaatgacagtggctggagctacrgcagattgaattgcttaatgatgtatttcattcggttttggtcaaactgcgttaaattaacataattaaaatttgaagtrtaaaaatgaaaaggttcraggctcaaaaatatccctcacgttggattgttcatcaaagagaagtttatacttttttttttttttttcctaggaaatggttgtcaaactctgcaggtctgcgtgatgtggtgtgcttgtgttgatggtgcactttcccaatggcgagt

SEQ ID NO: 14815 - DNA, 467 bp, Chicken  19866894220495_2
tcctaattaatagcggcgttctgcacccatgtgttaatccgtggcagcctgtcttggggttgttatttttgctgtctttaattttcgagtctcgtttcaatcttgtgtaatatcttatctttaaacgtggcaaatattggcttgtattgtggtcgggatgtatggcagaaaatgagtattaagtaaaaatgataaggtaatgacagtggctggagctacrgcagattgaattgcttaatgatgtatttcattcggttttggtcaaactgcgttaaattaacataattaaaatttgaagtrtaaaaatgaaaaggttcraggctcaaaaatatccctcacgttggattgttcatcaaagagaagtttatacttttttttttttttttcctaggaaatggttgtcaaactctgcaggtctgcgtgatgtggtgtgcttgtgttgatggtgcactttcccaatggcgagt

SEQ ID NO: 14816 - DNA, 449 bp, Chicken  19866894220495_3
ttctgcacccatgtgttaatccgtggcagcctgtcttggggttgttatttttgctgtctttaattttcgagtctcgtttcaatcttgtgtaatatcttatctttaaacgtggcaaatattggcttgtattgtggtcgggatgtatggcagaaaatgagtattaagtaaaaatgataaggtaatgacagtggctggagctacrgcagattgaattgcttaatgatgtatttcattcggttttggtcaaactgcgttaaattaacataattaaaatttgaagtrtaaaaatgaaaaggttcraggctcaaaaatatccctcacgttggattgttcatcaaagagaagtttatacttttttttttttttttcctaggaaatggttgtcaaactctgcaggtctgcgtgatgtggtgtgcttgtgttgatggtgcactttcccaatggcgagt

SEQ ID NO: 14817 - DNA, 599 bp, Chicken  19866894220519_1
  misc_feature (1)..(126): n is any nucleotide
nnnnnnnnnnnnnnnnnnnnnnnnnnnnnnnnnnnnnnnnnnnnnnnnnnnnnnnnnnnnnnnnnnnnnnnnnnnnnnnnnnnnnnnnnnnnnnnnnnnnnnnnnnnnnnnnnnnnnnnnnnnnnntcatctatgtgaatattgcttttttttttcctttccttttcgcagctgcaagttcagaagttaatgtgcattatctgtggatggggaaaaccactaagtgaagaacaatctttaataatgaaagtggagaagagagaccagcagtggtgtttttacgactttcgactcccacartgctgagaatctgtccccttcatgttttgtaccatcactttgcctctcacctacaaattgcacctgttgtgttctttgttcattcagctctgatgtcagccaaaactgtgactcacggcctcttgtcagctgtggttagtgtttcctaaaggcgcattagcccaaactgttttctgcgttatttcaccgcagtgagatgaaacagttaacaattagcggattgcaaatgtgacaacactaccacacaagtgctctgctttgggaattcatctgctgccttaactcagtgcaaagagagc

SEQ ID NO: 14818 - DNA, 600 bp, Chicken  19866894220519_2
gtttcctaaaggcgcattagcccaaactgttttctgcgttatttcaccgcagtgagatgaaacagttaacaattagcggattgcaaatgtgacaacactaccacacaagtgctctgctttgggaattcatctgctgccttaactcagtgcaaagagagccatgcctacgtgtgtgcaaagatggctaattgagctcctgttgtcttcgcagcaaatgagacttctgcgttcaggaggtgtagtctcaagggcactattaatcattctaaagcctcctgtttgccacaagccccaagtagrgtagatggatctacagactgagaagtgaaaacagtgcacctgacagatatgcctaaggtgactayataaaggagggagatcatcttgctttcttacctactttgctaacttacagttagtgctagcaaatgcttagagcctaaaagaactagtgaattcagctgcctaaaatgcacaagtagcaacacttgccctcacagagcggaacttcctccctaaaatccatcagtgatttcaagctgggaccttcaggaaggtgccctccccccacccccttgcagcaggagatacagcctcata

SEQ ID NO: 14819 - DNA, 600 bp, Chicken  19866894220519_3
ttaacaattagcggattgcaaatgtgacaacactaccacacaagtgctctgctttgggaattcatctgctgccttaactcagtgcaaagagagccatgcctacgtgtgtgcaaagatggctaattgagctcctgttgtcttcgcagcaaatgagacttctgcgttcaggaggtgtagtctcaagggcactattaatcattctaaagcctcctgtttgccacaagccccaagtagrgtagatggatctacagactgagaagtgaaaacagtgcacctgacagatatgcctaaggtgactayataaaggagggagatcatcttgctttcttacctactttgctaacttacagttagtgctagcaaatgcttagagcctaaaagaactagtgaattcagctgcctaaaatgcacaagtagcaacacttgccctcacagagcggaacttcctccctaaaatccatcagtgatttcaagctgggaccttcaggaaggtgccctccccccacccccttgcagcaggagatacagcctcatactgatcctcttgcagctcctctctacttcgttcctctaatttattccttaggggctggggctaac

SEQ ID NO: 14820 - DNA, 600 bp, Chicken  19866894220530_1
aaaagaaaaatcaataataccaaactatatcaatatatttgatatattgctgaattaacttacaagtgtctgttgcatatctaatgtgttccccattacaagtactgatgaagagctgcacctgtgagaataatgtttcgaagtcggggatgctgggcatagaaaacttcacaaacctaacacaagataaaaaaaaaaagtttaacacataacatttagagattaattaaagaaaaaaaagttttatcttcatcagtctctgcaaatacaggtagctgcttgcaagaagtgccaaagtarccatgacagatggcatatcatttccccaggagctgcacagcacttggaaacacactatcagcgcaaagtcctgctacgaacctggtgaaaaactagtttggaactaactatggccaacaaagatcaccttatctgttacaattacaatcacaataaatagctaacagtgaagtttttatactaaaccacataacttctccagacacctgcttgaatgagtcatggatttctcaactattaaatgattagacttgtatgccttgctaagagctcctcctcttcactttcagtttctctcca

SEQ ID NO: 14821 - DNA, 600 bp, Chicken  19866894220574_1
ctatgggaagctgaggtcttgtggcctgctggctgcaaagtgctgattggtcctgattctgacctattggaggcactgggagatattaagctggtgacaggaggagaagcctaaacgctgaattcttaaacagaggagaactcttgaggaaggagaactttcctacagagttattaagggtctttaggtgctgacctaatcccattttcactgagtgaaacacctaaataacacatctgacacatagctacatctttgctgtcctgtgtactcctattatctgcatgggcatctaaatgrtgggaggtactgtgcaaataaaattacactgaaagagagtattctcattcattataaaaatgacctttggaaaatgcatgatgtattaaaaaaaattgctttcaaggtaatatgacctactacacccatgctagacaccaatttaaacagaagttctggttaaattgccttttaatacaaatgccattttattcctccttctcctgtgtatttgtcaagtagagatgtacaactgaaagtactactgaatgacagataattttttttgttaagcatcggtatccaggataaaattctaag

SEQ ID NO: 14822 - DNA, 600 bp, Chicken  19866894220577_1
taattttgatttttaaaaacaactacacacactacagaaaccccttgtctgtcttcatcttaaatcatggttgtaacaacatcacagtctagaggctgcaaattatttttaaagttgctacacaaagttagaattggaaaatacacaagagactgcatatacattaaaatcaatgaacatctggacagatcagtgtttatccatttaattcatgtatattaataacaaaattatcacacaaataatttttctgttctcacattatttaactaaaagtgaataaggcagtacaaaatcccytatctacgtctatattgtatatcaagatatcattatagcttatccaatttggattcctccggtacctatactgtagctgcagaaatctcactgcagagcatttaacaacgtagaagactaaagtgtgatagtcttcctgatgtacctcagtgattacagcacagtcaatactggagctaaattatttaaatataacttgtctgcaacrgtagcaatcagatcttcttactgcagtrtaggcacagacaaaacttattaaatatttggaaaacactccaatgtgaattatttaaataacac

SEQ ID NO: 14823 - DNA, 600 bp, Chicken  19866894220577_2
ttcatgtatattaataacaaaattatcacacaaataatttttctgttctcacattatttaactaaaagtgaataaggcagtacaaaatcccytatctacgtctatattgtatatcaagatatcattatagcttatccaatttggattcctccggtacctatactgtagctgcagaaatctcactgcagagcatttaacaacgtagaagactaaagtgtgatagtcttcctgatgtacctcagtgattacagcacagtcaatactggagctaaattatttaaatataacttgtctgcaacrgtagcaatcagatcttcttactgcagtrtaggcacagacaaaacttattaaatatttggaaaacactccaatgtgaattatttaaataacactaaccacattctcaaggaagttaatgagaaggttttactgtactttaaaacagaatgtattgcattcttttttcatctacctacccattttcagcttccgtttattcttgtttctattcacaaaatctatataggctaggaaaacatcatatattgctagaaaaaggaccattacattttcaaattcatggctctcaataagagagaa

SEQ ID NO: 14824 - DNA, 600 bp, Chicken  19866894220577_3
cacaaataatttttctgttctcacattatttaactaaaagtgaataaggcagtacaaaatcccytatctacgtctatattgtatatcaagatatcattatagcttatccaatttggattcctccggtacctatactgtagctgcagaaatctcactgcagagcatttaacaacgtagaagactaaagtgtgatagtcttcctgatgtacctcagtgattacagcacagtcaatactggagctaaattatttaaatataacttgtctgcaacrgtagcaatcagatcttcttactgcagtrtaggcacagacaaaacttattaaatatttggaaaacactccaatgtgaattatttaaataacactaaccacattctcaaggaagttaatgagaaggttttactgtactttaaaacagaatgtattgcattcttttttcatctacctacccattttcagcttccgtttattcttgtttctattcacaaaatctatataggctaggaaaacatcatatattgctagaaaaaggaccattacattttcaaattcatggctctcaataagagagaagaaaaaatgtaaccaaggaattgttaag

SEQ ID NO: 14825 - DNA, 599 bp, Chicken  19866894220578_1
  misc_feature (1)..(208): n is any nucleotide
nnnnnnnnnnnnnnnnnnnnnnnnnnnnnnnnnnnnnnnnnnnnnnnnnnnnnnnnnnnnnnnnnnnnnnnnnnnnnnnnnnnnnnnnnnnnnnnnnnnnnnnnnnnnnnnnnnnnnnnnnnnnnnnnnnnnnnnnnnnnnnnnnnnnnnnnnnnnnnnnnnnnnnnnnnnnnnnnnnnnnnnnnnnnnnnnnnnnnnnnnnnnnnnnttcttaaaacaaatgaaaccattaatgtactcctggagactgaatgcaagacctggtggttcctccatccttgtttccatctttccagccarttttctaggagagctgtacaagtctttcctcttcaaaaacatgacccagctactgcttttgctcccagtaaatcctctgtctaccacttagctgtggaataaattgcagtcttgctctcttccatttccatttgcatgtctagccctgctagcatgtaacatcatcagctcctgggccaaggctcaccacaccacgctcaccccaggtgaaccctgccctgctgacaccctgcaggtctgccttgctgaatttctagcacctcctgcctaacctgtttgcttctcccttttccttgggc

SEQ ID NO: 14826 - DNA, 600 bp, Chicken  19866894220578_2
taggagagctgtacaagtctttcctcttcaaaaacatgacccagctactgcttttgctcccagtaaatcctctgtctaccacttagctgtggaataaattgcagtcttgctctcttccatttccatttgcatgtctagccctgctagcatgtaacatcatcagctcctgggccaaggctcaccacaccacgctcaccccaggtgaaccctgccctgctgacaccctgcaggtctgccttgctgaatttctagcacctcctgcctaacctgtttgcttctcccttttccttgggcttcaamtcatttggctttcatttaatgtcctgtctagaaaaaagcaagtctgcgacctgccttcctcctccttggcacagtgcaaatgaggacacctctgtatgagtggccatgtacccagcaaatacccaacaagctggggagcagcgctgtccaggtcacccctgggctttgtccatcagggcaagaagctcatctccattttgcagccctcacccttgtcttttgtggcagcacacagcagcctctcatgtatttaatgcgctgtgctcctctattcctgtcattgtaataggagagctttcc

SEQ ID NO: 14827 - DNA, 599 bp, Chicken  19866894220585_1
  misc_feature (1)..(80): n is any nucleotide
nnnnnnnnnnnnnnnnnnnnnnnnnnnnnnnnnnnnnnnnnnnnnnnnnnnnnnnnnnnnnnnnnnnnnnnnnnnnnnnntgttgaaaataagtgtatatacagtagctataagcatattctagactgttgtcagagtgatgtcatttactatcacaattctggggtctttggtctacaaagaccagtacgtgctcttctcagtatgcccaagagttcaagtagaagggtaagagaggtcagggaatgaaaaaatgtttgagcatctctctgaagctctaatacaagcatgacaggcatkagactcttttaaaattgactcttcaaaagacaaaaaataggagagaagcctgaaaagcttgattataacctgcagataaaagagagtgtttgcattgcccttcccaggacacagacttgtggtgagatgggtgtcartttttaccctaaaacttcaagtgactccctgatccagctcatcttacagcttgacaaraacattaaatgaagagatgatgctgtacttacggttggggaccagaacaggcagctggggaaaaacaaatattcttaaactactgttctcaccaaggcccactg

SEQ ID NO: 14828 - DNA, 600 bp, Chicken  19866894220585_2
tgatgtcatttactatcacaattctggggtctttggtctacaaagaccagtacgtgctcttctcagtatgcccaagagttcaagtagaagggtaagagaggtcagggaatgaaaaaatgtttgagcatctctctgaagctctaatacaagcatgacaggcatkagactcttttaaaattgactcttcaaaagacaaaaaataggagagaagcctgaaaagcttgattataacctgcagataaaagagagtgtttgcattgcccttcccaggacacagacttgtggtgagatgggtgtcartttttaccctaaaacttcaagtgactccctgatccagctcatcttacagcttgacaaraacattaaatgaagagatgatgctgtacttacggttggggaccagaacaggcagctggggaaaaacaaatattcttaaactactgttctcaccaaggcccactgcctgatcaaaccatattcttgttggacagctggagaaaaggcacactgagtcaggtgtccaagcttcattcatcccctacttttccattaaggcacgaaacatcttagtactgcagaactctcagtctttctgccaaa

SEQ ID NO: 14829 - DNA, 600 bp, Chicken  19866894220585_3
cttctcagtatgcccaagagttcaagtagaagggtaagagaggtcagggaatgaaaaaatgtttgagcatctctctgaagctctaatacaagcatgacaggcatkagactcttttaaaattgactcttcaaaagacaaaaaataggagagaagcctgaaaagcttgattataacctgcagataaaagagagtgtttgcattgcccttcccaggacacagacttgtggtgagatgggtgtcartttttaccctaaaacttcaagtgactccctgatccagctcatcttacagcttgacaaraacattaaatgaagagatgatgctgtacttacggttggggaccagaacaggcagctggggaaaaacaaatattcttaaactactgttctcaccaaggcccactgcctgatcaaaccatattcttgttggacagctggagaaaaggcacactgagtcaggtgtccaagcttcattcatcccctacttttccattaaggcacgaaacatcttagtactgcagaactctcagtctttctgccaaatctgacttaagttgtctaggtagagtcaaaacatggagaactaagggagttctagaag

SEQ ID NO: 14830 - DNA, 600 bp, Chicken  19866894220588_1
tgaaatccttcacttcttagtttccccttctgacttgagtacagagttaagtataactgagagcagaacttgacctcagctctagctggtaatctatttgtaatctatttcaggaaatcttcatttctgctgggtatagaaggcatagttaggtaaaaaaaaaaaaaaaaaaaaaaaaaaaagatcaattgactaaaagcaatagcactaaaataatgagtattgcaatgctcaacctcttctggcctccttgacacaaaaacaaaagatgtttttggaagaaatgctaatggcatttckcttttttcattcatcttcctcttcaagctgaggctctcacatatttccagaagatctttgcctctatcttggaattctcagcctccaacttcctcctgaaaatcattattttatattttttgtcaataaataaaaattataattagtttcagtgtttaatggaatcaattggcaccagactgacatcatccytctacaactcagaacaaaaacaaaaacatttaccatgatawtgtaaatttgmatttcatttacagtgaattgctgtgactggacaataagctgtttagctcttctcca

SEQ ID NO: 14831 - DNA, 600 bp, Chicken  19866894220588_2
ctaaaagcaatagcactaaaataatgagtattgcaatgctcaacctcttctggcctccttgacacaaaaacaaaagatgtttttggaagaaatgctaatggcatttckcttttttcattcatcttcctcttcaagctgaggctctcacatatttccagaagatctttgcctctatcttggaattctcagcctccaacttcctcctgaaaatcattattttatattttttgtcaataaataaaaattataattagtttcagtgtttaatggaatcaattggcaccagactgacatcatccytctacaactcagaacaaaaacaaaaacatttaccatgatawtgtaaatttgmatttcatttacagtgaattgctgtgactggacaataagctgtttagctcttctccattagttgtcagcagaatgagcaaaatgttctcaggtacagaacatcactagtttggatgggaatgcttcagactgacaactagaacatttttgctggagataaaactgaaagccatatctctgcatgtgtggcctaaaaactaaagtgttgtagaaaatggggcactaataacttctgtagcttcattttga

SEQ ID NO: 14832 - DNA, 600 bp, Chicken  19866894220588_3
aacctcttctggcctccttgacacaaaaacaaaagatgtttttggaagaaatgctaatggcatttckcttttttcattcatcttcctcttcaagctgaggctctcacatatttccagaagatctttgcctctatcttggaattctcagcctccaacttcctcctgaaaatcattattttatattttttgtcaataaataaaaattataattagtttcagtgtttaatggaatcaattggcaccagactgacatcatccytctacaactcagaacaaaaacaaaaacatttaccatgatawtgtaaatttgmatttcatttacagtgaattgctgtgactggacaataagctgtttagctcttctccattagttgtcagcagaatgagcaaaatgttctcaggtacagaacatcactagtttggatgggaatgcttcagactgacaactagaacatttttgctggagataaaactgaaagccatatctctgcatgtgtggcctaaaaactaaagtgttgtagaaaatggggcactaataacttctgtagcttcattttgacagaattagttaatggaaacagcatttactatgtattgaac

SEQ ID NO: 14833 - DNA, 600 bp, Chicken  19866894220588_4
gcctccttgacacaaaaacaaaagatgtttttggaagaaatgctaatggcatttckcttttttcattcatcttcctcttcaagctgaggctctcacatatttccagaagatctttgcctctatcttggaattctcagcctccaacttcctcctgaaaatcattattttatattttttgtcaataaataaaaattataattagtttcagtgtttaatggaatcaattggcaccagactgacatcatccytctacaactcagaacaaaaacaaaaacatttaccatgatawtgtaaatttgmatttcatttacagtgaattgctgtgactggacaataagctgtttagctcttctccattagttgtcagcagaatgagcaaaatgttctcaggtacagaacatcactagtttggatgggaatgcttcagactgacaactagaacatttttgctggagataaaactgaaagccatatctctgcatgtgtggcctaaaaactaaagtgttgtagaaaatggggcactaataacttctgtagcttcattttgacagaattagttaatggaaacagcatttactatgtattgaacgggtgacttta

SEQ ID NO: 14834 - DNA, 600 bp, Chicken  19866894220591_1
agcaaatacctcacctgtcaaacttttgctattgccctcagagcagtattcaccatctcctgaggatttgttgactgtttgagttcctctaactccagtccttgtcactctgctcttcctcaggaagcatgtctatctaataagatacctggctgcttttataaagctttgactaaggtggtgtcagaattttccttaaattatgacaggaggaagtggccttccatagcttattcagctggagaaaaaggagaaacaatagcatgtttctgtcccctgcatctttaaatatggcatacratctccatgtgtttcagcaagtcagagagagattcttgactcaatttcaaacagaagtgatctcaaaaggaaaaaaaaaagaagtgcaaaaacttgctctgctctagacttccacactaaaggcactgattcttcatggtgctttcatttggaagaattacagcagtgatgaaggagcagattacgtccttgaaatgaaatatcacttataacacagaacatttgacagacaacacatttgaagcaataaaccaatcagcacaatctttgtttccagatatgtttaacagaagaacatga

SEQ ID NO: 14835 - DNA, 495 bp, Chicken  19866894220596_1
tttatacgtatatgtgttgtctgttaatgcatgtatatttctaattttaagattaaatcagtggtagtgcaagaaacatagtttattcatactaaatacattgaactagattctctcctttttaagaacgggacctaagaaaatctttaagtctgtgggagatcttatatataatgaatgtgtgttttccttcttaattatgttttgcttctccaagaaatctttgggaaattaaatccaatttctacttgtgtatatatgtgtgctatctgaggtgcattgcatgcaggctctgaaatmgaaataatgctaatttatctgtacaaggatcttaacgtttcttggagagtgtgaagtctaaaaatccttttttcgcttttcagaatagacttggtgacacttctcaaattgctttacattttgcagttcacttctcaatcttgaggacagccaggaatgttttcaagatgcagagaatctcctcaagattttgtt

SEQ ID NO: 14836 - DNA, 600 bp, Chicken  19866894220600_1
agattatctgttccataacctttcgtggcaccgaggtgaggtctgtagctaccgggatcatctttccagccctttttgaagatgggcgtcacatctgccagtctccagtctgccgggacatccccggttagccaggactgctgtagaatgatggagagaggcttgtcagccacatccgccaactccctcagcactccagggtgcgatccatcggccccagggacttctgagcgtccagctttcagagcaggtccaaaatcattttcttcatggattactcagggcctgttctgttccccrtccctatctatcagcacaaggggctgtgttcccagggagtaacaagtcttgctattgaagattgaggcaaagaaggcattaagtacctcagccttatcctgatccttggtcaccaagttgcctttggcatttgaacaagggatggagattctccctagccctcctcttgctgttgatgtatttatagaaatatttattgttatcctttacattagtggccaagctcagttctagctgggctttggcttttctaattttctctctgcacagcttcactgcatacctgtaatcatcatcagt

SEQ ID NO: 14837 - DNA, 599 bp, Chicken  19866894220614_1
  misc_feature (1)..(51): n is any nucleotide
nnnnnnnnnnnnnnnnnnnnnnnnnnnnnnnnnnnnnnnnnnnnnnnnnnnacatttcttgcaagaagttactggagagctctaaactttagaaatgtggcaagcaacaaggaaggaaccaaaaaagcactgcccagcttaaatgaaccagcatgaatgcttaactcttccctattatcagaaagctgatgacaaaatcattctgtgacaagcgtctctactaaaaatgacaaaaatactgcagatataggaagagcagagaattgtgtttacctagtgaaaagagtaaatatgagtaartctttacaaccaatctgtatagaacaaactaacactgaaggattattttccaggtgatacaaatatttactcagggaacagaggatcccagttgaagatggaattacttccagcccatctggcctttgtgcatttgaaagtccagccctaaacagcagataaacaaaactgctgacagcacatattttctcacatatgtactcatagtctaaagtatctggatgtgcagctgtctcctgattgtttccatgtgagaaagtaaagatttctttgtccccctatttctcagaagacagcaa

SEQ ID NO: 14838 - DNA, 600 bp, Chicken  19866894220628_1
catttttcctttgtctttgctgaatatctgttctgatccaaattgttttttccttatttttctgtttgatgttaaaaacaaacaatgaaaaaatgaatttctttcagaaatgaaaattctattcttgctctaccacattcttcagatacatagttctgaaggtcctgaagaatgactttgacattagtaggcataataaagatagccttaaatcatcaaaacagatagaactgaaagaaaagtaatactgaatgctttcagtaattttccatttgtcaaaattacaataaaaagcctttwaaaaaaggaaagattcaaagttatttctgccttgaaatatgtttcttataaattaacaaaatgcagtccttgatttggtatgttctgcaaaaatagcattgagaatagtgggctgtatattcaacagtcacagaccttcacagtaaaaacaggttcagagaaaaatggctgctacagaatctagaagttaatgcatcacaacctctttgccctttctgtctgcctgtcttatggactgatctttggagatcactgaagttgtcctgttattcagagacagagatcagtattatagaaatt

SEQ ID NO: 14839 - DNA, 599 bp, Chicken  19866894220634_1
  misc_feature (1)..(146): n is any nucleotide
nnnnnnnnnnnnnnnnnnnnnnnnnnnnnnnnnnnnnnnnnnnnnnnnnnnnnnnnnnnnnnnnnnnnnnnnnnnnnnnnnnnnnnnnnnnnnnnnnnnnnnnnnnnnnnnnnnnnnnnnnnnnnnnnnnnnnnnnnnnnnnnnnncattttctttcaggctggaatgatcatcgataacggcgttaaaaccactcctgcctcagccaaggacaaaaggcccattctgacactgatttctgggaggtaaagtgctctgcatggcgtggtttgaaaaagacttctctttagcactggtttmggactataatgttgctcccaaggaagctgatacattgcagtgcttttggagggcagttattgaggagaggatttcacttaaatttcatagaatcattaaggttggaaaagaccactaagctcacctagtccaacaccagcccatcacaccatgcccactgaccacgtccctcagtgccacatctgcatgtgctctttgaacacctccagggatggtgactccacggtgatttatcactttctaacttcatctccttgttgcacgtcataaaggacccccagctccacatcctcctcttg

SEQ ID NO: 14840 - DNA, 600 bp, Chicken  19866894220634_2
gttggaaaagaccactaagctcacctagtccaacaccagcccatcacaccatgcccactgaccacgtccctcagtgccacatctgcatgtgctctttgaacacctccagggatggtgactccacggtgatttatcactttctaacttcatctccttgttgcacgtcataaaggacccccagctccacatcctcctcttgttgtctttgctctttggcttggagctgagcgggcgtggatattacatctgctttagggtattctattgatttctttggtagatgacagagacaattaaatrctgtctggccaacagctctgctggacagaacttgctgcaagtttcccacaacaggaaatgaaaggacttccggggaatgctgttgatcttctttgttccttcgagacctgcttgagcagggaacacttcagcagcagagcttacactctgatttctgtctagttcccaatctgacactgcagcagtagttacgtttaaatgtgtggcgtgacccttcatccctggagctgtgtgtagcatccgtatgacataacacagccacttagaaatgctaaaaacctctttacagagcgtattgtg

SEQ ID NO: 14841 - DNA, 600 bp, Chicken  19866894220634_3
gacccccgtggggaggctgttgtaagcaaagggttttttgcaggcaaagtgttccaatgtaagggctgcgcttgcacccttttgtctcattagagtctcagtctggctcttaacatagttaccaaccccagggagagaaaaggctctcaagttgcagttttctttcctgacttcactgcctctgtggcactcagacggcgttttcccacggctgggtctctggacagaagaaaccaaacagggatgagaaacaccactgctcgggaagggactgttcagtttttcctttctcctttccayctctggtgtgcaggttgcccacagtgctggttatgcagtgtgctgggttggttcagcatcttttccaggcaactcatctctgtgtcagcccagtgccccactccacagctgatgctaaaagagtttcaaaaatgaatattattgacattgtttcaatgccaaattaattgaaataattaactgaatagcaaaattrcccctaaaaaacagcgaacaaacaaacaaacaaaaaaagcccacagccttctctgcaaatacctctaaattctcttgagaaattgatgctgcttctccagatag

SEQ ID NO: 14842 - DNA, 600 bp, Chicken  19866894220634_4
ggcgttttcccacggctgggtctctggacagaagaaaccaaacagggatgagaaacaccactgctcgggaagggactgttcagtttttcctttctcctttccayctctggtgtgcaggttgcccacagtgctggttatgcagtgtgctgggttggttcagcatcttttccaggcaactcatctctgtgtcagcccagtgccccactccacagctgatgctaaaagagtttcaaaaatgaatattattgacattgtttcaatgccaaattaattgaaataattaactgaatagcaaaattrcccctaaaaaacagcgaacaaacaaacaaacaaaaaaagcccacagccttctctgcaaatacctctaaattctcttgagaaattgatgctgcttctccagatagctgaacacatgccttgggaagctgctggttgccacaggcacagtaagggattacaaaaggcaatttgtcccttgccctacaaggcaggaatgacccctggaagccaagcaattcaatatgcagtcgtgtttgtgcttggtgattacccagcagtacgggctgcggctcagattatttgtactgctttccacttttc

SEQ ID NO: 14843 - DNA, 376 bp, Chicken  19866894220639_1
tgctcctgcctggcgccgtgtccccgtgtgcggtgagggcggcgtggtcaggagagggctggaaacacagctccagggagggggctgcagcgtctgacccccactgcagcaatgccaatcgaagccacaggcccggcccggactggcggagcttttgccaagctttgatttccctctccctcggcagtaaacaagggatgattcagcccggaggctcgagggcaaaggcacctccggccgccgggaacagtagctgctttctgcacagcgtggccgtggggggatccatgggaggagggkcayggctcagccccccccaaggcaaagactgcctgtcttgcacggcaaaaatagacagaggcacgaaacccgcaag

SEQ ID NO: 14844 - DNA, 373 bp, Chicken  19866894220639_2
tcctgcctggcgccgtgtccccgtgtgcggtgagggcggcgtggtcaggagagggctggaaacacagctccagggagggggctgcagcgtctgacccccactgcagcaatgccaatcgaagccacaggcccggcccggactggcggagcttttgccaagctttgatttccctctccctcggcagtaaacaagggatgattcagcccggaggctcgagggcaaaggcacctccggccgccgggaacagtagctgctttctgcacagcgtggccgtggggggatccatgggaggagggkcayggctcagccccccccaaggcaaagactgcctgtcttgcacggcaaaaatagacagaggcacgaaacccgcaag

SEQ ID NO: 14845 - DNA, 560 bp, Chicken  19866894220647_1
tgccaaaaaacaattacatgagtgaggtgtggttgtgaaatgagggatatttctccttagtaagataaaattctgttagagagatatggctaagttttctgagtatctgattgcaactctgtacattccatttgaaaatttgcaggtaagtatattttgttgactgaaaatagagtagaaaacatacaaaaaaaaaaaaagatttttttttttggcagccctttctcaaattcctttattaaaacagaaagcacagctgcatatttctctctgttcacagaattgtgtttagccagtgtrtcaaaatgcatagaatastttcccttgagtcggcactgcactgcccactacccttgctctggtttcagtccagacagcagtaacargacaccgatatttggttattgccaagccatgggtgcatacatggaaccaggctgaatcacttggtggtgaatagacaccattatgatggcatagggcaggaggtggggcacaatgaggcccaggccaggtcgcatgcagccctgcagtctgcgagttggacatgcctgctctaa

SEQ ID NO: 14846 - DNA, 542 bp, Chicken  19866894220647_2
tgagtgaggtgtggttgtgaaatgagggatatttctccttagtaagataaaattctgttagagagatatggctaagttttctgagtatctgattgcaactctgtacattccatttgaaaatttgcaggtaagtatattttgttgactgaaaatagagtagaaaacatacaaaaaaaaaaaaagatttttttttttggcagccctttctcaaattcctttattaaaacagaaagcacagctgcatatttctctctgttcacagaattgtgtttagccagtgtrtcaaaatgcatagaatastttcccttgagtcggcactgcactgcccactacccttgctctggtttcagtccagacagcagtaacargacaccgatatttggttattgccaagccatgggtgcatacatggaaccaggctgaatcacttggtggtgaatagacaccattatgatggcatagggcaggaggtggggcacaatgaggcccaggccaggtcgcatgcagccctgcagtctgcgagttggacatgcctgctctaa

SEQ ID NO: 14847 - DNA, 474 bp, Chicken  19866894220647_3
tggctaagttttctgagtatctgattgcaactctgtacattccatttgaaaatttgcaggtaagtatattttgttgactgaaaatagagtagaaaacatacaaaaaaaaaaaaagatttttttttttggcagccctttctcaaattcctttattaaaacagaaagcacagctgcatatttctctctgttcacagaattgtgtttagccagtgtrtcaaaatgcatagaatastttcccttgagtcggcactgcactgcccactacccttgctctggtttcagtccagacagcagtaacargacaccgatatttggttattgccaagccatgggtgcatacatggaaccaggctgaatcacttggtggtgaatagacaccattatgatggcatagggcaggaggtggggcacaatgaggcccaggccaggtcgcatgcagccctgcagtctgcgagttggacatgcctgctctaa

SEQ ID NO: 14848 - DNA, 599 bp, Chicken  19866894220650_1
  misc_feature (1)..(13): n is any nucleotide
nnnnnnnnnnnnnttgcctcttcacttaggagaagaagtaagctagaaacctgtattcctcttttgaggtggaagtttctttagaacagaaagggaaggaggggcatggatttcatttttaagttatcatacaggcgggactcatcaggcaatgtctgatgcacacactcacctcctgcctgtgacgaacacctcacaactgcaagaaaaggatgctctgagtggggattgaacaggacagaaaccccacttaatgctctaaagaactgaaggaggccaggttactgagcagtcagactyggtctgtgagcttggcttgcctgatytgacttgaaaacaataaagcacagaaataagaacctgaactccttcccctagggtttcctgcccagacctcttgctcgaagaggcaattcacatttttcatctctctcaaaacaaattaggcccacatgccaacatgacttagtgattatgtagtaattaccttgaatatttatgcagcatttyagcagataagctcagggtgagtcatcggaagggccttattcttttgcacagtttagtccctgactccttaaaaacattgtttagtttct

SEQ ID NO: 14849 - DNA, 600 bp, Chicken  19866894220650_2
taggagaagaagtaagctagaaacctgtattcctcttttgaggtggaagtttctttagaacagaaagggaaggaggggcatggatttcatttttaagttatcatacaggcgggactcatcaggcaatgtctgatgcacacactcacctcctgcctgtgacgaacacctcacaactgcaagaaaaggatgctctgagtggggattgaacaggacagaaaccccacttaatgctctaaagaactgaaggaggccaggttactgagcagtcagactyggtctgtgagcttggcttgcctgatytgacttgaaaacaataaagcacagaaataagaacctgaactccttcccctagggtttcctgcccagacctcttgctcgaagaggcaattcacatttttcatctctctcaaaacaaattaggcccacatgccaacatgacttagtgattatgtagtaattaccttgaatatttatgcagcatttyagcagataagctcagggtgagtcatcggaagggccttattcttttgcacagtttagtccctgactccttaaaaacattgtttagtttctactgaaacgctttctgcttggcttgga

SEQ ID NO: 14850 - DNA, 600 bp, Chicken  19866894220650_3
ggatgctctgagtggggattgaacaggacagaaaccccacttaatgctctaaagaactgaaggaggccaggttactgagcagtcagactyggtctgtgagcttggcttgcctgatytgacttgaaaacaataaagcacagaaataagaacctgaactccttcccctagggtttcctgcccagacctcttgctcgaagaggcaattcacatttttcatctctctcaaaacaaattaggcccacatgccaacatgacttagtgattatgtagtaattaccttgaatatttatgcagcatttyagcagataagctcagggtgagtcatcggaagggccttattcttttgcacagtttagtccctgactccttaaaaacattgtttagtttctactgaaacgctttctgcttggcttggatttcatcaggacttttatgctgtctgcattattgttcttattgcaagtgacaattttatgagcaattcaatgtctgaatagctcttctactagcactggtgragactatttcaactgagagccaaagactttgtcgtggtgtgtttgaatgtgaacattaaatcagagataataaatagggata

SEQ ID NO: 14851 - DNA, 600 bp, Chicken  19866894220650_4
tctctcaaaacaaattaggcccacatgccaacatgacttagtgattatgtagtaattaccttgaatatttatgcagcatttyagcagataagctcagggtgagtcatcggaagggccttattcttttgcacagtttagtccctgactccttaaaaacattgtttagtttctactgaaacgctttctgcttggcttggatttcatcaggacttttatgctgtctgcattattgttcttattgcaagtgacaattttatgagcaattcaatgtctgaatagctcttctactagcactggtgragactatttcaactgagagccaaagactttgtcgtggtgtgtttgaatgtgaacattaaatcagagataataaatagggataagatttgaattagaagaaggagtaaatcagagtttaaaagtaaactgcttgctttgcaaaactctcatgttaaggcaaccagaatatatgtcaaattattttttcctttttgattaatgtagtttttcttaactcagttctactctgatcattaaaataagtgtctgggatgacttagtttccaatgctgacaataaaaagaacattttgttacagct

SEQ ID NO: 14852 - DNA, 600 bp, Chicken  19866894220656_1
acacatatatagctcaagacacccagaaattgaaagttgtgcatctagttttgtgtacctccatgcaaataccaaaaaagtctcccatacaggtgttgatgtttttcaagtcagatagttgatagctgctctaatttttttctccaaaatggttctaacccatgatttagtgaggtaaatccatgctttctgtcctccagatttgttcatttttctctccattcacccactgccctcagctcccttttttacttcaggcagttctttttttgtgtgttgtatttgctgattgctcaccargagcagaaagggagaaaagagctcctctgaatgactgctcccatgcttgtggctgtgagttggggagtggatctgtcttagagatttggagaaaccctgaggaagtatgaggccgcagtgcttgctgcagctttggcaccttcacacactgtgctgttaatgaggaaaggagacactttctttttacaagtggggaatccttgcatgtgacgctgcatgtaggacacaaaacttggaagcagcagatggtaaagtgagagtcactaggatggatgtgtgactaacaggaaggcgaagcag

SEQ ID NO: 14853 - DNA, 600 bp, Chicken  19866894220664_1
gagctgttattccacatgagcattttatacaatattgtacaaataatttgtttcctatctgttttaaatgcttctataaataatgttaagcaatatgacaaccatgtaagtatgtaaatagtaacaatatactaataaagatctaaaggtgtgttgttttttttaacaagaaagctctgtaatttagagggaattgtcctttgtttagtgggagcctcacttaagtcacacaataatttcaagtggggatgtctgtttgaggtccttgttgtagaaagcactaatgagtaatgtccatgktttttttgccttrcaaaaataaacaaagtttgtgtaagggacagctttctgatttgacagtgttgggtctgttactgtgtcttagcacgcctaattctctacccagctctgtgaatagtctcctttatgaccataacgccattccaacagatgaaacaattgggacttcttatgtcagataccacttccatattgtactacatcatgatttaatcgcattcagactcctccaaactgatttcaaattccaaaagtagtgttatgtcattggctgtrctctttgccaatttcacacaagtc

SEQ ID NO: 14854 - DNA, 600 bp, Chicken  19866894220664_2
acatgagcattttatacaatattgtacaaataatttgtttcctatctgttttaaatgcttctataaataatgttaagcaatatgacaaccatgtaagtatgtaaatagtaacaatatactaataaagatctaaaggtgtgttgttttttttaacaagaaagctctgtaatttagagggaattgtcctttgtttagtgggagcctcacttaagtcacacaataatttcaagtggggatgtctgtttgaggtccttgttgtagaaagcactaatgagtaatgtccatgktttttttgccttrcaaaaataaacaaagtttgtgtaagggacagctttctgatttgacagtgttgggtctgttactgtgtcttagcacgcctaattctctacccagctctgtgaatagtctcctttatgaccataacgccattccaacagatgaaacaattgggacttcttatgtcagataccacttccatattgtactacatcatgatttaatcgcattcagactcctccaaactgatttcaaattccaaaagtagtgttatgtcattggctgtrctctttgccaatttcacacaagtcatgaagggatgaa

SEQ ID NO: 14855 - DNA, 600 bp, Chicken  19866894220664_3
agcactaatgagtaatgtccatgktttttttgccttrcaaaaataaacaaagtttgtgtaagggacagctttctgatttgacagtgttgggtctgttactgtgtcttagcacgcctaattctctacccagctctgtgaatagtctcctttatgaccataacgccattccaacagatgaaacaattgggacttcttatgtcagataccacttccatattgtactacatcatgatttaatcgcattcagactcctccaaactgatttcaaattccaaaagtagtgttatgtcattggctgtrctctttgccaatttcacacaagtcatgaagggatgaaatgagagttcctatgcatttgacatgttttctggaaatgatggagccctctagatgacctcctatgtgtcaaaccccttttagagagaatgaaggattttgcaggtcagcatctaagtgttgttagagcaaatctccggatgtgtgagtctgataatcgacagtgctgaagygcacataacaaggctgctacaacttagatgttctcacttaaaacatatcctggttacttaatatgtaagctaataacctggaattctgtat

SEQ ID NO: 14856 - DNA, 600 bp, Chicken  19866894220664_4
ttccatattgtactacatcatgatttaatcgcattcagactcctccaaactgatttcaaattccaaaagtagtgttatgtcattggctgtrctctttgccaatttcacacaagtcatgaagggatgaaatgagagttcctatgcatttgacatgttttctggaaatgatggagccctctagatgacctcctatgtgtcaaaccccttttagagagaatgaaggattttgcaggtcagcatctaagtgttgttagagcaaatctccggatgtgtgagtctgataatcgacagtgctgaagygcacataacaaggctgctacaacttagatgttctcacttaaaacatatcctggttacttaatatgtaagctaataacctggaattctgtatctgtgctgagatagtgtataacatggcaagctcagtcccatttcagcaggaaattctccatcccaattaaaaagatttgaactccccgctccttgtttttatttagtgattgattgataccttgtgataatcctccatgaattacagacctaggtgagcctcaaaggaaaagtaagtgaatctgagtgatgctccacgtgcatgttcac

SEQ ID NO: 14857 - DNA, 600 bp, Chicken  19866894220664_5
gcttgcagttcttcatttccattcagccatgtgctcaagtggagtgctccactgctggtagtttaagttgcatacaaaaggttgttcctcgtttgtttgtcttcaagattagcctatgcagctccttaacagcctttctggacagttttttggtcttgtaggtgagaaccaaattccctttcctaatgcatagggagtggttttgctacctcagaggtacctgttcttagtatttactccagctgttccttcaaaatgtagaaagaaaaaatactgggacccctacaacttgtggacttrtttgaaaaaacttatgaaggccttgtgcgttacaaatgaagagaaaatttcacatcctgaagygtgctattgtgctgtacagaacttccaagtgtgggtacactaacaacttgcattggagaagaccctctattgcactttaatccttttaagtgcacgtgcccgaagagcccatgcatgtatgtcagcacttcacacacctaagcaccacctgagctgaatcaggtcagctggcatccccccgagtggttcattattgggtaacatcttcttttcttgggtcttccatactcaactatc

SEQ ID NO: 14858 - DNA, 567 bp, Chicken  19866894220664_6
taagttgcatacaaaaggttgttcctcgtttgtttgtcttcaagattagcctatgcagctccttaacagcctttctggacagttttttggtcttgtaggtgagaaccaaattccctttcctaatgcatagggagtggttttgctacctcagaggtacctgttcttagtatttactccagctgttccttcaaaatgtagaaagaaaaaatactgggacccctacaacttgtggacttrtttgaaaaaacttatgaaggccttgtgcgttacaaatgaagagaaaatttcacatcctgaagygtgctattgtgctgtacagaacttccaagtgtgggtacactaacaacttgcattggagaagaccctctattgcactttaatccttttaagtgcacgtgcccgaagagcccatgcatgtatgtcagcacttcacacacctaagcaccacctgagctgaatcaggtcagctggcatccccccgagtggttcattattgggtaacatcttcttttcttgggtcttccatactcaactatcaaacctgatgatgctttctcaatgtgtcct

SEQ ID NO: 14859 - DNA, 600 bp, Chicken  19866894220678_1
ctgagaaaaaaattctcaggagctggtatgaaacagatctcagcaaatccttcctttatcacctttatatatgtgagctttgccctagttctagaaactaaagctctaatttctttcctggcaattacaaaatggcaactatatctcagctgcagaaggactttaatgaagtcaaaccatcattcgagcctctcattggacactgtgcctattcctaaggagataatgcacctcgcaagtccatttaaattaaaacaataaactgaaccaagcactgtatttttattcacagaggaccarccgcctttcaaggctgaagaatgttaagggctgtagcagagttacacagctagttgaaccaacaactttctttcacggatgcagcagtgcaaacaagctattgattgggcaatggccaccagaggagctgcccataacattatactgctcccyagacacacctcgtttagagcacttgcttctttcaccaagtgttctttgcattcctgaaggctggtaccatggtgaaaaggtgttatccaaacttattttatactttacctctttataaatgtggggtgtttgccatttctgtagtgt

SEQ ID NO: 14860 - DNA, 600 bp, Chicken  19866894220678_2
agaaggactttaatgaagtcaaaccatcattcgagcctctcattggacactgtgcctattcctaaggagataatgcacctcgcaagtccatttaaattaaaacaataaactgaaccaagcactgtatttttattcacagaggaccarccgcctttcaaggctgaagaatgttaagggctgtagcagagttacacagctagttgaaccaacaactttctttcacggatgcagcagtgcaaacaagctattgattgggcaatggccaccagaggagctgcccataacattatactgctcccyagacacacctcgtttagagcacttgcttctttcaccaagtgttctttgcattcctgaaggctggtaccatggtgaaaaggtgttatccaaacttattttatactttacctctttataaatgtggggtgtttgccatttctgtagtgtgatagagtaggctgtgggaaggtcccagctgttaatgatacaatggcacaggtgtcattcctcaatcagaagtttagctttcgcacagttgtgcaatctattacaattaaactcacagcagaatttggccagaccttttcagcagtttgtcac

SEQ ID NO: 14861 - DNA, 600 bp, Chicken  19866894220679_1
ggctcagtaagtctacccaaaagctgtagattctgctgaaaacagctgctttccttgtggtttggatgaatcaccacaggcctcagttgctcgggcctttgcagtagattcctccacacttctctgtgcaattctgccagcaaatatctaaattatctggacaccagctgtttggaagtcctgaaagccccattgtaagagttcaggacagcagagcaactcttgttctaattcttaaattatatccatcaaatgtgtatttatgctgtgtatggattgtatttatcctattagaagacwttttttttattagctgcaatagtcagaaaggatttttattctttctgatacatttattgatgctcagagrgtggggaatgactattcatctttctttgctcagtcagttaacagctagaaccaagatgtaggtcagggtgaactgatgcacctacaggtattaaattgctttggtgtctggtcagtacctcttgatcatacagtcagaaaatgccgagtgccagttttgcagtaaaaatggaatttcaccctgtggtcagaccagcagggagtttcagagaagctgagaggggaaaaaat

SEQ ID NO: 14862 - DNA, 600 bp, Chicken  19866894220679_2
tcaccacaggcctcagttgctcgggcctttgcagtagattcctccacacttctctgtgcaattctgccagcaaatatctaaattatctggacaccagctgtttggaagtcctgaaagccccattgtaagagttcaggacagcagagcaactcttgttctaattcttaaattatatccatcaaatgtgtatttatgctgtgtatggattgtatttatcctattagaagacwttttttttattagctgcaatagtcagaaaggatttttattctttctgatacatttattgatgctcagagrgtggggaatgactattcatctttctttgctcagtcagttaacagctagaaccaagatgtaggtcagggtgaactgatgcacctacaggtattaaattgctttggtgtctggtcagtacctcttgatcatacagtcagaaaatgccgagtgccagttttgcagtaaaaatggaatttcaccctgtggtcagaccagcagggagtttcagagaagctgagaggggaaaaaatagtaggatcatatgggaatgttgtttaacaaattatcttctattaaaattctgtgacactggtggttcct

SEQ ID NO: 14863 - DNA, 600 bp, Chicken  19866894220685_1
acacaggaagtgagctttaatttaattgctagatgctttgatacattttagatttgatttatgtgctgttcatttcccttaacccagcaatactgccagttgtttgcactatgctgatgcacggctgcttccctgaaagcataacaattttagtaggactgtaggataaaaaacacttctcctatgtattcaaaccatataagaatacaggaataaaaagtatgttattgaattatttgactttgctatgtggtattacagttactattaaatatgacttttgtatttctaaatgtaagraaataattaaaaacaacagaaaaataggtttaacctcatttgacctttctgacgttcagtcagttaaaaggtttgtaagacgtttaattaccaaatggtacgatcattattcatctcatcatttgatatataacgtcaagtgaattgcctccctggagtgcactgtgtttcacagatcaatagatttagtaagagcttgaaggagagctttatgcattcgtagaaaagaaggaaaagtatatctgccttgtaaaatggcttatgcagatatactgtgagcttgatggagttactatttta

SEQ ID NO: 14864 - DNA, 600 bp, Chicken  19866894220687_1
aattaaaggctaaacacattgtctacttgttcatagaaatttcacatgttcattttcattacattagctaaacctgcatttaaaagagaaggtcttctctaatgtcattttcccaactgtgaattgatggtagttctacatactaaaagaacaagaatttctacattaaatcatccacttcatagaacaatagatgcaaactaaactagatatagtttagataaactggattagtatttctaagtagcttcaaaggagtaatgttagaatgagttagtatcagctggtactgaaaagcgyaggtgccattgaagatgggagcactctggatccacttcctccataaataagtatctctcttgctttaaatctctccaggattcaaaaataaactcactgataatagtttcatcttgcaatccttgtgtcattttcttaatggttaaatttacaattcaaattcaagtgttgttttaggttgggaagctggtaagtggtaacaaaactgaaatgaagttaaatcattagctgccttgaaatcctgttttcttccaccaccaaccaaattcaaaattgacaaaaaagaatgatgttacctta

SEQ ID NO: 14865 - DNA, 600 bp, Chicken  19866894220696_1
accctgaagtgaaagccactacacacttgtcctagtgatcccgtatgtgcagttgcacttcaacattatccacttttatgtcagtaaaaaattagactacttggcatttgcaaatgctgagtttatgaagcttaagtagcacagattacagctttcaactggaccggagacagtaaaaccatgggtctcttctgttgtggttcctgctggttaccaaccagtatctgttatttttcccaagcatatagatacgcttctgcagaaattatccttgcaccagtaacaaagatagtaaacacrttccttactcatagtaatgagacgcaaaaatatcaacttttcttgaactcagtattgctgataataacttttacttttagaaatttgcattcttccacgtgtctggattgattccagtcttacatgttcgtgtgctctcctagaccaaacaaatttcctcctcagtgccttgctgaaaattacaccacattttgctgcctgcctggtccttccccacagaagaggccaagcaagcattccctaatgcaccgcaagtaaagccagcctggttagctcacatccrtgttcatcaccaggtga

SEQ ID NO: 14866 - DNA, 600 bp, Chicken  19866894220696_2
caaagatagtaaacacrttccttactcatagtaatgagacgcaaaaatatcaacttttcttgaactcagtattgctgataataacttttacttttagaaatttgcattcttccacgtgtctggattgattccagtcttacatgttcgtgtgctctcctagaccaaacaaatttcctcctcagtgccttgctgaaaattacaccacattttgctgcctgcctggtccttccccacagaagaggccaagcaagcattccctaatgcaccgcaagtaaagccagcctggttagctcacatccrtgttcatcaccaggtgaaatggatctgacagacttcgcttgaaacagattaggaggcaatttgtgatccctctcactaatggagcagtatgccgggtacccaggcggcaacagcaagcactgaaacagggctatcacctcccagaagagcttccatgcagcctcaggttttctcaccactcccatcattaaacacagtctcgcacccctgaactttcatgctttttctacataactttcatttatttttaccatagtggctataactaaagatatattttgacattttaaatgagtcttc

SEQ ID NO: 14867 - DNA, 600 bp, Chicken  19866894220696_3
ctctgcctaattttatcatggctaatgccaaatcttagctgcagaaccagcagtaaggggacagacttctctttgccacgtttgttctcactcttctataaaatctcagctgaaaatgaagggcattctcttctgtgaccataactctgcactcctccttttcctgctagtcttccttctgggatatgttttaatatgttatcatccatggaaactgcactgtttatatctgcagcttttcaatatgcttggagtcagggttttccaggtgaaccatgtattaagatttaatctgaatcyagtcagataatattgacctgagatgaaaaagctgcatgaatgagatagtagcagacagcttgaagtgctgagtgaaaaacaataccccagaagcttggtggcagagagcatatgggacatttctgaatggaaaagcttctttgattatttaaatattatgatctatttttaaaacttgctctgtctgttgaaggtttgctgggctttgcctgctctggcagtgtgtgcagcacagatcttgcaggagctctgcttggtaaactaccacatcctgttatcaactttaaggcctccctgttt

SEQ ID NO: 14868 - DNA, 600 bp, Chicken  19866894220697_1
ccaagaggtgatctcattgctctgtacaacttcctgaggaggagaagcagagaggtaggtgccagtcttttgtggtaaccaatgacaggaaacaagggagcaaaaaaaaaccctctcccacaggagttttggaatggactttagaaaaaaattatttactgtaatgtttgccatacacaggcctttgacacagtcccccataacacccttctgtccaaattggaaatatatggacttcataagaggtctgttcaatggacaaggaactggttgtgagatcagaactagagagtggagatygatggctcaatgtccggatggagattggtgacaagtggtgtgtcaagctgtatgctacagtcaacatcatttagagagaactggacaggcttaaggagtgggaccaagtgaacctcatgaggtttaataaatccaagggcaaggtcttgcacctgagtcatggcaacctatgctgtcagtacaagctgggggatgtgaagatggagcacagccctgctgaaaaggaattgggagtactggtggatagcaaccatatgagccagcaatgtgtccttacagcccagaaagcaaactgtatcc

SEQ ID NO: 14869 - DNA, 600 bp, Chicken  19866894220700_1
atagatgttctttgaggtccattcctactcaagccattctgtaattgtattttatggttctatgtaactttagaatcaaacaattaattcactcttcatataactttgtgctatttaggaaattattcttatcaattgtccaaattgattcaaagtattgtagtccccatcaacaaagtgactgttatagagaacatcactagctaaggaatgaaaaaggctttaataagtagtacagatggtagattgctttaaaccaaggaaagagcttgtggttgggattctggcatgaatgtcaayaacgtatcccttttagcaatacctgaaagtaaaggagctacagcagtttacacctactaagaaaacagtttgaaaagttagcttcttgatgttttatttaatctaaatcaaacagacaggaaaaggaaattgtacacttttttcctgagggtctcacagccttagagagactttctgcacaacagagagctcacaacagtagtgttgtgtgtagctccttggtttagtaaccgctcttccccgttaatgatggagttgtacttctgtgtcaggagctgatgccattctaatcgcattcaa

SEQ ID NO: 14870 - DNA, 599 bp, Chicken  19866894220709_1
  misc_feature (1)..(149): n is any nucleotide
nnnnnnnnnnnnnnnnnnnnnnnnnnnnnnnnnnnnnnnnnnnnnnnnnnnnnnnnnnnnnnnnnnnnnnnnnnnnnnnnnnnnnnnnnnnnnnnnnnnnnnnnnnnnnnnnnnnnnnnnnnnnnnnnnnnnnnnnnnnnnnnnnnnnntcaaaataataaacatgaccaacaaaagtgtttggaagtgcaaccaaaccagcatgcttagtgttttattctttggtgaacatttacgtaagaccgattttggccaaggggatgtagccatatatgactgagaaacatcctggaaaatggygtttacttacaatttctattgcagaggaatttttttttgttctagacagtagggcttacacagtcatttctgaccttttgccttcatcctcagtagctgtcactatcttgaacagagtgcttcctttgttcaccgcagtagccctttccatggaagattttacaagcaggagagcagaaaatgatccttttaatccaactcaaaactgagcgtcagtgactgaaccactaaccttcttttggcactgacaagtgttactcatcaagtttggccatacacatgacccactaragatctat

SEQ ID NO: 14871 - DNA, 600 bp, Chicken  19866894220709_2
gaaaatggygtttacttacaatttctattgcagaggaatttttttttgttctagacagtagggcttacacagtcatttctgaccttttgccttcatcctcagtagctgtcactatcttgaacagagtgcttcctttgttcaccgcagtagccctttccatggaagattttacaagcaggagagcagaaaatgatccttttaatccaactcaaaactgagcgtcagtgactgaaccactaaccttcttttggcactgacaagtgttactcatcaagtttggccatacacatgacccactaragatctatttgcaaacttttccagttcttctgccattcctttcagctaagttttattcccctgtgaagagraaatctttgtgattagacagtatagaaacatagagccttaataacctttgrcataatctacgcatactaggaaatgcttgctaggtgattttgcaagcttggtcaggcagagtgctgaagagagtttgtatgagcacacagaaaatagatcataattttaaattactggtttatggctcyagcatttgcttatttctattttcctatgagtttttgagatgatggcaga

SEQ ID NO: 14872 - DNA, 600 bp, Chicken  19866894220709_3
gtcatttctgaccttttgccttcatcctcagtagctgtcactatcttgaacagagtgcttcctttgttcaccgcagtagccctttccatggaagattttacaagcaggagagcagaaaatgatccttttaatccaactcaaaactgagcgtcagtgactgaaccactaaccttcttttggcactgacaagtgttactcatcaagtttggccatacacatgacccactaragatctatttgcaaacttttccagttcttctgccattcctttcagctaagttttattcccctgtgaagagraaatctttgtgattagacagtatagaaacatagagccttaataacctttgrcataatctacgcatactaggaaatgcttgctaggtgattttgcaagcttggtcaggcagagtgctgaagagagtttgtatgagcacacagaaaatagatcataattttaaattactggtttatggctcyagcatttgcttatttctattttcctatgagtttttgagatgatggcagagaaatgttagcagattgttttagaaataaatagtagcttgaacgaaaaataaaattggcaatttcagagga

SEQ ID NO: 14873 - DNA, 600 bp, Chicken  19866894220709_4
agagtgcttcctttgttcaccgcagtagccctttccatggaagattttacaagcaggagagcagaaaatgatccttttaatccaactcaaaactgagcgtcagtgactgaaccactaaccttcttttggcactgacaagtgttactcatcaagtttggccatacacatgacccactaragatctatttgcaaacttttccagttcttctgccattcctttcagctaagttttattcccctgtgaagagraaatctttgtgattagacagtatagaaacatagagccttaataacctttgrcataatctacgcatactaggaaatgcttgctaggtgattttgcaagcttggtcaggcagagtgctgaagagagtttgtatgagcacacagaaaatagatcataattttaaattactggtttatggctcyagcatttgcttatttctattttcctatgagtttttgagatgatggcagagaaatgttagcagattgttttagaaataaatagtagcttgaacgaaaaataaaattggcaatttcagaggaaagcatgagctcagtgtgaagaatgtcactagtaggactcattttgaaaga

SEQ ID NO: 14874 - DNA, 600 bp, Chicken  19866894220709_5
cactgacaagtgttactcatcaagtttggccatacacatgacccactaragatctatttgcaaacttttccagttcttctgccattcctttcagctaagttttattcccctgtgaagagraaatctttgtgattagacagtatagaaacatagagccttaataacctttgrcataatctacgcatactaggaaatgcttgctaggtgattttgcaagcttggtcaggcagagtgctgaagagagtttgtatgagcacacagaaaatagatcataattttaaattactggtttatggctcyagcatttgcttatttctattttcctatgagtttttgagatgatggcagagaaatgttagcagattgttttagaaataaatagtagcttgaacgaaaaataaaattggcaatttcagaggaaagcatgagctcagtgtgaagaatgtcactagtaggactcattttgaaagatgtcacctgcagtaaaaggaggaccatttaaaacattgtgctgaggcactgctccagctctggctcagaggaaagtatattacctactgaattatgaccaccatcttgttcagcatcctgtttaaagga

SEQ ID NO: 14875 - DNA, 600 bp, Chicken  19866894220713_1
tacttaaattccttattagtggtagcaaattttagaccaagtgctgcccattttcaaatgcatcataaaagaccacattaaagaaaaagcacctagttacttagggacactcttgctacgttttttgttgggttttttttttgagctaaaacgatcagtgcaatagcacgagtaaaatcatcagtggaacagtatgatatttgcttttctctaagatgagatcatgtacctgctcgagttgtaagaaacaccagaacttaaacttacaaaaagaatttgtctaccaaagttttttagaarctgaatattttttcatcaataaaayataaggcyttttccctttagtactatattattagaacagaaagtcgttgccgcttaccacttagtgtttttgaccgtattggaggcaatccctttttctgacgttctttttccctttccctagcccttctttcactggagtaggaccgagatgactttctcttcctttctcttgatcttgagcgtgaacgttttctgtgtttacgcttacgagaaccagatcgtgatctagaccttcgttttcttggtgacctaaaaaatacttaacttcagtat

SEQ ID NO: 14876 - DNA, 600 bp, Chicken  19866894220713_2
caaattttagaccaagtgctgcccattttcaaatgcatcataaaagaccacattaaagaaaaagcacctagttacttagggacactcttgctacgttttttgttgggttttttttttgagctaaaacgatcagtgcaatagcacgagtaaaatcatcagtggaacagtatgatatttgcttttctctaagatgagatcatgtacctgctcgagttgtaagaaacaccagaacttaaacttacaaaaagaatttgtctaccaaagttttttagaarctgaatattttttcatcaataaaayataaggcyttttccctttagtactatattattagaacagaaagtcgttgccgcttaccacttagtgtttttgaccgtattggaggcaatccctttttctgacgttctttttccctttccctagcccttctttcactggagtaggaccgagatgactttctcttcctttctcttgatcttgagcgtgaacgttttctgtgtttacgcttacgagaaccagatcgtgatctagaccttcgttttcttggtgacctaaaaaatacttaacttcagtatgctgagtttaaaaaaaaaaaaaagt

SEQ ID NO: 14877 - DNA, 600 bp, Chicken  19866894220713_3
agaccaagtgctgcccattttcaaatgcatcataaaagaccacattaaagaaaaagcacctagttacttagggacactcttgctacgttttttgttgggttttttttttgagctaaaacgatcagtgcaatagcacgagtaaaatcatcagtggaacagtatgatatttgcttttctctaagatgagatcatgtacctgctcgagttgtaagaaacaccagaacttaaacttacaaaaagaatttgtctaccaaagttttttagaarctgaatattttttcatcaataaaayataaggcyttttccctttagtactatattattagaacagaaagtcgttgccgcttaccacttagtgtttttgaccgtattggaggcaatccctttttctgacgttctttttccctttccctagcccttctttcactggagtaggaccgagatgactttctcttcctttctcttgatcttgagcgtgaacgttttctgtgtttacgcttacgagaaccagatcgtgatctagaccttcgttttcttggtgacctaaaaaatacttaacttcagtatgctgagtttaaaaaaaaaaaaaagtaatttagt

SEQ ID NO: 14878 - DNA, 418 bp, Chicken  19866894220713_4
ttgccgcttaccacttagtgtttttgaccgtattggaggcaatccctttttctgacgttctttttccctttccctagcccttctttcactggagtaggaccgagatgactttctcttcctttctcttgatcttgagcgtgaacgttttctgtgtttacgcttacgagaaccagatcgtgatctagaccttcgttttcttggtgacctaaaaaatacttaacttcagtatgctgagtttaaaaaaaaaaaaaagtaatttagttttatttttaactacagatttcaagcttactacaaatwcttcctttatatttactcaaactgccattaatgtggggaataggacatatacacagggcttttaacaataaaccaaaacaaaacacacttaaggagttccgtaacagtacctgttttc

SEQ ID NO: 14879 - DNA, 600 bp, Chicken  19866894220714_1
tttcaagctccaatcgagccagcacggagaggtcacaaaccgttttacccctcctggctttctcctgaagtcgggttgcttcgagggcctttcacatcacccagaggctttcccctgccagctctagccctttttccacagcaaaagctgctcagcctctgcacagctgtgacctccactccagagactttcctgcaagctccagcagatgcagacaaagcaaaggtgcaaaccttaaggcaaggggaggagaaagacctgccctgcacaggcagtgcagcaaagctcacatggagcaaygcatctccccttgggaggaagcatttgttcctccagcacctcctagggcacagcaggtgggcttcccacagctccctttcccagcccctaggraggagcccagggacacctctgcattcaytgcacacagaaaggccccccgagtagagcaggactcctgcgggaccagaaggaaatcagggctaatccccatcctcctccagggcaatccccagccctgtgtaggttaaccgagcaaaggggctccacattctgccattcccaatgctgtgcagtagctgtgatgagagggaaggaata

SEQ ID NO: 14880 - DNA, 600 bp, Chicken  19866894220714_2
acatcacccagaggctttcccctgccagctctagccctttttccacagcaaaagctgctcagcctctgcacagctgtgacctccactccagagactttcctgcaagctccagcagatgcagacaaagcaaaggtgcaaaccttaaggcaaggggaggagaaagacctgccctgcacaggcagtgcagcaaagctcacatggagcaaygcatctccccttgggaggaagcatttgttcctccagcacctcctagggcacagcaggtgggcttcccacagctccctttcccagcccctaggraggagcccagggacacctctgcattcaytgcacacagaaaggccccccgagtagagcaggactcctgcgggaccagaaggaaatcagggctaatccccatcctcctccagggcaatccccagccctgtgtaggttaaccgagcaaaggggctccacattctgccattcccaatgctgtgcagtagctgtgatgagagggaaggaataaagaagcagagaagctgtcagtaatcccatctcactgcttctgctcccggacagatgatgttttatgttgacagcaaaagggaggtgcctcgg

SEQ ID NO: 14881 - DNA, 580 bp, Chicken  19866894220714_3
ctctagccctttttccacagcaaaagctgctcagcctctgcacagctgtgacctccactccagagactttcctgcaagctccagcagatgcagacaaagcaaaggtgcaaaccttaaggcaaggggaggagaaagacctgccctgcacaggcagtgcagcaaagctcacatggagcaaygcatctccccttgggaggaagcatttgttcctccagcacctcctagggcacagcaggtgggcttcccacagctccctttcccagcccctaggraggagcccagggacacctctgcattcaytgcacacagaaaggccccccgagtagagcaggactcctgcgggaccagaaggaaatcagggctaatccccatcctcctccagggcaatccccagccctgtgtaggttaaccgagcaaaggggctccacattctgccattcccaatgctgtgcagtagctgtgatgagagggaaggaataaagaagcagagaagctgtcagtaatcccatctcactgcttctgctcccggacagatgatgttttatgttgacagcaaaagggaggtgcctcgggcaaaaaa

SEQ ID NO: 14882 - DNA, 600 bp, Chicken  19866894220717_1
tccatgcacagccgtcacaccacaaaatgaagagcatcttgatcagctcatccacacaaattgatggattatgaccagggaactgcacacagagctagataacaactttgatgcatttgtaaccatgttgacaacactggaatattgcaaagttggtgccaaatgggtcccacaaatgctcacaacaggaacagaacaccatatgcaagcttgtcagaatcttttgaaccaatacaaggatgaaggtgacagtttcctggatgacatcactactggtgatgaaactgggtgtcactgctstgagatggaatcaaaagggcagttcatggagtggtggcgtgtgaattccccatcacagaaaaagtccaagacacagcccccagcaggtaaagcactgtgcactgtcttttggggtgggaaaagggtaattcttctggatttcctggagactggacacaccatctctgactaagatgaaggctcaaacttccagagtcaggccagagcagaagacagcatttctcttgcaacatgactgtgccaagctccataccagtttgaagaaggtggagcacattgcctggctgaactgtcttacag

SEQ ID NO: 14883 - DNA, 599 bp, Chicken  19866894220728_1
  misc_feature (1)..(37): n is any nucleotide
nnnnnnnnnnnnnnnnnnnnnnnnnnnnnnnnnnnnntgaggagcactggaaatcatcttccagtaaactttggattgaatattgaatgcagtaccctcaggatattctcattctgtaccctcccattgcagtcattcaaaggaactgctggttttgctttactttgcagagatcttgtgctcattttaggaataaagaaataataaaagaaggaaacgtacctgtgtggtcaggagaaaattaactgaaacacagtttcagtttatttccattcatccattagagaaaggaatgctcartttcaagtaaatttccagattcaaacattgaattgtgatttagttgacataatccattctttgtawcttctttcttttaagaattagtaacattgtgttctcactttttcccctgtatctacttttgaatactgaacttgtcactgtatacaactgatgtgcatgcatttgagttatccatgaaatcaaaaagtcattgaagtaaggaaatggaaaattccattgttgatctttattgcagtgaagctgcacacttcttgggttgcttttaaatattcccattagaggtgatggaggct

SEQ ID NO: 14884 - DNA, 600 bp, Chicken  19866894220728_2
aactttggattgaatattgaatgcagtaccctcaggatattctcattctgtaccctcccattgcagtcattcaaaggaactgctggttttgctttactttgcagagatcttgtgctcattttaggaataaagaaataataaaagaaggaaacgtacctgtgtggtcaggagaaaattaactgaaacacagtttcagtttatttccattcatccattagagaaaggaatgctcartttcaagtaaatttccagattcaaacattgaattgtgatttagttgacataatccattctttgtawcttctttcttttaagaattagtaacattgtgttctcactttttcccctgtatctacttttgaatactgaacttgtcactgtatacaactgatgtgcatgcatttgagttatccatgaaatcaaaaagtcattgaagtaaggaaatggaaaattccattgttgatctttattgcagtgaagctgcacacttcttgggttgcttttaaatattcccattagaggtgatggaggctctgcctctcctcagcctttaaatctattagcgcagcccccagtactgcaacacctattaatctttat

SEQ ID NO: 14885 - DNA, 600 bp, Chicken  19866894220738_1
ttcccaccctaaaaagccccttccaccacacgcagcctttcacagaaaggagctaaacccaaaacagcaaagctaaagctcaactcaccagtgggaaaagccaggagctcctgtacagagcaggacctgggttttatacagagcatgctcagaccctactcggtagccttgaccttaaaggcagatgcctcccactttcacagggtgggtacctgatgtaggatacagcttggccttactgtagcatgtgctcaagacctccttagaaaataagaatagttgccacagccagaagatagygtggttttccttggtttcccttccaaaacacacttgtagcttcaacactctcaactgccccaaggttaggatggggaaatctgaaatgaataaagtatcttggtgaagctcctgggttggctttcaagagatctgagcccctccacttctccttagcttccctggagctcagcacccctggcattgcttttatgagggctttttttcccccttacagtgtgcgaactctcagaagctgtcagcgtggtttataggcrcggagcttcatggcttcacattgcttctaygcattataaatcc

SEQ ID NO: 14886 - DNA, 600 bp, Chicken  19866894220738_2
cctccttagaaaataagaatagttgccacagccagaagatagygtggttttccttggtttcccttccaaaacacacttgtagcttcaacactctcaactgccccaaggttaggatggggaaatctgaaatgaataaagtatcttggtgaagctcctgggttggctttcaagagatctgagcccctccacttctccttagcttccctggagctcagcacccctggcattgcttttatgagggctttttttcccccttacagtgtgcgaactctcagaagctgtcagcgtggtttataggcrcggagcttcatggcttcacattgcttctaygcattataaatcctcagtgcaaaacgtgggaagaaatcattcatagtgtggatgagcagaatgatttggggcttttttctgtttgctgcccaagttaaagaatgccactttctgcttcttccctccaaactgctctcattggttttccgtcactgtagtcagtctgtggatgtgcagatggggccagagaggttcctccatgcaaggtactgtgtattttcacagtatatattcttctaaaggagccggtggcagacaatttaggaaacc

SEQ ID NO: 14887 - DNA, 600 bp, Chicken  19866894220738_3
gccagaagatagygtggttttccttggtttcccttccaaaacacacttgtagcttcaacactctcaactgccccaaggttaggatggggaaatctgaaatgaataaagtatcttggtgaagctcctgggttggctttcaagagatctgagcccctccacttctccttagcttccctggagctcagcacccctggcattgcttttatgagggctttttttcccccttacagtgtgcgaactctcagaagctgtcagcgtggtttataggcrcggagcttcatggcttcacattgcttctaygcattataaatcctcagtgcaaaacgtgggaagaaatcattcatagtgtggatgagcagaatgatttggggcttttttctgtttgctgcccaagttaaagaatgccactttctgcttcttccctccaaactgctctcattggttttccgtcactgtagtcagtctgtggatgtgcagatggggccagagaggttcctccatgcaaggtactgtgtattttcacagtatatattcttctaaaggagccggtggcagacaatttaggaaaccctgatgcaaagagaacatctgcttgtatga

SEQ ID NO: 14888 - DNA, 600 bp, Chicken  19866894220738_4
ttgctgcccaagttaaagaatgccactttctgcttcttccctccaaactgctctcattggttttccgtcactgtagtcagtctgtggatgtgcagatggggccagagaggttcctccatgcaaggtactgtgtattttcacagtatatattcttctaaaggagccggtggcagacaatttaggaaaccctgatgcaaagagaacatctgcttgtatgaagaaagcaattccacatcacacaaatgaaccgaatgtataattaataatatctaaataatgttatctactatgtctcatttyattcatatctctcaaagtgctctacaaaggaagacagagtcattattcccattttacctgtgggaaaactaagtcaccaggaggtcacaggattactcacggttactcagcaagccagaaatactgccttggtcacctaactccagggctggtgctgcacagaagggaactggtggttttgggaggctgacctttcatgagkgtaggtagtgaggggtacaacggggaatggttttatacacaaagaggggaaattcgatttagagatcaggaggaagtctttcacttagaggatggtga

SEQ ID NO: 14889 - DNA, 600 bp, Chicken  19866894220738_5
acatctgcttgtatgaagaaagcaattccacatcacacaaatgaaccgaatgtataattaataatatctaaataatgttatctactatgtctcatttyattcatatctctcaaagtgctctacaaaggaagacagagtcattattcccattttacctgtgggaaaactaagtcaccaggaggtcacaggattactcacggttactcagcaagccagaaatactgccttggtcacctaactccagggctggtgctgcacagaagggaactggtggttttgggaggctgacctttcatgagkgtaggtagtgaggggtacaacggggaatggttttatacacaaagaggggaaattcgatttagagatcaggaggaagtctttcacttagaggatggtgaggctcaggcacagctgcctagagaactgtgggtaccccatccctggaaggcttcaaggccagattatcctgggcagcctgagctggtgggggacagccagcccatggcagggtgctgggacagggtgggacttaaggtctcttccaacccaagccatgatacaattcagtgattctgggcccttggcacagacattcaaaaa

SEQ ID NO: 14890 - DNA, 600 bp, Chicken  19866894220741_1
ataccaccaccatctgcctctgatgtcaagggccaatatagtaacataggctgctttcagagcagcccctgtatattactgtctattataatataaaattcatatcttatattttcacataacacctttctttctgaaagaaaataaaaaactagaaaccagtgaaataaaaacaatggaccgaactctcttagtggcaccaggtaatataagtctaataaaagcattctgccttacacctgcagaaattctaataccatcctgttgtcagagaaatctccctttgttaatatgctacaratcacagtaatacactgttgttgaacacacatacgccattttctactcggttgcacaagtgaaatgctaatttgcttatctgtagtctcctgcatttgaagtgctttgtttatttaaataaaaaatcgataartgtatttcccagacaatagtcaacaatctcttggaattgttgccaaattttcaagtcaagttcagatgttcattgcaaaagaatctaataaaaagtcaccgaataaacagcctatcacaaaaacattgttggaatagccagtagaagcaagctagctgatggctata

SEQ ID NO: 14891 - DNA, 574 bp, Chicken  19866894220741_2
ctgaaagaaaataaaaaactagaaaccagtgaaataaaaacaatggaccgaactctcttagtggcaccaggtaatataagtctaataaaagcattctgccttacacctgcagaaattctaataccatcctgttgtcagagaaatctccctttgttaatatgctacaratcacagtaatacactgttgttgaacacacatacgccattttctactcggttgcacaagtgaaatgctaatttgcttatctgtagtctcctgcatttgaagtgctttgtttatttaaataaaaaatcgataartgtatttcccagacaatagtcaacaatctcttggaattgttgccaaattttcaagtcaagttcagatgttcattgcaaaagaatctaataaaaagtcaccgaataaacagcctatcacaaaaacattgttggaatagccagtagaagcaagctagctgatggctatagacttgttagattgacaattcactgcacatctgtgtctgccaatatagaatttactcaaaattgcctctctagacacttctttacataacacatatttagcttatta

SEQ ID NO: 14892 - DNA, 600 bp, Chicken  19866894220743_1
gtaatactatgcgtattggttattacagcgttttaaattttcattgcagtaaaataatttgacattaaaatgattatttcaatgtaacttaacattccaaaaaggaaaatatgtaatccgtgagcgctactgtggtgaattttcttgcagctactcatccctggtccataaagcacttccagtttctcctggtcattttttaccacatgcccaatgccatggcttagcaggcagagatcgggcattttcccctgtgctgcagagctgtcagcaggctctccaagtttgcagtttgccccwggaactgcacacttcctctcagagcgctcaaccagattctttgttcagaaatgcactaattcatacctctgtgctctgcaaatgcactatcccaaatagcagcaaagccagactagcatcgtgtgtttttgacaagtgtgagggagaatcaggggagttagttactttttcctcctgtatgtcttatgcacttgttgttcaatctgttctgattgctttgcarcatctcaggatctgtgaagcacttctagcaccctctttattgtcatcaggggttgtttctktgttgctatggtggtg

SEQ ID NO: 14893 - DNA, 600 bp, Chicken  19866894220743_2
ttagcaggcagagatcgggcattttcccctgtgctgcagagctgtcagcaggctctccaagtttgcagtttgccccwggaactgcacacttcctctcagagcgctcaaccagattctttgttcagaaatgcactaattcatacctctgtgctctgcaaatgcactatcccaaatagcagcaaagccagactagcatcgtgtgtttttgacaagtgtgagggagaatcaggggagttagttactttttcctcctgtatgtcttatgcacttgttgttcaatctgttctgattgctttgcarcatctcaggatctgtgaagcacttctagcaccctctttattgtcatcaggggttgtttctktgttgctatggtggtgaactgaaatgaattttcttacgtcagccagggagagagtgagggagagcacagcaagcacagaaatascagttttggggtttgttttgtagaacagtcattctctatgtatttgtgtaggtgtttatgtaacttcaatgactttatctctgstattwcaactcttttcatgcagaaacttamtgtaagagcattttacccttcctagataattgcagagaagg

SEQ ID NO: 14894 - DNA, 600 bp, Chicken  19866894220743_3
tttgcagtttgccccwggaactgcacacttcctctcagagcgctcaaccagattctttgttcagaaatgcactaattcatacctctgtgctctgcaaatgcactatcccaaatagcagcaaagccagactagcatcgtgtgtttttgacaagtgtgagggagaatcaggggagttagttactttttcctcctgtatgtcttatgcacttgttgttcaatctgttctgattgctttgcarcatctcaggatctgtgaagcacttctagcaccctctttattgtcatcaggggttgtttctktgttgctatggtggtgaactgaaatgaattttcttacgtcagccagggagagagtgagggagagcacagcaagcacagaaatascagttttggggtttgttttgtagaacagtcattctctatgtatttgtgtaggtgtttatgtaacttcaatgactttatctctgstattwcaactcttttcatgcagaaacttamtgtaagagcattttacccttcctagataattgcagagaaggtaagagtctcaacctcatttctgactcctgttgtggagatcctgctctttagtccctgcac

SEQ ID NO: 14895 - DNA, 600 bp, Chicken  19866894220743_4
ctgtgctctgcaaatgcactatcccaaatagcagcaaagccagactagcatcgtgtgtttttgacaagtgtgagggagaatcaggggagttagttactttttcctcctgtatgtcttatgcacttgttgttcaatctgttctgattgctttgcarcatctcaggatctgtgaagcacttctagcaccctctttattgtcatcaggggttgtttctktgttgctatggtggtgaactgaaatgaattttcttacgtcagccagggagagagtgagggagagcacagcaagcacagaaatascagttttggggtttgttttgtagaacagtcattctctatgtatttgtgtaggtgtttatgtaacttcaatgactttatctctgstattwcaactcttttcatgcagaaacttamtgtaagagcattttacccttcctagataattgcagagaaggtaagagtctcaacctcatttctgactcctgttgtggagatcctgctctttagtccctgcaccaatgctggctgacaagacctattcagatatttgcttccctctgtgttcaagtgtgcaattcattaccttcttcatactcaatc

SEQ ID NO: 14896 - DNA, 600 bp, Chicken  19866894220743_5
gggagttagttactttttcctcctgtatgtcttatgcacttgttgttcaatctgttctgattgctttgcarcatctcaggatctgtgaagcacttctagcaccctctttattgtcatcaggggttgtttctktgttgctatggtggtgaactgaaatgaattttcttacgtcagccagggagagagtgagggagagcacagcaagcacagaaatascagttttggggtttgttttgtagaacagtcattctctatgtatttgtgtaggtgtttatgtaacttcaatgactttatctctgstattwcaactcttttcatgcagaaacttamtgtaagagcattttacccttcctagataattgcagagaaggtaagagtctcaacctcatttctgactcctgttgtggagatcctgctctttagtccctgcaccaatgctggctgacaagacctattcagatatttgcttccctctgtgttcaagtgtgcaattcattaccttcttcatactcaatccaaaggtacaagtttttctttctttaattttctcacggaggtactcaactgctttgagcatatttagtaggaggaagaggggtg

SEQ ID NO: 14897 - DNA, 600 bp, Chicken  19866894220743_6
ttagttactttttcctcctgtatgtcttatgcacttgttgttcaatctgttctgattgctttgcarcatctcaggatctgtgaagcacttctagcaccctctttattgtcatcaggggttgtttctktgttgctatggtggtgaactgaaatgaattttcttacgtcagccagggagagagtgagggagagcacagcaagcacagaaatascagttttggggtttgttttgtagaacagtcattctctatgtatttgtgtaggtgtttatgtaacttcaatgactttatctctgstattwcaactcttttcatgcagaaacttamtgtaagagcattttacccttcctagataattgcagagaaggtaagagtctcaacctcatttctgactcctgttgtggagatcctgctctttagtccctgcaccaatgctggctgacaagacctattcagatatttgcttccctctgtgttcaagtgtgcaattcattaccttcttcatactcaatccaaaggtacaagtttttctttctttaattttctcacggaggtactcaactgctttgagcatatttagtaggaggaagaggggtggggag

SEQ ID NO: 14898 - DNA, 600 bp, Chicken  19866894220743_7
cttatgcacttgttgttcaatctgttctgattgctttgcarcatctcaggatctgtgaagcacttctagcaccctctttattgtcatcaggggttgtttctktgttgctatggtggtgaactgaaatgaattttcttacgtcagccagggagagagtgagggagagcacagcaagcacagaaatascagttttggggtttgttttgtagaacagtcattctctatgtatttgtgtaggtgtttatgtaacttcaatgactttatctctgstattwcaactcttttcatgcagaaacttamtgtaagagcattttacccttcctagataattgcagagaaggtaagagtctcaacctcatttctgactcctgttgtggagatcctgctctttagtccctgcaccaatgctggctgacaagacctattcagatatttgcttccctctgtgttcaagtgtgcaattcattaccttcttcatactcaatccaaaggtacaagtttttctttctttaattttctcacggaggtactcaactgctttgagcatatttagtaggaggaagaggggtggggagccatcatttggtacaggcatgccct

SEQ ID NO: 14899 - DNA, 600 bp, Chicken  19866894220744_1
tgagaagaagaatgaaaattgcaagcagcgggggacaaaaagcaaaaaaaacccataagatgattaatcaaattgcattaaaagaaggctataagcacaccttgtagcaaaggcgtcctgggagagtccgatacctaaacaaaattcattcaattattaaaatcatatacaacaatgacaacttatttttaaattagaaaaaaaaggaaaagaaaaagctaactagtggattacaagaaatagctgcattcatgaagctcagtcatctgataccctgtacatcctgttgtacccctatcytagcatgctttgccctgacaagtctgcaaggtttcaccgttcccataaggacaaaacaaagctctccagacgtctggtcacctcttatccatggagcacttctagccaagtccaaattacccctgtttcagcaggctcaaggtagctaaaggtaatcctgtcgccttcccgtatctttcctcctcagaacaagcactgaaagctgaggatttggacactgtggttgcatggattttttgtttgtttgtttgcatcagtaagggcagttcaaattacagccttatgctgggaggacaacgt

SEQ ID NO: 14900 - DNA, 600 bp, Chicken  19866894220744_2
acaagtctgcaaggtttcaccgttcccataaggacaaaacaaagctctccagacgtctggtcacctcttatccatggagcacttctagccaagtccaaattacccctgtttcagcaggctcaaggtagctaaaggtaatcctgtcgccttcccgtatctttcctcctcagaacaagcactgaaagctgaggatttggacactgtggttgcatggattttttgtttgtttgtttgcatcagtaagggcagttcaaattacagccttatgctgggaggacaacgtataagaaagatccacaygacagcattctgtgagtgtaactygaataacatcctcaggaaaagaaaacagtagcaaagaaaagaaccttggaaaattatagaagagttttaccaaaagttacccaaaggcgttcaatcagagacaagtctaactgggggtggagtagtggggggtggaaatcaacagcttaaattgtgccagaaatgagatcatctgacctcaaaacatgctaaagttcagagcagttttaatccttcaaggaaccagtttaaaggatgtgaagtaactactatggcaacataattctcccaagtatg

SEQ ID NO: 14901 - DNA, 600 bp, Chicken  19866894220744_3
cccataaggacaaaacaaagctctccagacgtctggtcacctcttatccatggagcacttctagccaagtccaaattacccctgtttcagcaggctcaaggtagctaaaggtaatcctgtcgccttcccgtatctttcctcctcagaacaagcactgaaagctgaggatttggacactgtggttgcatggattttttgtttgtttgtttgcatcagtaagggcagttcaaattacagccttatgctgggaggacaacgtataagaaagatccacaygacagcattctgtgagtgtaactygaataacatcctcaggaaaagaaaacagtagcaaagaaaagaaccttggaaaattatagaagagttttaccaaaagttacccaaaggcgttcaatcagagacaagtctaactgggggtggagtagtggggggtggaaatcaacagcttaaattgtgccagaaatgagatcatctgacctcaaaacatgctaaagttcagagcagttttaatccttcaaggaaccagtttaaaggatgtgaagtaactactatggcaacataattctcccaagtatgagttttgctattagaagtgcaaga

SEQ ID NO: 14902 - DNA, 600 bp, Chicken  19866894220746_1
tggggtagttgtaagtggcagtagtgatccctcctttccaattcatatatggatctttttgttctgtttgaatcttagtagatacttcagtatgtgattgatctcttctctccagaaacacagcactgagggacaccttcagcactgatctattcttgtaccttaatcacaagcagttatatttcctctggtatgcctcaattcttcattcactgccccttttctaaatgttttctatgttgcttctgaagggccaatgcacccctttttctctccccattattgacagtaggtgtcagyggaaaagaggaagaggtggatttttccttcctgttgtataaagttctagaaagaataaaattgtggtaccaattacatacataatatacaacaccactggctgttgttgtatacttgtaaaaatctttgttttgtctgtaagttatttatggcatcctgatgtgtaattaacaactgatgtaatgactgtgttctgaaactactacttttggatgtacatatcaattacagatcactgagcaaatctgttctttccaggtgggttggaaaataaaaaattctaatagataaatgcatatc

SEQ ID NO: 14903 - DNA, 600 bp, Chicken  19866894220763_1
caggctgatccagaatttaatgctgattgaggcgggaacgcagcaggctggggcagttcggagctcacactggcgaaagctttcaaatgaacttcccaatcacagtcttatttaatccacagggatcatccattgtaggtttaatggactgaagtgtgtgagcagtggtgtctcactgctgcagcagctttggctaaaacctgagctgctcggcagcaccaagcactgcatcccaggggatgtgcactgcagcatggtgcatcctgccctgggtaccccagccagcattaccagtaccarcactctccagtatccttctttgcagagatgaatcaaatctgacagtggggtgagagcgaagactgcagttccttgrgggaaaatgaggcatcaaagcagaccatcccatggaaggctgtggttgagacactcggagggagctaatccttttcagggcactctgcaaatgaagtagtgcaaggaagcgatgccatgtgaaaagctctgctccacccatccacatacagaaggaggtggatggtccctgcagttccccttgagaactccctctcttgcaacagccaagttgttcttgttcca

SEQ ID NO: 14904 - DNA, 600 bp, Chicken  19866894220763_2
aagctttcaaatgaacttcccaatcacagtcttatttaatccacagggatcatccattgtaggtttaatggactgaagtgtgtgagcagtggtgtctcactgctgcagcagctttggctaaaacctgagctgctcggcagcaccaagcactgcatcccaggggatgtgcactgcagcatggtgcatcctgccctgggtaccccagccagcattaccagtaccarcactctccagtatccttctttgcagagatgaatcaaatctgacagtggggtgagagcgaagactgcagttccttgrgggaaaatgaggcatcaaagcagaccatcccatggaaggctgtggttgagacactcggagggagctaatccttttcagggcactctgcaaatgaagtagtgcaaggaagcgatgccatgtgaaaagctctgctccacccatccacatacagaaggaggtggatggtccctgcagttccccttgagaactccctctcttgcaacagccaagttgttcttgttccaaagaaataataaaaaaaagacaacaaaatacatccaccccaaacaaacaagttgattagtgtaatcagctctaatg

SEQ ID NO: 14905 - DNA, 600 bp, Chicken  19866894220769_1
tacaagaacttataagaaatcccaaaaatggcatcacagactgccatgggtttatggcagagaacccttgttaagtgtgggacggaaaaagaaacttgttcttgtaagcacacccgagggacccgatctgtgactggctcatgtgtgtgatttctagggaaagctcccagttcagcagagcttaaaaagaaacacttgactcaataactggatgtgaatgtagctcagccccctcagtgagacataggagatttgtaaatcacccaaatgggcaaaagacaattagctgtcagcaagctwggaacaaacagccyggggcatcaaaccttcggaaaartaacacacartacttataataatcayttccttcctaacggacacagtagagcctactggatacctccttaagtgttccaggagtgatgatcaaccgataagccatgtagattgggatacagatgatggaagaggttcctatgcagtagcccactactgtggtccagtagggatagttgtaatcaaaaagccggagctcgggggggttggacagaaagctgcaagtgacaaactggaaaggaaacgagaaaagtttcaacatgt

SEQ ID NO: 14906 - DNA, 600 bp, Chicken  19866894220769_2
agaaatcccaaaaatggcatcacagactgccatgggtttatggcagagaacccttgttaagtgtgggacggaaaaagaaacttgttcttgtaagcacacccgagggacccgatctgtgactggctcatgtgtgtgatttctagggaaagctcccagttcagcagagcttaaaaagaaacacttgactcaataactggatgtgaatgtagctcagccccctcagtgagacataggagatttgtaaatcacccaaatgggcaaaagacaattagctgtcagcaagctwggaacaaacagccyggggcatcaaaccttcggaaaartaacacacartacttataataatcayttccttcctaacggacacagtagagcctactggatacctccttaagtgttccaggagtgatgatcaaccgataagccatgtagattgggatacagatgatggaagaggttcctatgcagtagcccactactgtggtccagtagggatagttgtaatcaaaaagccggagctcgggggggttggacagaaagctgcaagtgacaaactggaaaggaaacgagaaaagtttcaacatgttttggtagcacaca

SEQ ID NO: 14907 - DNA, 600 bp, Chicken  19866894220769_3
agactgccatgggtttatggcagagaacccttgttaagtgtgggacggaaaaagaaacttgttcttgtaagcacacccgagggacccgatctgtgactggctcatgtgtgtgatttctagggaaagctcccagttcagcagagcttaaaaagaaacacttgactcaataactggatgtgaatgtagctcagccccctcagtgagacataggagatttgtaaatcacccaaatgggcaaaagacaattagctgtcagcaagctwggaacaaacagccyggggcatcaaaccttcggaaaartaacacacartacttataataatcayttccttcctaacggacacagtagagcctactggatacctccttaagtgttccaggagtgatgatcaaccgataagccatgtagattgggatacagatgatggaagaggttcctatgcagtagcccactactgtggtccagtagggatagttgtaatcaaaaagccggagctcgggggggttggacagaaagctgcaagtgacaaactggaaaggaaacgagaaaagtttcaacatgttttggtagcacacactgttccttcagggaactctctg

SEQ ID NO: 14908 - DNA, 600 bp, Chicken  19866894220769_4
gggtttatggcagagaacccttgttaagtgtgggacggaaaaagaaacttgttcttgtaagcacacccgagggacccgatctgtgactggctcatgtgtgtgatttctagggaaagctcccagttcagcagagcttaaaaagaaacacttgactcaataactggatgtgaatgtagctcagccccctcagtgagacataggagatttgtaaatcacccaaatgggcaaaagacaattagctgtcagcaagctwggaacaaacagccyggggcatcaaaccttcggaaaartaacacacartacttataataatcayttccttcctaacggacacagtagagcctactggatacctccttaagtgttccaggagtgatgatcaaccgataagccatgtagattgggatacagatgatggaagaggttcctatgcagtagcccactactgtggtccagtagggatagttgtaatcaaaaagccggagctcgggggggttggacagaaagctgcaagtgacaaactggaaaggaaacgagaaaagtttcaacatgttttggtagcacacactgttccttcagggaactctctgtgccagcgta

SEQ ID NO: 14909 - DNA, 600 bp, Chicken  19866894220769_5
acccttgttaagtgtgggacggaaaaagaaacttgttcttgtaagcacacccgagggacccgatctgtgactggctcatgtgtgtgatttctagggaaagctcccagttcagcagagcttaaaaagaaacacttgactcaataactggatgtgaatgtagctcagccccctcagtgagacataggagatttgtaaatcacccaaatgggcaaaagacaattagctgtcagcaagctwggaacaaacagccyggggcatcaaaccttcggaaaartaacacacartacttataataatcayttccttcctaacggacacagtagagcctactggatacctccttaagtgttccaggagtgatgatcaaccgataagccatgtagattgggatacagatgatggaagaggttcctatgcagtagcccactactgtggtccagtagggatagttgtaatcaaaaagccggagctcgggggggttggacagaaagctgcaagtgacaaactggaaaggaaacgagaaaagtttcaacatgttttggtagcacacactgttccttcagggaactctctgtgccagcgtagaactaaacttataaa

SEQ ID NO: 14910 - DNA, 600 bp, Chicken  19866894220771_1
ggccctaattcggagttcgttgttttcatggtatggttctctgttggttcagatgacttcatggtgttaactttttcctccatctagctttgtatgtagctcaatgtgtcatattatcacagaatggcttaggttggaaggcagtttcaagcctctgccatgggctggttgccacccattggctcaggctgcacagaatcccactcaacccggccttgagcacctccagggatggggtatgcacagcttctctgggcagtctgtgccagcgcctcaccaccctctgagtaaagaatttcyacctaacatctaacctaaacatcctctcttttagattaaagccattccacccttgtcctatcagaccatgtaaaaagttggtacccctcctgttcataagctcccttcaagtactggaaagctgcaatgaggtctccccagagccttcttttctccaagctaaacaagcccagctccctcagcctttcttcataagagaggaactccagccccctgatcatcttcgtggccctcytctggaccctcttcaacagccccatgtttctcttgtgctgtgggcaccagatctacttcagcaca

SEQ ID NO: 14911 - DNA, 600 bp, Chicken  19866894220771_2
ggtatgcacagcttctctgggcagtctgtgccagcgcctcaccaccctctgagtaaagaatttcyacctaacatctaacctaaacatcctctcttttagattaaagccattccacccttgtcctatcagaccatgtaaaaagttggtacccctcctgttcataagctcccttcaagtactggaaagctgcaatgaggtctccccagagccttcttttctccaagctaaacaagcccagctccctcagcctttcttcataagagaggaactccagccccctgatcatcttcgtggccctcytctggaccctcttcaacagccccatgtttctcttgtgctgtgggcaccagatctacttcagcacatggatcttgaccgaaactcctaaaaaactctttgaagatatctcagtcatgtattcccatctctctggctgcacggtgaggagaagagcaaaaccaaggaacctgagaggttttgctgcaggaataaaggcagctggattctttgcactgcagaattacagaaaaaaaaaaagaagaaaaaaataacatgacaggaaaggaagagcagagacatcagcagctctcccactgccat

SEQ ID NO: 14912 - DNA, 600 bp, Chicken  19866894220771_3
gtgccagcgcctcaccaccctctgagtaaagaatttcyacctaacatctaacctaaacatcctctcttttagattaaagccattccacccttgtcctatcagaccatgtaaaaagttggtacccctcctgttcataagctcccttcaagtactggaaagctgcaatgaggtctccccagagccttcttttctccaagctaaacaagcccagctccctcagcctttcttcataagagaggaactccagccccctgatcatcttcgtggccctcytctggaccctcttcaacagccccatgyttctcttgtgctgtgggcaccagatctacttcagcacatggatcttgaccgaaactcctaaaaaactctttgaagatatctcagtcatgtattcccatctctctggctgcacggtgaggagaagagcaaaaccaaggaacctgagaggttttgctgcaggaataaaggcagctggattctttgcactgcagaattacagaaaaaaaaaaagaagaaaaaaataacatgacaggaaaggaagagcagagacatcagcagctctcccactgccatatgaaccacccaaaacccacacaggca

SEQ ID NO: 14913 - DNA, 599 bp, Chicken  19866894220773_1
  misc_feature (1)..(72): n is any nucleotide
nnnnnnnnnnnnnnnnnnnnnnnnnnnnnnnnnnnnnnnnnnnnnnnnnnnnnnnnnnnnnnnnnnnnnnnncccctccccaggcctcatttaagggttggcattgggagcaagggtatcttgctggggatccctgcctacctgaggctgtccaaaggtaagcagctttttcctttgtttctgcatccatggctgttgtgcttgggtttatcctcacttgctgcagcatgggactctgctaccttgctgtcactgctgtattttccatcacattataacattacaggagagctaatcagmaagggttctcgggggatttggacttacagaaggagtgtaccatttcagtagtgaggaagaatgcctcatttcttgagtggcgtgaaattttcctttgcagttggctgcagrgaagtgagcctaggcaggcttttcctgcagtgtttctccatctgccagaatgactctgaggttgatggagtcaaacatgctaaacagtgctcttgtggttgctcaccttgtacatgcaaaacacacaaagcataaatggctgagcagtggcacctcctgtatggccctcctggcctctgtttgaggtc

SEQ ID NO: 14914 - DNA, 599 bp, Chicken  19866894220773_2
aagggtatcttgctggggatccctgcctacctgaggctgtccaaaggtaagcagctttttcctttgtttctgcatccatggctgttgtgcttgggtttatcctcacttgctgcagcatgggactctgctaccttgctgtcactgctgtattttccatcacattataacattacaggagagctaatcagmaagggttctcgggggatttggacttacagaaggagtgtaccatttcagtagtgaggaagaatgcctcatttcttgagtggcgtgaaattttcctttgcagttggctgcagrgaagtgagcctaggcaggcttttcctgcagtgtttctccatctgccagaatgactctgaggttgatggagtcaaacatgctaaacagtgctcttgtggttgctcaccttgtacatgcaaaacacacaaagcataaatggctgagcagtggcacctcctgtatggccctcctggcctctgtttgaggtcagaaccatagatattaaatgccacccttctccctgccaggacctgctccagcattaagggatgaggagaatgtccatgagttcttgaggtgcattcctatttcttattatt

SEQ ID NO: 14915 - DNA, 599 bp, Chicken  19866894220774_1
  misc_feature (1)..(20): n is any nucleotide
nnnnnnnnnnnnnnnnnnnnacacagtgaagcagtgggtggcgtgtttcagcagtggtgacagggatgtgaaaaacaagctgcattctggacagccatgcagatttttacaagcatggtatgcagtgtcttgttcatcactggtgaaaatgcatagttaatggtggtcactatgttgaaaactagtgttttatcactgagaattttttctatccaatagtgctgttgtgctctttgtatctgttgtaatttccatggaaatagataggaaacattacttttgtagcaacctatatatatycccattccacagtaactaaagactgtcttaaattacaggtactgaaacagggccttttcaaattatcctgtctgagaggttcagcctctgaactgaagagctttttgattcattaatgtagtttcagtaaatcctggggaacaaaaagacttcctcaaaaagcagatgcgcccgtatttagaaaaagttgaagagatgcctaagtcagcggatagcattctgtgaaaaacaacagaagagcagagataggaacagattaatagcaatttaaaggaaagaaatatcactaataattattt

SEQ ID NO: 14916 - DNA, 600 bp, Chicken  19866894220775_1
ctcttatcatccgcatcggccccatcaagacgagccatgttcttaatgagctgatacacgagacagtgatagctgcagcttaaagccaatattgtatctctggaagcaccatttttcaaaatgaacaaatggtctctgaagctggtggtgactcagggtaatggatgagatgtctggaggtgattttttctaggtgctagtgtagaaatggcatatttttaaatgagctgtaatgggattgggggtatgctgcagaccgtatgcagacgggttgacctgctgtccctgctggtttccatrgagtcacagaatcattcaggttgaaaaaggtctctgggatccctaagcccaacccagcccatcccaccacgtccactgatcatgtttgctagtgtcacagctccatggttcttgaacacctccagagagggtgactctaccaattccctgtgtacaaccatgccttgctttggggtgagatcaatggcaaatgtcaagtctgggatgagtattgtggatggggatatgtccctgtctagatgctttcttggaaagctgtatgatgaaaggaatgcttggaggggttagggaatgcatgcc

SEQ ID NO: 14917 - DNA, 600 bp, Chicken  19866894220779_1
gcccagcagcacccagcccaaggatatgcacagctgagttcttctctcatactcacagtgtgtgatagacatggtcatgtgggtgccttcaggtcttcattaggtctgagctcttcctgcagccacgtgctcttggtggggttctctaggaatagtgtcgccacctgcaaatgacaccatgcaaagcaccatcagcacctcccattgctagctgatggcactgagaccagcacaggagctgtaatgctgttgctgcctgcaccccttcccatgcactgcatatttgcaatgctgcagctycaccttgtcccttcagcatccatttatagagctgctggccattatggtcatgttccctgcatatactgaagcacttttcctcagcttgaacacattccctcatctcctcaagatgacttagctctcgagtggttgcaggcactgcatctgccttatccaccttcttaatgacttggaaaacctcagtcccacttccatcccagccacttctctccaaattgaatgctcctggcctatttgagctctgtctcataattctttaagcttttgctctctggactttctgtatttttaggaaac

SEQ ID NO: 14918 - DNA, 600 bp, Chicken  19866894220780_1
tctccatcattaatcctgacaatacaatcattctcacaaaaaagattttcttgttcagcttttccacctttctccagccgctttactagtagccccagggttctggaacattaagattacaagtgataacagttccaacagtttgcagtatataacatcatactgacttaatatttaatcacaatcattatagaaactgaattttaaaacatcttcacctaggagtaggataccaacttttctaataatttacaagcattacctgaattattatccattatccatgaaacaaagaccctrggtgaaacaagcatgtcatttaagtgtataaaaagagcagtaagtatgatgacatcagatctattcttgcaaaagacatagatatctgaagagtaaaacttggcgccacgaagttccatgcacatcttttctaatggttaactgaagctgaacaagttcaacttaaaatttgaatttctgaattagcagagagtacaacagccattcatttctgctcctatgcaagtgaaatgtggggtcatctcatgcatttattgtaagccttaacttttcytgcaagacagcaaagaggaaactaaa

SEQ ID NO: 14919 - DNA, 600 bp, Chicken  19866894220780_2
ccattatccatgaaacaaagaccctrggtgaaacaagcatgtcatttaagtgtataaaaagagcagtaagtatgatgacatcagatctattcttgcaaaagacatagatatctgaagagtaaaacttggcgccacgaagttccatgcacatcttttctaatggttaactgaagctgaacaagttcaacttaaaatttgaatttctgaattagcagagagtacaacagccattcatttctgctcctatgcaagtgaaatgtggggtcatctcatgcatttattgtaagccttaacttttcytgcaagacagcaaagaggaaactaaaaataaaaacgtaaatgtcacttttaattcactgtattagatgaattggttcagtaataactggaaacaattaccatttgatagcttctgtacaatgagttgaccactcctgccttagtgcttatgtacagtgtcatcttgctgacattcagagagagaaaatacaaataaatgttcagcctgaaattatgaaatggatcctgaagaaggaatttctgaagtattggtaggactgtctgaaaagccagtgatatttcaatacatgaactgtcatt

SEQ ID NO: 14920 - DNA, 600 bp, Chicken  19866894220786_1
tcagccccgtgttctcattccagtctcagtgttaggtcatgacacacagaacttgcaccccctctgtgcattctgcacccacacaacaacacgctggctacagctgttgctcaacaccagcagcagctctccactggcaaaactgcttgtgaccccagtgctcgccattttgttgcccaagctggtgttgatgcaggcgttccacacagccttctaaaagcccaaccaagcctctcctccttttcctctgactctcttcttcttggctttcatgcagtgtacagaggcttctggacggcrttcatcatactggccgtgaccgctggcctggtgggaggactgctgctggtgtgtggtgtgccctttgtcagcgccaggtcctacaaagtgggcggcgggttcctgatagcctcgggtaagccaacagtgggaatcagacacacggracagaaaggagtgtgcacagcctactgcacgcaagggagtggggtggcacccaatgatggagaggcacacagtgatgtcgtggtccccagggatgctggggaggaattggttttctgatgggagcagtggtgaattsgaataaatgttcccctt

SEQ ID NO: 14921 - DNA, 600 bp, Chicken  19866894220786_2
ttgtgaccccagtgctcgccattttgttgcccaagctggtgttgatgcaggcgttccacacagccttctaaaagcccaaccaagcctctcctccttttcctctgactctcttcttcttggctttcatgcagtgtacagaggcttctggacggcrttcatcatactggccgtgaccgctggcctggtgggaggactgctgctggtgtgtggtgtgccctttgtcagcgccaggtcctacaaagtgggcggcgggttcctgatagcctcgggtaagccaacagtgggaatcagacacacggracagaaaggagtgtgcacagcctactgcacgcaagggagtggggtggcacccaatgatggagaggcacacagtgatgtcgtggtccccagggatgctggggaggaattggttttctgatgggagcagtggtgaattsgaataaatgttccccttctccagatggaaataaacttctatgctgagccaaactttagaaagatagttcttaggcctaaggagccccccgaattgggaaacatactatttttcttctacagccttgtacgatatccagagcctttttattttagtaatgtctg

SEQ ID NO: 14922 - DNA, 600 bp, Chicken  19866894220786_3
gaggcttctggacggcrttcatcatactggccgtgaccgctggcctggtgggaggactgctgctggtgtgtggtgtgccctttgtcagcgccaggtcctacaaagtgggcggcgggttcctgatagcctcgggtaagccaacagtgggaatcagacacacggracagaaaggagtgtgcacagcctactgcacgcaagggagtggggtggcacccaatgatggagaggcacacagtgatgtcgtggtccccagggatgctggggaggaattggttttctgatgggagcagtggtgaattsgaataaatgttccccttctccagatggaaataaacttctatgctgagccaaactttagaaagatagttcttaggcctaaggagccccccgaattgggaaacatactatttttcttctacagccttgtacgatatccagagcctttttattttagtaatgtctgtagttgcatttatcccaggcagtgatcagccacactcttttctgccagcgtgccttcatatttgagcctcttctgtccttgttctgctagaacctggagaaccaccatgcaatgaaaggcatacccagcaattcaaa

SEQ ID NO: 14923 - DNA, 600 bp, Chicken  19866894220790_1
atcccaaccaatgcatttcttggaaaactcccacgctgtacaaccaggtaatgtaccgggcattgaggagagctgccttcggtgcaagacctgagggagtcgctcagggtaagagtcaaaaaactccacgttccaagtcggcttaagcatcctcatctccataaaggtgaatggttacctgcctccctccctcagactgccaacaaacccagtttggaaatgactgatgagggcagccagcagtaacagaagaactcccacaggccaaggaagggtctgtagctgatcacagcatgcaarccagcttcccatgctcatttcaaccaagtctcactctcctccctgtctccatgtctttggttgatttattctgtggctctctcttacatgcctttgggtttttaatttccccagggatcttcagcaaagaggggactctggctctgacactggtaaatgtatgtgccatcagtgcctgcttctcagacagcgctgagacgttcgacaagcagcacagcagccaccctgcgaacactcttcatctctctgccatgatgaaggctgcccaaaagctgagagaggcgtctggctgtgctccca

SEQ ID NO: 14924 - DNA, 600 bp, Chicken  19866894220791_1
aagcattctgccttatttcatcacgcactgtgtttcaatacaagtccagagaggaactaaattctgttattttcgaaactgatcttgataaatttaataatagatgtatttgttgtagttgttgattacagatggataatccaggacgtcactttttctttctgtcctgtgtttatcatgcaaaaagttgatgcattgtggcggtgatgggctaaggttttagatccactcacttgggaacgtttcaggcagaagagagggagagggtcctcttaacctgagatccagagacctagactrgatgacacaattaggcaggatgtcaaagggaagatctcttgagtacagaggtcaaaaggacatctttaacccaatcaattactggaattccctttaaacttccagtgtaacctgaactttcgttaagattcgtatactttatttttactttttatctcaatagctagataatccagtaaaaataatctgaccatatagcccttttcctgctgctttttactggttgctgaaggcacaagtttctgtgtagaagtacagagactggcccaggtactggtatctgaaagggcaaactacagt

SEQ ID NO: 14925 - DNA, 600 bp, Chicken  19866894220793_1
agggctgtaacataacagtgcagcaggatctcttcttagtgtttggaaaaacaaaaactaatactagtagaactgatttgcgaagtttaaaatgtccccatcacctgtactcatgtatatattattgctgtaaaaagatatttctattaatatcagatgaaagaactccgttatccagaaaggagaacataaataaataataaccacctgcaacactggtcttagcaacattagcataggtgctgaatatgggctaggtaatatccaaactcccaggaaggggagactcattcctgtagygaggagcccctgctcaaagggccatcacgcagatgggcaagataggaacctctgacaatttctacataggtgaactctgcactacagaaaggactgcacagagaagtgtttttaaagagcttaagaagtgcaggtaggatagaggctttacattgcaagaaaaaaaaggcatgaacatgacagttgaacaaagaatttaacccccaaacaagttgaattgaaacatttccttacagcagtgtcatcctattctgtgggtggatcacccatattaacactacatacttaaaatacctactg

SEQ ID NO: 14926 - DNA, 600 bp, Chicken  19866894220793_2
atacgttagcttatctaagaaaggttattactaattttacagctctggtgtgggagaaaattgtgcagcctgaaggagtgaaacaaagactttctttatctgattggtgtggtttttgttgttttcttttgttttgttttgttttatcttgctttcccagaaagaaggttgctgattgagaagcactgagcagcaaagaaggctggaagtagttagtttggtggaggtgaactgcgcggttagagggcagaaaaagaggtcagaggtatagatgatcaatacaatattgcacaggaattsccacagtgaacacctcgtgcctactttgtgtgtgcacttataatacctgtccgttatgccaatccttggctcagctgaaaaaggttctgtatctttgacgcgaggcaagatctccatccccgcagttctactgagattactcagctgtgaacagataactcaatacaaagacaaggaagaaaaagcaaggaaaaaagtagaagcagacaatttcatagagcccaaaccagacaagactctctctgatgaccaagggaaaagctttgataaacggtagggcagctcctcaaatccaggtct

SEQ ID NO: 14927 - DNA, 600 bp, Chicken  19866894220795_1
ccatcagtattcaagatgccactgcgaatgcaatgctctcaggtacctaaggggacattatctgagctattgcctccaaagatattacaaattttgcaacctgtgctctcattatcaccttcttaaaacatttgctcatgttttcctctcttatcacagagagaaagctttatttgaaatgcagttatctctcagagaaaacaacaccattatgtgtggcacaacctacgtgacctcagcagaggactgagcagaataacacacccaggctgctatttcttaggctgggattaaaaaaamcattaatagtgaacctgtgtccagtgcaaggctgatccagcttaaacatatgcacacaaacacgtcagaaggacttagtgcagtctgaaatttgtatgctatataggatagctagatccagaagctccagtccaggtgcaacagatgaacaataattgatccacagcacactgaaaaacaggtgatacactgacacgttttcaggaaattggaactgacagaaagtaattacactgtcctggcagtttgtctcttgtggttgtagcatttttgatctggtttaaggaagatttttttttt

SEQ ID NO: 14928 - DNA, 473 bp, Chicken  19866894220801_1
gtccaactctcacctgcagatcccagccctcagcaggactgcccacctttcaatgggatcctcatccttcccagactctttccctcagcgttgcagccccatcatggttccattacacactgacttctccccttgcaggacgctcccccttacctgctgctggactccaccaactccagcaatgcgcactgcaaatctcctcttatccccttcctgccttgctcctgtttgcctaccccaagcctgctttcattaattaggagtgaaaaataacaatctgaaaaaactgttcttcattargacctgctccctttctcctgtccttgtctgatggcactccatccaattatgtgttgagcagacggagctgagtggcactgggctgtgctgggggaccctcaggagtcagctttcactttcccttggggctgaggaacaacccccagttggtgccctggggactcccccagcat

SEQ ID NO: 14929 - DNA, 600 bp, Chicken  19866894220807_1
tattagaattattcctggatttagaatcaaagaatcatcaaggttggaaaaggcctctaagatcatctagtccagttgtccacctatcaccaatatttccccactaaaccatgtccctcagtacagcatctaaatgttcctcagacatctccaaggacagtgactccatcatttccctgggcagcccattccagtgcctgaccactccttcagagaagaaatttttcctcatgtccaacccaaacctcccctggcgcaacttgaggccattctctctagtcctatcaacagttacacagragaattggccaatcccacttctcctaaggtaggaaatgtaagaagagaaatgtagccagaagtacttaatgcagaacaatttccaaggcagttatctcaataaatacgtaaaacaaacatatcctgcacgtgtattattttttctaattgaaaagtacttgtcaaaatcccaaagaattctgaatcagtagtagtcaatgtgacattaattgtatgaactgttatttcaatattaataatatttcaagcttgttttactctgatcttttccctcttgaatttaaagtattattcaactat

SEQ ID NO: 14930 - DNA, 600 bp, Chicken  19866894220808_1
tcacagataatctgttcaaatattttgcaggttgcatgcaagtagaatattttttttttactaagatccaactatcctaattccactccatcatttggtcctatatgacttcttaatttttatttgtttgctcgtgataaagagcttcctaagtttgccattctccttgcacatcacctataaaggacaagcagcatgcaggaatactttggaccttcttctaaataatacaccaataaagcataacgttctgcatgtgatggaagcaagcaactggttgttcatgtaactttttaaccrctagtaagcacaacagtcagtaaggagtcatcaaattccaacataaaaacctaatcatcagttcagaaaaaagacaacaacaacccacaaacctgctcttcccccttcttgttccaacctctccacctcctccaaaaacaaagaaacctaatctaactactagttctagtactgccagctgaatttcaatcaaagagttgaagccttccctatctcagtccggtttctataatagcacggtcagacaaaccactacagaacgcaattcaaaggtatgggtacaaaaccaaaataaatggg

SEQ ID NO: 14931 - DNA, 600 bp, Chicken  19866894220810_1
tggaataggtacaacggcaagcgagctttttataatctaattgctaacaataatgcaacaggtgttagacatgccagcctgataaactgagagatggaatcaagcttttggaaaggaaatgtttccatcagccagcattggctgcaggtcaggtgaagtcccaaagagctgagttgggctctctgagccgcatgccagcccagggatggtggcaaggagctctgcacacatgcatgagcacaaacacacagctgctgactcaacaccctgagcacaggagtgcactaaaggggagagcarggcgtgggaaggggacrtcaggccatgtcattctctaactaataygtcattttatgaaaatgaaaaataaaattttaaatcattcctgcctttcagaggtgcaccctgttcacccaaaggttttctggctgcattaaaacatctttcttaccacaaggtggcatcttcttatttttatataaaacatctgaatatttacataatttgaataattttctacacctgaacatttctgtttttttgatgacagccatttagcatctgtgcagatacccagcaatgatgttagacttcacccca

SEQ ID NO: 14932 - DNA, 600 bp, Chicken  19866894220810_2
caagcgagctttttataatctaattgctaacaataatgcaacaggtgttagacatgccagcctgataaactgagagatggaatcaagcttttggaaaggaaatgtttccatcagccagcattggctgcaggtcaggtgaagtcccaaagagctgagttgggctctctgagccgcatgccagcccagggatggtggcaaggagctctgcacacatgcatgagcacaaacacacagctgctgactcaacaccctgagcacaggagtgcactaaaggggagagcarggcgtgggaaggggacrtcaggccatgtcattctctaactaataygtcattttatgaaaatgaaaaataaaattttaaatcattcctgcctttcagaggtgcaccctgttcacccaaaggttttctggctgcattaaaacatctttcttaccacaaggtggcatcttcttatttttatataaaacatctgaatatttacataatttgaataattttctacacctgaacatttctgtttttttgatgacagccatttagcatctgtgcagatacccagcaatgatgttagacttcaccccacaaatgctcacgaaagg

SEQ ID NO: 14933 - DNA, 600 bp, Chicken  19866894220810_3
aacaataatgcaacaggtgttagacatgccagcctgataaactgagagatggaatcaagcttttggaaaggaaatgtttccatcagccagcattggctgcaggtcaggtgaagtcccaaagagctgagttgggctctctgagccgcatgccagcccagggatggtggcaaggagctctgcacacatgcatgagcacaaacacacagctgctgactcaacaccctgagcacaggagtgcactaaaggggagagcarggcgtgggaaggggacrtcaggccatgtcattctctaactaataygtcattttatgaaaatgaaaaataaaattttaaatcattcctgcctttcagaggtgcaccctgttcacccaaaggttttctggctgcattaaaacatctttcttaccacaaggtggcatcttcttatttttatataaaacatctgaatatttacataatttgaataattttctacacctgaacatttctgtttttttgatgacagccatttagcatctgtgcagatacccagcaatgatgttagacttcaccccacaaatgctcacgaaaggagctgctgctgctgctcttaaacctttt

SEQ ID NO: 14934 - DNA, 600 bp, Chicken  19866894220811_1
tttttttttttccccccttttatgaacttctcaaaatccagagaagtgggaggaggcaacctcaccagataggagatattgccaactccagagcaggccaaaaggcaaggaccccccataccagcatcccatatactccctctgacaatccacctcagtgccacaccaaccacgaccaatgtgccaggcccaagcaccccaccaacatgcccttatcttcccacggttccttcctggcttccaagaggcattttaagagcatctctgtgggctggacaacagcacagccagggcacccaycagcttcagytctatggagagcaagagctctgcacattgagcacaatggggaccacccattccctctgtaccactacataccattgccacagtgagcaaatgtctttggctggaatatattacttgcatcgcaaagcccataaggatcatcatcacaggtgagagaaaaggtggcggatgccaaaccacactgagagtcaccatggtcacagccactgcactgtgagtccccattccgtagcagatcccatttaaggtccaactttctggtgaaacaaagctggacattatatgtctgaa

SEQ ID NO: 14935 - DNA, 600 bp, Chicken  19866894220811_2
tccccccttttatgaacttctcaaaatccagagaagtgggaggaggcaacctcaccagataggagatattgccaactccagagcaggccaaaaggcaaggaccccccataccagcatcccatatactccctctgacaatccacctcagtgccacaccaaccacgaccaatgtgccaggcccaagcaccccaccaacatgcccttatcttcccacggttccttcctggcttccaagaggcattttaagagcatctctgtgggctggacaacagcacagccagggcacccaycagcttcagytctatggagagcaagagctctgcacattgagcacaatggggaccacccattccctctgtaccactacataccattgccacagtgagcaaatgtctttggctggaatatattacttgcatcgcaaagcccataaggatcatcatcacaggtgagagaaaaggtggcggatgccaaaccacactgagagtcaccatggtcacagccactgcactgtgagtccccattccgtagcagatcccatttaaggtccaactttctggtgaaacaaagctggacattatatgtctgaatgatgtggtt

SEQ ID NO: 14936 - DNA, 600 bp, Chicken  19866894220818_1
gcggattcttcctacctgctgctgctggaagtgcaggagctccactgggctcagctccccgttgctgtccccgctggcagccccctcccggcccccgccgccgcccccgcccccatcgggctggttgctgaggctgctgaccccgttctggccggagggagcggagcggatcgtctccgaggcggattccaccatcatgacgtgctagagggacctgaggagagaggagagaggagagggtgagaagacagcgcgacccccccaccagcacccccacctccagcaccaggatgtgagaayttatcgcgggttcagaawtgccaaaatatctcattttgaggcgagggagayggcgaagctgcaaactttcataatggctggaggagcccacactacgtgattccccctaaacatcccagcagtgctggcacctctccatagggcatcacagcaccttcctgcagggcacacaacccaccgtgcctggaagtttgctgctgctgtcagcaagcagagctgggcacaaagcagaagaygcagcagcaacagtcagaacagccttcttaaagatcacagaaccatgggatggttgggttggag

SEQ ID NO: 14937 - DNA, 600 bp, Chicken  19866894220818_2
ctgctgctggaagtgcaggagctccactgggctcagctccccgttgctgtccccgctggcagccccctcccggcccccgccgccgcccccgcccccatcgggctggttgctgaggctgctgaccccgttctggccggagggagcggagcggatcgtctccgaggcggattccaccatcatgacgtgctagagggacctgaggagagaggagagaggagagggtgagaagacagcgcgacccccccaccagcacccccacctccagcaccaggatgtgagaayttatcgcgggttcagaawtgccaaaatatctcattttgaggcgagggagayggcgaagctgcaaactttcataatggctggaggagcccacactacgtgattccccctaaacatcccagcagtgctggcacctctccatagggcatcacagcaccttcctgcagggcacacaacccaccgtgcctggaagtttgctgctgctgtcagcaagcagagctgggcacaaagcagaagaygcagcagcaacagtcagaacagccttcttaaagatcacagaaccatgggatggttgggttggaggggtccttaaagaccata

SEQ ID NO: 14938 - DNA, 600 bp, Chicken  19866894220818_3
cagctccccgttgctgtccccgctggcagccccctcccggcccccgccgccgcccccgcccccatcgggctggttgctgaggctgctgaccccgttctggccggagggagcggagcggatcgtctccgaggcggattccaccatcatgacgtgctagagggacctgaggagagaggagagaggagagggtgagaagacagcgcgacccccccaccagcacccccacctccagcaccaggatgtgagaayttatcgcgggttcagaawtgccaaaatatctcattttgaggcgagggagayggcgaagctgcaaactttcataatggctggaggagcccacactacgtgattccccctaaacatcccagcagtgctggcacctctccatagggcatcacagcaccttcctgcagggcacacaacccaccgtgcctggaagtttgctgctgctgtcagcaagcagagctgggcacaaagcagaagaygcagcagcaacagtcagaacagccttcttaaagatcacagaaccatgggatggttgggttggaggggtccttaaagaccataaagccatagaatggctgggttggaagggacccc

SEQ ID NO: 14939 - DNA, 535 bp, Chicken  19866894220818_4
agggtgagaagacagcgcgacccccccaccagcacccccacctccagcaccaggatgtgagaayttatcgcgggttcagaawtgccaaaatatctcattttgaggcgagggagayggcgaagctgcaaactttcataatggctggaggagcccacactacgtgattccccctaaacatcccagcagtgctggcacctctccatagggcatcacagcaccttcctgcagggcacacaacccaccgtgcctggaagtttgctgctgctgtcagcaagcagagctgggcacaaagcagaagaygcagcagcaacagtcagaacagccttcttaaagatcacagaaccatgggatggttgggttggaggggtccttaaagaccataaagccatagaatggctgggttggaagggaccccaaagcccctcctgccgtgggccggttgcccaccaccactgctcagagccgatctgcaagttacaaacaggaggaaataaagcacgagggatggggccaagaaataccattttcccttttt

SEQ ID NO: 14940 - DNA, 600 bp, Chicken  19866894220821_1
gatataagaagccatggatctttctggatccagtcagaaatgacctgctaaaagcccagaaacaataactcatgtgtgtttgtgaaacttttgaagaaggttcttagggcaaaatacttccaagctgagaattagggaataaataaataaataaataacctcacactagaataactagctgcagaactgagaactttactttgatcacaatgtgccttgtctagacaaacagaaatattccttatatggtaagagatattgactatacaaatccatatctagcttccctgtattttttcytttgatttctgctgtatggacactacttctcagagcaggaaaggttgactctacagaactccccttcaagatgatagtttagaattcatacttactcaaatcaacaacaacaaagtcacaaaaaatgcaattttagcattaaaaagataaacagaaacacctatggcttttggattaaattaactaagaaaacaactacatatttgaaattctatgtagttacacaattaagaaacaaaacagtattcaatctctgaagtaatgtatacacatgaaaaaaaatggagttgtaaattacaa

SEQ ID NO: 14941 - DNA, 600 bp, Chicken  19866894220824_1
tagtgcctgaccactttttcagagaagaaatgtttcttaatatccaatcgcaaccttccttggtgcagcttgaggacattcccctctagtgctatcactagttacataggagaagaggctgaccccccacttgccataacctcctttcaggtagtccagacttaaatagtcccagaccccttaactgttcttcataaggcttgtgctccagactcctcacagcttcattgcctttctctggacatgctccagggcctcaatgtcttacttgtagtgaggggacataaactaaacacaatrytcaaggtgtagcctcaccagtgctgagtacagagggatgatcactcccctgctcctgataacagcactgtttctggtatgagccaggatgccattggctttcttggccacttgggcacactgctggctcatgttcatctgagcatcaaccaatacccccaggtttctttcctctccagttttccagccactctgccccacacctgtagcattatgtggggttgttgtggccaaagtgcaggatccagcaattggtcttgttgaacttcatcccattggcctcattccaggtatccagcc

SEQ ID NO: 14942 - DNA, 600 bp, Chicken  19866894220824_2
agtgcctgaccactttttcagagaagaaatgtttcttaatatccaatcgcaaccttccttggtgcagcttgaggacattcccctctagtgctatcactagttacataggagaagaggctgaccccccacttgccataacctcctttcaggtagtccagacttaaatagtcccagaccccttaactgttcttcataaggcttgtgctccagactcctcacagcttcattgcctttctctggacatgctccagggcctcaatgtcttacttgtagtgaggggacataaactaaacacaatrytcaaggtgtagcctcaccagtgctgagtacagagggatgatcactcccctgctcctgataacagcactgtttctggtatgagccaggatgccattggctttcttggccacttgggcacactgctggctcatgttcatctgagcatcaaccaatacccccaggtttctttcctctccagttttccagccactctgccccacacctgtagcattatgtggggttgttgtggccaaagtgcaggatccagcaattggtcttgttgaacttcatcccattggcctcattccaggtatccagcct

SEQ ID NO: 14943 - DNA, 600 bp, Chicken  19866894220831_1
caaaatgctgaaggaaggctgagttcactgagtcaggcttcgtttttcccttcctactcagcactgacgtggagctcccatgctctgcaccaccatggctcacacctctgttaggacctgaagcatcactcagcccaatgctgccccccagtccgtttggacccttccgcctgctggcaacccagcaacgggcagccagcgttgtcctctccctttccaccaggagggaatggaaacctcttgagcaaaatcactgccaaccattgctcccaaaagcaaatctgcagcccaaatccttcrcctcccatctgcacagcccacagccaggctggaacatcagcagcaagagcgttactgggatgctgaaaggatggctcaagggatgcttagaggaacgtgcacttttcacaggctcacactgacttcacccaaacgaaacagaagctacaacagaggaaaaacaaaatagaagaaaaaaaaaagagagaaaagactccataaaacccagtgctgctgaagccccatggcctcagatgcactctgaagactgagaaagtgggcagagcctggaaggacaaaacaaaatctgattttttttgg

SEQ ID NO: 14944 - DNA, 600 bp, Chicken  19866894220831_2
ctggcaacccagcaacgggcagccagcgttgtcctctccctttccaccaggagggaatggaaacctcttgagcaaaatcactgccaaccattgctcccaaaagcaaatctgcagcccaaatccttcrcctcccatctgcacagcccacagccaggctggaacatcagcagcaagagcgttactgggatgctgaaaggatggctcaagggatgcttagaggaacgtgcacttttcacaggctcacactgacttcacccaaacgaaacagaagctacaacagaggaaaaacaaaatagaagraaaaaaaaagagagaaaagactccataaaacccagtgctgctgaagccccatggcctcagatgcactctgaagactgagaaagtgggcagagcctggaaggacaaaacaaaatctgattttttttggtggggtttatttggctttgtttttcatttgcctccagctgaacgacaacacaacatcctgacagcattaatacaaaccccataacccactcagcatcgctttgcccggtgcgtggcactgagggccacaaagtgctttgggggcacggggctgtgggcagtaccctgtgaggt

SEQ ID NO: 14945 - DNA, 600 bp, Chicken  19866894220831_3
agcaacgggcagccagcgttgtcctctccctttccaccaggagggaatggaaacctcttgagcaaaatcactgccaaccattgctcccaaaagcaaatctgcagcccaaatccttcrcctcccatctgcacagcccacagccaggctggaacatcagcagcaagagcgttactgggatgctgaaaggatggctcaagggatgcttagaggaacgtgcacttttcacaggctcacactgacttcacccaaacgaaacagaagctacaacagaggaaaaacaaaatagaagaaaaaaaaaaragagaaaagactccataaaacccagtgctgctgaagccccatggcctcagatgcactctgaagactgagaaagtgggcagagcctggaaggacaaaacaaaatctgattttttttggtggggtttatttggctttgtttttcatttgcctccagctgaacgacaacacaacatcctgacagcattaatacaaaccccataacccactcagcatcgctttgcccggtgcgtggcactgagggccacaaagtgctttgggggcacggggctgtgggcagtaccctgtgaggtaggtgagcag

SEQ ID NO: 14946 - DNA, 600 bp, Chicken  19866894220831_4
ggcagagcctggaaggacaaaacaaaatctgattttttttggtggggtttatttggctttgtttttcatttgcctccagctgaacgacaacacaacatcctgacagcattaatacaaaccccataacccactcagcatcgctttgcccggtgcgtggcactgagggccacaaagtgctttgggggcacggggctgtgggcagtaccctgtgaggtaggtgagcagcatgagccccagcaaggagaaaccgaggtacagaggaattctcctccttgtttttgcttcctttcctttttgctytacatttaatggttggactggatgatcctgcgggtcttttccaaccttagcgattctatgatcctcagcaccagtgggaattcctcagccctgggaagcagaacaccagcatgccccattcccccctctcctagcccagaggttcaccatgtcctcaggtcaaagctcagcccccaggggaggaacaccccaaacccacagtggggcagggttgggcgtgctgctttctcaacgcagaagaaattaaatatataaacccaaaggatttctgtagggaaagcaaagggcagcccagggggc

SEQ ID NO: 14947 - DNA, 600 bp, Chicken  19866894220839_1
attatatgtggtttatgaaccctaaaaagtgctccgttttgactgtcaatgtcatatatgcaatctgtatattcctcatgttcggtaaagggcccaatttaataagttatcatgcagaaaagcagatgaagtgcagccaagtctgtccatgtagattcagttaaatgctttttttgacctcaattacgcattaaaaaaaaaaaaaaaaaagcctgtacaggtgacaagagtagaaatcagctccctagagtcctattccagttctttcccaagcagacataccttctctcctccttcctrtacgctctctagaagtctcggactcctacattaaatgaaggggggagctccatgaggcagacagtatctgtaatgtagcagtaaagactcagcagtctttttcatatgtatgaaatagttatatttttaaaagtcctataattcaaattaagacaaaatgttacggagcttctccctccctcgggcctctaataaaattttttttgaggctgttctgagcacctggcaattaaagggggggaaatcttaaattttttaattattccactctctcctgtcagggtgaagaaaggacttcag

SEQ ID NO: 14948 - DNA, 599 bp, Chicken  19866894220840_1
  misc_feature (1)..(96): n is any nucleotide
nnnnnnnnnnnnnnnnnnnnnnnnnnnnnnnnnnnnnnnnnnnnnnnnnnnnnnnnnnnnnnnnnnnnnnnnnnnnnnnnnnnnnnnnnnnnnnnnaaaataccccagtaagctaaaatatatggctattaatatatcagaacttagtgaaaggaaccacccagacttatggcagaaaaattctgaacattgtatcttctaaattcccgggtctattggaacattcagtgctttttcactaactcagctttttaatcttggtcatgactatttaaattctttagtttatatatatatatwttttattttattcttttcttcctttctgctagtgcttaagtgctactacagtgagaaacattccaaaccaacagattcttgtggcatacatttctgttagcagtcaggggaaatacattgcctagtaattggaaaactggtattttcagattgctagttcagttcaggggattgcaaaatgctgcaggtttgcattcagtattatctaagctctttgaaccttgtatttccaaagctgtgctataccaaaacatagttttccccaatttgttaggtaagctctctctggatagaaatgc

SEQ ID NO: 14949 - DNA, 551 bp, Chicken  19866894220840_2
attgctagttcagttcaggggattgcaaaatgctgcaggtttgcattcagtattatctaagctctttgaaccttgtatttccaaagctgtgctataccaaaacatagttttccccaatttgttaggtaagctctctctggatagaaatgcattggcccaattatttttgtgttctattaccaagtgacacaattattgctgtatcattttaaaattctgatttaataaggtactgttgttactgttgcaggctttgaaaagtatgaagcactgacatacccatttcattaataatgacckcaccttgaactaaaagataactccagatcctcaaagtgccccatttaatgcaattgtagaggagtgtaccacgactggacagaaacaagaatgtaaggaaacaagttgtgttgattggtatgactagtggttactccaagaaaacaataatttttaaacgttattgaaattgaagatactttggctaaccttattgacaagatcttttaaaaagccatgcagtgagcattgctctctggcaaacagtggaa

SEQ ID NO: 14950 - DNA, 599 bp, Chicken  19866894220843_1
  misc_feature (1)..(30): n is any nucleotide
nnnnnnnnnnnnnnnnnnnnnnnnnnnnnntgccctttgcctggtgctgtatacagccgtccgggaagcacagcaggggcatgcccccgtgtgattacaggaaccagcccaagcctggaacacagggggtgtctgagcccagggtgctgctcctgcccttcgcacgcccacccaacgcacccacatcccagccgtggggtcacagcatgagccattgagtgaagaaagcagggaaagcagtgggggcacttcagccctctgcagacgcccaggcctctgctgtgcatcagctcctctackctcagagcggggcacagcaggcacagcctgcctggctgggtgggagccctgccctgcgcccagcacaacacccacccagcattacgcattgcagctgtgccccatggggatggggatgggggcactgcctgatggcagcggggctgccccgaaggcttcccaccactgcagtgcctgagggagctgcagaacccccatacaatgtgtgcatccccagcgctgctcccagcagaactcactggggggcacccagccgccrtggggctggggagagggggacctgcacccagcgggccccc

SEQ ID NO: 14951 - DNA, 600 bp, Chicken  19866894220843_2
tgcagacgcccaggcctctgctgtgcatcagctcctctackctcagagcggggcacagcaggcacagcctgcctggctgggtgggagccctgccctgcgcccagcacaacacccacccagcattacgcattgcagctgtgccccatggggatggggatgggggcactgcctgatggcagcggggctgccccgaaggcttcccaccactgcagtgcctgagggagctgcagaacccccatacaatgtgtgcatccccagcgctgctcccagcagaactcactggggggcacccagccgccrtggggctggggagagggggacctgcacccagcgggcccccagtgctgggagcagggtcaggacaacgcaaggatgtccccagggccccagtcctaccgtgggctccattggtgaggagggggccgggagccccgttgcgtggaggtgcccggtgtgcggcatttccttctgcagggtgtgctcacctgtgccaggtgcagctccgccccacctcgctgtgcacccaggtcctgccagccctcaggcagccatggctgcgtggtgcccccatactacttatcccatagccgtgagctgtgg

SEQ ID NO: 14952 - DNA, 599 bp, Chicken  19866894220844_1
  misc_feature (1)..(23): n is any nucleotide
nnnnnnnnnnnnnnnnnnnnnnntttctttgctaccattaatcactttatctttcactgagagaacagaaaggcgcactggattctgcttttgagattgtgataagatttctacagtaagaaaaataagacagaacagagtaaataaaacatctttttcttctttttaatccaaattatctaagactctttaatgttgatataaccatgctttgattgtttggggatgtttgcacatggctaatgcactcatacagagccaagtcaattccagagggagctgtcaaattaaaaccctgtwgcccatatcacctgctgctctaatctcctcagatcacagaccagttcagtcagctctgtttctcagctttccaatttcctgcaacatgagaatacaattgtgatccatttacactgcagcaacaactgccagagcaaagattcattacgaagtgctcttcaagtaagcaaagatgcacaacagagctctagcaatgatacacatcagagctcttgcaacaacaccagagttttgccagaaaatgactattattgtaaaaacttctcaacacccttgttctgagcagagagcatcattat

SEQ ID NO: 14953 - DNA, 599 bp, Chicken  19866894220845_1
  misc_feature (1)..(133): n is any nucleotide
nnnnnnnnnnnnnnnnnnnnnnnnnnnnnnnnnnnnnnnnnnnnnnnnnnnnnnnnnnnnnnnnnnnnnnnnnnnnnnnnnnnnnnnnnnnnnnnnnnnnnnnnnnnnnnnnnnnnnnnnnnnnnnnnnnnnntgtaagtcagtggctgtttttgaagggctgatctctgcatgtccacaagaagtggtctttaggctaaaatcattatgttccatagtgtaaatactcagtgtcttgaataactggaggcagagctgaaagtagcagttcagtggacagggacagctttggctaaataygtaagcagttcaaaataatgaagttccaggtccactgataaatctagaaggaagaagcctggtggcacttakwgctgagcttgctcataccagtggctatggcagttctcagaaatacctcattcgtttgttcacactgctgtgggctatctcttttccatrgagctttaaacagttgcttagagcatgtttaaccacatgcccgaagtaaagaaccttcttcagcaggtttactaacaaacctgcagatttctgctagatagggcctaagacwctgcagggatggacaaggcagacac

SEQ ID NO: 14954 - DNA, 599 bp, Chicken  19866894220845_2
  misc_feature (1)..(61): n is any nucleotide
nnnnnnnnnnnnnnnnnnnnnnnnnnnnnnnnnnnnnnnnnnnnnnnnnnnnnnnnnnnnntgtaagtcagtggctgtttttgaagggctgatctctgcatgtccacaagaagtggtctttaggctaaaatcattatgttccatagtgtaaatactcagtgtcttgaataactggaggcagagctgaaagtagcagttcagtggacagggacagctttggctaaataygtaagcagttcaaaataatgaagttccaggtccactgataaatctagaaggaagaagcctggtggcacttakwgctgagcttgctcataccagtggctatggcagttctcagaaatacctcattcgtttgttcacactgctgtgggctatctcttttccatrgagctttaaacagttgcttagagcatgtttaaccacatgcccgaagtaaagaaccttcttcagcaggtttactaacaaacctgcagatttctgctagatagggcctaagacwctgcagggatggacaaggcagacacagtgaggccatgacaggagaattgctttgttttgcctcaggtatgttgaaggaatgtttggaggcccctgac

SEQ ID NO: 14955 - DNA, 599 bp, Chicken  19866894220845_3
  misc_feature (1)..(60): n is any nucleotide
nnnnnnnnnnnnnnnnnnnnnnnnnnnnnnnnnnnnnnnnnnnnnnnnnnnnnnnnnnnntgtaagtcagtggctgtttttgaagggctgatctctgcatgtccacaagaagtggtctttaggctaaaatcattatgttccatagtgtaaatactcagtgtcttgaataactggaggcagagctgaaagtagcagttcagtggacagggacagctttggctaaataygtaagcagttcaaaataatgaagttccaggtccactgataaatctagaaggaagaagcctggtggcacttakwgctgagcttgctcataccagtggctatggcagttctcagaaatacctcattcgtttgttcacactgctgtgggctatctcttttccatrgagctttaaacagttgcttagagcatgtttaaccacatgcccgaagtaaagaaccttcttcagcaggtttactaacaaacctgcagatttctgctagatagggcctaagacwctgcagggatggacaaggcagacacagtgaggccatgacaggagaattgctttgttttgcctcaggtatgttgaaggaatgtttggaggcccctgacc

SEQ ID NO: 14956 - DNA, 600 bp, Chicken  19866894220845_4
gatctctgcatgtccacaagaagtggtctttaggctaaaatcattatgttccatagtgtaaatactcagtgtcttgaataactggaggcagagctgaaagtagcagttcagtggacagggacagctttggctaaataygtaagcagttcaaaataatgaagttccaggtccactgataaatctagaaggaagaagcctggtggcacttakwgctgagcttgctcataccagtggctatggcagttctcagaaatacctcattcgtttgttcacactgctgtgggctatctcttttccatrgagctttaaacagttgcttagagcatgtttaaccacatgcccgaagtaaagaaccttcttcagcaggtttactaacaaacctgcagatttctgctagatagggcctaagacwctgcagggatggacaaggcagacacagtgaggccatgacaggagaattgctttgttttgcctcaggtatgttgaaggaatgtttggaggcccctgacctaaacaggagctctggtagctggctgggaaggttggtgagaagcccggttcctagctcccaatgcacagtggctgcatgttgtacgggtt

SEQ ID NO: 14957 - DNA, 600 bp, Chicken  19866894220845_5
ggacagggacagctttggctaaataygtaagcagttcaaaataatgaagttccaggtccactgataaatctagaaggaagaagcctggtggcacttakwgctgagcttgctcataccagtggctatggcagttctcagaaatacctcattcgtttgttcacactgctgtgggctatctcttttccatrgagctttaaacagttgcttagagcatgtttaaccacatgcccgaagtaaagaaccttcttcagcaggtttactaacaaacctgcagatttctgctagatagggcctaagacwctgcagggatggacaaggcagacacagtgaggccatgacaggagaattgctttgttttgcctcaggtatgttgaaggaatgtttggaggcccctgacctaaacaggagctctggtagctggctgggaaggttggtgagaagcccggttcctagctcccaatgcacagtggctgcatgttgtacgggtttattcctcaacatctctgaaactgcagtgcaacctgttcaggaagttgcttatgatttaattttagcttgattattttattataaatgtgaagggatagaagaggtgtactg

SEQ ID NO: 14958 - DNA, 538 bp, Chicken  19866894220852_1
cggtaagcatccacttgtgctttcccctcacggacaccgcaaaaagggaaagctctccatgcaccacgaacatctgcattgagaggagctgtgtgaaaactgtggatggtgtggaaaagtaaaaaatgcaaggtggaaacacccacacagacacttgtgagtaaaacctgactcttgctccccagtgagcctgtctggagaggagcagtgtaaagtaaacatgctggagaagtgacagcaaaatggtgtgtctgtgacgtgggatgtaacctacatattttgctcctcacactattaggwaaaaaaaaaagaggaaaaaaaaggttcttcctcawgtcctcattgtacttccccaggatgagctgctgaagggaagagatgggaccttcagcatccttcctggcagtatggttacgcagtttagagaaggtttagaaaaatttaggaaatgtgcaatactgaactacttttcaggtcactgaaatagtgctgtgcaggggcagggggaagatgtggggccaacagcagaggccttcct

SEQ ID NO: 14959 - DNA, 503 bp, Chicken  19866894220852_2
accgcaaaaagggaaagctctccatgcaccacgaacatctgcattgagaggagctgtgtgaaaactgtggatggtgtggaaaagtaaaaaatgcaaggtggaaacacccacacagacacttgtgagtaaaacctgactcttgctccccagtgagcctgtctggagaggagcagtgtaaagtaaacatgctggagaagtgacagcaaaatggtgtgtctgtgacgtgggatgtaacctacatattttgctcctcacactattaggaaaaaaaaaaagaggaaaaaaaaggttcttcctcawgtcctcattgtacttccccaggatgagctgctgaagggaagagatgggaccttcagcatccttcctggcagtatggttacgcagtttagagaaggtttagaaaaatttaggaaatgtgcaatactgaactacttttcaggtcactgaaatagtgctgtgcaggggcagggggaagatgtggggccaacagcagaggccttcct

SEQ ID NO: 14960 - DNA, 600 bp, Chicken  19866894220859_1
gttgctttcagttttgaaatcacgtgaaaagatgtaaacacgggagaactgaagttaaaacatgacagttattaagggatctcactgcagctctctcagctctttcaaagaccagccttaatgatccactgtcaaacaaggtaatgatcattcaagcttggaaattagagcctgctgatctgaacatcaaccacgatgctcccaaatgacccattgcctgacaccaggagtaccagaccagccaaaccaggttttgcagcctgctgacactaactcggaaaccatagagtctgacaggaratatcactgtaaaagcttacagttctgcatcagtctccacaatctactgagatttctattttttattagtattattggattctatgtgggaataaagaattggtgcaaatttgtttacatgtttatattgattgcatgttaacaaatgtaaactactacaacatcaaagtaacctaaataacattataagaaagaaactcatatttacccatgcttgtctcttgccttccaccagtgaatgtcattcttctcaattacyrtatattcttcacctttatctaaccttaaatcatgacattc

SEQ ID NO: 14961 - DNA, 600 bp, Chicken  19866894220859_2
cctgctgacactaactcggaaaccatagagtctgacaggaratatcactgtaaaagcttacagttctgcatcagtctccacaatctactgagatttctattttttattagtattattggattctatgtgggaataaagaattggtgcaaatttgtttacatgtttatattgattgcatgttaacaaatgtaaactactacaacatcaaagtaacctaaataacattataagaaagaaactcatatttacccatgcttgtctcttgccttccaccagtgaatgtcattcttctcaattacyrtatattcttcacctttatctaaccttaaatcatgacattctgtgggctggaagtcatacatcgcaaccactatctcctcctcwtcgttatcattttcctcagctggaggaacaggtggtggcggccttcgctgaaaatgacacaaaattatcatcatcccactcygttctttgattcccctccaccccacctctgctattacacccctgcaaaccagctgagcagcccagaggcaaaggctgggctggtttggactgtcccatgcgggagctgtgggggtcaggctgaggcatgcatgg

SEQ ID NO: 14962 - DNA, 600 bp, Chicken  19866894220859_3
ctgctgacactaactcggaaaccatagagtctgacaggaratatcactgtaaaagcttacagttctgcatcagtctccacaatctactgagatttctattttttattagtattattggattctatgtgggaataaagaattggtgcaaatttgtttacatgtttatattgattgcatgttaacaaatgtaaactactacaacatcaaagtaacctaaataacattataagaaagaaactcatatttacccatgcttgtctcttgccttccaccagtgaatgtcattcttctcaattacyrtatattcttcacctttatctaaccttaaatcatgacattctgtgggctggaagtcatacatcgcaaccactatctcctcctcwtcgttatcattttcctcagctggaggaacaggtggtggcggccttcgctgaaaatgacacaaaattatcatcatcccactcygttctttgattcccctccaccccacctctgctattacacccctgcaaaccagctgagcagcccagaggcaaaggctgggctggtttggactgtcccatgcgggagctgtgggggtcaggctgaggcatgcatggg

SEQ ID NO: 14963 - DNA, 600 bp, Chicken  19866894220859_4
ctactgagatttctattttttattagtattattggattctatgtgggaataaagaattggtgcaaatttgtttacatgtttatattgattgcatgttaacaaatgtaaactactacaacatcaaagtaacctaaataacattataagaaagaaactcatatttacccatgcttgtctcttgccttccaccagtgaatgtcattcttctcaattacyrtatattcttcacctttatctaaccttaaatcatgacattctgtgggctggaagtcatacatcgcaaccactatctcctcctcwtcgttatcattttcctcagctggaggaacaggtggtggcggccttcgctgaaaatgacacaaaattatcatcatcccactcygttctttgattcccctccaccccacctctgctattacacccctgcaaaccagctgagcagcccagaggcaaaggctgggctggtttggactgtcccatgcgggagctgtgggggtcaggctgaggcatgcatgggacattcacagcgtcgcagcccccatagcgcttactcttggaccatctctactagcagcatagatacctaccatacttttttct

SEQ ID NO: 14964 - DNA, 600 bp, Chicken  19866894220859_5
tattgattgcatgttaacaaatgtaaactactacaacatcaaagtaacctaaataacattataagaaagaaactcatatttacccatgcttgtctcttgccttccaccagtgaatgtcattcttctcaattacyrtatattcttcacctttatctaaccttaaatcatgacattctgtgggctggaagtcatacatcgcaaccactatctcctcctcwtcgttatcattttcctcagctggaggaacaggtggtggcggccttcgctgaaaatgacacaaaattatcatcatcccactcygttctttgattcccctccaccccacctctgctattacacccctgcaaaccagctgagcagcccagaggcaaaggctgggctggtttggactgtcccatgcgggagctgtgggggtcaggctgaggcatgcatgggacattcacagcgtcgcagcccccatagcgcttactcttggaccatctctactagcagcatagatacctaccatacttttttctggcattggcaagggcagtgttactacacctagaaacagagcacagaaaagcattaagtgtcctgtgaaaaaagtctatctca

SEQ ID NO: 14965 - DNA, 600 bp, Chicken  19866894220859_6
caaaagtattttttttctcctgtgcttcttttttccattcaaaagatcttgtagaataagggcaaccacgagcaatcctttattcctcttttaatggaatggaatccacagttccgaaccactgccactcaaggctgtgaacaagggaaccaccttggcactcctgattttaccaggaggtgagcattggtgccacttcttttcttaataaggaggattccttgaatcaagttcaaggacaaataattactgtattgttatgcagagcaatattacactgagggtcacgctttcacactyttgcatgccacagcacacactgctgaacaagcacaggctgtgatttgcatgctggaagagtcataagcatttggaagtgatgtctcacctaggttcagcatttgaacgtttgcaaacttctacgaagcgtgagccacgtgtctgcaaattcattaagcctggttaccctcttgtaccattttcactttggtgtaacttctctgattccatcagggttattattcttttacacaggtacacaagagccatttattcaaatgaagaactggcaaagattaacatctgaaccttatttaccat

SEQ ID NO: 14966 - DNA, 600 bp, Chicken  19866894220865_1
ccgcccgctcacagatgtgcagcagcaccaacgcaggacggagccggctgtcccggcagtgcagctgtggctcacgcactgagctgccgtggaactccgcatcccctgtgctgcaccacagtgctacagacgggctgtgcagggcagagcgctcgacagcacagcagcagcgccgtgcagctgcttccatcaacacagcgcagcaggcggctgccctcacagcatggcggctctcccaccccaccgcaccgcacacaaagtggggatggaacccagcagaagagcgccgccctttgctgygagatgctgagcgccgggggctcagccaggagagcagccagcagcaccagcagccatttcgggacaaccatctccgctgtggcctctctgaagctgcacgttcctgagaccacaaacacagggagccatttctgcccacaggagatgttcacgctacacccccagcaaccagcgcccccacccagggctgccacacgcccaccagtgccccacagccccagcaggagctcccragaagcacggcatcacgccactgccttccatcagcaccagcttctgctgtaaggaacgctcacggaa

SEQ ID NO: 14967 - DNA, 600 bp, Chicken  19866894220865_2
tcccaccccaccgcaccgcacacaaagtggggatggaacccagcagaagagcgccgccctttgctgygagatgctgagcgccgggggctcagccaggagagcagccagcagcaccagcagccatttcgggacaaccatctccgctgtggcctctctgaagctgcacgttcctgagaccacaaacacagggagccatttctgcccacaggagatgttcacgctacacccccagcaaccagcgcccccacccagggctgccacacgcccaccagtgccccacagccccagcaggagctcccragaagcacggcatcacgccactgccttccatcagcaccagcttctgctgtaaggaacgctcacggaagccaacgtgagaaagggctgacagcagtcccagctgagtgcagctggcagagcacagcccccaaaccccgctgggctgtgcccccaggcagccccggacacccagtgccaagtcaatgggatttggtgctcgtacccaaacagcagctgtcctgcagccatccgccctgcagcccctcatagcagaacaccgcatccaagaacacaagccacaaagcatttagatcaggagca

SEQ ID NO: 14968 - DNA, 594 bp, Chicken  19866894220871_1
ttaatcagaagaaagaaaaaaattagcttgacttttttgacagcaaagccaaaccaactggaaaattcacctcctacaagaaatgttgaaagggaaaactctggataacaacatgttagtgaaatgctttcaaatgcagacacagctgtattgtaatgcaatcttatattctctttgacctgccatcccgcattccgcgtctcccctccaatacacaaggaaaactgttggattcaagtctcgttttttcatcttcccctctcccataggaaagggcaccgcaaaggacagagacgcacmaaatcaggtgcctgtgaatttactttgcaaactacctgctttcataaaaatgtgaaagaagttaatggtaaggtcagagagtactgactatttatttgacattactttgtttccttccttaatgaatgttgctaaaacagatgagtactcttaaattcatttcagaaatagggattactggggatcactgatagctttttttccaattactggagtcagcagcaatactgggaatggaccagagctgccaggctcccattttttgtctctgtctctggctcctgggccccagat

SEQ ID NO: 14969 - DNA, 505 bp, Chicken  19866894220878_1
acacaaggggtcaaatgttagcctgaccagtttattacaaattctagtcatttaggaagatgggtgatagaaaagataggaaataaaagcaaggagtctttgtaggaagcaagagggagatagtcaccaccatgggtcctgtgtggtttgtagttcagttgttgatcttcagtagtggtgggttgtcaagcattgttatttgcttgatgatgatgtctttccagtggtagtacaagcttatttataggtccaaagttgtcaagtcagctctctttggagtggcagcttctggctttgggwtctctgcagaaactcctttgttcccatcttctgggccttgccaacagataagagggagcagggatgtacccacctgcatcctgtttttcacaggacacgatggtatcattccccacttttcccataccaagctggagttatttggtcacaggccagatcttccaccagtaaacactcctgagcactctcttccagaggcaaacag

SEQ ID NO: 14970 - DNA, 600 bp, Chicken  19866894220879_1
cctctccggttttgtcccggtgtctaacctgatttctcttgctgtaatttaagccgattatttcttgtcctgtccaccatggacataaagagcagattattctcttccccttggcagcagccttttaagcacttgaagactgttatcacatctcttctcccatcatctcttttaggctaaataacccagttctttcaatctttctttgtaggtcatgtcttgtagacctctgatcattctcactgttccctgcatgctgactgcagtgttgctgcctcccttctgacatgagctgccgayaccaaaatttgctccagtgcagacctcagaagcactgaatggcaagagrgatgatgtggtgagcctgggtaggccgtgctgctgctcgcatctcccggggcactgtgcctcttgatgcgacactgatagctcatgttcagctcatgaccctctataattcccagacctctttctgaggaactgttaccaattgcctgcaggccttttgggacttttaggtgaataggaaaaggaagcgatggagttttctggatgtgttctccagtgcttgtcagtctcctctaaatcctcattttggtt

SEQ ID NO: 14971 - DNA, 600 bp, Chicken  19866894220879_2
taagccgattatttcttgtcctgtccaccatggacataaagagcagattattctcttccccttggcagcagccttttaagcacttgaagactgttatcacatctcttctcccatcatctcttttaggctaaataacccagttctttcaatctttctttgtaggtcatgtcttgtagacctctgatcattctcactgttccctgcatgctgactgcagtgttgctgcctcccttctgacatgagctgccgayaccaaaatttgctccagtgcagacctcagaagcactgaatggcaagagrgatgatgtggtgagcctgggtaggccgtgctgctgctcgcatctcccggggcactgtgcctcttgatgcgacactgatagctcatgttcagctcatgaccctctataattcccagacctctttctgaggaactgttaccaattgcctgcaggccttttgggacttttaggtgaataggaaaaggaagcgatggagttttctggatgtgttctccagtgcttgtcagtctcctctaaatcctcattttggttggttcacatactcagaagacactcttggtygggctttgatgaggctgta

SEQ ID NO: 14972 - DNA, 600 bp, Chicken  19866894220879_3
agcactgaatggcaagagrgatgatgtggtgagcctgggtaggccgtgctgctgctcgcatctcccggggcactgtgcctcttgatgcgacactgatagctcatgttcagctcatgaccctctataattcccagacctctttctgaggaactgttaccaattgcctgcaggccttttgggacttttaggtgaataggaaaaggaagcgatggagttttctggatgtgttctccagtgcttgtcagtctcctctaaatcctcattttggttggttcacatactcagaagacactcttggtygggctttgatgaggctgtatatgacacctgggctggagctctttggtccatgctgaacaggcttttccaatgatcttttcggttgctggctcctgcttcctcttaatttccagtgttttatctctctcatgcaagtcatttcacggtctaagacatgcttgtgttaaacacaggataatcataattttatgcaagaaaaaaaaagaattcataattttctgcagtccacagggcactgaaaagcagaccagcatggccaggccccaaccccagcagctctgtttgagtgagcctggggtg

SEQ ID NO: 14973 - DNA, 600 bp, Chicken  19866894220882_1
acctctaagcccatatgttttaacaaattaagaggtaaataatttgctgaaggtacagttcagccacgtcagaacacctctggaaatgagatatctctgtgtttcacgtggagtttcttatcaaaagatttttctcaactttttagcaaaaaaaaaaaaaatccaaatgccttgttttgtctcaaggaatactactgtaagtcactattaaccctttagggtctctgcagatgatgtggtcatttgaagtctagcctgctctgctgctcttgtgtcggcaagtggctgagagggattgayagcattcaggtcttcaataggataaagccaccagggacttcctagggaatgaaaagaggcacaaaaaggttaccacgtgtatcctagaatctggtacataattctaccattgaacctttaattcatgaaaaaaaatgctagcgyggtccccaaatggttaaattccactcgaacttttcattttagttagtcatgaatatatctaacatacagaggccatcagcatctcgccactagagactataaagtctacttacatagggttcctgggatttttcatgttcttatggaaaatatctc

SEQ ID NO: 14974 - DNA, 600 bp, Chicken  19866894220882_2
agcaaaaaaaaaaaaaatccaaatgccttgttttgtctcaaggaatactactgtaagtcactattaaccctttagggtctctgcagatgatgtggtcatttgaagtctagcctgctctgctgctcttgtgtcggcaagtggctgagagggattgayagcattcaggtcttcaataggataaagccaccagggacttcctagggaatgaaaagaggcacaaaaaggttaccacgtgtatcctagaatctggtacataattctaccattgaacctttaattcatgaaaaaaaatgctagcgyggtccccaaatggttaaattccactcgaacttttcattttagttagtcatgaatatatctaacatacagaggccatcagcatctcgccactagagactataaagtctacttacatagggttcctgggatttttcatgttcttatggaaaatatctctgaaatccccgagctgaaaattttgatctcatttgtggatgtgagcggtgctgagaaagggtggaagagtgaagagaacacttttctcgcataatttcatttgtcaggagaatcttgctgctgacattggaagagtgatttaat

SEQ ID NO: 14975 - DNA, 599 bp, Chicken  19866894220884_1
  misc_feature (1)..(40): n is any nucleotide
nnnnnnnnnnnnnnnnnnnnnnnnnnnnnnnnnnnnnnnntcagcccccctaaacttctgtcccccctttcacattctttaggggttatcatttaagaaactttgcccacctaactcagtttgttgaagaacccttggaggacaaacacctccaagtcaccaagaggtgctcagtgtgcacaccacccagccacactcccacccctcggtgatgctctgggggtccccgggggcttcaaggccgcgctggggggggttacagcagaagggagacttacccatgtcctgcagccgcgagcrctgagagagcacagctccgtgctggcaggagcgccgagtgcggttcacgcttcccctcccagtatataacccgtccaaatcaatgaatcagcacaggggcagcggcggggttacggaaatcactgcagcagagcggcttccagcttgcacttcctcagcaaacagagtgattgactcggagatggagtggctggtttctcacttgcgaaccctctcacttgaagacaagcagtcggccctgagaacacgctgtgcacgtcagccagcacactgcrtgcagctcagccctgcagccccca

SEQ ID NO: 14976 - DNA, 600 bp, Chicken  19866894220884_2
tacccatgtcctgcagccgcgagcrctgagagagcacagctccgtgctggcaggagcgccgagtgcggttcacgcttcccctcccagtatataacccgtccaaatcaatgaatcagcacaggggcagcggcggggttacggaaatcactgcagcagagcggcttccagcttgcacttcctcagcaaacagagtgattgactcggagatggagtggctggtttctcacttgcgaaccctctcacttgaagacaagcagtcggccctgagaacacgctgtgcacgtcagccagcacactgcrtgcagctcagccctgcagcccccagcacacagccagggaccgtgactcactggggcaccatcctgccccgctgctgccaccatcacctcgtgcatcacagcacccacctcacccactgcagcccctctaggacctgcagctgtgcacagccctcccacagcactatgcagaggctcttcagccacagcaggcaggggccgtgttgtgcttctggrckctgcagactttcgaggtcctccagcatcayccacccatgaggccttggccagtgggggatttggtgcccacaggcacagcccc

SEQ ID NO: 14977 - DNA, 600 bp, Chicken  19866894220884_3
ctggtttctcacttgcgaaccctctcacttgaagacaagcagtcggccctgagaacacgctgtgcacgtcagccagcacactgcrtgcagctcagccctgcagcccccagcacacagccagggaccgtgactcactggggcaccatcctgccccgctgctgccaccatcacctcgtgcatcacagcacccacctcacccactgcagcccctctaggacctgcagctgtgcacagccctcccacagcactatgcagaggctcttcagccacagcaggcaggggccgtgttgtgcttctggrckctgcagactttcgaggtcctccagcatcayccacccatgaggccttggccagtgggggatttggtgcccacaggcacagcccctctgagcccacggtgatggagcccagcaccacggagaatgggggaagaagggcacaaagccctacacgcagccctgcccttcctttggccccaccactcacctggcctgccccacgcccacctctcccaggcagcctggtccagcagcagccacgagcagagctttgagagatatcactatgggaaaaccaacacgtgtggcgccttgttctgag

SEQ ID NO: 14978 - DNA, 600 bp, Chicken  19866894220884_4
ggtttctcacttgcgaaccctctcacttgaagacaagcagtcggccctgagaacacgctgtgcacgtcagccagcacactgcrtgcagctcagccctgcagcccccagcacacagccagggaccgtgactcactggggcaccatcctgccccgctgctgccaccatcacctcgtgcatcacagcacccacctcacccactgcagcccctctaggacctgcagctgtgcacagccctcccacagcactatgcagaggctcttcagccacagcaggcaggggccgtgttgtgcttctggrckctgcagactttcgaggtcctccagcatcayccacccatgaggccttggccagtgggggatttggtgcccacaggcacagcccctctgagcccacggtgatggagcccagcaccacggagaatgggggaagaagggcacaaagccctacacgcagccctgcccttcctttggccccaccactcacctggcctgccccacgcccacctctcccaggcagcctggtccagcagcagccacgagcagagctttgagagatatcactatgggaaaaccaacacgtgtggcgccttgttctgagcc

SEQ ID NO: 14979 - DNA, 600 bp, Chicken  19866894220884_5
agacaagcagtcggccctgagaacacgctgtgcacgtcagccagcacactgcrtgcagctcagccctgcagcccccagcacacagccagggaccgtgactcactggggcaccatcctgccccgctgctgccaccatcacctcgtgcatcacagcacccacctcacccactgcagcccctctaggacctgcagctgtgcacagccctcccacagcactatgcagaggctcttcagccacagcaggcaggggccgtgttgtgcttctggrckctgcagactttcgaggtcctccagcatcayccacccatgaggccttggccagtgggggatttggtgcccacaggcacagcccctctgagcccacggtgatggagcccagcaccacggagaatgggggaagaagggcacaaagccctacacgcagccctgcccttcctttggccccaccactcacctggcctgccccacgcccacctctcccaggcagcctggtccagcagcagccacgagcagagctttgagagatatcactatgggaaaaccaacacgtgtggcgccttgttctgagccagcagcagccctgtgctaaccacgggggca

SEQ ID NO: 14980 - DNA, 599 bp, Chicken  19866894220886_1
  misc_feature (1)..(73): n is any nucleotide
nnnnnnnnnnnnnnnnnnnnnnnnnnnnnnnnnnnnnnnnnnnnnnnnnnnnnnnnnnnnnnnnnnnnnnnnnaaaaatctatagataacttgtttaacttgtcaatagctatcacatttagagcaagcatcattctttttcaagtattgcttcactgtcaaaatatctccaaattttataattcttagagattactgattttacctttaaaaaggtgctttcccagcttccgaaaggcagacaaatgtaactactttgcttttaaatattcagtatcataagaaatactttaaaattgsatcaacataagaagctgggagacaaactagatgtcttaactagtattgagtaggatttaacagcatcattcaaaaaacacaaatctgttgtcactagatttaagtaatgtcaaaaatatttttacagaaggtaaaactttcagggatatatgagataatataataaaacttataataaacacttattagactttggtctaagtcactggaaatattttttgggaggaagatgaattttcaaatgtwaaagtagatgcactgaagccatattatacatctgtcagttattgggagtgctt

SEQ ID NO: 14981 - DNA, 600 bp, Chicken  19866894220886_2
tgtaactactttgcttttaaatattcagtatcataagaaatactttaaaattgsatcaacataagaagctgggagacaaactagatgtcttaactagtattgagtaggatttaacagcatcattcaaaaaacacaaatctgttgtcactagatttaagtaatgtcaaaaatatttttacagaaggtaaaactttcagggatatatgagataatataataaaacttataataaacacttattagactttggtctaagtcactggaaatattttttgggaggaagatgaattttcaaatgtwaaagtagatgcactgaagccatattatacatctgtcagttattgggagtgctttgagatatttcccattttctaatggagaccttcatttaattcwcatctactctatgcaaactaatattctttcaagttctaacttgttagtcttaatttttatactggaagataactgcccattaagcacatcattcatatcagtgcaaaaatacctagacagagaatactgtataatgcaattcagacaccagatagataaagtatatgtggttaattcattgctattacacactctgaaaaaatc

SEQ ID NO: 14982 - DNA, 565 bp, Chicken  19866894220886_3
gtattgagtaggatttaacagcatcattcaaaaaacacaaatctgttgtcactagatttaagtaatgtcaaaaatatttttacagaaggtaaaactttcagggatatatgagataatataataaaacttataataaacacttattagactttggtctaagtcactggaaatattttttgggaggaagatgaattttcaaatgtwaaagtagatgcactgaagccatattatacatctgtcagttattgggagtgctttgagatatttcccattttctaatggagaccttcatttaattcwcatctactctatgcaaactaatattctttcaagttctaacttgttagtcttaatttttatactggaagataactgcccattaagcacatcattcatatcagtgcaaaaatacctagacagagaatactgtataatgcaattcagacaccagatagataaagtatatgtggttaattcattgctattacacactctgaaaaaatcagacggaaggaaaagggttgttttgaaggattttctgtcaaaatggaaggaaaaaaaactt

SEQ ID NO: 14983 - DNA, 600 bp, Chicken  19866894220888_1
ggcatgccattgacacataaaatgtagcaattattgctagcatttttattctcaaggttttttggcacattcagcacagattcccatttgcttggtttaatacatgtaaacaatccaatttttcatcagttctgctcaagatctcatcagtgactgcatatgggtgtaatcaagtaagcatcgtttactaaattcaaagcttggttctttcattttcatcagctcccacttttaaaattttctagaactgctctaaattttaaatagcattcagcagggctcttctcttgcactcctacygagatcgtgtcagtcctttttttcctctttgaattgtaattccaatttccccyataatggctttgcaaagccagatgagcagaataggtcccgtcccatgctgaaatagcctgtcttatgtatacaagacaaattttgctcctaaaccgttcttcctgaagaagttgctggttatataataactagtgaatttgtcattgaacgtgttctcatttcgtcttccatcgttctgctcctcttctctgtacacacatagtggaagaggggaaaaaaaaccactatggagacgatgatgacagt

SEQ ID NO: 14984 - DNA, 600 bp, Chicken  19866894220888_2
aaggttttttggcacattcagcacagattcccatttgcttggtttaatacatgtaaacaatccaatttttcatcagttctgctcaagatctcatcagtgactgcatatgggtgtaatcaagtaagcatcgtttactaaattcaaagcttggttctttcattttcatcagctcccacttttaaaattttctagaactgctctaaattttaaatagcattcagcagggctcttctcttgcactcctacygagatcgtgtcagtcctttttttcctctttgaattgtaattccaatttccccyataatggctttgcaaagccagatgagcagaataggtcccgtcccatgctgaaatagcctgtcttatgtatacaagacaaattttgctcctaaaccgttcttcctgaagaagttgctggttatataataactagtgaatttgtcattgaacgtgttctcatttcgtcttccatcgttctgctcctcttctctgtacacacatagtggaagaggggaaaaaaaaccactatggagacgatgatgacagtaatcttgtgagatgggtgaattttctagcagctgttttgcccccatgatgaca

SEQ ID NO: 14985 - DNA, 600 bp, Chicken  19866894220899_1
acgtgtgtgtgtgtgtattttattttatttctctcaaaatcaaagcacacactgaaagctgcacttcagctgtccaacagtttgcatagtggcctgtttcctcggaagcataacacaccaccataaatggtttacagtgaccttaccacagcagttagacatgctggaaaagcactctgtcctaggctagcacttagctggcacaggcaggtattctgcacacttgtgattaagcagatccacttaggttagattctgtatcaagtcctttcaagaatcttgcaactgtacttcagcctsagatcaaactgctacagccaatgcaacacatgaacaatgtgctggagaactgcgcaattcaatgaagagtttttccatacagtagtacaaattgcagacttgacagatataacagacatacagctgatgtcccacctgctcatctccttatttaagaacaagaaaagacgtggtcattactgtataaaaaggcacagcagaataatccacatgggaaggggactgaacatgaaagcagcaaatgaaccagtgacagcaattgtcacattaacactgtgatttgcacacttcattaggcac

SEQ ID NO: 14986 - DNA, 600 bp, Chicken  19866894220900_1
gtacgtgtctgccacgttactgggcaccagcctttacaatcagcgggaaatgatgaagcaggcttactggcccgagttcgatggattgagaattcaccatctgaggacattacctattggttacatcagatataccctgatgtgtgtcgatactgtaagtgggctactgcaggcctattcagtaccaaaagcaaaccaggcttttagtaagtaccatcaaggcacttaccaaactgatgtctgcctatgggacacctcaagtcatcaagagtgatcaagagacccattttactggtacastgatacagcgctgggcagaagaaaataacatcgaatggcaattccacctgtcatataatccaaggggggcaagcctcattgaacattataatagtattctcaaggctgccctgaagacagattcccagtccctgcaggggggtrcaaagagactctatgaaaccctgtgggacttgaatgaaagacctcaagatgtcagatccaatgccctgaaaatgctacaaacaacatgggcctcctggcttagcatccaatttactggcactgataaacaggtaagaccccagattagcaatgaaa

SEQ ID NO: 14987 - DNA, 600 bp, Chicken  19866894220900_2
tgtcgatactgtaagtgggctactgcaggcctattcagtaccaaaagcaaaccaggcttttagtaagtaccatcaaggcacttaccaaactgatgtctgcctatgggacacctcaagtcatcaagagtgatcaagagacccattttactggtacastgatacagcgctgggcagaagaaaataacatcgaatggcaattccacctgtcatataatccaaggggggcaagcctcattgaacattataatagtattctcaaggctgccctgaagacagattcccagtccctgcaggggggtrcaaagagactctatgaaaccctgtgggacttgaatgaaagacctcaagatgtcagatccaatgccctgaaaatgctacaaacaacatgggcctcctggcttagcatccaatttactggcactgataaacaggtaagaccccagattagcaatgaaaatattcttctgctccctgccccttagaatctagatccaggtacccatagaataaaatggccttggaaggtggaggtaggacctaagtggcatggcctacttgcacctttggggggattattggaggtgagaggctcagtagtcc

SEQ ID NO: 14988 - DNA, 600 bp, Chicken  19866894220906_1
tttagagttttccagcaggaagtcaggctaggtcatactaggagcttcccaccctcctgctccaactttgtcaaccccacggctttaccaggtctggttatatggtcttgattttgcatatttgcaaggaggaagactttcttttgcaggaaagttgcttttctttgggaaactgtgtgttcaacttggtcctggaactgctcaattggcttcatgtagttgggtgggaatagaaacagaacagggactgcatttatgttgttcctaaattgtcaacggaacagcttcatgttgagttgrtttttgtttgcttttagagttttgccctaaattcacactttgaaggacaggaattatgtaggaaataatcagaagttgcagaaatttgcttgtcgtactacatctgctttatgcttcagaaagccagtgagtttcagtgtaacatcacttgactggcaaagaagaagactgaagacacagtttggttccatrttgcttttaagcaaagtcttgagatttaaatgtcatagtgcttatcacagggtaggacttagattgtggtggtttccataggttatcttaaccatcaaagctaattga

SEQ ID NO: 14989 - DNA, 600 bp, Chicken  19866894220906_2
tggaactgctcaattggcttcatgtagttgggtgggaatagaaacagaacagggactgcatttatgttgttcctaaattgtcaacggaacagcttcatgttgagttgrtttttgtttgcttttagagttttgccctaaattcacactttgaaggacaggaattatgtaggaaataatcagaagttgcagaaatttgcttgtcgtactacatctgctttatgcttcagaaagccagtgagtttcagtgtaacatcacttgactggcaaagaagaagactgaagacacagtttggttccatrttgcttttaagcaaagtcttgagatttaaatgtcatagtgcttatcacagggtaggacttagattgtggtggtttccataggttatcttaaccatcaaagctaattgaaaaatgaagacgatgggctgaatttgcaaatagtgaaaacagctgcttcagaacaacagctacattgacatttggaacagcagycctgctcccagtgcctctctccagtgaaaagtctgaaggtgacttacctatctgtgaactttgtttttactgtcatggtacgtgcacttaaaaatgaatgccttgtgc

SEQ ID NO: 14990 - DNA, 600 bp, Chicken  19866894220906_3
tttgcttgtcgtactacatctgctttatgcttcagaaagccagtgagtttcagtgtaacatcacttgactggcaaagaagaagactgaagacacagtttggttccatrttgcttttaagcaaagtcttgagatttaaatgtcatagtgcttatcacagggtaggacttagattgtggtggtttccataggttatcttaaccatcaaagctaattgaaaaatgaagacgatgggctgaatttgcaaatagtgaaaacagctgcttcagaacaacagctacattgacatttggaacagcagycctgctcccagtgcctctctccagtgaaaagtctgaaggtgacttacctatctgtgaactttgtttttactgtcatggtacgtgcacttaaaaatgaatgccttgtgcaaagtcataagttaggagctctgttgcataccttaccaataatttccaaacgctctgctactgctgccatccacatatactctgcagcagctatttgggtctcctttgcttggaagcttctgggatagcatcttctgagaagctgcgagcagtcggtaygctggaggctggggttctggatatgaagtcgga

SEQ ID NO: 14991 - DNA, 600 bp, Chicken  19866894220906_4
aacaacagctacattgacatttggaacagcagycctgctcccagtgcctctctccagtgaaaagtctgaaggtgacttacctatctgtgaactttgtttttactgtcatggtacgtgcacttaaaaatgaatgccttgtgcaaagtcataagttaggagctctgttgcataccttaccaataatttccaaacgctctgctactgctgccatccacatatactctgcagcagctatttgggtctcctttgcttggaagcttctgggatagcatcttctgagaagctgcgagcagtcggtaygctggaggctggggttctggatatgaagtcggatcacattgccaagtaaatcgttgtgtcatggttttaaaaggttattcaggacactgtttgcaaagcatttcactgctgtttcagagcataacttaaaaattcggacacaggctcctataaagttccataggttagagcgggaacttgcattctgtgggataggttaaatgcatatgtaaactgtactgcactattatttccttattcctttaacatctacaaatcactggaatgttatacttaacatgtacgtgcactgtaaatatt

SEQ ID NO: 14992 - DNA, 600 bp, Chicken  19866894220906_5
tgaagtataagtgaataactaaacagtttgcaaagaaagttcctattatatatatttatagaaaaataatgataattacagatgctatttcttcattttcagattttggactgattcatatttggatgggatagataaacgaaatacggacttactccacatttataagagtatagtgaatatttatattttagaggaaaagaatatatttaataaagtcatttattggattttttgtgaggtgagcttactttgtacccaaacaagccgtgtagaaggctgccctttgggttggggctrgggaaaagatgttctaaatctcagttcagtaacctgtaagagctattcgttacattgatagagtgttgactttgaaagtaatttcaacgaagtatgaatgcagtgtcagtggcacattgcttatacttaaccgggctgttacagcagtcatgaaagacttctgttcaaccccttgcattcagggagcaaggccaacgtgtgccatgctatgttcttaggggtggttatggaaaaaaaagaacattttccttcccctttgtattaattcttaacctagtggcccagatagccagctgtggg

SEQ ID NO: 14993 - DNA, 599 bp, Chicken  19866894220911_1
  misc_feature (1)..(44): n is any nucleotide
nnnnnnnnnnnnnnnnnnnnnnnnnnnnnnnnnnnnnnnnnnnntctttctctgatagcacgagttgcttgaggtttaagggagtcagcgatctagccagtttcctacacaatggaattgttgattcctcgtaccgtaatcatttgtttaatcagaaggtctcattgctaaaaatggaacatttggtaatgttttgttgggtctccttctgtcagagctttatatccactcggtgacaaaaaaaaaaattgtgcatgaattgtagttcagcagcaatgagacagtttaattgatcatgargagagcatgagaaaggttaaataatgtaaaaatgcttgtttacattcaaactgggttttttcaagaccaacttctgtgggatatatctttaaatcaaatattatttccatatgccagagaaaatggatttcatttctttcaagccaaagaattcccggaactctgtataatgcaaccagaatgattggacttgttgttcactacaaagatctatagttaaatactgcaaatttttcagtgcctgagtaggcattcagtgaattaacaaagttctgttttgtacaataaaaataaggctt

SEQ ID NO: 14994 - DNA, 600 bp, Chicken  19866894220926_1
taagtgattcttttcatttagatatttttactgtggctttcctgtccttttaaaaacgctagtgctggggtgagaaagggagagagggaaagggagaaggggcgtacccattgtgcaaacacaatctgggataaaactcaatttatggtaaattattctgctgaaactcttaaattgttttcaaacgtttaaattagtgagtagagcctgtgaaactaataagagatattaaaccaatgttagtgttaaaaggagattacagcttgttagaaactcagtggcagagttgagatttaaagkaataacctctctttgcaacaggggaactggtaaatgccactggtttgtcaacagcatttggttttagcctgagaggtgttctcattctgctctccagatcagttgtaatttttacctttaaggtctggggaggaacatcctcaactctcattttycccagtaataatatccctcataggaattacagggttgtttcctgtggttacaatcaagaagcagctttacccatggaagggtatagtcccacctcaatacatgagatgtagaagctcaccatacagcaaaacaaggatgggggca

SEQ ID NO: 14995 - DNA, 600 bp, Chicken  19866894220926_2
ttctgctgaaactcttaaattgttttcaaacgtttaaattagtgagtagagcctgtgaaactaataagagatattaaaccaatgttagtgttaaaaggagattacagcttgttagaaactcagtggcagagttgagatttaaagkaataacctctctttgcaacaggggaactggtaaatgccactggtttgtcaacagcatttggttttagcctgagaggtgttctcattctgctctccagatcagttgtaatttttacctttaaggtctggggaggaacatcctcaactctcattttycccagtaataatatccctcataggaattacagggttgtttcctgtggttacaatcaagaagcagctttacccatggaagggtatagtcccacctcaatacatgagatgtagaagctcaccatacagcaaaacaaggatgggggcaaaagcatcaagataaaggtgaggacagtaagataagaatagattatacgcttatcaaaaagtcaaacatttactggtaaaatagatgcattctctattcctatgaaatgattaatttctgaatttacagtgacttttctgcagctcagctcctgt

SEQ ID NO: 14996 - DNA, 509 bp, Chicken  19866894220926_3
ggctggttgctggctatgccatatcacatggcagcaaacccactcatcatgcaccaacagctgcagtctgtgtgctgccatgactggtccttctgccacagccaccacccatacttgtaccaagggcatggttacaaaatgctgacagcatgattacacagtgctggaggaaaagccggaggaagaaaatatgcctgacacaaaagcattcctgctttcagtgctcctctttgcttctccctctgcattccaggggtgcaatggggaacactgctaaaaagtgaacgcagagcaacacamgtctaaccatgagctaaatgggatttgcaggtcatttctacccctgctctgagagtaaaaacaagtcttagtgagctatattccctactatgatgataaagatctaaatgaaggtacttcccaagaaacatggtgaagatttagggcatgtcctcctctcccagaatacaaagaggagtctggtaaaagctggcacacagcaattttaa

SEQ ID NO: 14997 - DNA, 600 bp, Chicken  19866894220938_1
agcactgaaaattactaccactgattatttttcaaaagtgcagaataatttcttgagaaaacaagaggaactactcattatactctatcacatgagctatgctttcattattttttttcttcctggaattagttttgaaaaattcaaggatcccagctgtttaataatgacgttgttgtattcatgcaaatccctcagaccttatgtcaacatttaattttacaataaatataaaaataagactagttgcatctgtagtcccttgggttgtaactgacaaatcatccaaaacatccctcwccctcttccctcctgaacatccttgttgttttagagtaaataatagtcaaaaggaaaatgttaacattcgtgtggtgtattgagagaagtttatagatattgacagtagtgctcacaaaacagattatatcaaaacaccaaatatattacctttactctagtggtaagcttttgtaaattgaagtcaaatatgtaatcgttgaactctgcaaagatgataaaggcagcatgggaaggacttcaagcacactggatttggagaaggaayygttcccactaaccatttactcctaatgaatt

SEQ ID NO: 14998 - DNA, 600 bp, Chicken  19866894220938_2
tgtaactgacaaatcatccaaaacatccctcwccctcttccctcctgaacatccttgttgttttagagtaaataatagtcaaaaggaaaatgttaacattcgtgtggtgtattgagagaagtttatagatattgacagtagtgctcacaaaacagattatatcaaaacaccaaatatattacctttactctagtggtaagcttttgtaaattgaagtcaaatatgtaatcgttgaactctgcaaagatgataaaggcagcatgggaaggacttcaagcacactggatttggagaaggaayygttcccactaaccatttactcctaatgaattttagacaaaaaacaaacaaacaacaacaacmacccaccaaaaaaacccttatttactaaatcacacttcaaaaaagatttctaaatttggagctgtttgtatagagaatgcagtatctataactccctctggatgatttgcctgtgcattgacttcaaaacaaaaagcaaagagaatttggtttaaaatagattcctaaaagcaagggcctaaatcctaaaagacaaatattttgtggaagaacacaaagctgtggggacaataaata

SEQ ID NO: 14999 - DNA, 600 bp, Chicken  19866894220938_3
gtaactgacaaatcatccaaaacatccctcwccctcttccctcctgaacatccttgttgttttagagtaaataatagtcaaaaggaaaatgttaacattcgtgtggtgtattgagagaagtttatagatattgacagtagtgctcacaaaacagattatatcaaaacaccaaatatattacctttactctagtggtaagcttttgtaaattgaagtcaaatatgtaatcgttgaactctgcaaagatgataaaggcagcatgggaaggacttcaagcacactggatttggagaaggaayygttcccactaaccatttactcctaatgaattttagacaaaaaacaaacaaacaacaacaacmacccaccaaaaaaacccttatttactaaatcacacttcaaaaaagatttctaaatttggagctgtttgtatagagaatgcagtatctataactccctctggatgatttgcctgtgcattgacttcaaaacaaaaagcaaagagaatttggtttaaaatagattcctaaaagcaagggcctaaatcctaaaagacaaatattttgtggaagaacacaaagctgtggggacaataaatat

SEQ ID NO: 15000 - DNA, 600 bp, Chicken  19866894220938_4
tagagtaaataatagtcaaaaggaaaatgttaacattcgtgtggtgtattgagagaagtttatagatattgacagtagtgctcacaaaacagattatatcaaaacaccaaatatattacctttactctagtggtaagcttttgtaaattgaagtcaaatatgtaatcgttgaactctgcaaagatgataaaggcagcatgggaaggacttcaagcacactggatttggagaaggaayygttcccactaaccatttactcctaatgaattttagacaaaaaacaaacaaacaacaacaacmacccaccaaaaaaacccttatttactaaatcacacttcaaaaaagatttctaaatttggagctgtttgtatagagaatgcagtatctataactccctctggatgatttgcctgtgcattgacttcaaaacaaaaagcaaagagaatttggtttaaaatagattcctaaaagcaagggcctaaatcctaaaagacaaatattttgtggaagaacacaaagctgtggggacaataaatataactcagaaaattctgaaaaatctataaaatagaatatagacatataaaaatatatggaatc

SEQ ID NO: 15001 - DNA, 600 bp, Chicken  19866894220942_1
tttgtgtgcagaggagagggttgctgtagcagctgagagctacgcatccatctttgaatgcaccagagctgcaaaagatcattctgccagacctttctctcaccctgaacttcctgcactttgccctgctcttgactggacccactgctctatcttatggctgcagtatcccctgccatcacaccatcactggcatcgtgctgtggctgcagtgtaacaggcgcatatggtagcacagtgatgctgccatctccgtcccgcagcttccaggactgctctcatttttctgggttactccakgagaatttcagctgggtctgaggttgctggaagggctgctgctctccgagctgtagtcaccccaccccacctgctccctgtgtyacaggcrctgccttgcttgctgtgtgcttccagctctgggacatgcacacagcagaagtgctgcacagcttaacrggggccaaggagatctctaaaggcatctgtgtggttgagacggtgctatctgttgggagggagggagggcaggagtgagcaggcctgacctccagagcatgaagagactaaaacctcacagctgactctctcatctgatct

SEQ ID NO: 15002 - DNA, 600 bp, Chicken  19866894220942_2
tgccagacctttctctcaccctgaacttcctgcactttgccctgctcttgactggacccactgctctatcttatggctgcagtatcccctgccatcacaccatcactggcatcgtgctgtggctgcagtgtaacaggcgcatatggtagcacagtgatgctgccatctccgtcccgcagcttccaggactgctctcatttttctgggttactccakgagaatttcagctgggtctgaggttgctggaagggctgctgctctccgagctgtagtcaccccaccccacctgctccctgtgtyacaggcrctgccttgcttgctgtgtgcttccagctctgggacatgcacacagcagaagtgctgcacagcttaacrggggccaaggagatctctaaaggcatctgtgtggttgagacggtgctatctgttgggagggagggagggcaggagtgagcaggcctgacctccagagcatgaagagactaaaacctcacagctgactctctcatctgatctatcacatctccctccacctgcagacacctgaaagagaaaaaaaacctcgataaatatggtagcgtggtgctggaagatgcttgg

SEQ ID NO: 15003 - DNA, 600 bp, Chicken  19866894220942_3
cctttctctcaccctgaacttcctgcactttgccctgctcttgactggacccactgctctatcttatggctgcagtatcccctgccatcacaccatcactggcatcgtgctgtggctgcagtgtaacaggcgcatatggtagcacagtgatgctgccatctccgtcccgcagcttccaggactgctctcatttttctgggttactccakgagaatttcagctgggtctgaggttgctggaagggctgctgctctccgagctgtagtcaccccaccccacctgctccctgtgtyacaggcrctgccttgcttgctgtgtgcttccagctctgggacatgcacacagcagaagtgctgcacagcttaacrggggccaaggagatctctaaaggcatctgtgtggttgagacggtgctatctgttgggagggagggagggcaggagtgagcaggcctgacctccagagcatgaagagactaaaacctcacagctgactctctcatctgatctatcacatctccctccacctgcagacacctgaaagagaaaaaaaacctcgataaatatggtagcgtggtgctggaagatgcttggaaaacaa

SEQ ID NO: 15004 - DNA, 600 bp, Chicken  19866894220942_4
gctgcagtatcccctgccatcacaccatcactggcatcgtgctgtggctgcagtgtaacaggcgcatatggtagcacagtgatgctgccatctccgtcccgcagcttccaggactgctctcatttttctgggttactccakgagaatttcagctgggtctgaggttgctggaagggctgctgctctccgagctgtagtcaccccaccccacctgctccctgtgtyacaggcrctgccttgcttgctgtgtgcttccagctctgggacatgcacacagcagaagtgctgcacagcttaacrggggccaaggagatctctaaaggcatctgtgtggttgagacggtgctatctgttgggagggagggagggcaggagtgagcaggcctgacctccagagcatgaagagactaaaacctcacagctgactctctcatctgatctatcacatctccctccacctgcagacacctgaaagagaaaaaaaacctcgataaatatggtagcgtggtgctggaagatgcttggaaaacaagtgattgtgctaatggagagcagtaagagggtagcgtggtactcacagccctcaaggatgctataaat

SEQ ID NO: 15005 - DNA, 600 bp, Chicken  19866894220949_1
gataatctgcttctggtgaggttatctggccatgagttggactcgatattcttatgggtcccatccaactcaggatatcctatgattctaggattctatgtcatatccaaattacagaattattctttaaagatcattccacttttaaaaatttctgcttgttaaatctgctgtgactgtcagggttgtgcaaggactccgttgcacattatttatatcatagtatcattggttccaccctgtcacatttaggaaaagacatctctgctaaaaaaacgcatgatccccatcataggaaarctgactgtagcagaaagtaaattcacaagaaggtctgacccaagattttagaaggcctgcatctcattctcattagtgctaggatctacaggtgtggtcttagaaaaataagattcttctggggaagatttgtgttcgtagactcatagaatcatagaattgtttgtgctggaagggacacctggtctaactcccttgcaactgacagggacatttataactacattaggttgctcagaccctggttttggatccccaggacgggtgtgcatgatactgcttggctactgggaaaagttc

SEQ ID NO: 15006 - DNA, 600 bp, Chicken  19866894220951_1
gcagatcaaatgtgcgtttctttcatcctaaatgcaactctgctgccaggcatagtagttctacgaaaaaacttcactccctgcttttcttagtctctgagcagctagaaacaacagtactttctctttcagaaactacgagcaatatgcacaagctcctaagcatacttcaatgttatgaaacctcagggactgaagagaaaaactttgatggcaaagtagttagtgcacactgtcaagttggaaggaaccctgttggtcggcagatcaatagaaatcttccagttcttcacagcttcygctgtcctttgtcaaaagggcagtgactattgtgggggtgctcatccaaataccacctactgtaccaaataacatccacgtggaattttacactaagactgtaaggtttttttyccccttgcaaatgttgataatgcaaacacatgaaactaattgtgaacaacttattaatgtcttccctcatatgtgtacattaatctgtttgcttccatgaggttgtctatactaaggtaataatcaggagttttacataccttggtcagagaggggttggaatggcattttaccgaagtgtaaata

SEQ ID NO: 15007 - DNA, 600 bp, Chicken  19866894220951_2
cagtactttctctttcagaaactacgagcaatatgcacaagctcctaagcatacttcaatgttatgaaacctcagggactgaagagaaaaactttgatggcaaagtagttagtgcacactgtcaagttggaaggaaccctgttggtcggcagatcaatagaaatcttccagttcttcacagcttcygctgtcctttgtcaaaagggcagtgactattgtgggggtgctcatccaaataccacctactgtaccaaataacatccacgtggaattttacactaagactgtaaggtttttttyccccttgcaaatgttgataatgcaaacacatgaaactaattgtgaacaacttattaatgtcttccctcatatgtgtacattaatctgtttgcttccatgaggttgtctatactaaggtaataatcaggagttttacataccttggtcagagaggggttggaatggcattttaccgaagtgtaaatacttgaacagtacccaagactcttttcaatggtaggtatataaatctactcttgaagcttattccaaggcaatccatactttattttactgcagactaaaacctggactggagtt

SEQ ID NO: 15008 - DNA, 600 bp, Chicken  19866894220951_3
tgtgaacaacttattaatgtcttccctcatatgtgtacattaatctgtttgcttccatgaggttgtctatactaaggtaataatcaggagttttacataccttggtcagagaggggttggaatggcattttaccgaagtgtaaatacttgaacagtacccaagactcttttcaatggtaggtatataaatctactcttgaagcttattccaaggcaatccatactttattttactgcagactaaaacctggactggagtttattatatcacagcattcacactatggattaatgcaatcyagtttggattccaaccttgcttaattttatctgagttcattttaatmttctcttctcctgaacaaagacagcacagatcattatgaacattaaactccacgaataacacgactgaaccagtcagcccttgaaagggccaagagatgagtcctgtgtaactggcatgacgacaggacagatttgtcaggctttccttcattgcaaatacatgccatttggtttgtgttcaacatcacctgcagtctttgctactgtgtgaacatcaccaaacagcataacactcgaaccccactaactggc

SEQ ID NO: 15009 - DNA, 600 bp, Chicken  19866894220951_4
tttgcttccatgaggttgtctatactaaggtaataatcaggagttttacataccttggtcagagaggggttggaatggcattttaccgaagtgtaaatacttgaacagtacccaagactcttttcaatggtaggtatataaatctactcttgaagcttattccaaggcaatccatactttattttactgcagactaaaacctggactggagtttattatatcacagcattcacactatggattaatgcaatcyagtttggattccaaccttgcttaattttatctgagttcattttaatmttctcttctcctgaacaaagacagcacagatcattatgaacattaaactccacgaataacacgactgaaccagtcagcccttgaaagggccaagagatgagtcctgtgtaactggcatgacgacaggacagatttgtcaggctttccttcattgcaaatacatgccatttggtttgtgttcaacatcacctgcagtctttgctactgtgtgaacatcaccaaacagcataacactcgaaccccactaactggcagctrtttgcratgggcagcactgacttgtctatctttggatgcctc

SEQ ID NO: 15010 - DNA, 596 bp, Chicken  19866894220951_5
ggattccaaccttgcttaattttatctgagttcattttaatmttctcttctcctgaacaaagacagcacagatcattatgaacattaaactccacgaataacacgactgaaccagtcagcccttgaaagggccaagagatgagtcctgtgtaactggcatgacgacaggacagatttgtcaggctttccttcattgcaaatacatgccatttggtttgtgttcaacatcacctgcagtctttgctactgtgtgaacatcaccaaacagcataacactcgaaccccactaactggcagctrtttgcratgggcagcactgacttgtctatctttggatgcctctgtttgcctgagcactgatatgatgtgatgaaatgatcgcagaacggaacaaacttcaaytaaaagagaaaaaacatagtagatacctaccaagaccaatatgctggctgcatactttgcctgcagcatttactttcttcatgctgaactgagaaaactgggtaggaatatcacctttttcatatatggtctttgatgcatacattaaaaaaatgacaatcttatgctggcatcaatgaaggacttctaaataa

SEQ ID NO: 15011 - DNA, 590 bp, Chicken  19866894220951_6
caaccttgcttaattttatctgagttcattttaatmttctcttctcctgaacaaagacagcacagatcattatgaacattaaactccacgaataacacgactgaaccagtcagcccttgaaagggccaagagatgagtcctgtgtaactggcatgacgacaggacagatttgtcaggctttccttcattgcaaatacatgccatttggtttgtgttcaacatcacctgcagtctttgctactgtgtgaacatcaccaaacagcataacactcgaaccccactaactggcagctrtttgcratgggcagcactgacttgtctatctttggatgcctctgtttgcctgagcactgatatgatgtgatgaaatgatcgcagaacggaacaaacttcaaytaaaagagaaaaaacatagtagatacctaccaagaccaatatgctggctgcatactttgcctgcagcatttactttcttcatgctgaactgagaaaactgggtaggaatatcacctttttcatatatggtctttgatgcatacattaaaaaaatgacaatcttatgctggcatcaatgaaggacttctaaataa

SEQ ID NO: 15012 - DNA, 494 bp, Chicken  19866894220951_7
acgactgaaccagtcagcccttgaaagggccaagagatgagtcctgtgtaactggcatgacgacaggacagatttgtcaggctttccttcattgcaaatacatgccatttggtttgtgttcaacatcacctgcagtctttgctactgtgtgaacatcaccaaacagcataacactcgaaccccactaactggcagctrtttgcratgggcagcactgacttgtctatctttggatgcctctgtttgcctgagcactgatatgatgtgatgaaatgatcgcagaacggaacaaacttcaaytaaaagagaaaaaacatagtagatacctaccaagaccaatatgctggctgcatactttgcctgcagcatttactttcttcatgctgaactgagaaaactgggtaggaatatcacctttttcatatatggtctttgatgcatacattaaaaaaatgacaatcttatgctggcatcaatgaaggacttctaaataa

SEQ ID NO: 15013 - DNA, 600 bp, Chicken  19866894220958_1
ttgaaattgtaaaagaacatccttaatcaaagcacagtagatgacagaagttagtctgttcataatatagttacatactctacataacataacgatgatgcatgatcacctttgaaaatatcctttaaggattttttagtatatttttgcatccagtcaaaataaagtgcaagtcctggttatctcaaatcaactgaaaaaagtagtatacatttgtccttgagtgaatggtaacacagacattcttctttacatttgagtgcatatacatgaattagctggcctaaatatctcttttaytaaaatcttaaaaggacaaaccagattatcattttcatttgcactacatagttaaagcaactctgaactcatcgctccatacttttgaaatactgatttgactgaaaatcttagccctgttccattcttgaatattttytgagttgaatagacaggagcagaatgaaccagaattctgaatatgagcagttctcatactgtgcatgaaaggtggtgacattttatccactgctgctttagttctgcttactacactgcttcacttcaagtccttactccttaccaacctttacaacacat

SEQ ID NO: 15014 - DNA, 600 bp, Chicken  19866894220958_2
tatatttttgcatccagtcaaaataaagtgcaagtcctggttatctcaaatcaactgaaaaaagtagtatacatttgtccttgagtgaatggtaacacagacattcttctttacatttgagtgcatatacatgaattagctggcctaaatatctcttttaytaaaatcttaaaaggacaaaccagattatcattttcatttgcactacatagttaaagcaactctgaactcatcgctccatacttttgaaatactgatttgactgaaaatcttagccctgttccattcttgaatattttytgagttgaatagacaggagcagaatgaaccagaattctgaatatgagcagttctcatactgtgcatgaaaggtggtgacattttatccactgctgctttagttctgcttactacactgcttcacttcaagtccttactccttaccaacctttacaacacatctgtccaccatggaatccagccactcaatgtatgactcaatgggggactgttcctccagaaggtgatcaaactcctgatacactggcagacaaagcaaaaaaacagcccacttcagtgcttgaattccatttagagcaa

SEQ ID NO: 15015 - DNA, 600 bp, Chicken  19866894220974_1
tcttactcctacagtagatacaaatgagattttgttgtgagctctcaaaacacctcagaaataatatatagatgacagagatacatcaataaatttttatctgcattcataacaatccttcctgcatcgccaggaatactacatttggtcttttgagatacgttatttctagcatttcttttactgacacatcaggagttgttaatcataagtacactcttgcttctgtctcatacagccatgagaaagttcaggatggaatattttaaagtatttctagaggccatcttaggaaaatawtttagttaagccaaaggtctaagtataaaatagtcaaagtagcttatctttgtttagcactgagtgtgctatatagaagagatagctaagaagttagaggctgtaaaatgactcccagtttgtctctggaatgagataattttctgaattacagactcagaatatcacatgtaagaataaacaatatcactgataaatcaaagcacagagatgaaaaacgctgaaatagtctgccccatgtagtagagactaccttcaaggtatacagtgacattacaattgatccttcagattagacat

SEQ ID NO: 15016 - DNA, 600 bp, Chicken  19866894220976_1
ggtgtttcttgcttcttaatatttttttgtgaagttgttttctatgctatattaataatgctacatcataatttgccttcctgttttttactcagaattatcaatttctatatgctttattgtataatttctttgtctcttttgatttcaaaacctttgagcaatctaagaaggaatattacaggccacagtattcactgacccagtatattttcactgaaatgctcaagtttaaagctgacccctttaacctgttttctctcaagcttagttttcccttgagcagtagctgaccttttrtagtatagaaggataaaccttcttgtgaaaaagtgaaaaagctctaccaaacactcttaaatgtttgggctctcttgtcctagctcataacataccactttatgggcagaacacgtgtgaaagtctatcaacagggtgagttatgtaatcttgtgcaaataatgaaaggttttccagataccccaataaaatgtgagaaattatgatgacctattgctaatattgtatttgggatgggctaaacagcattaacaaaatgtatgtaagtaaaataatggatatggatttattgttcttaaa

SEQ ID NO: 15017 - DNA, 600 bp, Chicken  19866894220979_1
acatggaagtgtgctcagaagatgctggctggcacagaggtgagttgttcttgtcagcctgttggcctgaataaaagaaatacattgagtaaattcaaataagcctggtgcattgcttccagcactgtgagatgcaccagagcggggtgcagcccccccactagccttcctctgcttgtcttcctcttcctcctggggctgcagcccacagcagggcagggtgcgttatcttccttctccagatgtaggaaacccggggctgggaatgcagagcagtttgtccccaccagcaccaggctyctcaggtgtagcacagcctgctctccgcttgtacctcacgcctgctctgggctggcggtgctgtttctgackgtctctttgatggaaaggccctaaggcagtgcaggcactctgctgctggaagatggatgtctttttgtgtccagggattgtaaacagggctctttcgatagctatttcataacacggatcttatttcaacactttgggtatttcttttttccaggctttgcagagttcagtggaattctgctgtgtgtgctsctgtgtgtgtgcagcgactgcacgcagccacaaaaa

SEQ ID NO: 15018 - DNA, 600 bp, Chicken  19866894220979_2
aaaagaaatacattgagtaaattcaaataagcctggtgcattgcttccagcactgtgagatgcaccagagcggggtgcagcccccccactagccttcctctgcttgtcttcctcttcctcctggggctgcagcccacagcagggcagggtgcgttatcttccttctccagatgtaggaaacccggggctgggaatgcagagcagtttgtccccaccagcaccaggctyctcaggtgtagcacagcctgctctccgcttgtacctcacgcctgctctgggctggcggtgctgtttctgackgtctctttgatggaaaggccctaaggcagtgcaggcactctgctgctggaagatggatgtctttttgtgtccagggattgtaaacagggctctttcgatagctatttcataacacggatcttatttcaacactttgggtatttcttttttccaggctttgcagagttcagtggaattctgctgtgtgtgctsctgtgtgtgtgcagcgactgcacgcagccacaaaaataaaccagtgggatctctccctcagacagctgctttgtgaaagacgggcacttgagtgaccaaagatgagaa

SEQ ID NO: 15019 - DNA, 600 bp, Chicken  19866894220979_3
aatgcagagcagtttgtccccaccagcaccaggctyctcaggtgtagcacagcctgctctccgcttgtacctcacgcctgctctgggctggcggtgctgtttctgackgtctctttgatggaaaggccctaaggcagtgcaggcactctgctgctggaagatggatgtctttttgtgtccagggattgtaaacagggctctttcgatagctatttcataacacggatcttatttcaacactttgggtatttcttttttccaggctttgcagagttcagtggaattctgctgtgtgtgctsctgtgtgtgtgcagcgactgcacgcagccacaaaaataaaccagtgggatctctccctcagacagctgctttgtgaaagacgggcacttgagtgaccaaagatgagaaaaagcccacagcttcctatggtgaggttcctgtgcaaagcaccagcaaggttctctcctttgttcctctgcgtccagactttggcaggagccgtgagcttatgcaccacatgcaagggtgcagaaaagatgaactgttgtaatctgacttgagaaggagaaacaatttccattaagaaaagacgattgctgt

SEQ ID NO: 15020 - DNA, 600 bp, Chicken  19866894220983_1
acataggctggaacagggatacaggcaaggcaaagaagacactggggttggtggcccttaaacagaaagcatgggacaaaactggaaaagggctttcagggcatttgtatttgacacatgtacaacactgttctctgacacttgggaaaactgctcagcagtcctagtgggaggagagggagaagaatagtgtctccagcagacgttctttctatgattctatgattcttgcagctcttggctcagcagagaataattgctaataactggagcctggtcaggatgaccagagctaacacytctgttcctgcatgacgtgggattttgggtgaccgcaagtagttgtcttgggatgtcattaatgccctgtttgctcctcagctctctgttcctcaaaggcctgaggaagctgcagagattcatgggtgtttttttcccctttcttgaaagcacagctaaaaataaaaagcagattaaaattgagcccagcccacagtacagtgtgtaggtgtgatgctaaccaacacccggggctgggaagctcctgggagagatgactcccaagtcctcttataccatctggcagacattctcttcctc

SEQ ID NO: 15021 - DNA, 600 bp, Chicken  19866894220988_1
gacatcaaccgtactgcactccagacaacatcgcaagcagctcccacacgaagtgtctatacagaaacagtctttaaaaatacaattccctgatcccctcttcctcgtggtgccatccctgttgcttcctatgggtgctacgtcagtttctttattctgcggttctgcttgtcgatattcagcgtcgcacggtcgacggaggtagtgatggaatcaagagcttcgtcctgtctctccagttctgcttctgtctccaaggcaaggctcttcaacttcttcagtatctatcggaagaaaagrctgagagctttgagcaaaaaaccatacggttcattaagaatgtaatagacacaaggcagttacttatttatttcctctgaattaccaaataatttgtagtcatgccctgaagtgctctggacaaatatcccttctccactgatgtagttgctccaccgtagaagactaccagactggtcatgcacagtctgcccttggtgaagctatgctgcctcagatcaactccctgtcttacatgtgccttaacatgacttccaggaggatctgttccaccatcttcccaagcacataagtaaggct

SEQ ID NO: 15022 - DNA, 599 bp, Chicken  19866894220997_1
  misc_feature (1)..(189): n is any nucleotide
nnnnnnnnnnnnnnnnnnnnnnnnnnnnnnnnnnnnnnnnnnnnnnnnnnnnnnnnnnnnnnnnnnnnnnnnnnnnnnnnnnnnnnnnnnnnnnnnnnnnnnnnnnnnnnnnnnnnnnnnnnnnnnnnnnnnnnnnnnnnnnnnnnnnnnnnnnnnnnnnnnnnnnnnnnnnnnnnnnnnnnnnnnnnntactgcatccagcatgctgtagttaactgtgcttgtagaaagaaaggagtgggatatggaagagtactgtgagatgcaattagctttgcatgtgtaaaattgaagcaagarcgtgcgtgtatgtaaagaacatagaaaacttggccaggactgtagtagtaagtagttacaagatgtcagtgatctacttgaacgttttgtaatatccatggtgtctaccaacactrtagtggtgtgtatgtccatagtgaaaaacagaagctcttatataaaaacttaaaaggcagggcagaacraggagaggaagaacaatactcagtggggtgtgtttggtagagttgccttggcttccagctcactatgcacaggtaactggatccaggttaatccagaagagtaagagcattctg

SEQ ID NO: 15023 - DNA, 599 bp, Chicken  19866894220997_2
  misc_feature (1)..(73): n is any nucleotide
nnnnnnnnnnnnnnnnnnnnnnnnnnnnnnnnnnnnnnnnnnnnnnnnnnnnnnnnnnnnnnnnnnnnnnnnntactgcatccagcatgctgtagttaactgtgcttgtagaaagaaaggagtgggatatggaagagtactgtgagatgcaattagctttgcatgtgtaaaattgaagcaagarcgtgcgtgtatgtaaagaacatagaaaacttggccaggactgtagtagtaagtagttacaagatgtcagtgatctacttgaacgttttgtaatatccatggtgtctaccaacactrtagtggtgtgtatgtccatagtgaaaaacagaagctcttatataaaaacttaaaaggcagggcagaacraggagaggaagaacaatactcagtggggtgtgtttggtagagttgccttggcttccagctcactatgcacaggtaactggatccaggttaatccagaagagtaagagcattctgtaatgtttgagttgcagtgggttatgaaagtgtgggcaggctttcaatgggaggatcccagccagttagtctttgaaataatactgtgacttcaatttgtacaataccattttgct

SEQ ID NO: 15024 - DNA, 599 bp, Chicken  19866894220997_3
  misc_feature (1)..(4): n is any nucleotide
nnnntactgcatccagcatgctgtagttaactgtgcttgtagaaagaaaggagtgggatatggaagagtactgtgagatgcaattagctttgcatgtgtaaaattgaagcaagarcgtgcgtgtatgtaaagaacatagaaaacttggccaggactgtagtagtaagtagttacaagatgtcagtgatctacttgaacgttttgtaatatccatggtgtctaccaacactrtagtggtgtgtatgtccatagtgaaaaacagaagctcttatataaaaacttaaaaggcagggcagaacraggagaggaagaacaatactcagtggggtgtgtttggtagagttgccttggcttccagctcactatgcacaggtaactggatccaggttaatccagaagagtaagagcattctgtaatgtttgagttgcagtgggttatgaaagtgtgggcaggctttcaatgggaggatcccagccagttagtctttgaaataatactgtgacttcaatttgtacaataccattttgctgaggactttgttctctttgtttgcaggaaactggaagagatcttggcagacgtactaaaggttgaagtt

SEQ ID NO: 15025 - DNA, 600 bp, Chicken  19866894220998_1
tttctagtcaatatatagtatgtttcaataactggaagtaacacgaaggcctcacagggatcccagacctccatggtgatagcagcaggcacctctgaagcagcactcaagttctattaggacagtgcaggtactgcagactgcttttcaccccaccaggcacagccccatatctcccaagcccagctggcaggacagccgctcccatcgctcccctgctcagtggcaacaaggcagctggagctgccatcccccccaccctgcacatatcccagctgggcacagcccgtcacatccccrgccccaccctcattgctgtgccactgacgcacagccaccaccgcagccttcctccggccctgtgcaggcacccagcagcaagcctgcaggcaaggacactgctcttgccagctcctcccatagccaacacttacagctacccagaagccccacggcagcacggacaaattgacctgctccctataagggatttgtgtaatcgttacratgatccccaggatagttttgagtccccagcactgggttatatgcatggagtgcaggagctgccatccaagcactggcagcaggtagcatctg

SEQ ID NO: 15026 - DNA, 600 bp, Chicken  19866894220998_2
tcgctcccctgctcagtggcaacaaggcagctggagctgccatcccccccaccctgcacatatcccagctgggcacagcccgtcacatccccrgccccaccctcattgctgtgccactgacgcacagccaccaccgcagccttcctccggccctgtgcaggcacccagcagcaagcctgcaggcaaggacactgctcttgccagctcctcccatagccaacacttacagctacccagaagccccacggcagcacggacaaattgacctgctccctataagggatttgtgtaatcgttacratgatccccaggatagttttgagtccccagcactgggttatatgcatggagtgcaggagctgccatccaagcactggcagcaggtagcatctgcagcttgggagatgagtcatggcacgaaattcccctctattttctaggaaccagttaggcagccaatggctgcagcaatgatctgagcgggcaaacacccacacaaaccagcagaaatatcctctttccataaacacgcattgtattaggcatattgactgcagatttcaaagagaagagattgcaatttggaaaatcatcttagga

SEQ ID NO: 15027 - DNA, 600 bp, Chicken  19866894220998_3
gaaatatcctctttccataaacacgcattgtattaggcatattgactgcagatttcaaagagaagagattgcaatttggaaaatcatcttaggaatgggaaagcatcatccagattcatgtgaaggcagcataaatttcattaagatgcattaaggacggaagaggctgggatagataaaccaatttaaatgaattaaatgaatttgaggacactttgagggaggaaagtaaatgtccagcagaactctgacatcccatagcacacggctgtaccgtcagtaactgcatcacctcctgcyaaacctgtctcttaaccaaactttaaccaatctcaacaaccccagcatcaatcttacagtgatgagggattcagctctctttgaccttccagtttctccccatcccacagcactgcctcatttactacaagggacaaaacagtcccacagctgcagggagacaggaggataccagaggcacatgagagctcctacactcttggagcaccgagatacagttttggggttttgtcttctaatttgataacaagagctccaacagctctgtgctggtcgcaaactaataacacttccagatca

SEQ ID NO: 15028 - DNA, 599 bp, Chicken  19866894221018_1
  misc_feature (1)..(225): n is any nucleotide
nnnnnnnnnnnnnnnnnnnnnnnnnnnnnnnnnnnnnnnnnnnnnnnnnnnnnnnnnnnnnnnnnnnnnnnnnnnnnnnnnnnnnnnnnnnnnnnnnnnnnnnnnnnnnnnnnnnnnnnnnnnnnnnnnnnnnnnnnnnnnnnnnnnnnnnnnnnnnnnnnnnnnnnnnnnnnnnnnnnnnnnnnnnnnnnnnnnnnnnnnnnnnnnnnnnnnnnnnnnnnnnnngtagaggaggaattggtaagccctgctgctgggactgcttttccttactagccttcctgtcagttcccttttacygttttacatatggtcacttgataccagcagctgctmtgrgacatctgtatctgtcacatccttctttttgttgcggtgtcygaaagcttcagagaaccacaataataacaataataacaaagcattaaaaaaaccctcctagtagctgagtttcctcccagcctcagttctaaacatgtcactttaatgatgtctaaactacgctgtgcttgatgagcaaaacattactatcttctagccacatttgttttccctgtctcccagagcattatagtcacccggggagaactgcatgttct

SEQ ID NO: 15029 - DNA, 599 bp, Chicken  19866894221018_2
  misc_feature (1)..(189): n is any nucleotide
nnnnnnnnnnnnnnnnnnnnnnnnnnnnnnnnnnnnnnnnnnnnnnnnnnnnnnnnnnnnnnnnnnnnnnnnnnnnnnnnnnnnnnnnnnnnnnnnnnnnnnnnnnnnnnnnnnnnnnnnnnnnnnnnnnnnnnnnnnnnnnnnnnnnnnnnnnnnnnnnnnnnnnnnnnnnnnnnnnnnnnnnnnnnngtagaggaggaattggtaagccctgctgctgggactgcttttccttactagccttcctgtcagttcccttttacygttttacatatggtcacttgataccagcagctgctmtgrgacatctgtatctgtcacatccttctttttgttgcggtgtcygaaagcttcagagaaccacaataataacaataataacaaagcattaaaaaaaccctcctagtagctgagtttcctcccagcctcagttctaaacatgtcactttaatgatgtctaaactacgctgtgcttgatgagcaaaacattactatcttctagccacatttgttttccctgtctcccagagcattatagtcacccggggagaactgcatgttctactttgctgctgtaaagctattatgggtatgaaaag

SEQ ID NO: 15030 - DNA, 599 bp, Chicken  19866894221018_3
  misc_feature (1)..(186): n is any nucleotide
nnnnnnnnnnnnnnnnnnnnnnnnnnnnnnnnnnnnnnnnnnnnnnnnnnnnnnnnnnnnnnnnnnnnnnnnnnnnnnnnnnnnnnnnnnnnnnnnnnnnnnnnnnnnnnnnnnnnnnnnnnnnnnnnnnnnnnnnnnnnnnnnnnnnnnnnnnnnnnnnnnnnnnnnnnnnnnnnnnnnnnnnnngtagaggaggaattggtaagccctgctgctgggactgcttttccttactagccttcctgtcagttcccttttacygttttacatatggtcacttgataccagcagctgctmtgrgacatctgtatctgtcacatccttctttttgttgcggtgtcygaaagcttcagagaaccacaataataacaataataacaaagcattaaaaaaaccctcctagtagctgagtttcctcccagcctcagttctaaacatgtcactttaatgatgtctaaactacgctgtgcttgatgagcaaaacattactatcttctagccacatttgttttccctgtctcccagagcattatagtcacccggggagaactgcatgttctactttgctgctgtaaagctattatgggtatgaaaagttc

SEQ ID NO: 15031 - DNA, 599 bp, Chicken  19866894221018_4
  misc_feature (1)..(144): n is any nucleotide
nnnnnnnnnnnnnnnnnnnnnnnnnnnnnnnnnnnnnnnnnnnnnnnnnnnnnnnnnnnnnnnnnnnnnnnnnnnnnnnnnnnnnnnnnnnnnnnnnnnnnnnnnnnnnnnnnnnnnnnnnnnnnnnnnnnnnnnnnnnnnnnngtagaggaggaattggtaagccctgctgctgggactgcttttccttactagccttcctgtcagttcccttttacygttttacatatggtcacttgataccagcagctgctmtgrgacatctgtatctgtcacatccttctttttgttgcggtgtcygaaagcttcagagaaccacaataataacaataataacaaagcattaaaaaaaccctcctagtagctgagtttcctcccagcctcagttctaaacatgtcactttaatgatgtctaaactacgctgtgcttgatgagcaaaacattactatcttctagccacatttgttttccctgtctcccagagcattatagtcacccggggagaactgcatgttctactttgctgctgtaaagctattatgggtatgaaaagttcccattaatctgctccacacatggatgtttctggataaagttc

SEQ ID NO: 15032 - DNA, 600 bp, Chicken  19866894221028_1
tcacttgcaaaattgttaattagggcactttggtagttcatttgcttttgtattgatgtgctgagtccaacgagagaaattgggtttgtatatggtatttacagccctcaggaataaaggaaataaagtgtaaatcagagctggtttctgaatggtgctggtgccttcactgaggggctggcagctatgcaaggtgttgtccactagcagtgcattttcatgtgtaattaagcttggtagttatattttggcttcatttttctttgtatgtgtagcagtggtcttgaataatgacttaayaggatttttttaaagaagtttggtgtacagagtttttaaaactatgttaaaacagatcgtcttgcaaaagcaaggagctggatgttcattttagccctggaagaaggcgttatctcctygaacgtatactgcagggctatatggagctgcagttcatggcctgcagtcatcagtgcctgggaaatcacaaaaacagctcctggtgtgtgctctaagtccaccgtgcctctcctgcagaacttaaacctttaaggtagtggcattttgtacatgggaagggcaaaatcgtgctgattgtcc

SEQ ID NO: 15033 - DNA, 600 bp, Chicken  19866894221028_2
gaaataaagtgtaaatcagagctggtttctgaatggtgctggtgccttcactgaggggctggcagctatgcaaggtgttgtccactagcagtgcattttcatgtgtaattaagcttggtagttatattttggcttcatttttctttgtatgtgtagcagtggtcttgaataatgacttaayaggatttttttaaagaagtttggtgtacagagtttttaaaactatgttaaaacagatcgtcttgcaaaagcaaggagctggatgttcattttagccctggaagaaggcgttatctcctygaacgtatactgcagggctatatggagctgcagttcatggcctgcagtcatcagtgcctgggaaatcacaaaaacagctcctggtgtgtgctctaagtccaccgtgcctctcctgcagaacttaaacctttaaggtagtggcattttgtacatgggaagggcaaaatcgtgctgattgtccacctgcattttttgtgggttgtaattgcatggattaatcctggtgctgtttcataatagacttgctggatgcaaagcttgctatttgaattggctgcaggaaggctgcattgtgtacag

SEQ ID NO: 15034 - DNA, 600 bp, Chicken  19866894221041_1
aaatgtcatattggcatggagaaaatatagaatgccgtgtataagcttgtggaataatgtggtctcattacagttgcttaacaagttattgcacatcagacgaagtactgtaatagtctgtccatgcacttgagcttgcccagagtgaggtaaacatccatatgctccggagattacttgttaaatgaagcattatgttctagtactgagcagtctctgctgtcattccattatttgctgctttaaagagaaatttactctccataagagtaattttaacaacatggttttctctgtgtrtatcttggatatttttcaattgctcgcacagattgtagacaaacacatacatatatgtgcacacagcattttcctactataattaggtatttttggcactttccaatggcagaatcaaatccaaattgtagctacctttggaaaatcttaaaagtagctgtaattgaaaaagaggtgtgacatttctgtattaaaacttaatgaggattttttttttccaaaaagtgtaatgttttccatcactgttttaatattaatttttgataaaaatgccacgggactttttaatatgtgagattt

SEQ ID NO: 15035 - DNA, 600 bp, Chicken  19866894221041_2
aaacataaatcttcacaattttactgctctcatctgtatgttgttgtttcttacaatgctcacaccttgagatgtagagattaacagatcttttaactgcatatccatataatatgtttatagcatatatcttaaaatacatttttttaaattatttactctaaaatctttacctattttgagaaaagaagattttaaaagtgtattctcaaattgtgcaaaagtaacactgttctctcatcccccttacttcctttataatgagattgaaagttatggatatggggaaaaaaagatttwaaaaaaataaattagttattttactgcaatgtgggagattcagagggccttgtaagggagagaggtgacataactagtccagtggagggttctgggatatttttttccatcctactgcctgaaggtgttcactaagaagaaggcatgggagcttttctycaagtagtgttgagacactgttggcagtgacactctctgattttcccaaccatagacttgccaagtttggcaaaaactatttttggttcagtgttaaaagcttgtcctgggttctgagcaaagattcagttatgaaacctt

SEQ ID NO: 15036 - DNA, 600 bp, Chicken  19866894221041_3
tctaaaatctttacctattttgagaaaagaagattttaaaagtgtattctcaaattgtgcaaaagtaacactgttctctcatcccccttacttcctttataatgagattgaaagttatggatatggggaaaaaaagatttwaaaaaaataaattagttattttactgcaatgtgggagattcagagggccttgtaagggagagaggtgacataactagtccagtggagggttctgggatatttttttccatcctactgcctgaaggtgttcactaagaagaaggcatgggagcttttctycaagtagtgttgagacactgttggcagtgacactctctgattttcccaaccatagacttgccaagtttggcaaaaactatttttggttcagtgttaaaagcttgtcctgggttctgagcaaagattcagttatgaaaccttacatttcatcttgtgcaataacaatagcaagatattttcctctggcagcaaacactcattgaaactgaccactactatcaccctaattttttgtaatcaattttctcttaatttcccagccaatctacgcatctattgcataatgtaatatagcatgca

SEQ ID NO: 15037 - DNA, 600 bp, Chicken  19866894221043_1
catgagagcaggtaagagcagctcaagcatatgagttatgctataactggttcaactactgattgctatgagttctgtttatgcagcattcatgtaaatactctaaaccaagacttttatgagttctgctgtgtaatgtgctgggtggtgattttcacgtgcacgatgtaactgtaaagtaaagtgtgtgcttaaatcctgctgagtgctgggggtgcaaagaaatacccaaagttaggggagaggtgcagctctttgctgacccgcagccgatcctggatgcactttgtttcaggctcytgtgtccagctctgtgtttggcttcacaatgcaaggaggctgagaaggtttggggatggttgaggattgcccagcagtgtgtgtgcattgtgtctgtgggctgtgccccacggaaaactgcttctagcttgtgtgagggtgtaacagctgatctggcagcacaaggacgctcagccttgccagcagcctgccctgggcttgtctgagtcttgcataaaataaaatatcatcctcttgtgactcagtttatcctcccaataatgtttatcttatttgctccagcattctttctgttgagta

SEQ ID NO: 15038 - DNA, 599 bp, Chicken  19866894221045_1
  misc_feature (1)..(125): n is any nucleotide
nnnnnnnnnnnnnnnnnnnnnnnnnnnnnnnnnnnnnnnnnnnnnnnnnnnnnnnnnnnnnnnnnnnnnnnnnnnnnnnnnnnnnnnnnnnnnnnnnnnnnnnnnnnnnnnnnnnnnnnnnnnnnatactttcaatagccatactcccatgaaaagtttatcaagaacagtttgatcaatagataaatcaccccagaagtgataaaactagaaagcaggaaagtaaactcagcatacaagaacatcttgttacttcaggctatgctgtgcaatccagtaatatgacttaaattcatacayagagatcagaagtacaattaattaactagattagaaggcaagttgcccatatgaaatgttaaaagacacatatgcayttcatgttaaggcacagggtttttacctgcagaactagcctactctcatcgtagcaggtcaattttgtagacagytgaccaacgtaaggaccaaattgtgttctcttctgtattactttctttgcaaatactccaaggactgtaaataaaaaagaccagactaatattaatgtggacacaatgagctattccttgtacagttacatttatgaaaatggattt

SEQ ID NO: 15039 - DNA, 599 bp, Chicken  19866894221045_2
  misc_feature (1)..(48): n is any nucleotide
nnnnnnnnnnnnnnnnnnnnnnnnnnnnnnnnnnnnnnnnnnnnnnnnatactttcaatagccatactcccatgaaaagtttatcaagaacagtttgatcaatagataaatcaccccagaagtgataaaactagaaagcaggaaagtaaactcagcatacaagaacatcttgttacttcaggctatgctgtgcaatccagtaatatgacttaaattcatacayagagatcagaagtacaattaattaactagattagaaggcaagttgcccatatgaaatgttaaaagacacatatgcayttcatgttaaggcacagggtttttacctgcagaactagcctactctcatcgtagcaggtcaattttgtagacagytgaccaacgtaaggaccaaattgtgttctcttctgtattactttctttgcaaatactccaaggactgtaaataaaaaagaccagactaatattaatgtggacacaatgagctattccttgtacagttacatttatgaaaatggatttaaacatgatagtcctgaatgcattaattcttcttcaacatraatataccaggtaaaccattcaaagcgttaaaagtc

SEQ ID NO: 15040 - DNA, 600 bp, Chicken  19866894221045_3
aaagtttatcaagaacagtttgatcaatagataaatcaccccagaagtgataaaactagaaagcaggaaagtaaactcagcatacaagaacatcttgttacttcaggctatgctgtgcaatccagtaatatgacttaaattcatacayagagatcagaagtacaattaattaactagattagaaggcaagttgcccatatgaaatgttaaaagacacatatgcayttcatgttaaggcacagggtttttacctgcagaactagcctactctcatcgtagcaggtcaattttgtagacagytgaccaacgtaaggaccaaattgtgttctcttctgtattactttctttgcaaatactccaaggactgtaaataaaaaagaccagactaatattaatgtggacacaatgagctattccttgtacagttacatttatgaaaatggatttaaacatgatagtcctgaatgcattaattcttcttcaacatraatataccaggtaaaccattcaaagcgttaaaagtctgaaaacgatccaagtctttaaagagactttgtaaaaaaatggaacttacattgaatacaatggacaaaattgctt

SEQ ID NO: 15041 - DNA, 600 bp, Chicken  19866894221045_4
agttgcccatatgaaatgttaaaagacacatatgcayttcatgttaaggcacagggtttttacctgcagaactagcctactctcatcgtagcaggtcaattttgtagacagytgaccaacgtaaggaccaaattgtgttctcttctgtattactttctttgcaaatactccaaggactgtaaataaaaaagaccagactaatattaatgtggacacaatgagctattccttgtacagttacatttatgaaaatggatttaaacatgatagtcctgaatgcattaattcttcttcaacatraatataccaggtaaaccattcaaagcgttaaaagtctgaaaacgatccaagtctttaaagagactttgtaaaaaaatggaacttacattgaatacaatggacaaaattgcttaaaatccacarcaggacattaacatgcaatgctcaaatgtgctgattgtcttcagtgtaaaagatgttatcacagcactatgcttatagttgagaaagttgtcatgtcccagaattagagaagatctataaaaacacaaaattccctgccttactcatctcgttacctcccagctataaccaatggtg

SEQ ID NO: 15042 - DNA, 600 bp, Chicken  19866894221045_5
aggaccaaattgtgttctcttctgtattactttctttgcaaatactccaaggactgtaaataaaaaagaccagactaatattaatgtggacacaatgagctattccttgtacagttacatttatgaaaatggatttaaacatgatagtcctgaatgcattaattcttcttcaacatraatataccaggtaaaccattcaaagcgttaaaagtctgaaaacgatccaagtctttaaagagactttgtaaaaaaatggaacttacattgaatacaatggacaaaattgcttaaaatccacarcaggacattaacatgcaatgctcaaatgtgctgattgtcttcagtgtaaaagatgttatcacagcactatgcttatagttgagaaagttgtcatgtcccagaattagagaagatctataaaaacacaaaattccctgccttactcatctcgttacctcccagctataaccaatggtgcagcgtaacaggcatcttgctattccctttctgaaacgtcatctaggcagaactaattttacagcacaccgagaatgtagctcacttgctcaagcttgagcattcaaactttctataacatga

SEQ ID NO: 15043 - DNA, 600 bp, Chicken  19866894221046_1
agcactgctctgccttctgccctgtatccaaacttctgttcaaatcagcaaacgggggctgggagcatcctgcagggtgggatcactgatgtggggctcagggctgtgctttgggctctcaggtatgggacctgaagacctctgcatcctgagcaaacctcccagtttggggcaatgtgaataaacctaacccagctcccaccggcccctgcagtgctgcaccagcagacgttgcaatgagaccctgttctgcaagtgctggggccagcagcatctgctcatttctcctcatagtgctgkttttttttctcttttctcacttttgctgcagtcacattgcctcgccactgccgcggcagaaaggaagaagggaaagttaaagccacccacgtcagcactgccctcaccccagcacctttggtgacagcaggactgcattgccccatggggatgggcacccgtggggaccgcccccaaccctgtccccatctcatggcacacacagcatcacagagtcacaggatcatagaggcaggaagggacctctgcacatcccccagtccaacccccacttgaaagtctctgggctctctccagcag

SEQ ID NO: 15044 - DNA, 600 bp, Chicken  19866894221051_1
gccagaacagaacaaaatgaatttagaagtgtggtaagccccttttacttctattaactttgtttgacattcatttaatcatcactcttactacttgtcatcaccaccttagttatttgacctgccttagtacttcagatacaacctctcttaagttgaattttcccattaggaaaaacactgaatttcagctctgagatcaaagtgcattctgagaccacagtttcacattacaaattcttcactgttaacgatttaggaattcctaatcagtagagactgtgtgaataagaagataargtgtcagtgtactccttccaataartcactcacacatattgtgagmccttccagtccttgtctgttcattaccagtccttaccacatcactacagagcagacctgaatgttttacaatgtttctagattcaagctaccaccttaaattkaagatgaggtaattaatttaacttttaccccttaaccagaccccatttgtggaaaattaggtcatatttctcctacagtgaggtagaaatactgtgcagttatacagaatgtaataaagragagatgaccgagttggatatcactgatatt

SEQ ID NO: 15045 - DNA, 600 bp, Chicken  19866894221051_2
gaagtgtggtaagccccttttacttctattaactttgtttgacattcatttaatcatcactcttactacttgtcatcaccaccttagttatttgacctgccttagtacttcagatacaacctctcttaagttgaattttcccattaggaaaaacactgaatttcagctctgagatcaaagtgcattctgagaccacagtttcacattacaaattcttcactgttaacgatttaggaattcctaatcagtagagactgtgtgaataagaagataargtgtcagtgtactccttccaataartcactcacacatattgtgagmccttccagtccttgtctgttcattaccagtccttaccacatcactacagagcagacctgaatgttttacaatgtttctagattcaagctaccaccttaaattkaagatgaggtaattaatttaacttttaccccttaaccagaccccatttgtggaaaattaggtcatatttctcctacagtgaggtagaaatactgtgcagttatacagaatgtaataaagragagatgaccgagttggatatcactgatattagatgcagtgctagtgaaaaacacc

SEQ ID NO: 15046 - DNA, 600 bp, Chicken  19866894221051_3
acttctattaactttgtttgacattcatttaatcatcactcttactacttgtcatcaccaccttagttatttgacctgccttagtacttcagatacaacctctcttaagttgaattttcccattaggaaaaacactgaatttcagctctgagatcaaagtgcattctgagaccacagtttcacattacaaattcttcactgttaacgatttaggaattcctaatcagtagagactgtgtgaataagaagataargtgtcagtgtactccttccaataartcactcacacatattgtgagmccttccagtccttgtctgttcattaccagtccttaccacatcactacagagcagacctgaatgttttacaatgtttctagattcaagctaccaccttaaattkaagatgaggtaattaatttaacttttaccccttaaccagaccccatttgtggaaaattaggtcatatttctcctacagtgaggtagaaatactgtgcagttatacagaatgtaataaagragagatgaccgagttggatatcactgatattagatgcagtgctagtgaaaaacacccaaaaacgttgttgtgtatca

SEQ ID NO: 15047 - DNA, 600 bp, Chicken  19866894221051_4
cttaagttgaattttcccattaggaaaaacactgaatttcagctctgagatcaaagtgcattctgagaccacagtttcacattacaaattcttcactgttaacgatttaggaattcctaatcagtagagactgtgtgaataagaagataargtgtcagtgtactccttccaataartcactcacacatattgtgagmccttccagtccttgtctgttcattaccagtccttaccacatcactacagagcagacctgaatgttttacaatgtttctagattcaagctaccaccttaaattkaagatgaggtaattaatttaacttttaccccttaaccagaccccatttgtggaaaattaggtcatatttctcctacagtgaggtagaaatactgtgcagttatacagaatgtaataaagragagatgaccgagttggatatcactgatattagatgcagtgctagtgaaaaacacccaaaaacgttgttgtgtatcacaacacagagtccctsctcgtacaagttattttctggaatgtaagtggataacattcagaatgtatgttttagtttttgatgctgctgcatggtattacacta

SEQ ID NO: 15048 - DNA, 600 bp, Chicken  19866894221051_5
tcagtagagactgtgtgaataagaagataargtgtcagtgtactccttccaataartcactcacacatattgtgagmccttccagtccttgtctgttcattaccagtccttaccacatcactacagagcagacctgaatgttttacaatgtttctagattcaagctaccaccttaaattkaagatgaggtaattaatttaacttttaccccttaaccagaccccatttgtggaaaattaggtcatatttctcctacagtgaggtagaaatactgtgcagttatacagaatgtaataaagragagatgaccgagttggatatcactgatattagatgcagtgctagtgaaaaacacccaaaaacgttgttgtgtatcacaacacagagtccctsctcgtacaagttattttctggaatgtaagtggataacattcagaatgtatgttttagtttttgatgctgctgcatggtattacactacaaagaatgataatgaaatggaatacaattgccctgatgttcaaagaaagtcagaaaatgaatagaagtcacatactcataccatctcaagtggcttcccctttcttcctgacacagtac

SEQ ID NO: 15049 - DNA, 579 bp, Chicken  19866894221051_6
tgttcattaccagtccttaccacatcactacagagcagacctgaatgttttacaatgtttctagattcaagctaccaccttaaattkaagatgaggtaattaatttaacttttaccccttaaccagaccccatttgtggaaaattaggtcatatttctcctacagtgaggtagaaatactgtgcagttatacagaatgtaataaagragagatgaccgagttggatatcactgatattagatgcagtgctagtgaaaaacacccaaaaacgttgttgtgtatcacaacacagagtccctsctcgtacaagttattttctggaatgtaagtggataacattcagaatgtatgttttagtttttgatgctgctgcatggtattacactacaaagaatgataatgaaatggaatacaattgccctgatgttcaaagaaagtcagaaaatgaatagaagtcacatactcataccatctcaagtggcttcccctttcttcctgacacagtactcactacttcatgcctaagaaaagcagctccagccatttatgaacagacaacaaacaacttgttgcttattg

SEQ ID NO: 15050 - DNA, 600 bp, Chicken  19866894221056_1
gaaagaaaaaaaagcaaaaaaaataaaaaaaagcaaaacaaaacaccaagcaatattaaatagtttactgaaaactaggttatttatgttttttgagtaaaggtgcagatctaatacaaataattattttactgaaaaatcattccagcccttacatgctcttactaggaactgaaaaataaaagcagggccaggtctgaatgtgtatcatataagatggaaatcatatgccttcttctgtttcttttcaaagtatttatctcagagatgaataatcagtaattgcttcatatgagatayatacagagtgaaacttaattagtaatttaaatgtacaccaaattggaacattttgaatcccaattaaaattaatggctgcaattaattcaaacttattagccaccagcttgttcccagttccagctgctgacattttcaagtaaatgagacagtgtttggtgaatccatgtcataaacatcaccatcaagggatgctgtcagctgttaatttgtcagaaggatgttaaaacctttccatctgccttacaattgcctttatgaggattctgccaactacaaaagctgtcagatcaccaata

SEQ ID NO: 15051 - DNA, 600 bp, Chicken  19866894221058_1
aaaatggagtacctgtatttctaaaaactgtttttgaatctttttttttttccattggttgtttttgtaatgtttcttccagttgttacattatttaatgctgtaaattcatggggactggtcatttgtgtgttttcactgagccagattatactaagaaatacaaatatgctgagaactttgtcgtccttacttttgcactagaatgaatgcaatattaaaagagaaatcagaagctgttaaaatcgaagatgacttgctaatgtgtcagctattttattttctgactatattaaaggraataattcttgggatttttttgtgtagcattttctgaaagcgtaacagtctcctgctgctaaaactggttaaaaaaaaaatactatttgattactcagtagctaacattaaagctattacgagtgaattcaattcacactgaagttaatggtagagttaaattggccgttatctgaatgatgacaaacataattacaggtactgcttttttttctctgacgtccagttgtcataactaactcattataggaagagctcaccatcataatgtaactccaccaagtctgtttttcttttttc

SEQ ID NO: 15052 - DNA, 600 bp, Chicken  19866894221062_1
gtgtttggttttgggggccacatgctgctgacaccattacctttgctttcagcctaaggtcagcgccctgggagtggttcagggcccctccaaggacaaggtggccatcctgacagtggatgaatgcgacgcctctgtggccctgcagtttggcagtgagattgggaactactcgtgtgctgcagaaggagtgcagactagctccaagaagtgagttcctcactggggtgctgctgtggtggggagaggagcaggacacctgtgtccccacatggaccctgtccttcacgcctgggatgrcttgactccaggtgtcacctctgaatgtctgcttcccagcctggccagctagaggtcacagggcttctctcctcgcaggtccttggacctcacgggtcccttgctcctcggaggagtccccaacctgccagaaaacttcccygtctcccaccgggactttgtgggatgcatgagagatctgtacatcgacaacaaacgcatcgacctggcctcctacattgccaacaatggaaccactgcaggtaccaatgcctctgccctcccctgccctgggagcagccccagatctccctgcacctg

SEQ ID NO: 15053 - DNA, 507 bp, Chicken  19866894221062_2
ctgcagtttggcagtgagattgggaactactcgtgtgctgcagaaggagtgcagactagctccaagaagtgagttcctcactggggtgctgctgtggtggggagaggagcaggacacctgtgtccccacatggaccctgtccttcacgcctgggatgrcttgactccaggtgtcacctctgaatgtctgcttcccagcctggccagctagaggtcacagggcttctctcctcgcaggtccttggacctcacgggtcccttgctcctcggaggagtccccaacctgccagaaaacttcccygtctcccaccgggactttgtgggatgcatgagagatctgtacatcgacaacaaacgcatcgacctggcctcctacattgccaacaatggaaccactgcaggtaccaatgcctctgccctcccctgccctgggagcagccccagatctccctgcacctgcactggggaagggctggatgccaacaatgcctgccttgcaggccggagg

SEQ ID NO: 15054 - DNA, 600 bp, Chicken  19866894221063_1
ttttctggaagggaccctgggcaggattccacaagtctctggactccttaggcatgcctttcatttcaccaatattcaagcacggcgaagccaacaaaaagagggtcctcaaagtattggtgctgcagccacaggcagaaaccttacaggactccacaaacccaatggggctgtccaacagcagccaacagagccacggccgtgagctcagctgcaccagcacacctgggcttctgggcaccatgggacagcagtccctctgcttcaccagcacaggaatcccagccctgccgtgcagcmggatccacctgcagtttgcttcctatgttgttactgaccacacaaacaaattaaatccaatttcatatgctccatataaaacatttattgttatgatttggaactaagcagataatgcttaagaacatttgttactctgtgaggacaaccccgctccaagaagttgctgcaggagcaaacacaggagcacgataagcaaaatctctcttttaataaatcttacttctcaaataatagctgcagtagcccagagtcttttctctttcagctgggatctttctcttatgtgaagggtaagaa

SEQ ID NO: 15055 - DNA, 600 bp, Chicken  19866894221072_1
acttcaggtgtgacctcatgcagcccccaacacgtactggtgcatatgaggctactcctccccacgcacagaactttgcacttcttgttgaacttcatgtggcttctgtcagcccatttctctatcttgtcaaggtccttctagacggcatcacaaccctctgttctatcagccactcctcccagctgggtgttgtcagcaaactgtctgaccttgtagcactgatcaccctcctccaagaccaactgttcaaccagttttcaatacagctgcctgctcatctacccacgctccatcagyctcactgtgaggatcttatgggagaaggtactgatagtcttaaagaagataaaatatactctaaaatcacacagcaatctcaccgaattaaaggcataagactgccctaaactcagtatgtttcagtactttgaactagtgacaaggtaatacaaatgataagaacaatgcatcacaaaatatatcaagatcatattcctaaaagaacccgttatttctgtattgcatactatgccaataagcacgttctgcattcagtatgtcactgcttttgcaaatcaggagggatctcattccaca

SEQ ID NO: 15056 - DNA, 600 bp, Chicken  19866894221072_2
gtaatacaaatgataagaacaatgcatcacaaaatatatcaagatcatattcctaaaagaacccgttatttctgtattgcatactatgccaataagcacgttctgcattcagtatgtcactgcttttgcaaatcaggagggatctcattccacacccttcagctgtcagccccattctgaaaaggagagccaatgcagcatctggaatctaattaaagatcagcaggtttctcctttataaggttcacctgagaagcaataggaaaccgatttgctgccactcagcacttcagccttcasaatcttgaaggctcccatgacttgatagagaagctttatcagcattcacattttttaacgtgtgttttctgctatttatatgcaaccttgacttaaatagcctaacacgagaccaacaatttccactgtattttaattaggttatagaaagaataaagaaaagaataattgctctaaaaagcacacgcaatgtacgtcattagatgaaatcaagaacacttaactgactctcatcccacaaggactgactggtaaacataagtaccataatgctttgcatccaaaatcacttgcttctaa

SEQ ID NO: 15057 - DNA, 599 bp, Chicken  19866894221078_1
  misc_feature (1)..(31): n is any nucleotide
nnnnnnnnnnnnnnnnnnnnnnnnnnnnnnntctgggtatgtgccttattaacctggttttccagagccatcatttcagtgttgctgcttttacctaaggacacggatgtcactttattgtgcaagctgagtagatttgatttcttgcagatgcattattccctcagttatgcaatggtagctgccattacttaagatgaagcaataacaaaatattcaagaaagttatcgtgtactttacaacttgttgaaaccagaacagatttccaccccaaaagttgggagcacatttcctatgargaaacagtacacttttctacttatttgcaagcctttcagtagcagtgctctggggctgtttctccttaggggctgaaatgacattttggaaactttttgtggtgtgcagtgtttgattgtctaatcaagatgggcatcagtgtgatgcttctaaattctagctgtgggggttgtgaagttgcacttaaaacttcacagcatggcagctgagtgcctcagacctggggtgcagtgtcaggcaaagccagctaagatcttgttagaaaaattggtgaagtagcatttagatggatggaact

SEQ ID NO: 15058 - DNA, 600 bp, Chicken  19866894221097_1
cctggaaacaactcattttctcagttttctgtttcacttatctggttttgggctatgtgatggaggagccatcagtggccctaccctgaatgtgggggaacgcggccatgtagagcagagcccagcggatggcggttgctgttgtctctgtcccagtcaagaagaggtccagtgtggagcagagcagattttcctcatggaaataggagttggtgtcacccttacacttgcataaaaaaagacagtggaagtgcttgttagggaagagatgctttcaaaaactcaatcaaaatacccaarcaccctcctgcaaattctcataggaacataaataagttccctgagagccctcctataccacttgacagaatgagaaatagaagataaagtgtaaatacttccaaatgaaaaaaatatatatatataaaatctatgtgttttcaaagcgatcagactcctgctgctgctaaaaaatctgacatgaaagaggtaagagaggaaaaagcccatctaacaaagttgccttgagtcttgtctgctcatttttggggttaagctttaggtgaccataggtatttcactctcaccttttctatttcc

SEQ ID NO: 15059 - DNA, 600 bp, Chicken  19866894221109_1
tgaccaatgtgtcactacacatcatgggtaatctggcttagtcatagcagtactggtaaaaggcacaaaaccagataacagaagtcctttgggcaggtttctgttcactctgtggcctgcctggtttatgccacccaactgtacctcatccttaggaagctctttcttgcatcccccttcatttcccctccctggtcctccaagacataccttaaagcatggccaaaaaatactttcaagcttggattgtttcacacagagcagttgagggcatggctccacatacaggtcagcaggcasagaggggcaggcagcagtcaccagcagggaagagcacgcagcagcgtcaagggagygggatctaatacaagattaggcagtagtaaatcccctgcagtttggtactacagtgtgctggtagatggcacagatagaaggtggttaagccatgaatctgaatcacgaatgcacaagtaagagaaaaaagggaccaaaaaaaacccccaacaacaacaacaaaaaacccaccataaaaaatgaaaggrcaaagtgagttcagggacatgacactagaaacgagagaaaaaagctaacagtagg

SEQ ID NO: 15060 - DNA, 600 bp, Chicken  19866894221109_2
taaaaggcacaaaaccagataacagaagtcctttgggcaggtttctgttcactctgtggcctgcctggtttatgccacccaactgtacctcatccttaggaagctctttcttgcatcccccttcatttcccctccctggtcctccaagacataccttaaagcatggccaaaaaatactttcaagcttggattgtttcacacagagcagttgagggcatggctccacatacaggtcagcaggcasagaggggcaggcagcagtcaccagcagggaagagcacgcagcagcgtcaagggagygggatctaatacaagattaggcagtagtaaatcccctgcagtttggtactacagtgtgctggtagatggcacagatagaaggtggttaagccatgaatctgaatcacgaatgcacaagtaagagaaaaaagggaccaaaaaaaacccccaacaacaacaacaaaaaacccaccataaaaaatgaaaggrcaaagtgagttcagggacatgacactagaaacgagagaaaaaagctaacagtagggcaaagggcttcatggaaaaggcttgaatgtgagcacaggtaggctcctgctgttt

SEQ ID NO: 15061 - DNA, 600 bp, Chicken  19866894221109_3
attgtttcacacagagcagttgagggcatggctccacatacaggtcagcaggcasagaggggcaggcagcagtcaccagcagggaagagcacgcagcagcgtcaagggagygggatctaatacaagattaggcagtagtaaatcccctgcagtttggtactacagtgtgctggtagatggcacagatagaaggtggttaagccatgaatctgaatcacgaatgcacaagtaagagaaaaaagggaccaaaaaaaacccccaacaacaacaacaaaaaacccaccataaaaaatgaaaggrcaaagtgagttcagggacatgacactagaaacgagagaaaaaagctaacagtagggcaaagggcttcatggaaaaggcttgaatgtgagcacaggtaggctcctgctgtttgcctggatgttctttgctgtgttcagaaaaacaagaactttgtacgtgtcttgttaaatcgagggactctataaagtctgttgcagtgtaactggtgccagaaacatgagtaggggtgactgctaggatcacacaggactggccataaagagrgggtggtgaaaaggagaccagggcctaccaagcctt

SEQ ID NO: 15062 - DNA, 600 bp, Chicken  19866894221109_4
acaacaacaaaaaacccaccataaaaaatgaaaggrcaaagtgagttcagggacatgacactagaaacgagagaaaaaagctaacagtagggcaaagggcttcatggaaaaggcttgaatgtgagcacaggtaggctcctgctgtttgcctggatgttctttgctgtgttcagaaaaacaagaactttgtacgtgtcttgttaaatcgagggactctataaagtctgttgcagtgtaactggtgccagaaacatgagtaggggtgactgctaggatcacacaggactggccataaagagrgggtggtgaaaaggagaccagggcctaccaagccttaagagatgataacaaaaaagcccaaacaaaaactgttgattttcctagattcaagacttgctattgtatatttgcacatatcagcagctagaatatataactgaaacgtttatgtctttcttgcatgttgataatgaaggaaaaccttacccaggctcaaaaagcaatgccttgggttaatctggaaagcactgcttgaacctgccatcactttggaaatgggcaacaaactcactttcctccggagagctataaaaccaagca

SEQ ID NO: 15063 - DNA, 600 bp, Chicken  19866894221109_5
tgttcgcttctctcacgttgctgttacgctcttgaactatctcaggtcgagcaactcgaagacggcatgttctgtaggcagatggctcctggcaggcgctcagtacagctgtgagtgcgacgctccgtgccaaacatgagtctgtaatttctactactctccaactgtcagctttttgaggacaccgtttaatcatttcccgagaagacaaagggtgcccgtcagacctaacgatacttcacttgcatgcacatcgatgtgtgggaggctgttataacgcacccttggaaaaagagcatytctaattcaaaatgacggcagtgatactgctggaggaatgtgcagtcagctcggagagatcccacaccctttgtcaaacaagggggagttttcttctgacttcattttctcagccctctaagtgggagagtgtttctcccctcaggagaaatgagaagtgcgttagttttcattaacttttaatttgaagcccgcgtaactgaatgaagccactgtggcaatctggaaacggtatctgaatgccctgttgaatcagagataaatccttctctctgaaaagcacatatgaaaaaggtgctt

SEQ ID NO: 15064 - DNA, 600 bp, Chicken  19866894221126_1
gtggtaaattatgcagtaattacatacacacaagagcaattgaagatatttcactaaagacatgaatacctgaaggaacagttgaattttaaagaaacagtgagattcatgtgtttgggaaggctctgtacacagctaaattaatgcagtttgaacagatacttaattgatacaaccctttaatagacaaaaaggtgaattcaaatacgtaattttcccatcagagtttaacaagtgctctggggacagtcatcactgtcctccaaaatccaggagtcctcaggaacatgttctactccytaattccaagaggcagacgtaaatttgtttacttaaccacgtatgtattcatttacaaggccatctattacttagtctcagtgaagagccagagctatcagtaagctatcttgcaagttattctattcatatgaaggcaaatatgagtaaggccatttgagtctgaaaagccttgagcccacatcagatctggaaagttggaatgtgatccagaggctgcatctaattaattccaaagtgtttttacataattacactaaataatacaactgtaattaacacacagtctacacactacat

SEQ ID NO: 15065 - DNA, 600 bp, Chicken  19866894221133_1
agaccctgtaggagttgtggaatccaactccttcatttttaggttctttaattattacaaacaacttttgaagtaggatgatgtcatgtgtgcatgcatgtgtggcaagtgtgtgtgtgcatgtgcatacgaagggagaaaggacgatcagggacttctggagacaagtcatctaacagtggtttttggtgtcctcttatggaatgctgtgtcaaaataagctgtcttctaacagatcagtaagaggttttgctggtttttctgctttggcttttaatgccgcatctgctggctgagaaygtttgagaagataaggctaaaagcactaaaactattttcctaaaacaatgagttttttgtttttctctaagtatactgttacaaattagacctttttgacctgtttgcaaccaggagttttgaggttgaaagttcaatttctcatagtgaacttaagtaataatgcattttattatgcatttttttcttcctttcaactttattttataggttgaatttaaataygttactttttacctttctaggtgccactgccgaggagataaatcagcactgggaatggctggaacaaaacttgct

SEQ ID NO: 15066 - DNA, 539 bp, Chicken  19866894221133_2
cttctaacagatcagtaagaggttttgctggtttttctgctttggcttttaatgccgcatctgctggctgagaaygtttgagaagataaggctaaaagcactaaaactattttcctaaaacaatgagttttttgtttttctctaagtatactgttacaaattagacctttttgacctgtttgcaaccaggagttttgaggttgaaagttcaatttctcatagtgaacttaagtaataatgcattttattatgcatttttttcttcctttcaactttattttataggttgaatttaaataygttactttttacctttctaggtgccactgccgaggagataaatcagcactgggaatggctggaacaaaacttgctccatactttgtctgtttttgacaataaagaagatattgttagttttgtcaaggggaaagtaaaggtagggaatctgtcttacttttgtccaattagttgcaggaagttgttatcattcatatttgtttttgttcatctttaatactattttttagttgagtgtg

SEQ ID NO: 15067 - DNA, 600 bp, Chicken  19866894221135_1
agccaatttttcttcctttggttagttccatttgattgttccgagcatcagagcacccagagatgagcccttttcttcctggagggaccacagttcttcccctcatcccagattccagttttgggctaagatgttgggtcagaccttggctgagaacgtcaggatctggccttttccttatgctttacatctcgcttcctcagtcagtgcttgcagagttgcttccatcccgtggcgttgcttccatcccgtggcgttgcttccattactgttttgctgttccctcagattctcccatcrtgggtgtgtgtacctgtgtgtgcacactgcatggctgggagtatggcacagaaagccaagcctgtcctgctgtggctttctagggttccatggggctgcatcgtgatgcttctgtaccagcctaaaatctcagatgcttttgctccgcctgtggctcattttatttagtctcaatagccatcctggtcccctcacccttctgctctctgtgtcttgggctgtttttcccacaggcagtgttaccctgcattttgccctcctgttgtttcttactttgctcaacacctgtttcaaactgat

SEQ ID NO: 15068 - DNA, 599 bp, Chicken  19866894221143_1
  misc_feature (1)..(53): n is any nucleotide
nnnnnnnnnnnnnnnnnnnnnnnnnnnnnnnnnnnnnnnnnnnnnnnnnnnnncctggaaggctggagcgagtctgcagaaccctgcacagaggcgggcagcgcaggcggctgccgtgacggtgggttcctcagatcggctctcctggtagaagtgggcagtccaacacaggaaagcttttaacttccacaaccacgtccattttaaagcctgtttaaaaggagttttaaaggaacagctgggagtgtggtgcttccagacagcacggcttgggaaggacaaaagctgtcaggattagcrgtgtgagtgagaactgtccaggttaatttcttcacgagagaaggagcaggcagaataagttctgatgaaacgtggaaccacaagatacgctaaaaaggtcctgatggattgacagccataacgtaaagcactctgaaaactaagcctttaacgggctggcactcgtcctgtttttgtagttaatggataatcaatagcagaataatagcaatgcaagtcatggtcgagaaagtgatgttagagaagagctggatgcagcgcgtgcctcggggcggcccagggcagctctgctggtggga

SEQ ID NO: 15069 - DNA, 599 bp, Chicken  19866894221147_1
  misc_feature (1)..(136): n is any nucleotide
nnnnnnnnnnnnnnnnnnnnnnnnnnnnnnnnnnnnnnnnnnnnnnnnnnnnnnnnnnnnnnnnnnnnnnnnnnnnnnnnnnnnnnnnnnnnnnnnnnnnnnnnnnnnnnnnnnnnnnnnnnnnnnnnnnnnnnnnacttttctctagagttgtggaagctgtaactgaaagctgagattcccatcgagccacttgctctacaaactggcagagagagagaacaaaaggcaagtttggggctcagattgtggcgacagggcctcagcgaggggcttctgccaagaggctctcaccctgcmggagataagtttatacctaagtctctgaagtgctgcatcacttgactggcaaagctgaagttactccacggataaaatattttatctctgctgctctctgggtgacttgttctggggaaacacagcgcatagcttacgcttcatcagaaggaattactataaaatcaattatgtgatgcaatatatgccatgaaaaatactttatcacaaactaatttgaaaagtaatttacatcagatacattttgggaagagttctgtaatatgtagcaagctctgcattatgaaattgtggcgact

SEQ ID NO: 15070 - DNA, 600 bp, Chicken  19866894221150_1
aagcagcctcccccgcagcacccacgcaccgcagcccaccctgtgcctaccccacggagccctgcctgccgctgacctctcacctccccgaagccgtctgtgcctatgtgcggccggcgtcggctcggagggaggacggggagtaggagaggggagctttcctgaaccgcttccagatctggagcggatggtgcatatcttctctgggagtgacaccccgatatggagggatgtaacgtggaggctcagcctaagccctgctgccaagctgcctccctgctctgcctcttgccctgctcrtttcctccrgctggctttgcatccccccggtcactccccccatcttagcgtcgctagttccataaggatatattttctcatttaggcagtatctcagtaacgagctctatctctctgttcaggtaattgtttctcygcctcggggataaatcctctggagctctgaagcacggctgcaccctggattgctcgcagtgcttgtggacagcttgtgcgcagctctgccctccaccttagtaaccccccagcaaaaacgtcatctgcaccacatcgcaactgagttagccatcagaaaacgct

SEQ ID NO: 15071 - DNA, 600 bp, Chicken  19866894221150_2
cccccgcagcacccacgcaccgcagcccaccctgtgcctaccccacggagccctgcctgccgctgacctctcacctccccgaagccgtctgtgcctatgtgcggccggcgtcggctcggagggaggacggggagtaggagaggggagctttcctgaaccgcttccagatctggagcggatggtgcatatcttctctgggagtgacaccccgatatggagggatgtaacgtggaggctcagcctaagccctgctgccaagctgcctccctgctctgcctcttgccctgctcrtttcctccrgctggctttgcatccccccggtcactccccccatcttagcgtcgctagttccataaggatatattttctcatttaggcagtatctcagtaacgagctctatctctctgttcaggtaattgtttctcygcctcggggataaatcctctggagctctgaagcacggctgcaccctggattgctcgcagtgcttgtggacagcttgtgcgcagctctgccctccaccttagtaaccccccagcaaaaacgtcatctgcaccacatcgcaactgagttagccatcagaaaacgctcagctatgc

SEQ ID NO: 15072 - DNA, 600 bp, Chicken  19866894221150_3
cggggagtaggagaggggagctttcctgaaccgcttccagatctggagcggatggtgcatatcttctctgggagtgacaccccgatatggagggatgtaacgtggaggctcagcctaagccctgctgccaagctgcctccctgctctgcctcttgccctgctcrtttcctccrgctggctttgcatccccccggtcactccccccatcttagcgtcgctagttccataaggatatattttctcatttaggcagtatctcagtaacgagctctatctctctgttcaggtaattgtttctcygcctcggggataaatcctctggagctctgaagcacggctgcaccctggattgctcgcagtgcttgtggacagcttgtgcgcagctctgccctccaccttagtaaccccccagcaaaaacgtcatctgcaccacatcgcaactgagttagccatcagaaaacgctcagctatgcctcgcgtgctcactttctccgcattgcatatatagccatgctttattctgtaagcaacagtgcagtttatgcaacggcataaamtccctttttcgggctgtatatgagaaatggtttccttcttatc

SEQ ID NO: 15073 - DNA, 574 bp, Chicken  19866894221150_4
tcagtaacgagctctatctctctgttcaggtaattgtttctcygcctcggggataaatcctctggagctctgaagcacggctgcaccctggattgctcgcagtgcttgtggacagcttgtgcgcagctctgccctccaccttagtaaccccccagcaaaaacgtcatctgcaccacatcgcaactgagttagccatcagaaaacgctcagctatgcctcgcgtgctcactttctccgcattgcatatatagccatgctttattctgtaagcaacagtgcagtttatgcaacggcataaamtccctttttcgggctgtatatgagaaatggtttccttcttatcatttttatattgtgtttgctaagtgatgtgtccagccagcacgtgactgtacatttaggaaaactccctcagcacgtgagaactagatctggtgtgctggaagcgctcggtccttaggtcagtaaggaggcagaagtgtctgtggggggaacccaggctcagataacactgtcagctcagtcctggtctgggaggtcagagggaccacacaactgatgggaaaaatcaggg

SEQ ID NO: 15074 - DNA, 600 bp, Chicken  19866894221153_1
ctgaaggccatctagtccaactcccctgcaatgtacaccacagctagatcaggttgcccagggccttatccagccctaccttgaaagtctccagagatgggttatcaatcatatcactaggtaacctgttccagtgcctcaccaccctcactgtaagattttttccttatatctaatctaaacctacctacccctccctgagtttgaaaatatttccccttgttgtatcaccacagaccctgctaaagagtcattccccttcttcctgtagctcccttttatatactgaaaggacactakcaggtcacctcactgccgtctctcctccaggctaaaaagcctcagcttttcctgaagcccaggatacggttggctttctgggctgcaagggcacatttctggctcatgtctagcctgccaaccaccaagtatccccagctctttttcagcagggctgtgctcaatcctttcatcccccagcttgcatttgtaatgggggctgcctcaacccaggtgcaacgccttgcatttggatctactgaacctcatgaggttcacttgggcccactgctcaagcctgtctaggtccctctggatggc

SEQ ID NO: 15075 - DNA, 600 bp, Chicken  19866894221156_1
ccttttcctatatatttgtctacatttacaatctaaagatggttctttttgggtagttcctttattccatcctccctgcaattccttctgtgtcgtattcgatctattgttaaaatttagcaaagaaaaatttaaaacctctgagtaaaaacaattgggatagaattcatcccatccagttcatgtatagccagtcaagaaaaataatcacttttagggaataattcaaccaatgtatttcagatccctaggttaggataagataaatcacattctgagatgcgtatttatttttgtccrctgtctttagatgaattctgtatggctagttcacatgaaaacatgttcagtatggacatctgcactgagtcagatatctgaacaacactactgaaaagagattatgtatgcctacagtaacagtttccaacctgtatttatcaaatttgtacgtgaaaaagaaaatacaggttatgaactgaaaatgtgttctccaggctacatctttttcaaaacaatgacattggagagggatgcagataggggttgctgtctcctgagaaaccattgctgtagcttcatgagaagctccatatcaag

SEQ ID NO: 15076 - DNA, 600 bp, Chicken  19866894221158_1
cgctcccaccgccagcaccaggcggtcgatgcggccgatcaccctctcgctgtgtgccaacgagatctcctcctcctcactggggagcacttccaggcgttccctcaacctgcacggtggaaacacttctgacgtgaaacagccacggggcagcccctccgggaaggagcgaactgcgtttgaagggtgctcagtcgtggagtgctctcagcttgttcctatttgcaggctgctatcagaaggcacactcctagctggtttgctgtgctgttctgcctctttttcttttaacctgaggartcttttctctgtctttccccaagagttaagaagtggctgatctaaaatcgcttctaatttagtgttggtggaagcaagtgatgttccatgtttccttccgtcagctgagctaacagcactgtccccaggagagatttctcctctcaagaactatgctgacagctttggttcgtcctttaaactgaactggaacctgatggagarctggtcagagacagtaacatctcactcasattgaggctgtgtttactgctggctgttcagaggcagagaagccagagctgaggctgggatctcctc

SEQ ID NO: 15077 - DNA, 600 bp, Chicken  19866894221158_2
ctctcagcttgttcctatttgcaggctgctatcagaaggcacactcctagctggtttgctgtgctgttctgcctctttttcttttaacctgaggartcttttctctgtctttccccaagagttaagaagtggctgatctaaaatcgcttctaatttagtgttggtggaagcaagtgatgttccatgtttccttccgtcagctgagctaacagcactgtccccaggagagatttctcctctcaagaactatgctgacagctttggttcgtcctttaaactgaactggaacctgatggagarctggtcagagacagtaacatctcactcasattgaggctgtgtttactgctggctgttcagaggcagagaagccagagctgaggctgggatctcctccaacactgagcacagcactaggaccaggagaggcagccaagagaacagcccaggtcccctccatctcttcacttaggggctggcctgtcattgctgccaggagcacaccaaggaggagttcaggggctcctggaccctgagctggcttcttttggccccaggtgaattggagtgtctttatgggggcagtcatttcccagagcc

SEQ ID NO: 15078 - DNA, 600 bp, Chicken  19866894221158_3
tatcagaaggcacactcctagctggtttgctgtgctgttctgcctctttttcttttaacctgaggartcttttctctgtctttccccaagagttaagaagtggctgatctaaaatcgcttctaatttagtgttggtggaagcaagtgatgttccatgtttccttccgtcagctgagctaacagcactgtccccaggagagatttctcctctcaagaactatgctgacagctttggttcgtcctttaaactgaactggaacctgatggagarctggtcagagacagtaacatctcactcasattgaggctgtgtttactgctggctgttcagaggcagagaagccagagctgaggctgggatctcctccaacactgagcacagcactaggaccaggagaggcagccaagagaacagcccaggtcccctccatctcttcacttaggggctggcctgtcattgctgccaggagcacaccaaggaggagttcaggggctcctggaccctgagctggcttcttttggccccaggtgaattggagtgtctttatgggggcagtcatttcccagagcctttctacagctccagggaaggcacgcagc

SEQ ID NO: 15079 - DNA, 600 bp, Chicken  19866894221160_1
aagttttttataaaccagcattattcctacaaactctcttctccaggtaatatgatgcaatctgtgtctccagagacatttaaatgttcctattcaagccttcactggtggggaggcaataccagggaatgagctttgctgaaggctagacttagtggctcagtgaatagagctcaagtgaaaggaaaggagattcatcctgtatgcccagtagactgagaccaaactgacacattggtatgtcttaatattggctcaagggtcttttctgattctttctttctttctttgttcctataytaagtattggaaaagtaactgaacaaaagcagatctgtctgaatacgttatggaagagatgcactgtttagaaaagggctttgttcatgctctttcttgttgtccaaagtctgagatatctgggaaatctgcagttagtgaactctgctcacaccttaagtgctaattttagtatgcacatcgtgtttgaaaaatgtcagcagaaaagactgaataatacttgttgcgtattcatctgaagtacataattgctccagctgacatgtatgaatgcactttcattatcgtgtcaagaggaca

SEQ ID NO: 15080 - DNA, 398 bp, Chicken  19866894221173_1
cgggatgaagattgcatttttgcttccttgtagaattaaactgaaggataatgagcctcttgtacagaacgagtgcatcaccactcgctgcaggccctgctggggagttgatgtctctcttgagaaacatcccattgctccattgatgcatatcaagccttctatttacagaagaattaattaattacccagggcaatctccaacatgatatgctcttgatgaagctgatgtcaaaggttatcttgacagccttactgataaccctgacgtgtggctgagaacagccatatgtagaagargcagagcagatgtgaaggggcttttctctatacacttaacattcaaagaggaagcagaaactttgggtttcttctcaagaaaagcaaagaactctctc

SEQ ID NO: 15081 - DNA, 600 bp, Chicken  19866894221174_1
gccctggtgagccaggggcccttcagcactcactgggaactagctgtgtccggtggctttgcccctgccatcagttatctcttcgacacaacttgcctttctggtagaagagtcctgcccgggaactgttgtggtttctttttttcttgtggctcttttttgagaggaaaaaaaaaaataaaaatagtagagatttttggtagctaattcaatagagggagctccgctaccttactgttagaaagaacatcttcgtgctttttctcagacctctggcttcagattgaaagatgcactggwaaaaaatgtactttcttaacagtatttggtggcaaagtgtttgttttttgaatgcatcctcctttgttccaagccttcctgttgcatgaagaaggaaggatgaatctgagtcacacaattgggcaaatccgaagaggtgactcagttacagagcattccctttgcagtgaggctttgcaggtttttaaactgggtgtattgcagaatctggttctcatctgaagtctgcttgtctgaagggtgctttgtggaacaattcaaaatgaatttagaataaagagagggtactctgaagagatg

SEQ ID NO: 15082 - DNA, 600 bp, Chicken  19866894221174_2
tctgaagtctgcttgtctgaagggtgctttgtggaacaattcaaaatgaatttagaataaagagagggtactctgaagagatgagctgcaccaagaatggtgttggatgaagcaaggtgcaaacggtaagattgcacttgatagactgttgtgtcaagagaaagcacaagcacttacagtaacactgacaaagcaggacctttgtttaacaaaaataagttcatctaggaacataaagagaaactggaacatgcctaccattctgtaaacgtggattcaaggttatagcaaaagaacacrtacaaaagaacaaaatatgtgtttgcatgcttttaacctattccaaatctctagtatataaacaggtaaacgtagaccttgtatttctcacagatcctgtatttttttattgcagaagtaatctattttttcctaattttttcaatttaaccagaaaaaatagaattcaaaartagatgttggctgtatacagctagatttgtaagtgtttatatatatatatatatatatatatatatatatacacacacatacacacatactttttgatgtgtgtgtgtgtgtgtatcctcttttgtt

SEQ ID NO: 15083 - DNA, 600 bp, Chicken  19866894221174_3
ttacagtaacactgacaaagcaggacctttgtttaacaaaaataagttcatctaggaacataaagagaaactggaacatgcctaccattctgtaaacgtggattcaaggttatagcaaaagaacacrtacaaaagaacaaaatatgtgtttgcatgcttttaacctattccaaatctctagtatataaacaggtaaacgtagaccttgtatttctcacagatcctgtatttttttattgcagaagtaatctattttttcctaattttttcaatttaaccagaaaaaatagaattcaaaartagatgttggctgtatacagctagatttgtaagtgtttatatatatatatatatatatatatatatatatacacacacatacacacatactttttgatgtgtgtgtgtgtgtgtatcctcttttgtttgtttatttttaagaagtagaatgacttgtttttcactgttgagttgagtgagcttaccttgttggtcaagaagagttgctaaggttcatagagtagaaggaccggagagggttatctgttgggtggcatggcaaacttccacggaaaggattgtgagattacctggtttaaa

SEQ ID NO: 15084 - DNA, 600 bp, Chicken  19866894221175_1
cttttcctagaaagagctgaccatttcactagaatactgggctgcttccccaggcatttatgtccccccatgagatttattatctcaacaaggaaagaacctgactcaaaggagccttttctacagaaaaccttttactctttcaaagacatatatactggaaggaaagcaaaatttgtgctgctgtccatcccagcctgtagggcatctccgtggatatgtgttcctccaaaagggagaagtgagatcctgtagctctgtagctcccttaggtcaaaagggagggatgagggaagccawagctctgagcaatgacagggagaggaaagaagaaaggagagaattcatgcggtgaatgtagtgcacacgcccacagtgaaatccctgcctgcctcaagatcccaagttccctcacatatctacttgtgcactacctacatgaactaaaccttgcacagaaaagtgggctgaatagagcccagctcagctgtacatgttttgcttttctgccaagacacttcaagataaaagatactctsccaagcagatactaatgctatcactgaacatgttatttatgttgaattartaattctcatt

SEQ ID NO: 15085 - DNA, 600 bp, Chicken  19866894221175_2
aagtgagatcctgtagctctgtagctcccttaggtcaaaagggagggatgagggaagccawagctctgagcaatgacagggagaggaaagaagaaaggagagaattcatgcggtgaatgtagtgcacacgcccacagtgaaatccctgcctgcctcaagatcccaagttccctcacatatctacttgtgcactacctacatgaactaaaccttgcacagaaaagtgggctgaatagagcccagctcagctgtacatgttttgcttttctgccaagacacttcaagataaaagatactctsccaagcagatactaatgctatcactgaacatgttatttatgttgaattartaattctcattgctgctatcatttcctgtgaatcagagatggratcaggatttttttcttttgcatcamtggggctcaaatacctccaggctgttagtgccaggatttagttttacattgtgttacagttgttcagtcctatctggatgactttccaagtgaaaagtgcccatatctcagcaatcattcattatttctgtcctagttctcactgaggagggtmaaagccaaactgaatgggatttatgac

SEQ ID NO: 15086 - DNA, 600 bp, Chicken  19866894221175_3
agggaagccawagctctgagcaatgacagggagaggaaagaagaaaggagagaattcatgcggtgaatgtagtgcacacgcccacagtgaaatccctgcctgcctcaagatcccaagttccctcacatatctacttgtgcactacctacatgaactaaaccttgcacagaaaagtgggctgaatagagcccagctcagctgtacatgttttgcttttctgccaagacacttcaagataaaagatactctsccaagcagatactaatgctatcactgaacatgttatttatgttgaattartaattctcattgctgctatcatttcctgtgaatcagagatggratcaggatttttttcttttgcatcamtggggctcaaatacctccaggctgttagtgccaggatttagttttacattgtgttacagttgttcagtcctatctggatgactttccaagtgaaaagtgcccatatctcagcaatcattcattatttctgtcctagttctcactgaggagggtmaaagccaaactgaatgggatttatgactacatttttgtgtcagagagcaattgttttgttcaggatcaagtatattc

SEQ ID NO: 15087 - DNA, 600 bp, Chicken  19866894221175_4
aaaggagagaattcatgcggtgaatgtagtgcacacgcccacagtgaaatccctgcctgcctcaagatcccaagttccctcacatatctacttgtgcactacctacatgaactaaaccttgcacagaaaagtgggctgaatagagcccagctcagctgtacatgttttgcttttctgccaagacacttcaagataaaagatactctsccaagcagatactaatgctatcactgaacatgttatttatgttgaattartaattctcattgctgctatcatttcctgtgaatcagagatggratcaggatttttttcttttgcatcamtggggctcaaatacctccaggctgttagtgccaggatttagttttacattgtgttacagttgttcagtcctatctggatgactttccaagtgaaaagtgcccatatctcagcaatcattcattatttctgtcctagttctcactgaggagggtmaaagccaaactgaatgggatttatgactacatttttgtgtcagagagcaattgttttgttcaggatcaagtatattccctgttcttctactacttgagcccatcatgttcctgttctatc

SEQ ID NO: 15088 - DNA, 600 bp, Chicken  19866894221175_5
tagtgcacacgcccacagtgaaatccctgcctgcctcaagatcccaagttccctcacatatctacttgtgcactacctacatgaactaaaccttgcacagaaaagtgggctgaatagagcccagctcagctgtacatgttttgcttttctgccaagacacttcaagataaaagatactctsccaagcagatactaatgctatcactgaacatgttatttatgttgaattartaattctcattgctgctatcatttcctgtgaatcagagatggratcaggatttttttcttttgcatcamtggggctcaaatacctccaggctgttagtgccaggatttagttttacattgtgttacagttgttcagtcctatctggatgactttccaagtgaaaagtgcccatatctcagcaatcattcattatttctgtcctagttctcactgaggagggtmaaagccaaactgaatgggatttatgactacatttttgtgtcagagagcaattgttttgttcaggatcaagtatattccctgttcttctactacttgagcccatcatgttcctgttctatctgttagtccaaggggctttcataaga

SEQ ID NO: 15089 - DNA, 542 bp, Chicken  19866894221175_6
agacacttcaagataaaagatactctsccaagcagatactaatgctatcactgaacatgttatttatgttgaattartaattctcattgctgctatcatttcctgtgaatcagagatggratcaggatttttttcttttgcatcamtggggctcaaatacctccaggctgttagtgccaggatttagttttacattgtgttacagttgttcagtcctatctggatgactttccaagtgaaaagtgcccatatctcagcaatcattcattatttctgtcctagttctcactgaggagggtmaaagccaaactgaatgggatttatgactacatttttgtgtcagagagcaattgttttgttcaggatcaagtatattccctgttcttctactacttgagcccatcatgttcctgttctatctgttagtccaaggggctttcataagacataaaatgaacatattttacagcatgtaggaattaagcatttatgttgttttactggcttgcagttaaaaaaagtaaagatcctcccagaagttt

SEQ ID NO: 15090 - DNA, 600 bp, Chicken  19866894221180_1
tcctcagtagcatgtggagatcaataactgtttatagacttttcaatcctggtttatatggagcatattattatggactatgtcaaatctcttaactgtgaagtggaagtctgatttcacacacaaatccacccaaaatcccatgctgctaagacaagaaggataacctggagacccatgggctagtcagcatttgcttttctctgggaaaataatggcgcacatccttagatgtaatttctggagaaggaggaagagaaagtgattatgaacagtagccagcatggattgaccaaggtwtgccatgcttgaccaagtgcacctgccttccatgatggaatggtaagatgtgcaaaatatgctgtaccccaatgctgtaaagaaatgagacataaaatgttcacatgaaaaacacggtcaaattacattattccatttaattaattcagatgtacaggagctactgttctcttagaatcgtaggtttyatctctttagttacatccatactgtaaactccctggtaagcgaggagagtcctcaacatgactaatactactacaatatagtcatttgttacatgactgcacagtctaaatg

SEQ ID NO: 15091 - DNA, 600 bp, Chicken  19866894221180_2
agcatttgcttttctctgggaaaataatggcgcacatccttagatgtaatttctggagaaggaggaagagaaagtgattatgaacagtagccagcatggattgaccaaggtwtgccatgcttgaccaagtgcacctgccttccatgatggaatggtaagatgtgcaaaatatgctgtaccccaatgctgtaaagaaatgagacataaaatgttcacatgaaaaacacggtcaaattacattattccatttaattaattcagatgtacaggagctactgttctcttagaatcgtaggtttyatctctttagttacatccatactgtaaactccctggtaagcgaggagagtcctcaacatgactaatactactacaatatagtcatttgttacatgactgcacagtctaaatgtgacagtatttagcaaactgtagaaatgcatactggaaatgaaacatacattttcttcctaattcctttaataagagtgtgtaaacatgttaaattgtgcagtttcatatccaatgtctgatttctagtattaccaaagacttccttaaggtatttaagcactctgtgctgtgttatcgtgaattaaa

SEQ ID NO: 15092 - DNA, 600 bp, Chicken  19866894221198_1
agggttcatagggtggtcaagcagctgctgagtgtttgctgaacatatagttagacagcttaatacctgttgtctttaagtcgttagtagaacataattattccaggaggtgggttttaaaaattaccagctgtcgtgttctgatcaggctgttaaaggtgtctgataaagtcaggttagtagcagccttgttcaggtgctcaacccttagaataaaggtgtactgtttgctgcacatgagaagtgccatcctgcctacaaaaaaggcacagaaatattcagtgtcacttaaaatgcatygaggtgtgtgctgaccttcttagcactgattctttgagagagactggtggttttaaaaccgtatcttatctttgtttgatcttctttttctcagggtaagcaggatagcttcagacctctctggactccaaaactgacagtgagtgaggttcctgcttaataggttgtttagagcttcattttccctctgttcttaagggaatagttttctctgggaaaataattgcatgcttgatgaggatagaagcctctttgcagtggtccaacaacatgaatacaattgtgatgctatatgagaaa

SEQ ID NO: 15093 - DNA, 600 bp, Chicken  19866894221209_1
ggtggtgcgagagagcgttcagctccgcgaattgattgcttttagttcctcctctttaataattagtggaacaatgcagattgggaatacaatggccgttgtgtttacattataacaggggattaatgctattaagtgagtgctacagttatgacctgggaagagtacttaaacaaataccgcgatcccgggagaatcgctgtaattcagttcagagtgcggagatccgcacagccacacacgcacacacagatagggatctccatgcagagctccacgcagatccatgtgtcacacacrcaggttcacgagcacctccgtgcaattgtaggtgttgttccagcctccttctgcttcgccctgtgaaaatatttctgcttgtgctctcggtgggacgaatgtttaaatgaagaccatcaccccttcctccaaacacaaagagcaacagattatatgtctgatgctttaatatctgccgtccaaaaatcagtgttttgtacacagaaacggggttaatctctcaatcacggatgaatggggcaatatattcgcaattcaaaaggcgagttttcacgttagtttgatttgcatcatttttgt

SEQ ID NO: 15094 - DNA, 600 bp, Chicken  19866894221218_1
aagaacatgatggccgcctgcgacccccgccacggccgctacctcaccgtggccgccgtcttccgcggccgcatgtccatgaaggaggtggacgagcagatgctgaacgtgcagaacaagaacagctcctacttcgtcgagtggatccccaacaacgtgaagacggccgtgtgcgacatcccgccccgcggcctcaagatggccgtcaccttcatcggcaacagcacggccatccaggagctcttcaagcgcatctcggagcagttcaccgccatgttccgccgcaaggccttcctgcaytggtacacgggggaggggatggacgagatggagttcaccgaggccgagagcaacatgaacgacctggtgtcggagtaccagcagtaccaggacgccacggccgaggaggaggaggatttcggcgaggaggccgaagaagaggcctgagaaaggcgccggccttcgtccttygccatcatcgtcgtcgtcgtcctcggagagccctcgtcgtcctcccacgtcgtcctcggagagccctcgtcccgcagcagagcccggctgcactgcagacatggccgccatcgtccctcctcatcgtcg

SEQ ID NO: 15095 - DNA, 600 bp, Chicken  19866894221218_2
tgcgacatcccgccccgcggcctcaagatggccgtcaccttcatcggcaacagcacggccatccaggagctcttcaagcgcatctcggagcagttcaccgccatgttccgccgcaaggccttcctgcaytggtacacgggggaggggatggacgagatggagttcaccgaggccgagagcaacatgaacgacctggtgtcggagtaccagcagtaccaggacgccacggccgaggaggaggaggatttcggcgaggaggccgaagaagaggcctgagaaaggcgccggccttcgtccttygccatcatcgtcgtcgtcgtcctcggagagccctcgtcgtcctcccacgtcgtcctcggagagccctcgtcccgcagcagagcccggctgcactgcagacatggccgccatcgtccctcctcatcgtcgccgtgaaggcgccggccgtcgtcgtcgtcctttggtgttatcgccgtgaagatgaaggccgccgtcatcgtcccccgccgccgtcaccgtgaagacgttggccgtcgtcactgtcccccactgccgtcaccacggagctgttggccgtcgtccccaccgctgtcaccacga

SEQ ID NO: 15096 - DNA, 599 bp, Chicken  19866894221219_1
  misc_feature (1)..(100): n is any nucleotide
nnnnnnnnnnnnnnnnnnnnnnnnnnnnnnnnnnnnnnnnnnnnnnnnnnnnnnnnnnnnnnnnnnnnnnnnnnnnnnnnnnnnnnnnnnnnnnnnnnnnaaattattagtgaaatagttgaaaacaaaaaccagagcggtgcattccgttaattcttcatttggacttgtgcaaatacagaacaatttccaaacaaaaaggtccaggcatgttagaacggagccaacacacgtctgacacattagctaatctattttatttttgttcttctaattgttggtttatttctctcttttagyaaaaaaaaagtgactttattattamttttgggaaatggtgatgaactaacaacatgtgttcgggaaattgttaatgaaaataattttttactttttatctgtaattggtataaaaaaattatatatcatcagctctaattagaccttgattcataaggcaaagagcccttaatgttcttagagcacttaacttgccagaaacaaacagttaaatggggttgaagtaacatttgtgaatgttggatggaatagggggttactgttgcgttgtaggcagaggggcgattgcaaatrgaaaa

SEQ ID NO: 15097 - DNA, 599 bp, Chicken  19866894221219_2; identical to SEQ ID NO: 15096
  misc_feature (1)..(100): n is any nucleotide

SEQ ID NO: 15098 - DNA, 599 bp, Chicken  19866894221219_3
  misc_feature (1)..(75): n is any nucleotide
nnnnnnnnnnnnnnnnnnnnnnnnnnnnnnnnnnnnnnnnnnnnnnnnnnnnnnnnnnnnnnnnnnnnnnnnnnnaaattattagtgaaatagttgaaaacaaaaaccagagcggtgcattccgttaattcttcatttggacttgtgcaaatacagaacaatttccaaacaaaaaggtccaggcatgttagaacggagccaacacacgtctgacacattagctaatctattttatttttgttcttctaattgttggtttatttctctcttttagtaaaaaaaaagtgactttattattamttttgggaaatggtgatgaactaacaacatgtgttcgggaaattgttaatgaaaataattttttactttttatctgtaattggtataaaaaaattatatatcatcagctctaattagaccttgattcataaggcaaagagcccttaatgttcttagagcacttaacttgccagaaacaaacagttaaatggggttgaagtaacatttgtgaatgttggatggaatagggggttactgttgcgttgtaggcagaggggcgattgcaaatrgaaaagatgagtccttaatatagctcacga

SEQ ID NO: 15099 - DNA, 600 bp, Chicken  19866894221219_4
aaatagttgaaaacaaaaaccagagcggtgcattccgttaattcttcatttggacttgtgcaaatacagaacaatttccaaacaaaaaggtccaggcatgttagaacggagccaacacacgtctgacacattagctaatctattttatttttgttcttctaattgttggtttatttctctcttttagtaaaaaaaaagtgactttattattamttttgggaaatggtgatgaactaacaacatgtgttcgggaaattgttaatgaaaataattttttactttttatctgtaattggtatmaaaaaattatatatcatcagctctaattagaccttgattcataaggcaaagagcccttaatgttcttagagcacttaacttgccagaaacaaacagttaaatggggttgaagtaacatttgtgaatgttggatggaatagggggttactgttgcgttgtaggcagaggggcgattgcaaatrgaaaagatgagtccttaatatagctcacgaatcctgcattcagcccatctggtcggcggacactgggagtgactctgttgagtttggtggcctgcatgtgtagtgggcaggcatctca

SEQ ID NO: 15100 - DNA, 501 bp, Chicken  19866894221219_5
tttagtaaaaaaaaagtgactttattattamttttgggaaatggtgatgaactaacaacatgtgttcgggaaattgttaatgaaaataattttttactttttatctgtaattggtataaaaaaattatatatcatcagctctaattagaccttgattcataaggcaaagagcccttaatgttcttagagcacttaacttgccagaaacaaacagttaaatggggttgaagtaacatttgtgaatgttggatggaatagggggttactgttgcgttgtaggcagaggggcgattgcaaatrgaaaagatgagtccttaatatagctcacgaatcctgcattcagcccatctggtcggcggacactgggagtgactctgttgagtttggtggcctgcatgtgtagtgggcaggcatctcatgcggatgcagttgggctgcatgttctcatatgacgtgacaaatcgggtgtgcatcttgggctgcgtcttttgcactctttct

SEQ ID NO: 15101 - DNA, 599 bp, Chicken  19866894221220_1
  misc_feature (1)..(131): n is any nucleotide
nnnnnnnnnnnnnnnnnnnnnnnnnnnnnnnnnnnnnnnnnnnnnnnnnnnnnnnnnnnnnnnnnnnnnnnnnnnnnnnnnnnnnnnnnnnnnnnnnnnnnnnnnnnnnnnnnnnnnnnnnnnnnnnnnnncacttttttttagttttggtgtgctgctataagcagcacaaaagaacaaaaagattcatccttactcataggaacacctgataaatgagaaatacagcaggggaaaagatgcttgttgtttcttggctaaggaacatggtgcctctcttataacacatggaatcatgtrcatggggccacctaacacaaccctacctcgctcagctctctctaccaagcctgcatgtctaatactggtgagggggaactaaggggacagagcaaggagcatcttcatccagaagttatgtggcagtagtattggccattttgagctgctgtggcttaggttgtgcttattcaytatcccaaatgtctccattccagatccagcctcctgcagtgagcagagaggctcaaggacacctttccaaattgcagagttgttcttgtagctacatctgccactggcaccattggttggctcag

SEQ ID NO: 15102 - DNA, 600 bp, Chicken  19866894221220_2
gaacaaaaagattcatccttactcataggaacacctgataaatgagaaatacagcaggggaaaagatgcttgttgtttcttggctaaggaacatggtgcctctcttataacacatggaatcatgtrcatggggccacctaacacaaccctacctcgctcagctctctctaccaagcctgcatgtctaatactggtgagggggaactaaggggacagagcaaggagcatcttcatccagaagttatgtggcagtagtattggccattttgagctgctgtggcttaggttgtgcttattcaytatcccaaatgtctccattccagatccagcctcctgcagtgagcagagaggctcaaggacacctttccaaattgcagagttgttcttgtagctacatctgccactggcaccattggttggctcagctgaggctagtggggcacttttcatgcgtagaagctggacagtggctctgctgagctttagagttttgtagctatagctgcttaattatctgtatacctcactgytgtttggagactttgtcacgtgatgtcccccccccatccttttttgcctgtccatgctgcacaaagagaa

SEQ ID NO: 15103 - DNA, 565 bp, Chicken  19866894221220_3
tcatccagaagttatgtggcagtagtattggccattttgagctgctgtggcttaggttgtgcttattcaytatcccaaatgtctccattccagatccagcctcctgcagtgagcagagaggctcaaggacacctttccaaattgcagagttgttcttgtagctacatctgccactggcaccattggttggctcagctgaggctagtggggcacttttcatgcgtagaagctggacagtggctctgctgagctttagagttttgtagctatagctgcttaattatctgtatacctcactgytgtttggagactttgtcacgtgatgtcccccccccatccttttttgcctgtccatgctgcacaaagagaagtgaaaaggcatctttcccctttgcttacatacatgattttgcattcttctccgagaatccagccatataatatgaacctatcactagtttatagcttgcttcatttatgtttaaagacatgttatcttcaaaaatataaaagatgagccaaattcctccctgatttatgcactgcatactaccacctcgtcctg

SEQ ID NO: 15104 - DNA, 599 bp, Chicken  19866894221225_1
  misc_feature (1)..(12): n is any nucleotide
nnnnnnnnnnnntgggatatgtgaaggcaagcaggcttacattcagaatgagacctaagaaaccaaggcttcttaggatttcatccaggtgagttgtgaaaatctgcaaggatgcagcttctgtaacttctttgggcaaactctttcagtgcctatcaactcttcaggctttttgctcttacatccagtccaacccatcctttgttgcattttgtccattagcagtgcatcttcaagaaaaattctggctttgtcttctctatagctcaactttatgtagttgaagtttgcaaatagttyccttcttgccccatccatttccacctstgcyttctttaggcaaagcaagtctatctccctctctccctccctcatctccttgtgtactctacttctgactgtcctagctggcttctgctgttttctcctgtttataactctagtgctgggaggaacctaaaactttaatggcacaggagcacaaagttacatgtcatatgggtgtctgaataacaaagtatagaatgcgttgtctccctttcttggtgagcagttttatttctaaccaggcaaggtgcttgtttgcatgtctacattta

SEQ ID NO: 15105 - DNA, 600 bp, Chicken  19866894221225_2
caagcaggcttacattcagaatgagacctaagaaaccaaggcttcttaggatttcatccaggtgagttgtgaaaatctgcaaggatgcagcttctgtaacttctttgggcaaactctttcagtgcctatcaactcttcaggctttttgctcttacatccagtccaacccatcctttgttgcattttgtccattagcagtgcatcttcaagaaaaattctggctttgtcttctctatagctcaactttatgtagttgaagtttgcaaatagttyccttcttgccccatccatttccacctstgcyttctttaggcaaagcaagtctatctccctctctccctccctcatctccttgtgtactctacttctgactgtcctagctggcttctgctgttttctcctgtttataactctagtgctgggaggaacctaaaactttaatggcacaggagcacaaagttacatgtcatatgggtgtctgaataacaaagtatagaatgcgttgtctccctttcttggtgagcagttttatttctaaccaggcaaggtgcttgtttgcatgtctacatttaatccctgtattggcatgtgaaatcaagg

SEQ ID NO: 15106 - DNA, 600 bp, Chicken  19866894221225_3
caggcttacattcagaatgagacctaagaaaccaaggcttcttaggatttcatccaggtgagttgtgaaaatctgcaaggatgcagcttctgtaacttctttgggcaaactctttcagtgcctatcaactcttcaggctttttgctcttacatccagtccaacccatcctttgttgcattttgtccattagcagtgcatcttcaagaaaaattctggctttgtcttctctatagctcaactttatgtagttgaagtttgcaaatagttyccttcttgccccatccatttccacctstgcyttctttaggcaaagcaagtctatctccctctctccctccctcatctccttgtgtactctacttctgactgtcctagctggcttctgctgttttctcctgtttataactctagtgctgggaggaacctaaaactttaatggcacaggagcacaaagttacatgtcatatgggtgtctgaataacaaagtatagaatgcgttgtctccctttcttggtgagcagttttatttctaaccaggcaaggtgcttgtttgcatgtctacatttaatccctgtattggcatgtgaaatcaaggtacc

SEQ ID NO: 15107 - DNA, 600 bp, Chicken  19866894221228_1
atcctaaggttctctaacttggtagtttcagcagatccataagagaataccccaaaattttgcaaactacctcaaaaaagcaaaattacttcaaaatttgtaacattcaactttcacaggaagcaagaatttcatcttctaaatggcagtccatttttacataacaattcaaagtccagctgaactagcaacatagaaatatggttttccatttcatcacacatggcataatccagtcctataagtgaatatataaccaaaaagggcaccacatataccagtactcctctagtttttttmttcttcaacttttcccacyaattgagcaaaggaacttttaattcaaacaagaaacaaacactgcacatccatctcaaagacttaatatggaaaaaatgcacacaatttttgacagctcctcaagaaatcagtgcttactcaaactgatattacgcactaagaaacaatacatgaagaattcctgagtcaaaatctcccactgacctgcttggtcctcttttagagtattagagatggtagagccagtgagagcagccaatgttgctgatggggaggctctgtacctggacagcctgctca

SEQ ID NO: 15108 - DNA, 600 bp, Chicken  19866894221228_2
tggtagtttcagcagatccataagagaataccccaaaattttgcaaactacctcaaaaaagcaaaattacttcaaaatttgtaacattcaactttcacaggaagcaagaatttcatcttctaaatggcagtccatttttacataacaattcaaagtccagctgaactagcaacatagaaatatggttttccatttcatcacacatggcataatccagtcctataagtgaatatataaccaaaaagggcaccacatataccagtactcctctagtttttttmttcttcaacttttcccacyaattgagcaaaggaacttttaattcaaacaagaaacaaacactgcacatccatctcaaagacttaatatggaaaaaatgcacacaatttttgacagctcctcaagaaatcagtgcttactcaaactgatattacgcactaagaaacaatacatgaagaattcctgagtcaaaatctcccactgacctgcttggtcctcttttagagtattagagatggtagagccagtgagagcagccaatgttgctgatggggaggctctgtacctggacagcctgctcagaagcatctcattaatact

SEQ ID NO: 15109 - DNA, 600 bp, Chicken  19866894221230_1
ggcagggcgatgcatggcaggcgaggcggggcagggtggggtgaggcgaagcggggtggggcgaggcgaggcaaggcgcggcgaggcgaggcggggcaaggcgaggcgaggtgtggtggggcgagacaaggcggggcgaggtggggcgaggtgggatggggctttgtgttgcgaggcgggagagacggatcgagttggggcgaggtggggcgaagcggggtgaggcgaggcgtggcaggcgaggaggggcaaggcccgctgaaactcagcggggcgaggcgaggcgaggcggggcaaggmgaggygcggtggggcgtggcgggacggggcgaagctaggcgagacgtgggaggcaaggcggggcggggcgagacggggcgatgttggacgaggcaggacagagtggagcgaggtggggcaaagctaggcgagacgatgtggggcgaggtgggatgaggcgaggcgtggtaggcgaggcggggcagggcccgctgaaactcagcggggtggggcgaggtggggcgaggcggggtgaggcgaggcgtggcaggtgaggcggggcaaggcccgctgaaactcagcggggtggggcgaggcggg

SEQ ID NO: 15110 - DNA, 600 bp, Chicken  19866894221230_2
ggcgatgcatggcaggcgaggcggggcagggtggggtgaggcgaagcggggtggggcgaggcgaggcaaggcgcggcgaggcgaggcggggcaaggcgaggcgaggtgtggtggggcgagacaaggcggggcgaggtggggcgaggtgggatggggctttgtgttgcgaggcgggagagacggatcgagttggggcgaggtggggcgaagcggggtgaggcgaggcgtggcaggcgaggaggggcaaggcccgctgaaactcagcggggcgaggcgaggcgaggcggggcaaggmgaggygcggtggggcgtggcgggacggggcgaagctaggcgagacgtgggaggcaaggcggggcggggcgagacggggcgatgttggacgaggcaggacagagtggagcgaggtggggcaaagctaggcgagacgatgtggggcgaggtgggatgaggcgaggcgtggtaggcgaggcggggcagggcccgctgaaactcagcggggtggggcgaggtggggcgaggcggggtgaggcgaggcgtggcaggtgaggcggggcaaggcccgctgaaactcagcggggtggggcgaggcggggagag

SEQ ID NO: 15111 - DNA, 600 bp, Chicken  19866894221241_1
aagtcaccattcctaattcagtgcaaaaacttttggtgtgcatccgcattctcgactatgcatggaaggcaatcccaaggcaacaagaagattcatttctagaacagaagctccaaaatagacaaatgtgagaaacccaggcaaaaatgcactcaggataaccctttctgtttggggtttcatttcagctctgcatttgtacgtgagcaagacacacgtagatcagccccattcactggaacccagtgctttccatcttcaaaatgttaagcaaaacacagagaaagctgaacaaaacamaaaagaagtttagccatatcagtgcaatgcttctaaggctgcagttttcattcacattcaagactgctattctccatgctgctgatttcatcacatcctgagtaacttcaygacaagatttcttaaagtggaggtagaaaagagctatctaagttaaactacccagttaatgaggcacataactttctgcatgacttcttcatcagaagcgctcaagattaacaagacatggaatgataacaaaaaataacaatcgctctgcactacactgtatcaaagggagtttcatatgaggaacac

SEQ ID NO: 15112 - DNA, 600 bp, Chicken  19866894221241_2
tccaaaatagacaaatgtgagaaacccaggcaaaaatgcactcaggataaccctttctgtttggggtttcatttcagctctgcatttgtacgtgagcaagacacacgtagatcagccccattcactggaacccagtgctttccatcttcaaaatgttaagcaaaacacagagaaagctgaacaaaacamaaaagaagtttagccatatcagtgcaatgcttctaaggctgcagttttcattcacattcaagactgctattctccatgctgctgatttcatcacatcctgagtaacttcaygacaagatttcttaaagtggaggtagaaaagagctatctaagttaaactacccagttaatgaggcacataactttctgcatgacttcttcatcagaagcgctcaagattaacaagacatggaatgataacaaaaaataacaatcgctctgcactacactgtatcaaagggagtttcatatgaggaacacagaagcgctttagtctaaaaaaagccctgtttattygttgcaagagccagtacttaatgctgctacatgcaaatctgaaaagttgtgcatgcacacactgacaagagagag

SEQ ID NO: 15113 - DNA, 533 bp, Chicken  19866894221241_3
ggctgcagttttcattcacattcaagactgctattctccatgctgctgatttcatcacatcctgagtaacttcaygacaagatttcttaaagtggaggtagaaaagagctatctaagttaaactacccagttaatgaggcacataactttctgcatgacttcttcatcagaagcgctcaagattaacaagacatggaatgataacaaaaaataacaatcgctctgcactacactgtatcaaagggagtttcatatgaggaacacagaagcgctttagtctaaaaaaagccctgtttattygttgcaagagccagtacttaatgctgctacatgcaaatctgaaaagttgtgcatgcacacactgacaagagagagaaagaaaacaaggaacagcactgtcaaactaaattcattcctattcctatttataccacagacaaaaaaagtactgagaggaaaaaaaaaaagaaaaaggagagagtgagagaaaagtaacccatatgtccagatctgagggctcagaggtttcgatt

SEQ ID NO: 15114 - DNA, 600 bp, Chicken  19866894221242_1
caactgaatcacacagtgacatttttgctttttcttttaaccctttttaattccttctgatagctggcattttcttcttaggccaagaacgtatccacacatttgaaaactactttcctgtgacagacaaactgttttcttacaggagtttgtctgctctgatatctgaatcatccacacaggccagctgttctctcaccaaactactaatacagcctcatgcctccagagctcaagcaagagccctggaagacaaagtgcaaagaagccagtaataatgcatttagggctgggagggakgaggaggaaggaaagagggagacaaaaatacaaaaaataaaaaataaaaaataaatatatatatatcactatttcacagatcatgaatagaggcaagaaaataataagcaacttttacatggtcacaaaagtctctggcagaggcaggaaaaagaaccaaaatttctttaatccctgttcagtaccttaaatataaagctattcttcctcttcctacttgatattgtgtcaatgcacgagtgtaggtgtgaaagactaacaaaagaaaagtaatagtatggtattatgagctgagaaacc

SEQ ID NO: 15115 - DNA, 600 bp, Chicken  19866894221247_1
gggagagctatacccacccccccctcacaccacctccccgcttactttcagctggcacagaggtgacatgagatatggcaacgaatagcgcagcacagcgcccgcaggaggggctctccccgtgtcccaccttgctcacggcgcgggcgggggtccccgggagcccggagtggggctgagctgaggtttctccggggcggcagtaggcagcaggttggcagcagggctgggagtgagctgcaccgggcataagtgcaggcaccgaaaggagaggagtcctctgtgtgtgtccgtgtccgyggctctckctctctctctctctctctttcttctttttttttttttaatccttcctctttccctcctccttttatactttattccttcccctaagtaagaaaaaaaaaattattaccgtgttggcagagcgcgttgtccctccccgtccctcccccctggcacaggcagcacgagacccacgccgccgctgctccagctgggcacggtgtgaacccaatgcagcagagccgagcagctgcagggaaggggcaccctacattcagagccctccggcatcggggtgcactttgagtacttatt

SEQ ID NO: 15116 - DNA, 600 bp, Chicken  19866894221247_2
tatacccacccccccctcacaccacctccccgcttactttcagctggcacagaggtgacatgagatatggcaacgaatagcgcagcacagcgcccgcaggaggggctctccccgtgtcccaccttgctcacggcgcgggcgggggtccccgggagcccggagtggggctgagctgaggtttctccggggcggcagtaggcagcaggttggcagcagggctgggagtgagctgcaccgggcataagtgcaggcaccgaaaggagaggagtcctctgtgtgtgtccgtgtccgyggctctckctctctctctctctctctttcttctttttttttttttaatccttcctctttccctcctccttttatactttattccttcccctaagtaagaaaaaaaaaattattaccgtgttggcagagcgcgttgtccctccccgtccctcccccctggcacaggcagcacgagacccacgccgccgctgctccagctgggcacggtgtgaacccaatgcagcagagccgagcagctgcagggaaggggcaccctacattcagagccctccggcatcggggtgcactttgagtacttatttccgacat

SEQ ID NO: 15117 - DNA, 600 bp, Chicken  19866894221247_3
cctccccgcttactttcagctggcacagaggtgacatgagatatggcaacgaatagcgcagcacagcgcccgcaggaggggctctccccgtgtcccaccttgctcacggcgcgggcgggggtccccgggagcccggagtggggctgagctgaggtttctccggggcggcagtaggcagcaggttggcagcagggctgggagtgagctgcaccgggcataagtgcaggcaccgaaaggagaggagtcctctgtgtgtgtccgtgtccgyggctctckctctctctctctctctctttcttktttttttttttttaatccttcctctttccctcctccttttatactttattccttcccctaagtaagaaaaaaaaaattattaccgtgttggcagagcgcgttgtccctccccgtccctcccccctggcacaggcagcacgagacccacgccgccgctgctccagctgggcacggtgtgaacccaatgcagcagagccgagcagctgcagggaaggggcaccctacattcagagccctccggcatcggggtgcactttgagtacttatttccgacattgggcacctccggcaggatgtgga

SEQ ID NO: 15118 - DNA, 600 bp, Chicken  19866894221247_4; identical to SEQ ID NO: 15117

SEQ ID NO: 15119 - DNA, 600 bp, Chicken  19866894221248_1
ccccacaagccgtgcacttgaacatcaccggtcatggaaaccatacccctgcaaacacagtgtgtacactgcccgaacttcagaaagtttaaaccttactttaaccaaaaaacttcttccagtttcagggaatgcaaacagcacatggcctgaggggagcaaactcaagcatatatgtgcaagctgaagtagtagcccttttcttttgtactactaccataaggttttcactacatcttgcggggcctttttccattctaacttagaaacactgctggtattgggtaatcctctgctatkwggtgcgggtaacatggaaaacaaactgtaactcagctgctcgaagcactgccctaagaacagttaaatgagtgaagaaagcaatttagagttcaggttactgaagaaaaacaacytgataattttaaaaagaacttgctctctcyacttgagagaaactgaagtgaatttcaaaacaccagtatttacaaatcaaaccttgaaactgctagaagtagtatcactgagcatatacaatatacaaaatgtaagcaacgtgcccatctagccttcctcagggaagtaaatacatcccacttg

SEQ ID NO: 15120 - DNA, 600 bp, Chicken  19866894221248_2
cccacaagccgtgcacttgaacatcaccggtcatggaaaccatacccctgcaaacacagtgtgtacactgcccgaacttcagaaagtttaaaccttactttaaccaaaaaacttcttccagtttcagggaatgcaaacagcacatggcctgaggggagcaaactcaagcatatatgtgcaagctgaagtagtagcccttttcttttgtactactaccataaggttttcactacatcttgcggggcctttttccattctaacttagaaacactgctggtattgggtaatcctctgctatkwggtgcgggtaacatggaaaacaaactgtaactcagctgctcgaagcactgccctaagaacagttaaatgagtgaagaaagcaatttagagttcaggttactgaagaaaaacaacytgataattttaaaaagaacttgctctctcyacttgagagaaactgaagtgaatttcaaaacaccagtatttacaaatcaaaccttgaaactgctagaagtagtatcactgagcatatacaatatacaaaatgtaagcaacgtgcccatctagccttcctcagggaagtaaatacatcccacttgg

SEQ ID NO: 15121 - DNA, 600 bp, Chicken  19866894221248_3
ttccagtttcagggaatgcaaacagcacatggcctgaggggagcaaactcaagcatatatgtgcaagctgaagtagtagcccttttcttttgtactactaccataaggttttcactacatcttgcggggcctttttccattctaacttagaaacactgctggtattgggtaatcctctgctatkwggtgcgggtaacatggaaaacaaactgtaactcagctgctcgaagcactgccctaagaacagttaaatgagtgaagaaagcaatttagagttcaggttactgaagaaaaacaacytgataattttaaaaagaacttgctctctcyacttgagagaaactgaagtgaatttcaaaacaccagtatttacaaatcaaaccttgaaactgctagaagtagtatcactgagcatatacaatatacaaaatgtaagcaacgtgcccatctagccttcctcagggaagtaaatacatcccacttggccatgacttgagtatttgattgctacataatatccagcaattgctacagatgttcccacgtgtatctaacaaaatcaatattatgtcaaatagcccatcattatgragcatggaa

SEQ ID NO: 15122 - DNA, 600 bp, Chicken  19866894221248_4
ggcctgaggggagcaaactcaagcatatatgtgcaagctgaagtagtagcccttttcttttgtactactaccataaggttttcactacatcttgcggggcctttttccattctaacttagaaacactgctggtattgggtaatcctctgctatkwggtgcgggtaacatggaaaacaaactgtaactcagctgctcgaagcactgccctaagaacagttaaatgagtgaagaaagcaatttagagttcaggttactgaagaaaaacaacytgataattttaaaaagaacttgctctctcyacttgagagaaactgaagtgaatttcaaaacaccagtatttacaaatcaaaccttgaaactgctagaagtagtatcactgagcatatacaatatacaaaatgtaagcaacgtgcccatctagccttcctcagggaagtaaatacatcccacttggccatgacttgagtatttgattgctacataatatccagcaattgctacagatgttcccacgtgtatctaacaaaatcaatattatgtcaaatagcccatcattatgragcatggaagcttcaatgacaggcattttcctttctttc

SEQ ID NO: 15123 - DNA, 462 bp, Chicken  19866894221248_5
aaaacaacytgataattttaaaaagaacttgctctctcyacttgagagaaactgaagtgaatttcaaaacaccagtatttacaaatcaaaccttgaaactgctagaagtagtatcactgagcatatacaatatacaaaatgtaagcaacgtgcccatctagccttcctcagggaagtaaatacatcccacttggccatgacttgagtatttgattgctacataatatccagcaattgctacagatgttcccacgtgtatctaacaaaatcaatattatgtcaaatagcccatcattatgragcatggaagcttcaatgacaggcattttcctttctttcaaagagttataagggtatttgaatataaatcattaggcaagccctagaagcgcaaatttccagacacctgtttgctgttttcttttaaaacctttgaactagagacaaccagaagcataacgg

SEQ ID NO: 15124 - DNA, 600 bp, Chicken  19866894221249_1
tttctgtttgtttatcatgatgagcaaaggctttggaaaacctggaaaacttaaccacgctgagaaacaggcaaaaagcaggcattagcatacaatcaagagtccccccagttcaagaattattttcttttaaagcacgagactgcatcttattttgaagcatctgtaattttatcaggagcaccaaacttcctccctcccacaagctgagcaaatgacatttgcactgggatttgtgggcgcagtcaaaccccatctggctacataggaacccctagtttacgtgtgattctgaaacaytgcatagcttcggggctgggttttgtttcttataagctgtttttaacccagatcaatcacgcccaaaaaacccactgaggtttccatcaccagatcttccccccctctctgtgtttctggagttcagtttaagaactgctcaagaacttcacaagcagaaatgttatgtgcacagtccactaacagcacgggaaggaaacgactctatggatgaagctgcacagaactaaacgaagttagtaacgggtgtgctttttgggttggtgtaatggccaaatgtttccaatacgaggtccaggg

SEQ ID NO: 15125 - DNA, 600 bp, Chicken  19866894221250_1
gtttgtcctgttctcaattgcccttggcctctgttgttgattgctcttggaaacaaagcaagcaatgatttggtgaggcaaatgctccatacctgcaaggtgtcatagatgatgccttatgagtgatgcagtcttccataggcatctgtaggtatgcagcattccttccatggtggtacagagaaagcagcagagatacggactgagatgatgtgatctgcttatgcaaagcaaaatggtatatttgccaggttattcctccaagtggaaaattattgaccttgctttttctggcatacyagctactgttacagtgatgatgatggtgacagcaaccagacagaaaggccagcaataattctttcctgcccattattacaaagcataaagcaaaatccaggctaaaaccagtgctagtctggctgtgttctctttataaatgtgttaggtggttctcctatgggtttcaattcaggacttttcatattgagctttccagaaccaatctttctgatcttctgatgtgaacctgtgtctatacgtttgtatcttaccagtgatttgcagcccagagataacacccagtacatatgtgtgagt

SEQ ID NO: 15126 - DNA, 600 bp, Chicken  19866894221250_2
cctgggtgattcatctcctgacagtacatcttggctgtacatgtaagaactggatattgcccctgagaatattggctcaaagaagcaataacagtgtggtcagtcaaagtactattttccctgggaattttgttgcatgaggaaaaagaacttcagccttcctttgttcgtcaacatgatctgcctttcagcagctttttctgttcctgtcccattaaatgtgttctttttttcctgccctcatatctgtgtatctcagtcataatcagtattataaccacggatattctgccttatccmagattcaaacatgagctgataacatttgatatatccaggtgcatcaagcaaggatagagagtgaaattcattctcctaagctccactgaaatgacccaaatcattgccatagatttwttggtagtgtctgtgtttggcacctttgattcatggcatatgcattttgggtgcttggtttgaaatggcaacttgcacagctggtgtcagaagggctggagtgtctcatgggcagctatttgaagcaaaactactctggtgtttctgtaaccgactacaggggtgagtgagagttgaaatgag

SEQ ID NO: 15127 - DNA, 600 bp, Chicken  19866894221250_3
tccctgggaattttgttgcatgaggaaaaagaacttcagccttcctttgttcgtcaacatgatctgcctttcagcagctttttctgttcctgtcccattaaatgtgttctttttttcctgccctcatatctgtgtatctcagtcataatcagtattataaccacggatattctgccttatccmagattcaaacatgagctgataacatttgatatatccaggtgcatcaagcaaggatagagagtgaaattcattctcctaagctccactgaaatgacccaaatcattgccatagatttwttggtagtgtctgtgtttggcacctttgattcatggcatatgcattttgggtgcttggtttgaaatggcaacttgcacagctggtgtcagaagggctggagtgtctcatgggcagctatttgaagcaaaactactctggtgtttctgtaaccgactacaggggtgagtgagagttgaaatgagatgaattgctcagtgtaacccacttgaagaatgttttattggctccagtgcttcaggagcaggctggcatacctgtgaggcyggcgtacatgtaaggccaggaggatggctttggaa

SEQ ID NO: 15128 - DNA, 600 bp, Chicken  19866894221250_4
ccactgaaatgacccaaatcattgccatagatttwttggtagtgtctgtgtttggcacctttgattcatggcatatgcattttgggtgcttggtttgaaatggcaacttgcacagctggtgtcagaagggctggagtgtctcatgggcagctatttgaagcaaaactactctggtgtttctgtaaccgactacaggggtgagtgagagttgaaatgagatgaattgctcagtgtaacccacttgaagaatgttttattggctccagtgcttcaggagcaggctggcatacctgtgaggcyggcgtacatgtaaggccaggaggatggctttggaaatggcattttattcatcatctcaractttgggaggtagagataaatgatcacatgaagtcatcctgaactcgtgcccacgcaatgcttttgttccaggcactgtcttgtttactcctaggacttgacagtagttttcctgctgggagaggaagattaaggtttacytaccagacagataaagattccttagggcagagcagttagggtgtctctatagagccccaggagtgtgagctccagctttgcactgcactttaaggaggt

SEQ ID NO: 15129 - DNA, 600 bp, Chicken  19866894221250_5
tttgattcatggcatatgcattttgggtgcttggtttgaaatggcaacttgcacagctggtgtcagaagggctggagtgtctcatgggcagctatttgaagcaaaactactctggtgtttctgtaaccgactacaggggtgagtgagagttgaaatgagatgaattgctcagtgtaacccacttgaagaatgttttattggctccagtgcttcaggagcaggctggcatacctgtgaggcyggcgtacatgtaaggccaggaggatggctttggaaatggcattttattcatcatctcaractttgggaggtagagataaatgatcacatgaagtcatcctgaactcgtgcccacgcaatgcttttgttccaggcactgtcttgtttactcctaggacttgacagtagttttcctgctgggagaggaagattaaggtttacytaccagacagataaagattccttagggcagagcagttagggtgtctctatagagccccaggagtgtgagctccagctttgcactgcactttaaggaggttttgtctgataactcagctgcaaaaagttattcaagctgagcagtttggagacaaacat

SEQ ID NO: 15130 - DNA, 600 bp, Chicken  19866894221250_6
gtgagagttgaaatgagatgaattgctcagtgtaacccacttgaagaatgttttattggctccagtgcttcaggagcaggctggcatacctgtgaggcyggcgtacatgtaaggccaggaggatggctttggaaatggcattttattcatcatctcaractttgggaggtagagataaatgatcacatgaagtcatcctgaactcgtgcccacgcaatgcttttgttccaggcactgtcttgtttactcctaggacttgacagtagttttcctgctgggagaggaagattaaggtttacytaccagacagataaagattccttagggcagagcagttagggtgtctctatagagccccaggagtgtgagctccagctttgcactgcactttaaggaggttttgtctgataactcagctgcaaaaagttattcaagctgagcagtttggagacaaacatgcagaaagacaggctgcatagctttctcatttgttcttggctacagtagcttcagtatctcaaatacatccacctgatgggtcatctctgatcacttctcagagctgttgagagaaggctgtgatttttctcccaagggtta

SEQ ID NO: 15131 - DNA, 599 bp, Chicken  19866894221253_1
  misc_feature (1)..(76): n is any nucleotide
nnnnnnnnnnnnnnnnnnnnnnnnnnnnnnnnnnnnnnnnnnnnnnnnnnnnnnnnnnnnnnnnnnnnnnnnnnnncaaacaggcccttgtcaagacaagatctactactggcttaaactgatactcatttaccgcaagattagactagaaaacagaaaccaagtttctcattttgttcatacttgatatctcagatgacctcttaaaagtatatcaaagtaccaaacacctggatgactgctctccagctacagaggagcacttcataaacattcttgccacttctgagaaatagtacrgcaatggtgcaaacaacagggactgtgaaggttggactcagcatgaacattcctcttcctcttaatggtagcagctcagtcacacctagcagatcagaaatctgacatcaaacacacaactctgagatgcacctcccaaggacagtccattaccggtggcccacaattttattacacaagaaataaccttgtattctattaaaccagacacattattcagctccagtgcactgcaaaaatcccctaacgatcccctacagataggcaccagtgatttaccagtaactcagctcctcagt

SEQ ID NO: 15132 - DNA, 599 bp, Chicken  19866894221255_1
  misc_feature (1)..(108): n is any nucleotide
nnnnnnnnnnnnnnnnnnnnnnnnnnnnnnnnnnnnnnnnnnnnnnnnnnnnnnnnnnnnnnnnnnnnnnnnnnnnnnnnnnnnnnnnnnnnnnnnnnnnnnnnnnnnaacaagcatgtaaaatattcttgctcaggcaaatgattagacagaagccttgcacagcaagatttaacacattcaggtggcatttcttataagggtgtagcagacttataagttccattggcaccagcactccatttcctcctttctggagagtgagctatgtgaatagctaaagcttacctgcaccatgargttattggcatatctaactgccgcaagcagttttatttgtatattctgaaatgtaagatcaaagcagaccacgtggtatatttcacagtcctgtcctaaaagcatcgctaacaggagattttctggcagcagggagcaagtctgcatgcatgattggctataaactgtggactttgaattgcgaagacattgagagtggggggtggatataggagcaatcattaggtctataaccggcaggacaaatgcttgcccaaggagtcagcgggagcgttgctgacacaactggcgatgtggaa

SEQ ID NO: 15133 - DNA, 600 bp, Chicken  19866894221255_2
aacttccagggaacagcttcagacagctcctggccacgctacaaatgcaattaaaagttgtgagtatctgacagccactaaagtcagccttcgtctaataattaatcacccatggggccagtgtgtcattcacctatgagtggatgacaattcagataaagccagtgagtggtggcagtgtctctactgccttgtggctgagcagtgggctgagtagattcaacatttctggtctcaagagaacttagaatgaacagttttccttgcctccaactccattccttcccttggcagtcattmgtctcccaggcagtatctgtggtagtgctggctgcactcatgctgtgcttttatgggctgtgtggacaaaactgcccaagctcacacagtcctgcctgcctcatggactgggaggtggcagagacgcagtcaggctgggtgggatggggctrgggagactgaaagtcttttgctcagatcagggccctcttagggaggctgaagaactgaattggacaagcagctatgaaacctggactaatgccattgacaaatgagggactaaaggtcaaggaattgctttctgcttcccggatgaat

SEQ ID NO: 15134 - DNA, 488 bp, Chicken  19866894221255_3
cagataaagccagtgagtggtggcagtgtctctactgccttgtggctgagcagtgggctgagtagattcaacatttctggtctcaagagaacttagaatgaacagttttccttgcctccaactccattccttcccttggcagtcattmgtctcccaggcagtatctgtggtagtgctggctgcactcatgctgtgcttttatgggctgtgtggacaaaactgcccaagctcacacagtcctgcctgcctcatggactgggaggtggcagagacgcagtcaggctgggtgggatggggctrgggagactgaaagtcttttgctcagatcagggccctcttagggaggctgaagaactgaattggacaagcagctatgaaacctggactaatgccattgacaaatgagggactaaaggtcaaggaattgctttctgcttcccggatgaatgggagatacctttgcctcagtggcaagcaggctgttattc

SEQ ID NO: 15135 - DNA, 600 bp, Chicken  19866894221259_1
tggaaaaacttgacagcgagacaagcttgaaaaaacatccacctcctcaattcctcattatctgtgttctctccttttctctttaggtttcttttatctcctgtctccttcaaactgtgttctccttctctactcccagagccaggaccaggcagtagcgcagcaggaggcaggcaggagctctgcaggagtgtggccattgaaagacagtgccagcaaacgcatccagccgctttagctgagcggcttcccagggtcaatgctgattggaaagatgatggaggcatttataaagggcckcttcacaccctccagggattcctgtcaggacctccaaagaagcgtgcagagctggctccatcccatcttgcaggcactgcatcagaccctggctcttgctcccccgcctcagtgtaacagagcctggcacagacaatgccacagctccttgccagcattttaacaaatggcctcccaaaattcacccttgggctgtgacaaaccctctgtagtaggggggtgtgtatttgcagaattggagaaggagagtaatggtatttgaccaacaaatgcacgttaattactctttccacaaatatc

SEQ ID NO: 15136 - DNA, 600 bp, Chicken  19866894221261_1
acactatgttttttaaatatatattgggcctgccagcttgctaaacgtaaggtcagtaagtatacagatgtaaggctagaaagattattgcattagaaagggataatcagagatgaatggaaaccttacccatgtcctgggcttaccaaaaaagctccaagagaagcaatctcaagaaagagatcctttcccagtggcagtcagcccttaggtgaattgccttcacctgtgctcctgcagctgactcagtgctcatctcaggtggtcaatcagaggttcagtctgtgattcaacagttcycatacaatccttagccactctggtgattacagtaaaatagaaggagctgctgttgctctgaagggatgacaggctatgcagaggactctggatagaatgcagtattgggcaatcagcaacaataagaaatccaacaaaggaaattgctgggtgctgcacctgggacagaataatgtcaggcgtaagtatagatagttaatagaatcacagaatcatagaatgacctaggttgaaaaggacctcaaagatcatgtagtttcaagatccctgcaatgggcagggtcgccaaccactagacca

SEQ ID NO: 15137 - DNA, 600 bp, Chicken  19866894221263_1
cccattactgttaaagtttactatcattcagcaatactggaaagaaaggatccttctcataaatttacaaaatgccagtcttcagaataaggaattatgttttaatagggaactgtcttcagcgatatttagaatttcctgtagctgttattaaaaccatagtaaatatttcacatacctaaacagcatttcaaactgtttttcattttctgattattatcaactgtaaaagttaagatggccttcagaatgcagaacagaacagaacacttataaaatacataatccctggtacaaagyagtttgttccctaattgatgattttgctatcattttgtcaggatattacagtacagtgtttttctttccttagctacctttatacagyttatgacactctagtacctgcagctcagaacatactagttaaggaggtactgttccatacaaaacagaaatacagcgctcattaaatacatyaccactttcagccttgctgcttcaacacagaatcatatcaaggcatcaggactttcattaactcccttttcaactttcttcaacaagaactaacaaccacattccagaaaagttaaatgc

SEQ ID NO: 15138 - DNA, 600 bp, Chicken  19866894221263_2
aaggaattatgttttaatagggaactgtcttcagcgatatttagaatttcctgtagctgttattaaaaccatagtaaatatttcacatacctaaacagcatttcaaactgtttttcattttctgattattatcaactgtaaaagttaagatggccttcagaatgcagaacagaacagaacacttataaaatacataatccctggtacaaagyagtttgttccctaattgatgattttgctatcattttgtcaggatattacagtacagtgtttttctttccttagctacctttatacagyttatgacactctagtacctgcagctcagaacatactagttaaggaggtactgttccatacaaaacagaaatacagcgctcattaaatacatyaccactttcagccttgctgcttcaacacagaatcatatcaaggcatcaggactttcattaactcccttttcaactttcttcaacaagaactaacaaccacattccagaaaagttaaatgcaaacttattatttgtttaacttttccactgccatctcaactaataacagtcttcacttccaaaggaggttttgttttttgagcttcaa

SEQ ID NO: 15139 - DNA, 600 bp, Chicken  19866894221263_3
aaacagcatttcaaactgtttttcattttctgattattatcaactgtaaaagttaagatggccttcagaatgcagaacagaacagaacacttataaaatacataatccctggtacaaagyagtttgttccctaattgatgattttgctatcattttgtcaggatattacagtacagtgtttttctttccttagctacctttatacagyttatgacactctagtacctgcagctcagaacatactagttaaggaggtactgttccatacaaaacagaaatacagcgctcattaaatacatyaccactttcagccttgctgcttcaacacagaatcatatcaaggcatcaggactttcattaactcccttttcaactttcttcaacaagaactaacaaccacattccagaaaagttaaatgcaaacttattatttgtttaacttttccactgccatctcaactaataacagtcttcacttccaaaggaggttttgttttttgagcttcaacttttcttttctttctaatgtgaaacctattcatttcactccaaaactctacagtttgctttgccaaatgcctgcaattatcacttctcaat

SEQ ID NO: 15140 - DNA, 600 bp, Chicken  19866894221264_1
tttcttcctttttttttttttttttttttcccctaatggaaacaccaggtgttccatgttcctcctgtgtctctatgaaaagatgcataaggcagctttgactttgacctattttcttttttcagacagtgtttaaatatgggtctaaaatattttacacccaatctgatttagactcaccctcactattttcagatttcattggtaaaaagattttgttttctttgttttaaagacaaacttgcctcactgtaaaatttttgctacagactggagaatacccaaacacaactatcataragagctgtacaactgcactgtataaatatacacatgcaaaagcacatacaaaacttgtgggaggtagttgactcttatcaaattgcctctcaaaagcacaggagatacacccatctgagtagctaaaataaatatttactgcagcatcctaaggaaccattataaatatatgtgagtatccatagtgagataaatagtctctggttttctgaaattagaaggtaatcaagaatataaaccccgactttctcttgycttccaatagcaaagttgaaacagattcttcatcagttttggatt

SEQ ID NO: 15141 - DNA, 600 bp, Chicken  19866894221264_2
aatttttgctacagactggagaatacccaaacacaactatcataragagctgtacaactgcactgtataaatatacacatgcaaaagcacatacaaaacttgtgggaggtagttgactcttatcaaattgcctctcaaaagcacaggagatacacccatctgagtagctaaaataaatatttactgcagcatcctaaggaaccattataaatatatgtgagtatccatagtgagataaatagtctctggttttctgaaattagaaggtaatcaagaatataaaccccgactttctcttgycttccaatagcaaagttgaaacagattcttcatcagttttggattactgttgacaaattagcccttcatagaatatatttgaaagttaaagacattactttatgcattgattaaattgaaactttccttttaatataattccgtatacttgaaaagacaattttcctaacagaggaagaaccaattacataatgtaatacactctccttaatgacatgactttattggaatttaagttaatcactatgatggtatgatgtgcactttattaatattgtattatactgccttaaattacta

SEQ ID NO: 15142 - DNA, 600 bp, Chicken  19866894221266_1
tggaatctataactgaaagagatcatttcagaagttcataatttgttccaaattacaaaatactggaaggaattttttcctaagtgttaatattttcaacactctccacaaatgcattgctaagaagaactgtcaagaacacagatcattcagaatcaatacaaatcattgttaatatagtggtctctgaatttactcataatggcctgtagtgttgacaaaaattctggatttcaaatcattgctttctggtaattatacagttcatttattttatattgtctagacacttatttgggrraaaaaaaattggcaattggtaatgaaggaaatctgtatttaaaatgaagtagtaggaaaatacagaggattgtcttctattggtgcatttttaaaattgttaaattactgctttaagaataaaagggtttttgtttctttcttctgatacatttcacagctatgcttgatgtttacagagagttgagatgagtttcttgtctttagctaatgagactttgtaaatattgcaagaatctcactgtttttctctttaagagcatgttattttcaataattgaaaaaaaagatattttcatt

SEQ ID NO: 15143 - DNA, 600 bp, Chicken  19866894221266_2
ggaatctataactgaaagagatcatttcagaagttcataatttgttccaaattacaaaatactggaaggaattttttcctaagtgttaatattttcaacactctccacaaatgcattgctaagaagaactgtcaagaacacagatcattcagaatcaatacaaatcattgttaatatagtggtctctgaatttactcataatggcctgtagtgttgacaaaaattctggatttcaaatcattgctttctggtaattatacagttcatttattttatattgtctagacacttatttgggrraaaaaaaattggcaattggtaatgaaggaaatctgtatttaaaatgaagtagtaggaaaatacagaggattgtcttctattggtgcatttttaaaattgttaaattactgctttaagaataaaagggtttttgtttctttcttctgatacatttcacagctatgcttgatgtttacagagagttgagatgagtttcttgtctttagctaatgagactttgtaaatattgcaagaatctcactgtttttctctttaagagcatgttattttcaataattgaaaaaaaagatattttcattc

SEQ ID NO: 15144 - DNA, 600 bp, Chicken  19866894221269_1
agtgctcttaagctctagctagttcctggttcagcagaataaattttcaatcataggcaaactgacagctcttcatgaaacatttgaacaatgtccagcttccctccaaacaaatgtcatctcccagtcatacagaaaaatcacaaactaaaataagtatttttcaatagcaactgctctgctagaaatttaactcccttcagtacttttaaaatgcaacattaattacagagaatgttaacagaaaatttccttaaaatacattcatcttcaaacttcaaatttcaaatccttattgamagtacataaaataaaggaagctatccttggaagctgcttattgatctctgtatatcagaaaagccaataaacactgtctactctccgttactcagtttgtggttaattacaccagggaagaactgcagagacacctaagctgtctccatgcagtgccagctgggaataagtccagcagggagtaatgtttcagcattaactcatttgaatgcttgaaaacaccccagagtttccgatacaaaaaagagctaatttaatcagctgaaatataaatgcagtgtcactattctgggacctaca

SEQ ID NO: 15145 - DNA, 600 bp, Chicken  19866894221271_1
aacatagataacgcctatcctggctttttctacctctcaagtcttggcttcagcaacttattactttgtaaggccaatttctgtgtgtctcagctgaaatgtttgagtgtaagtaatgaaagtcactggaactgcttttgttttttttcatgtgtgagattatttaatatagtagcatctaatttaatgggattggacactggacaatgaactaacacattgctacatgcttcttcccattcaattagagagcattagaggcaagcaattgcatgaaattcattgttgtaacaaatagayaaataatgaaaagaaatgcaaactcacactcagctacagttgtcggctcagctgccaggaaggctaactgcctggccatttgtctctcctgctgtctggaaatagaagtgttcatgagagacatttcatatatccctcttcagaaactggagcgggtactgggtagacttgcagtagaaacccaagtttcagaatgtttttctctctgctcctataactggaaagaactgctggaagcaatggcatatcaccagtataatactatctcaggagaaatgaattgctcccacacagagattt

SEQ ID NO: 15146 - DNA, 600 bp, Chicken  19866894221271_2
tataactggaaagaactgctggaagcaatggcatatcaccagtataatactatctcaggagaaatgaattgctcccacacagagatttcagtgaaaaagccttgtgattgcaatggtatcacttatgctgatagcagagctaaataatgcaatggacttcatatggagattctgtatgaaagcagtgctgcccactagctgaatgagaggtaccgtccaggggtattttcactgttcttcctgccttacaaacatgacagtgtccagcaacggctttggttgatgctctgtgcataacaygaggtactcacactatcaggctgcctacagggaagctaacagtttacttccaggtgtgctgtatcattatgccacaggataggatgcctgtatgaactttgtgcctcctgccagagagctcagcacaagtcttgggaactgcgtgtttgacttctgcggatttgaattcagatgtgtcagggtttragcagcaaaacagagaaatacaaattcgtgcattgctttggcacctgaggcaaaaacargacctaaatattatccctgccatagctgcaattacattttgggccttacctgtgt

SEQ ID NO: 15147 - DNA, 600 bp, Chicken  19866894221271_3
gctgcccactagctgaatgagaggtaccgtccaggggtattttcactgttcttcctgccttacaaacatgacagtgtccagcaacggctttggttgatgctctgtgcataacaygaggtactcacactatcaggctgcctacagggaagctaacagtttacttccaggtgtgctgtatcattatgccacaggataggatgcctgtatgaactttgtgcctcctgccagagagctcagcacaagtcttgggaactgcgtgtttgacttctgcggatttgaattcagatgtgtcagggtttragcagcaaaacagagaaatacaaattcgtgcattgctttggcacctgaggcaaaaacargacctaaatattatccctgccatagctgcaattacattttgggccttacctgtgtctgggttggtaagagaacagctgagggggcccaaatggaatatgagcatgtgttgcctaactcttaaaaaattccttcattccatcttgctgaagtctcattttctttgcacttcttttccttccagagtagcctcttccctaccctaagcggtccccagctatccctrcagtacctctggtatgc

SEQ ID NO: 15148 - DNA, 600 bp, Chicken  19866894221271_4
ttacaaacatgacagtgtccagcaacggctttggttgatgctctgtgcataacaygaggtactcacactatcaggctgcctacagggaagctaacagtttacttccaggtgtgctgtatcattatgccacaggataggatgcctgtatgaactttgtgcctcctgccagagagctcagcacaagtcttgggaactgcgtgtttgacttctgcggatttgaattcagatgtgtcagggtttragcagcaaaacagagaaatacaaattcgtgcattgctttggcacctgaggcaaaaacargacctaaatattatccctgccatagctgcaattacattttgggccttacctgtgtctgggttggtaagagaacagctgagggggcccaaatggaatatgagcatgtgttgcctaactcttaaaaaattccttcattccatcttgctgaagtctcattttctttgcacttcttttccttccagagtagcctcttccctaccctaagcggtccccagctatccctrcagtacctctggtatgctttctcctttgccaggtgtctttcagcttcgctgccrtgtggcttatgagagtctacag

SEQ ID NO: 15149 - DNA, 600 bp, Chicken  19866894221271_5
agatgtgtcagggtttragcagcaaaacagagaaatacaaattcgtgcattgctttggcacctgaggcaaaaacargacctaaatattatccctgccatagctgcaattacattttgggccttacctgtgtctgggttggtaagagaacagctgagggggcccaaatggaatatgagcatgtgttgcctaactcttaaaaaattccttcattccatcttgctgaagtctcattttctttgcacttcttttccttccagagtagcctcttccctaccctaagcggtccccagctatccctrcagtacctctggtatgctttctcctttgccaggtgtctttcagcttcgctgccrtgtggcttatgagagtctacagaaatagggctgttccaagcactttcgtgtttcttcctctcatttacaatgaactcgtagaggtcttgattgcgtttgcagcagaacttctggaaggcagagagcagtgtcactgcagcagggctccccagggccggcccctcatctttctccttctcactgctctgtaacctgcggtggaggggtgaatgtcctcgaaggaagggaatggcctcagcaggcttc

SEQ ID NO: 15150 - DNA, 600 bp, Chicken  19866894221271_6
ttggcacctgaggcaaaaacargacctaaatattatccctgccatagctgcaattacattttgggccttacctgtgtctgggttggtaagagaacagctgagggggcccaaatggaatatgagcatgtgttgcctaactcttaaaaaattccttcattccatcttgctgaagtctcattttctttgcacttcttttccttccagagtagcctcttccctaccctaagcggtccccagctatccctrcagtacctctggtatgctttctcctttgccaggtgtctttcagcttcgctgccrtgtggcttatgagagtctacagaaatagggctgttccaagcactttcgtgtttcttcctctcatttacaatgaactcgtagaggtcttgattgcgtttgcagcagaacttctggaaggcagagagcagtgtcactgcagcagggctccccagggccggcccctcatctttctccttctcactgctctgtaacctgcggtggaggggtgaatgtcctcgaaggaagggaatggcctcagcaggcttctgcagtactcacacttcggagcatggtcctcctctgcctaaagtggaggcagga

SEQ ID NO: 15151 - DNA, 600 bp, Chicken  19866894221287_1
aacatagctttctaacatatgacacacagctgaggttcagcatggaggaaggccaatacctctttagtttttatggatattctagtaaaataattcctccattttataattagaaactgcaaatcacccagtaatctctcagtaattatatgaagtttgtttttatttaatctattttatcaatttagattttatcaagaacttcagaggattatgtacgcatttatttatgtgcctactgacacatacaagaaaggaacagaggagggaattagagtttaaaaattaaggggtcacaartctcctaaaaaagttttaactaaataagtctttgccagctcctgcacccacccttcacagctaaacatagaatttcactgcctctttttttacctacagcraactgaaacatacggataaaatgagcctgatccagctcgcaatgaattattctacagaagtatcactttgacttcagaaggaataggatcaggatggaacaagatacaacagggttgtagtaacagcctgtgttgaygggagaaatcagatggtgaacttytgactcattgtctagttcctccactacttacctgtgta

SEQ ID NO: 15152 - DNA, 600 bp, Chicken  19866894221287_2
ttttataattagaaactgcaaatcacccagtaatctctcagtaattatatgaagtttgtttttatttaatctattttatcaatttagattttatcaagaacttcagaggattatgtacgcatttatttatgtgcctactgacacatacaagaaaggaacagaggagggaattagagtttaaaaattaaggggtcacaartctcctaaaaaagttttaactaaataagtctttgccagctcctgcacccacccttcacagctaaacatagaatttcactgcctctttttttacctacagcraactgaaacatacggataaaatgagcctgatccagctcgcaatgaattattctacagaagtatcactttgacttcagaaggaataggatcaggatggaacaagatacaacagggttgtagtaacagcctgtgttgaygggagaaatcagatggtgaacttytgactcattgtctagttcctccactacttacctgtgtagtaaacatcgctttgaccccartctaagagtatgcacgtaaacacttgatgataaattcagggatgtgacccaatgggattacttatgaacttatttatgc

SEQ ID NO: 15153 - DNA, 600 bp, Chicken  19866894221287_3
ctgacacatacaagaaaggaacagaggagggaattagagtttaaaaattaaggggtcacaartctcctaaaaaagttttaactaaataagtctttgccagctcctgcacccacccttcacagctaaacatagaatttcactgcctctttttttacctacagcraactgaaacatacggataaaatgagcctgatccagctcgcaatgaattattctacagaagtatcactttgacttcagaaggaataggatcaggatggaacaagatacaacagggttgtagtaacagcctgtgttgaygggagaaatcagatggtgaacttytgactcattgtctagttcctccactacttacctgtgtagtaaacatcgctttgaccccartctaagagtatgcacgtaaacacttgatgataaattcagggatgtgacccaatgggattacttatgaacttatttatgcaaattcrcaggtactctgctaacactctattcactctttgacaagacctttcagatattatattttccttttctttctctatgtgtactgaaaagataaaaagcaaaacaaaacaggaatccaagcaacagaagctg

SEQ ID NO: 15154 - DNA, 600 bp, Chicken  19866894221287_4
aggagggaattagagtttaaaaattaaggggtcacaartctcctaaaaaagttttaactaaataagtctttgccagctcctgcacccacccttcacagctaaacatagaatttcactgcctctttttttacctacagcraactgaaacatacggataaaatgagcctgatccagctcgcaatgaattattctacagaagtatcactttgacttcagaaggaataggatcaggatggaacaagatacaacagggttgtagtaacagcctgtgttgaygggagaaatcagatggtgaacttytgactcattgtctagttcctccactacttacctgtgtagtaaacatcgctttgaccccartctaagagtatgcacgtaaacacttgatgataaattcagggatgtgacccaatgggattacttatgaacttatttatgcaaattcrcaggtactctgctaacactctattcactctttgacaagacctttcagatattatattttccttttctttctctatgtgtactgaaaagataaaaagcaaaacaaaacaggaatccaagcaacagaagctgatgttgacttgcaaagcagcttcc

SEQ ID NO: 15155 - DNA, 600 bp, Chicken  19866894221287_5
aataagtctttgccagctcctgcacccacccttcacagctaaacatagaatttcactgcctctttttttacctacagcraactgaaacatacggataaaatgagcctgatccagctcgcaatgaattattctacagaagtatcactttgacttcagaaggaataggatcaggatggaacaagatacaacagggttgtagtaacagcctgtgttgaygggagaaatcagatggtgaacttytgactcattgtctagttcctccactacttacctgtgtagtaaacatcgctttgaccccartctaagagtatgcacgtaaacacttgatgataaattcagggatgtgacccaatgggattacttatgaacttatttatgcaaattcrcaggtactctgctaacactctattcactctttgacaagacctttcagatattatattttccttttctttctctatgtgtactgaaaagataaaaagcaaaacaaaacaggaatccaagcaacagaagctgatgttgacttgcaaagcagcttcctggtttgttactgttcttttgtaattatgacagagaaaaagagttcatcaataaaacagc

SEQ ID NO: 15156 - DNA, 600 bp, Chicken  19866894221287_6
acatacggataaaatgagcctgatccagctcgcaatgaattattctacagaagtatcactttgacttcagaaggaataggatcaggatggaacaagatacaacagggttgtagtaacagcctgtgttgaygggagaaatcagatggtgaacttytgactcattgtctagttcctccactacttacctgtgtagtaaacatcgctttgaccccartctaagagtatgcacgtaaacacttgatgataaattcagggatgtgacccaatgggattacttatgaacttatttatgcaaattcrcaggtactctgctaacactctattcactctttgacaagacctttcagatattatattttccttttctttctctatgtgtactgaaaagataaaaagcaaaacaaaacaggaatccaagcaacagaagctgatgttgacttgcaaagcagcttcctggtttgttactgttcttttgtaattatgacagagaaaaagagttcatcaataaaacagcttgtcttcattgctcatgtcagtctcagtaagattataatgtctgcttttgcagcacagcttcaccttcagcagcccctgtccatc

SEQ ID NO: 15157 - DNA, 600 bp, Chicken  19866894221288_1
tgatgctcctagtgtgcttctggctggaattcacagtcccaggctccttttgtccccagtgcatcactaccagcaccactgatgcagaggcgcagtgagagccaccggccctcggtccccaccctgcctgtgtggcagctcacattgctcccatttgctcttcagggccatcgttatctccctcccaggttttcggtgtttctcaggcttcccttaatccaccttccccacgggcactgcgaatttccactcctagacagacccgagaaattcctggttactcccagctctgccactcaygttttctccatgtgaccccgattactccacgtttcttatcagtttcctcttcctttccagctgatctggacgctttgtttgagtttcacgccttgctggttccccttccctggaagcccaggggaagtgtgagcgagctccactgacgtttgcagttgggcagatgcgatggctgcagcagagtgttataaaacaggtttgaagcattgttcacattcggggggctcggggcctccctccagctggttgggcttaaagcaggttacagcactgggaaagtgagctcttttaaagtatcaa

SEQ ID NO: 15158 - DNA, 600 bp, Chicken  19866894221289_1
ttgatacaagagaggatgtcactttttttcacggcaaagatgtaaatcttctcttgtagattttttccatgatatataacaacaaagcccatgctactcagccctctctttgtagaaatagaaaagctcttgcttgctattgactattggccgcattagactatgacctttggaaatggttcagcattagcagtcttactggttcttattgatgtgtattaatgattaggacctgactctttcatgcatatctcacagaattcttcctgtcctgtgtagtccacaggcttgagaaagttrttttattctcagatgcagaggctggtgctaactcctccccaaaggcaatgggacatctcttggctgtgagmaagggcacgtagccttcagttcccctgcaggctttccttttaactgctgcccactaataggttttactttcttaatttttttgccatttagctgtttctcccttccttccccctccctccctgcccccctccctcattccctttcaagcccatcgcttttccycacaggacttattaagccatcaagggtttatatttagttctggcagaagtcagagggtatgtgtct

SEQ ID NO: 15159 - DNA, 600 bp, Chicken  19866894221289_2
atatataacaacaaagcccatgctactcagccctctctttgtagaaatagaaaagctcttgcttgctattgactattggccgcattagactatgacctttggaaatggttcagcattagcagtcttactggttcttattgatgtgtattaatgattaggacctgactctttcatgcatatctcacagaattcttcctgtcctgtgtagtccacaggcttgagaaagttrttttattctcagatgcagaggctggtgctaactcctccccaaaggcaatgggacatctcttggctgtgagmaagggcacgtagccttcagttcccctgcaggctttccttttaactgctgcccactaataggttttactttcttaatttttttgccatttagctgtttctcccttccttccccctccctccctgcccccctccctcattccctttcaagcccatcgcttttccycacaggacttattaagccatcaagggtttatatttagttctggcagaagtcagagggtatgtgtctrctcccacctccggtgatgtaaggctaaccccagggtctgcactttcagccaaacctagtgcttggtggag

SEQ ID NO: 15160 - DNA, 600 bp, Chicken  19866894221289_3
gactctttcatgcatatctcacagaattcttcctgtcctgtgtagtccacaggcttgagaaagttrttttattctcagatgcagaggctggtgctaactcctccccaaaggcaatgggacatctcttggctgtgagmaagggcacgtagccttcagttcccctgcaggctttccttttaactgctgcccactaataggttttactttcttaatttttttgccatttagctgtttctcccttccttccccctccctccctgcccccctccctcattccctttcaagcccatcgcttttccycacaggacttattaagccatcaagggtttatatttagttctggcagaagtcagagggtatgtgtctrctcccacctccggtgatgtaaggctaaccccagggtctgcactttcagccaaacctagtgcttggtggaggaagactcagtgcatcgactttcccatgccctcagagtttgcctgtcaagactgcaagaatttcaatccaagtatctttcctggtgccaactgctacagtgaaaaataaaagcaaattcacaatggtcatttcttgctttaaccttatacatttaggcccaga

SEQ ID NO: 15161 - DNA, 600 bp, Chicken  19866894221289_4
tttattctcagatgcagaggctggtgctaactcctccccaaaggcaatgggacatctcttggctgtgagmaagggcacgtagccttcagttcccctgcaggctttccttttaactgctgcccactaataggttttactttcttaatttttttgccatttagctgtttctcccttccttccccctccctccctgcccccctccctcattccctttcaagcccatcgcttttccycacaggacttattaagccatcaagggtttatatttagttctggcagaagtcagagggtatgtgtctrctcccacctccggtgatgtaaggctaaccccagggtctgcactttcagccaaacctagtgcttggtggaggaagactcagtgcatcgactttcccatgccctcagagtttgcctgtcaagactgcaagaatttcaatccaagtatctttcctggtgccaactgctacagtgaaaaataaaagcaaattcacaatggtcatttcttgctttaaccttatacatttaggcccagactttagccagcatgagtcagagcagccccattggtcaaggcaagggctgtgccaggttatgtcacct

SEQ ID NO: 15162 - DNA, 599 bp, Chicken  19866894221293_1
  misc_feature (1)..(63): n is any nucleotide
nnnnnnnnnnnnnnnnnnnnnnnnnnnnnnnnnnnnnnnnnnnnnnnnnnnnnnnnnnnnnnntagattttctgtagtcaaaacgggaggtttgtttggttgatgaagtttgaatttgcaaaacacagttaaaaaaaaaagaactgacgtaaaggacaggattcagtgtaagaggctctgtgacttcttagtaagacagcatcaaaacaaataacagagaatttcatgttttaatttttaagggaagctcagactatttaaggcaggagcaccaaacagatcacttaatatttcaacaaraaaagtacttccttcattttggtttgtactataaccattttttatctgataaacaatctttttctgttttacagtgaatgagtccatgcagcagatcataaacacatcaccaagtcatgatattggaacatcacttcctgccgatacctaaatattaatgtaagtgaaacctgaaggggttgcttttagtgtgtggtgaatgttgcatcgtcaccaggtgaccaatgttggtttttttttaatcattgaatgtgctcctttatcaaagtgcctttgagataagtagaagtaaggcttga

SEQ ID NO: 15163 - DNA, 599 bp, Chicken  19866894221295_1
  misc_feature (1)..(96): n is any nucleotide
nnnnnnnnnnnnnnnnnnnnnnnnnnnnnnnnnnnnnnnnnnnnnnnnnnnnnnnnnnnnnnnnnnnnnnnnnnnnnnnnnnnnnnnnnnnnnnnntgatcttccttttgccttttaggtataccatgggatggtccagttaagggttaggagttgggtggcttgtcagtgcttctgagaggtgcaaaaacccctttttctaccttttgttctcacctctcttgaaaagagatgagcagaaggagcacccatctccctttattgccttggccaaatagtaaggaccacatggaaaggagractgaggcatgccaagcaacacatggtttgtgatgtgcacagagaccaggattcaaaccacagtgttactgtgcctaagccctaacagagaggcagccaccatcttcatctgatgtgacggagtaaggatgcaacccttttatgcgctcactggttaatgcaatgtatgtttgtatggaggaggtggtgcttggtgagagtgggagaatgcttaaccgcagtgattagtgttaattggttaatcacctttcattatgggygaagaaagtaagtgcagtaatttgcaatatggcttgaca

SEQ ID NO: 15164 - DNA, 600 bp, Chicken  19866894221295_2
attgccttggccaaatagtaaggaccacatggaaaggagractgaggcatgccaagcaacacatggtttgtgatgtgcacagagaccaggattcaaaccacagtgttactgtgcctaagccctaacagagaggcagccaccatcttcatctgatgtgacggagtaaggatgcaacccttttatgcgctcactggttaatgcaatgtatgtttgtatggaggaggtggtgcttggtgagagtgggagaatgcttaaccgcagtgattagtgttaattggttaatcacctttcattatgggygaagaaagtaagtgcagtaatttgcaatatggcttgacaccattgctggattggagaccraagcctgagaattaattctaagtatgaccttttcaggccagaggagaagatcccaaagatgagtattctttgatttggagattgagcaggagcacactgcctggcctgtggccctgctgattggcctccagggcttatggggtgctgaggcagcctctggagcttctcctgcctgctcggggcacatgactcagagccatgagaccttggttagctcctcgtgagcaggcaagtgctctg

SEQ ID NO: 15165 - DNA, 600 bp, Chicken  19866894221295_3
acatggtttgtgatgtgcacagagaccaggattcaaaccacagtgttactgtgcctaagccctaacagagaggcagccaccatcttcatctgatgtgacggagtaaggatgcaacccttttatgcgctcactggttaatgcaatgtatgtttgtatggaggaggtggtgcttggtgagagtgggagaatgcttaaccgcagtgattagtgttaattggttaatcacctttcattatgggygaagaaagtaagtgcagtaatttgcaatatggcttgacaccattgctggattggagaccraagcctgagaattaattctaagtatgaccttttcaggccagaggagaagatcccaaagatgagtattctttgatttggagattgagcaggagcacactgcctggcctgtggccctgctgattggcctccagggcttatggggtgctgaggcagcctctggagcttctcctgcctgctcggggcacatgactcagagccatgagaccttggttagctcctcgtgagcaggcaagtgctctgcacataaaggataatctaatgaatgcttctctgatggtagcaaggctcccacataaaagt

SEQ ID NO: 15166 - DNA, 600 bp, Chicken  19866894221300_1
ctgaaaccaggttctggttcagtcaaccactctggctgtgctttgttcagctccctaccaatgtttccatagaatcatagaatggcttgggttggaagggacctcaaggatcatcaagctccaactcccctgctgcaagcagggccaccaacctccatatctaatgctagaccaggctgcccagggccccatccaacctggccttgaacacctcctgggatggggcatccacaacctctgtaggcaacctgttccagcacctcaccactctcttggtaaagaactttccattttgattcratgctaagtctaattgtgacagatttgattcactgtaaattaaaggtgtgtagtgcaaattaaatattataatagtacctgctcctttccctagtgttcttctgggaccttccataytccggacatacagttgatagagcataatctgttacactgaagggttcacattaataattaaggtcattcagataaaaataactacagttgtacaactgagctctttatgttagtaagatttatagtgagaattattaactctaacagctattttatctccaagcaatgtccatgaaataggat

SEQ ID NO: 15167 - DNA, 518 bp, Chicken  19866894221300_2
gctccaactcccctgctgcaagcagggccaccaacctccatatctaatgctagaccaggctgcccagggccccatccaacctggccttgaacacctcctgggatggggcatccacaacctctgtaggcaacctgttccagcacctcaccactctcttggtaaagaactttccattttgattcratgctaagtctaattgtgacagatttgattcactgtaaattaaaggtgtgtagtgcaaattaaatattataatagtacctgctcctttccctagtgttcttctgggaccttccataytccggacatacagttgatagagcataatctgttacactgaagggttcacattaataattaaggtcattcagataaaaataactacagttgtacaactgagctctttatgttagtaagatttatagtgagaattattaactctaacagctattttatctccaagcaatgtccatgaaataggatgaccttttatctattacctgttgattttacagtat

SEQ ID NO: 15168 - DNA, 599 bp, Chicken  19866894221308_1
  misc_feature (1)..(31): n is any nucleotide
nnnnnnnnnnnnnnnnnnnnnnnnnnnnnnncgagggacaagttctccagcacaacgtgccctgggtggaagggaacagagaggacggctacctctgggggctggacaaccttcatccagatcctgacagacttgtcccagagcgaggacttgcattaaagcccgcgtccgactctgccactacccaaacctgcccccaactgactcctctgaactgcactacaagacactttccaacccttgcccttccaattttaaagctatactctccctatttaaggtggttttgttgtggttttyttttttttttagggtatttctcccccctctacatgtaaatacaaagctaacctgccggaacaaatgctgaacttgaaacctyggcttcacagagttagtggcagcctgggaggggttggttaggcgggcatgtgcttttgcctcttgcgcagcttggttttcagggaaccttccacccaggtggcagtggatcagggatgctgcagccgggctctgtggtgatgcggggccctccctgctccagcttcagaggcttcatcccaaaaacacctctggttatgcccgggaccctcccgtac

SEQ ID NO: 15169 - DNA, 600 bp, Chicken  19866894221308_2
ggacggctacctctgggggctggacaaccttcatccagatcctgacagacttgtcccagagcgaggacttgcattaaagcccgcgtccgactctgccactacccaaacctgcccccaactgactcctctgaactgcactacaagacactttccaacccttgcccttccaattttaaagctatactctccctatttaaggtggttttgttgtggttttattttttttttagggtatttctcccccctctacatgtaaatacaaagctaacctgccggaacaaatgctgaacttgaaacctyggcttcacagagttagtggcagcctgggaggggttggttaggcgggcatgtgcttttgcctcttgcgcagcttggttttcagggaaccttccacccaggtggcagtggatcagggatgctgcagccgggctctgtggtgatgcggggccctccctgctccagcttcagaggcttcatcccaaaaacacctctggttatgcccgggaccctcccgtacacagggggcatgagcaaggcttggagatggtgaagtgttcttggtggggggtattctgcagctgcctttgccagcaccttttg

SEQ ID NO: 15170 - DNA, 600 bp, Chicken  19866894221322_1
tgcaaaaggaatggtcattctatgttactacctactggatatggattattattgactacaaaaactaggatttgtgttccatttacatatttgctattggatgttattggaaaacattaaaggtactctgtttgcactattccttaatgattggctttcttgttaatagaacatagttgtagaattagaaaaggttagcagtcatttggttgagtagctaaatggtttaattgctcaaaagaaagacaaaacaaaacaaaaaaaaataattaaggagtagacttactggcttaatgtgaygggctgttttatttttcattgctattcttctgtccattagttttgcaaatgacagtgaaagagttggtttggacaaaacaattctgtttttgctgtacctggtctgaaattttagtagatatttcactaacatccatgtttactttcatgacagttatggttcctgtgtattgtatgtatgtggttactatatgccagcttttgtgattaaggaattcactttttaaacagagcagctggactgccaggaagaaattaatatgtaactagaggaaagcagtaggctgtccatctgtgttt

SEQ ID NO: 15171 - DNA, 600 bp, Chicken  19866894221322_2
caagaaggaaggcaggaagactttttcaagttttggtcaaagaagacagatgaaagttggcagcttaaagaattcaggatgcttgcagagaagaactagctttgggcgaagtgttccacttcatatgtgtaaataagcagctcttatttatggaagtaatgctcagcatttctagatacacagaagttaactttttttctctttatttttcctgcaactagacaaacaggattctgagatgcttccaaacttggtggttgaggtctgctaatgctaaaagtagtcagctcatatcctccrtttcacaagtgattctcactctactgtaaatttggttagaagcaatacacacacacacagacacacacaaaacaaaaaaagaaaaacactgttgtaaggatgttccagagtttcgctgctgtgatagctaaaacctgtctaataaacctactaattctccctaaattagttcacgatcaatttatatccatttactttgtgtcctgtggtttaagtagcttttccttttacaagtaatttcatcctcgtgtatttttagagggaaaatttattcctctacagcacttgcttttactaagc

SEQ ID NO: 15172 - DNA, 600 bp, Chicken  19866894221327_1
gatggggccctgggcagcctgagctggtgaggagcaaccagcctacagcaggggcctggaactggatggtctttaaggttcctttcaacctaagccattccatgattctgtggtatgtgattgagcgagggacctgcttggtaatgtgctattaaatatgcagcaccccactgaaggtatgcaagttgcattgcaaggagggcattggatgtttaatcccagtactgctgcctccaaaaactggtgctgttgcagtagaggtctgtgatacttcatggcaaaggatttggggctgtttgsaggrtgctgtacttgcagaggtagtggggagcaaatggggatgagaatagcatccatctctgccacccacctgactttttggatgctttgtgtgcagtggtgcaaggtgtagtttactgtgtttcaggaatgatgtgtttgcacaggaaaccactgcacggtggactgttaaattctgtgtacatttaaatttcttttcagaagcagtggtgaggcactggaacaggctgcccaggggagtgctggagtcaccatcccaacaggtgttcaggaaacatggagatgtaactgagagggcca

SEQ ID NO: 15173 - DNA, 600 bp, Chicken  19866894221327_2
gggccctgggcagcctgagctggtgaggagcaaccagcctacagcaggggcctggaactggatggtctttaaggttcctttcaacctaagccattccatgattctgtggtatgtgattgagcgagggacctgcttggtaatgtgctattaaatatgcagcaccccactgaaggtatgcaagttgcattgcaaggagggcattggatgtttaatcccagtactgctgcctccaaaaactggtgctgttgcagtagaggtctgtgatacttcatggcaaaggatttggggctgtttgsaggrtgctgtacttgcagaggtagtggggagcaaatggggatgagaatagcatccatctctgccacccacctgactttttggatgctttgtgtgcagtggtgcaaggtgtagtttactgtgtttcaggaatgatgtgtttgcacaggaaaccactgcacggtggactgttaaattctgtgtacatttaaatttcttttcagaagcagtggtgaggcactggaacaggctgcccaggggagtgctggagtcaccatcccaacaggtgttcaggaaacatggagatgtaactgagagggccatggt

SEQ ID NO: 15174 - DNA, 600 bp, Chicken  19866894221328_1
agctcctgggcttccctttgagtcaaacagcacagctgcagaagctctaaaattccttcagaaaaaggataaaacataccattcactgagtctttggagcaaaaactgttttcagatgaaataatgatgtctttttcctgtagggccaagctcacaatcagagaagatacacagcattgttttccttgagaataaaatatgaagtttatatttggattggaagcagttttaaaccacctgatgatttcatactgtttagtgcttgctaatgattgataaagaagtagaaataggtacaaytstcttttgattgtggaggtagaaagcacctgctttgtcatttcttctcaaagaactgttagggaaaatctgctcattttttctcacttctggaaacaacaggaaggcaaatacatgctatagtatgtaggggtagttagtattcatgtttttgatgtttttgttgtccattaagaaagaaattgaacattgagaaatattccactggtgtattgctctactgcrtcctggatgtaaacaacatagaattatgtagagatctaaaatgagtcgtgcattttgcaatctgcagtaccatac

SEQ ID NO: 15175 - DNA, 600 bp, Chicken  19866894221328_2
ctcctgggcttccctttgagtcaaacagcacagctgcagaagctctaaaattccttcagaaaaaggataaaacataccattcactgagtctttggagcaaaaactgttttcagatgaaataatgatgtctttttcctgtagggccaagctcacaatcagagaagatacacagcattgttttccttgagaataaaatatgaagtttatatttggattggaagcagttttaaaccacctgatgatttcatactgtttagtgcttgctaatgattgataaagaagtagaaataggtacaaytstcttttgattgtggaggtagaaagcacctgctttgtcatttcttctcaaagaactgttagggaaaatctgctcattttttctcacttctggaaacaacaggaaggcaaatacatgctatagtatgtaggggtagttagtattcatgtttttgatgtttttgttgtccattaagaaagaaattgaacattgagaaatattccactggtgtattgctctactgcrtcctggatgtaaacaacatagaattatgtagagatctaaaatgagtcgtgcattttgcaatctgcagtaccatacct

SEQ ID NO: 15176 - DNA, 600 bp, Chicken  19866894221328_3
gttttaaaccacctgatgatttcatactgtttagtgcttgctaatgattgataaagaagtagaaataggtacaaytstcttttgattgtggaggtagaaagcacctgctttgtcatttcttctcaaagaactgttagggaaaatctgctcattttttctcacttctggaaacaacaggaaggcaaatacatgctatagtatgtaggggtagttagtattcatgtttttgatgtttttgttgtccattaagaaagaaattgaacattgagaaatattccactggtgtattgctctactgcrtcctggatgtaaacaacatagaattatgtagagatctaaaatgagtcgtgcattttgcaatctgcagtaccataccttttagcagcatatgtacttacatcagaaaatacataaactaggaattctggcattagttttcatttaggtgcatagatatggtctttaattcacgggtgtccaaccttttggcttgcctgggctgcaatgagtgaaaaggaattgttttgaactgcagtaggttgcttcaaaggtaatatttcctatttatttccatggaagccgcaatagaaactatcaatg

SEQ ID NO: 15177 - DNA, 599 bp, Chicken  19866894221335_1
  misc_feature (1)..(181): n is any nucleotide
nnnnnnnnnnnnnnnnnnnnnnnnnnnnnnnnnnnnnnnnnnnnnnnnnnnnnnnnnnnnnnnnnnnnnnnnnnnnnnnnnnnnnnnnnnnnnnnnnnnnnnnnnnnnnnnnnnnnnnnnnnnnnnnnnnnnnnnnnnnnnnnnnnnnnnnnnnnnnnnnnnnnnnnnnnnnnnnnnnnnntgtgaacgcctttacaatatctttgtaggataaaaatagttaacattgtatttcaatctatccatagttgttaaagtttatatcgtgaaaaattcatagacaatacttagtaggaaagrtgtgataagagggcataggatattaaaagagattatgaatctggaaaaagagatatttattgtactcagaagctgcagtgtggatgctgaaaaattaaaatggaaaactagcttggaaatgaccttcagataaaggaggaagaacttgggacaagtaaagatcgaacagtgacaagtcttgcacatgagtggtagatggggcgtyatccatccctctggttttgttctgttctctgcacttactgcccactggtcttggatgttgagacaaactttcttagscctgtcttaagatgttc

SEQ ID NO: 15178 - DNA, 600 bp, Chicken  19866894221335_2
gtaggataaaaatagttaacattgtatttcaatctatccatagttgttaaagtttatatcgtgaaaaattcatagacaatacttagtaggaaagrtgtgataagagggcataggatattaaaagagattatgaatctggaaaaagagatatttattgtactcagaagctgcagtgtggatgctgaaaaattaaaatggaaaactagcttggaaatgaccttcagataaaggaggaagaacttgggacaagtaaagatcgaacagtgacaagtcttgcacatgagtggtagatggggcgtyatccatccctctggttttgttctgttctctgcacttactgcccactggtcttggatgttgagacaaactttcttagscctgtcttaagatgttctttagatatatttgtggctgtggtaggggcaacagtacaatgcaaaatcagatatacgatcctcctagctttcctggaaaactggattgcagactgttgtaaggtcatgagatgaagcagcctcttagttccttttcttctgggccactctgtccatttctgttgtaccatcagctatgttttctccctaaattatacccatttgg

SEQ ID NO: 15179 - DNA, 600 bp, Chicken  19866894221335_3
aatacttagtaggaaagrtgtgataagagggcataggatattaaaagagattatgaatctggaaaaagagatatttattgtactcagaagctgcagtgtggatgctgaaaaattaaaatggaaaactagcttggaaatgaccttcagataaaggaggaagaacttgggacaagtaaagatcgaacagtgacaagtcttgcacatgagtggtagatggggcgtyatccatccctctggttttgttctgttctctgcacttactgcccactggtcttggatgttgagacaaactttcttagscctgtcttaagatgttctttagatatatttgtggctgtggtaggggcaacagtacaatgcaaaatcagatatacgatcctcctagctttcctggaaaactggattgcagactgttgtaaggtcatgagatgaagcagcctcttagttccttttcttctgggccactctgtccatttctgttgtaccatcagctatgttttctccctaaattatacccatttgggtccctgtaactgacactctatttcacaacatccttttgtcccagagtttgttgtaaataactgattcttctagtcc

SEQ ID NO: 15180 - DNA, 600 bp, Chicken  19866894221338_1
ctatgactgaacgaaaattaaagctgtagtagaaagtctacacttaataaaagaaagaagaaaagcagccaggctggagtcataggttgattgaaaagaaagaaagtaaaaatgaaaaggatatacagagaagacaaaaagtttgtcaaggtagacgaatttttactattttccagtcatgaacataaatgcaacgtttccagtgaataatcttaaacagagaaaataactattgttgaaaagcagagaaaatctctttgagaaagatctgatgggataggggataaattaaacatatakaggaattgcgtcaaaattcaggaactttcttctaatatgatctaatttctttatagtctgaacacattagggagagttgataacaagctcyctggcaaatgctatgaggaagaccacagagaactgcttgcgtattagccttgacaccagttcaccaaataaatatcycatattctccctctctagtgcctacggacaaattggccagcacttcaaggactcagctttgatgacttgattctcttccctggtaagctggtttaaaagagctttgttccacatctgctatttgttttttta

SEQ ID NO: 15181 - DNA, 600 bp, Chicken  19866894221338_2
tgaaaagaaagaaagtaaaaatgaaaaggatatacagagaagacaaaaagtttgtcaaggtagacgaatttttactattttccagtcatgaacataaatgcaacgtttccagtgaataatcttaaacagagaaaataactattgttgaaaagcagagaaaatctctttgagaaagatctgatgggataggggataaattaaacatatakaggaattgcgtcaaaattcaggaactttcttctaatatgatctaatttctttatagtctgaacacattagggagagttgataacaagctcyctggcaaatgctatgaggaagaccacagagaactgcttgcgtattagccttgacaccagttcaccaaataaatatcycatattctccctctctagtgcctacggacaaattggccagcacttcaaggactcagctttgatgacttgattctcttccctggtaagctggtttaaaagagctttgttccacatctgctatttgtttttttactggttccacagccaactgtccatctaagcactaagagttatgttggtctctcctgtctcaaggccaaccaacaccagaaggggtggccag

SEQ ID NO: 15182 - DNA, 600 bp, Chicken  19866894221338_3
ttttccagtcatgaacataaatgcaacgtttccagtgaataatcttaaacagagaaaataactattgttgaaaagcagagaaaatctctttgagaaagatctgatgggataggggataaattaaacatatakaggaattgcgtcaaaattcaggaactttcttctaatatgatctaatttctttatagtctgaacacattagggagagttgataacaagctcyctggcaaatgctatgaggaagaccacagagaactgcttgcgtattagccttgacaccagttcaccaaataaatatcycatattctccctctctagtgcctacggacaaattggccagcacttcaaggactcagctttgatgacttgattctcttccctggtaagctggtttaaaagagctttgttccacatctgctatttgtttttttactggttccacagccaactgtccatctaagcactaagagttatgttggtctctcctgtctcaaggccaaccaacaccagaaggggtggccagaagcatgctttaattaagtagactttttcattgcagtaacattacaaaacacacaaacatctcttcccttttcattt

SEQ ID NO: 15183 - DNA, 600 bp, Chicken  19866894221339_1
gtagaagtgtcatttttcctccaggttttctttaatttacctctgtggactgttttcatatcagtggatgccagaaaacacagatgaaattctgagtattcctagtcatcaaacaaaagagtctcttggagtagaagtatcagggattgaaaataaaaaaagaaatctgtgtccaacacaagtgagaaatgaaggagaaacactggcaaggtggaggtagcacctaccctcaaaagacttctagatgacatctacttcattaaaatggagatctatcacatctacttgctttgtgtcacrtctcagatactccggactgctcaaggtaatgttaggcattcatgattagtgcctgaatattaccaggatagtttaaggccttcaggttgttctgtgcaaatttcttattctctgttcaagacctcrattttcatattttttacaggggaaactggcacacacatagttgctatgtgtacccgagtccatgaaaaggaatgacaggcttccagtaactacagcacaaagtcagtattgccactctccttatcttataacattggacttgggcactcagtattctcctccatgcccagtcac

SEQ ID NO: 15184 - DNA, 600 bp, Chicken  19866894221339_2
tggagtagaagtatcagggattgaaaataaaaaaagaaatctgtgtccaacacaagtgagaaatgaaggagaaacactggcaaggtggaggtagcacctaccctcaaaagacttctagatgacatctacttcattaaaatggagatctatcacatctacttgctttgtgtcacrtctcagatactccggactgctcaaggtaatgttaggcattcatgattagtgcctgaatattaccaggatagtttaaggccttcaggttgttctgtgcaaatttcttattctctgttcaagacctcrattttcatattttttacaggggaaactggcacacacatagttgctatgtgtacccgagtccatgaaaaggaatgacaggcttccagtaactacagcacaaagtcagtattgccactctccttatcttataacattggacttgggcactcagtattctcctccatgcccagtcactggagataaaaggaaaactgatgatggtacagagcctgctgcagatgtgcaacatctatatgctattaacaacatttcatgattgtaaactatgaagcttggcattttggcctcttttccaaaggt

SEQ ID NO: 15185 - DNA, 600 bp, Chicken  19866894221340_1
accctagttgtatggaaactccagctttaatttgcactttgtatgtgccacctgtgccatgctaggaaggatttttccctctgaacagctggtgggagagaaaagaattccacttaatgtgagattgggtatttgctgcttttcactgtgttatgtcaaaatgctttgaatgaaacgggtcccaagaaataggttattatttccgcaggctttctggttagctgggatagctaaacactgatagaagaggagagtgctacaggcagaaatgtgggctgggtaaggtctagcaggtggaaygagagcttttttttggctgtgatggaagattggtgtctcagatttggaactgcttttaggttatgttagggaattatctttgcatcctgtatttcatgcacattatgaaatcctacagcgttctttacctttaaaatcatttttcatggtctttcaattgttgctatggttttcttatagcattaaaacttcattttatgatattcattattgattgcttttacataatgatgaggtatgaaacatttccagagaggttgggatgctgagctctaacagttacttatgtaataaacctgg

SEQ ID NO: 15186 - DNA, 600 bp, Chicken  19866894221347_1
ctgtcacccctacataaaaaaaagttcttcctcatgctcatatggaacttcctgtgtttcagtttgtgccttttgccccttgttttgtcacactgtcacctggctttatcctcttgacttctgcacattagatacttacagacatttattagatttcctctcttctccaggctgaacagtcccaggtctcagccttccctcataaggaagatgctctaggcgtctaatcgtttctgtagacctccactggactctttctgggagacccctgtctttcttgaaatagggaagccagaaatkgacatagtactaatgctgctaatcacaactttctgagcttcaccagtcagacagttctcagtccacttcactgtccactcatcaatctcatgcttcctaagcttaccaatgaggatgttatgggaggctgtgttaaaagttttgctaaaatcaaggtagacaacatccactgctctcctgctctcccctcatctacccttccagtcatgacattatagaaagctatcatgttggttgagcatcattttcccttggtgaattcatgctgatgactcctggaaaccacttgcttggagatga

SEQ ID NO: 15187 - DNA, 600 bp, Chicken  19866894221350_1
attggaaataagtatgtaccacacaatcatgggagaattagatacttgctgttataatgagtttaccatctaatataagctacagtaggagttttgatgtgtcacatttgcacgggtgcttttgttttttgctttcttcccttcttcccaactggttcttcccaaacactttgtcaacagttgccatttgcagcatggtcctctacagtccccaggtcttcctgactaagcaggcatctaaaaccagaggggaactatggtgaatttgtttagaaaatacttttcatgtgagtgtgtttkaaaaaaaaatccataaatatggtgtgctgtactctggaaacacgtagagggtgggacaagatacttgtgagaggcactgagttcttcaaaatgaaggcaatgtggaggcgtggggggaaacgaactgcctgttaaatatggaaaatggagtctgctttttgttccgggcctttggaatctgtgggtggattggaactggcaggcagggagcaaacacccacccaccacagggctgtgtggttcagaagtttacaagagtgtttgtgttccaggagctgttggccttgaagccaatggaga

SEQ ID NO: 15188 - DNA, 600 bp, Chicken  19866894221352_1
tgctatattcagtgtagtttaggtaatgtttatgtgagtcaaggtggctgggtttgtgttattatgatgtatgaataatcagattactacgtgtcagctgccaataaaggaaaagattggattcaacagcagaaaatatttggagtaatactcttttctcagtaactgaatttactgcaatgtaaatagtaacttacaggcatgggggcatgtatgtatatgtaattaactgtccttaatggtctgaccactggttgatttggatagtcttagcttggtgttgttttaggaacataggcrtccaggtggagggccttaagtttgggcttgaacaagaaaaagaaatgagctgtgaartaccttaatcaataagatgcttttaggtcctgaggaacttcattctaggctgcttttacaagtggctgctggaattagagagttcttaggaatcaggtggctttttggctgtgggtgcctagcaccatcttcccaagttcattaaggctgtctgtaattctgctttgatttcatcttctgcaatagatygttcctgaggcatacttgagtggaataatctcacttgtatgttattttattatt

SEQ ID NO: 15189 - DNA, 600 bp, Chicken  19866894221352_2
gttattatgatgtatgaataatcagattactacgtgtcagctgccaataaaggaaaagattggattcaacagcagaaaatatttggagtaatactcttttctcagtaactgaatttactgcaatgtaaatagtaacttacaggcatgggggcatgtatgtatatgtaattaactgtccttaatggtctgaccactggttgatttggatagtcttagcttggtgttgttttaggaacataggcrtccaggtggagggccttaagtttgggcttgaacaagaaaaagaaatgagctgtgaartaccttaatcaataagatgcttttaggtcctgaggaacttcattctaggctgcttttacaagtggctgctggaattagagagttcttaggaatcaggtggctttttggctgtgggtgcctagcaccatcttcccaagttcattaaggctgtctgtaattctgctttgatttcatcttctgcaatagatygttcctgaggcatacttgagtggaataatctcacttgtatgttattttattatttgctacctgactgtgtcaattagattctaaaacatttagattacaagggtactcttc

SEQ ID NO: 15190 - DNA, 600 bp, Chicken  19866894221352_3
accactggttgatttggatagtcttagcttggtgttgttttaggaacataggcrtccaggtggagggccttaagtttgggcttgaacaagaaaaagaaatgagctgtgaartaccttaatcaataagatgcttttaggtcctgaggaacttcattctaggctgcttttacaagtggctgctggaattagagagttcttaggaatcaggtggctttttggctgtgggtgcctagcaccatcttcccaagttcattaaggctgtctgtaattctgctttgatttcatcttctgcaatagatygttcctgaggcatacttgagtggaataatctcacttgtatgttattttattatttgctacctgactgtgtcaattagattctaaaacatttagattacaagggtactcttcatgcgtgtttgaaaaggacgtgcactgcgtgctctcaaacacctcccctgttgttcccccaccccctaccaaaatggtgttttattacaaagtataaaatggctgtttgcttaaaaaggtgcaaggaatacttcactgggatttgcttttaatttctggtatatgctaactgtctttcttacgtagaag

SEQ ID NO: 15191 - DNA, 600 bp, Chicken  19866894221352_4
ctgctggagcagtgagagccagacaagaaggtgggagcctgatgctcctgcagggcctgatgaaaaaccaagaaagggtcgggaagaagcacatagttgagaatcagctgaaccacgggaggaagtttcttaaatatgagggtgtgttgctctgccttacaaagcctctgttgactgaagtcttacttggaagccatgacctgctgtccaaggtacagtgctcagggaagaatcttgtttattatccttctgcatttccattctctcatatacttgcttttgtctcttgctaaaaacttsacactccaccaatgtcagattttatgaagtctgctttgaggaaactatataaggagaaggtgtaagcagagccctgtgaaagctttggctgcctttgtatcctgttacattcctgcagtcagctgtagatgtttctgattgcagtgatgtttggtcgataacaagtggtgaagtggctgttatgcggctgtttgcggcctgagctcagcagtttgtgctctgtaggcagagtgggcactcttcctcttgtgaaaaggaaaagtgaattattagaagtttagtcactgatgagcaatcaga

SEQ ID NO: 15192 - DNA, 600 bp, Chicken  19866894221352_5
agtggctgttatgcggctgtttgcggcctgagctcagcagtttgtgctctgtaggcagagtgggcactcttcctcttgtgaaaaggaaaagtgaattattagaagtttagtcactgatgagcaatcagaagtgtgctgagctgagctttaccgatcttgatgcaaatcacagcatcagtatggtttctaagtgagttaataagtgttaaataagtttagctcacaacttaccatctaggtttagtttccagtagaaaaaaactaaaacatatgggcaatcaaatgccttttgtatgcatrcaaactaaggaaaaatctactgtggtttctgtcttacctttgggaacaatgctagttgtacaccaatcagttttaatttaccaagtatggacactttttcttaaatggggagttgtttatttggcrtttgcagaagaaaactgaagtacagcttttacagtttaatacagtttgaaagagcatttcaaggccaggatctatggactgatgaaaatagtgaccacatacatgaaaaaaatggctatgcagcttgtctagaatttcacagaaatctgactcattcaaggtaaggctttacaa

SEQ ID NO: 15193 - DNA, 600 bp, Chicken  19866894221352_6
agaagtgtgctgagctgagctttaccgatcttgatgcaaatcacagcatcagtatggtttctaagtgagttaataagtgttaaataagtttagctcacaacttaccatctaggtttagtttccagtagaaaaaaactaaaacatatgggcaatcaaatgccttttgtatgcatrcaaactaaggaaaaatctactgtggtttctgtcttacctttgggaacaatgctagttgtacaccaatcagttttaatttaccaagtatggacactttttcttaaatggggagttgtttatttggcrtttgcagaagaaaactgaagtacagcttttacagtttaatacagtttgaaagagcatttcaaggccaggatctatggactgatgaaaatagtgaccacatacatgaaaaaaatggctatgcagcttgtctagaatttcacagaaatctgactcattcaaggtaaggctttacaacagtattcagtggttgtaactgtgaaaccatcttctgtccacctgcttcagtcaccactcagagtcctgtttgctctggtttccattgtgattagtgtaggtgtaacgtgacatggaggacagggg

SEQ ID NO: 15194 - DNA, 600 bp, Chicken  19866894221359_1
aaagctccagagagtttttacaaggatggcatggatgtgctgaaaagagtccaataaaggaccatgaagatgatgaaggaaccgaagcatctctcttatgtaaaagaagtgagtcagatgggactgttcaacctagaaaaaagaaggctgagggaggaatttcatcaatgtattgaaattgaaatgtatagaaatagaaaactctgaagggggagtataaagagaatggagccagtctgttttcggtggttcccactgccatgacaagaggcaatgagcacaaactgaaacacaggaggytccctctgaacatcacaaaatgctttttttttttgctaacagagtgaaggagcaataatacaggttgcccaaagagactgtattgtcttcctccttagagatgttcagaagctgtctggacatagccctggttaaattgttgtaggtggcccttcttgagccaggaggttgrgctrgatggtctccagtggttccttccaacctcaaccatcctgtgattacgtgtgcttaccaatattattgagaatcacagagctgaggtgtgatgtgcagtctagcatagcactgtggcattttgag

SEQ ID NO: 15195 - DNA, 600 bp, Chicken  19866894221359_2
ttgaaattgaaatgtatagaaatagaaaactctgaagggggagtataaagagaatggagccagtctgttttcggtggttcccactgccatgacaagaggcaatgagcacaaactgaaacacaggaggytccctctgaacatcacaaaatgctttttttttttgctaacagagtgaaggagcaataatacaggttgcccaaagagactgtattgtcttcctccttagagatgttcagaagctgtctggacatagccctggttaaattgttgtaggtggcccttcttgagccaggaggttgrgctrgatggtctccagtggttccttccaacctcaaccatcctgtgattacgtgtgcttaccaatattattgagaatcacagagctgaggtgtgatgtgcagtctagcatagcactgtggcattttgagttattagtcaaggatcaaagtcaagtggtgggcaaaatgtttggtyccggggctggaagagtagaagagctacgggtcaatctgaggagcatctgcagagtttgttatggtggaaccaggaacaatagagaaaagaggggacttgccagtcagaaatgagggatgttgcaga

SEQ ID NO: 15196 - DNA, 600 bp, Chicken  19866894221359_3
aattgaaatgtatagaaatagaaaactctgaagggggagtataaagagaatggagccagtctgttttcggtggttcccactgccatgacaagaggcaatgagcacaaactgaaacacaggaggytccctctgaacatcacaaaatgctttttttttttgctaacagagtgaaggagcaataatacaggttgcccaaagagactgtattgtcttcctccttagagatgttcagaagctgtctggacatagccctggttaaattgttgtaggtggcccttcttgagccaggaggttgrgctrgatggtctccagtggttccttccaacctcaaccatcctgtgattacgtgtgcttaccaatattattgagaatcacagagctgaggtgtgatgtgcagtctagcatagcactgtggcattttgagttattagtcaaggatcaaagtcaagtggtgggcaaaatgtttggtyccggggctggaagagtagaagagctacgggtcaatctgaggagcatctgcagagtttgttatggtggaaccaggaacaatagagaaaagaggggacttgccagtcagaaatgagggatgttgcagagctc

SEQ ID NO: 15197 - DNA, 600 bp, Chicken  19866894221359_4
aaggagcaataatacaggttgcccaaagagactgtattgtcttcctccttagagatgttcagaagctgtctggacatagccctggttaaattgttgtaggtggcccttcttgagccaggaggttgrgctrgatggtctccagtggttccttccaacctcaaccatcctgtgattacgtgtgcttaccaatattattgagaatcacagagctgaggtgtgatgtgcagtctagcatagcactgtggcattttgagttattagtcaaggatcaaagtcaagtggtgggcaaaatgtttggtyccggggctggaagagtagaagagctacgggtcaatctgaggagcatctgcagagtttgttatggtggaaccaggaacaatagagaaaagaggggacttgccagtcagaaatgagggatgttgcagagctcagtatttggaaaaactggttggttttaaggtgcattcttcttccttggatgccactatgtatcaatctttcctgtattcctgcagtttccctttaagaatctgaatccgcctgagcagtaggtgttcttgactgtaacggagaggaataagcttgggaaagttttgttaa

SEQ ID NO: 15198 - DNA, 516 bp, Chicken  19866894221366_1
tgtaagtgatgcggtttgactttcactgtactgcaatttaaatccctgtggaggttcctggtttatcagaggcgagcagccttccatttggggaaaaagggacacagttcagtaaaaactgctctctctagtgagatcaagggaagaaaaaagaaaactatttcagtgaaggactaggaataaagaaatatgttcatcgtcaagactttgaggtaaataatagaaaaatctcaattctaggccagtagacccagactagtcaaggagaagccagttaaattacagacaggcagcagctgrgatggggaaatcattctgtatctggacccctcccactccatgaggaccctgtacctattttccttgaagatactccctttaggggtatttctccccatggattagaagaggcaagctaaaattgaagacacttttgttgtcaagcgtgtgggttctggggttttgtgatgcttgcaagcgcagcagcggaagatctcatgggcctctggggagcac

SEQ ID NO: 15199 - DNA, 600 bp, Chicken  19866894221373_1
tgaggagaaacagttacagcatcatgtggtcagacactatctacagcctgagaaatgacttgtaataaagtgctgtcccagacaacaccaacaagataaaccaagccaaaaaacaagtaagggtaggatataggacagggaaaaaagaggttaagatacatagcgtatacagtagggccaaatggaagtattaaaacataacaaggtgttaaaatataacaagttactaaaataaaacaagagggctataatgaatagtctaagatagagcagtagtatgttcctgttagtagctaaaayggtctgtaaccctctctattctgcttcagaaattgtgcctcacacagctgagagatgaaacggacatttggtctctttaggggctatgtcagaagccacaacaagaggggaatagtggcagtttggatactgccatttataaatccttttcttctaacattgactacatcttattgcctccgtgctttaaaataacgatcagagagaggaaaaaacattataaagcaggaaaaragtacaagagttactgagcttcactggtagcagaactgcaatgcagacacttatttgttatttagc

SEQ ID NO: 15200 - DNA, 600 bp, Chicken  19866894221373_2
aaacaagagggctataatgaatagtctaagatagagcagtagtatgttcctgttagtagctaaaayggtctgtaaccctctctattctgcttcagaaattgtgcctcacacagctgagagatgaaacggacatttggtctctttaggggctatgtcagaagccacaacaagaggggaatagtggcagtttggatactgccatttataaatccttttcttctaacattgactacatcttattgcctccgtgctttaaaataacgatcagagagaggaaaaaacattataaagcaggaaaaragtacaagagttactgagcttcactggtagcagaactgcaatgcagacacttatttgttatttagcttgagaaaaggaaagccatcactggagaaaatcttaagatagaaaaatatacagcataaatattttacattttcagaggggagcatccatcggtacattgagccctcatgcagcttagcagcatgacacatcctagtgattaaatgccagctccatggcaaaacccaaagaacaaaacaaacaaatttttcagtggagaaagccactgttctctaatcctgcgccttggctctc

SEQ ID NO: 15201 - DNA, 526 bp, Chicken  19866894221376_1
cagcgacataaccaaccccataagaattgctggagagaaaaaggatgcacagtcttttgcataggcaaaatgtccttcttgaatgttaaaaccttgaatctacaaagagaacaaaagggctcatattaaatacaatctttgcaaacaattttgtgaatttgctctggtgccagtaaaaatctttgatttagtatcattgtattacaaaattatatcttgcagtggtagctggagttcatagtgagcttatccaggtcagtcttctggaaaccaagagttattctaatctccttcactctwctgctcgaaggatttgcagctgtattttaaacaaacttgtccatgatcactctcaatactttggtcacatttaattgtaagtctggtacctttctgctacagtgcatttccagtatcatttgttaataatttccagattctctgttttaaactgtgcaaatttcaatgcaccaaacacacataattgcctaccctagtattagatttttatcaccacattcaagca

SEQ ID NO: 15202 - DNA, 600 bp, Chicken  19866894221377_1
ctcgttctaagcaaacaggtgaacattagctcacctaaaggcagtaaccaaccagtcagatggtgagcagtgagaacagtcaagctgctgatccccacaaaaccaaagcagaagagcctccttttatttgaatgactgtgcccttggaaatcctggaactcagcagcaggaaggtctgttgaagcatcatttagtgcaggatcaggacttgcttaccacctaggagaaggaagaaacctaatattaagaaacaattttgcctctacatttaacataagtcagaagcaattgtctcaaaaktaatgtgtagagtttctttaatcaattgtttgaagggcttgtacagttacctgtaaaggaagtatttaagagcagtttagaaatgaagtctttgcattcaagcagacacctcggcttcactgttcctaatttcccagaatcaggtagatgatatctgaacatctgacaaagcagtggacaagttttcttccagctccatgattctgcaacatagagaaactataggcaactataataagtgaacccacaacagttctggcactgtacttacagtattgtttggatgagaacacgcttttt

SEQ ID NO: 15203 - DNA, 600 bp, Chicken  19866894221387_1
gtcctgcaaagaagtgctttgcagggggagggaaaaaaaacccaccaagcccaacattttttcttgtgttagtgttgtagaagttgctcgttaatttgggtgagtttttgcttccatttcttgacaattttgtctctctgctttgtgctaatgagcgctagttgagctccaagtgtttaggggggaagagacatttggattctgagcaccaaatgctgggtgacctctgctgtgttggccgttgagctgtttcccatgtgagcacgagctgcgtgctcctggatggcaggagctccaagyttgtcctccccggtgaccgccacgcaattagggatttttaatggtaatcctgctttaaaaaaaattacactgatgtctggcagtggtttggctgccgctttctggccggcacctggctgtgctgttcctgaaggacctccctgcagtggggtacagcggtgttctgctccatttccagcttggctttgggttgctatccactgctctgaagtccccagctcgctgtgtagctgctcatctcactggcactgaggcaagagaatccaacattaaaagaggaatgtgattataatcccgtaa

SEQ ID NO: 15204 - DNA, 599 bp, Chicken  19866894221391_1
  misc_feature (1)..(163): n is any nucleotide
nnnnnnnnnnnnnnnnnnnnnnnnnnnnnnnnnnnnnnnnnnnnnnnnnnnnnnnnnnnnnnnnnnnnnnnnnnnnnnnnnnnnnnnnnnnnnnnnnnnnnnnnnnnnnnnnnnnnnnnnnnnnnnnnnnnnnnnnnnnnnnnnnnnnnnnnnnnnnnnnnnnatgagtacataagatgattcacttttaaatagctttccatggagaagtacagttcttacaattctcatttgtgttctatctctttacaatattcgcagcatcttaataatttgaaagggtacttttttttctcagcrtaagctacagttaatcttcctggagtgcttgttaagtggatactgcctcagctgttggctgcttgaaacctggcactgatcctaacaaagcaccaaaggcatgcaccagtggccaggtaatgcagacrctgtagtgccttatttcttctttgaatttaaattcctttcctggacasctgctcagtctttgagctttgctctcttttgctttagaggaccttcaytctaacgagaatgacttacagtttcaatatccatgaacaggatttttagaggagaggtatctctaaaacctattt

SEQ ID NO: 15205 - DNA, 599 bp, Chicken  19866894221391_2
  misc_feature (1)..(35): n is any nucleotide
nnnnnnnnnnnnnnnnnnnnnnnnnnnnnnnnnnnatgagtacataagatgattcacttttaaatagctttccatggagaagtacagttcttacaattctcatttgtgttctatctctttacaatattcgcagcatcttaataatttgaaagggtacttttttttctcagcrtaagctacagttaatcttcctggagtgcttgttaagtggatactgcctcagctgttggctgcttgaaacctggcactgatcctaacaaagcaccaaaggcatgcaccagtggccaggtaatgcagacrctgtagtgccttatttcttctttgaatttaaattcctttcctggacasctgctcagtctttgagctttgctctcttttgctttagaggaccttcaytctaacgagaatgacttacagtttcaatatccatgaacaggatttttagaggagaggtatctctaaaacctatttttagggggaaaaagaattgctttcagatatgaaaggagtagaatacatttttcacttcactttcccacatccacaatttcttgaaaaataaaaccagaaacacatgcagtacctcttagaatcaaagg

SEQ ID NO: 15206 - DNA, 600 bp, Chicken  19866894221391_3
atgattcacttttaaatagctttccatggagaagtacagttcttacaattctcatttgtgttctatctctttacaatattcgcagcatcttaataatttgaaagggtacttttttttctcagcrtaagctacagttaatcttcctggagtgcttgttaagtggatactgcctcagctgttggctgcttgaaacctggcactgatcctaacaaagcaccaaaggcatgcaccagtggccaggtaatgcagacrctgtagtgccttatttcttctttgaatttaaattcctttcctggacasctgctcagtctttgagctttgctctcttttgctttagaggaccttcaytctaacgagaatgacttacagtttcaatatccatgaacaggatttttagaggagaggtatctctaaaacctatttttagggggaaaaagaattgctttcagatatgaaaggagtagaatacatttttcacttcactttcccacatccacaatttcttgaaaaataaaaccagaaacacatgcagtacctcttagaatcaaaggactagctccagcattaataaaagccattggaaatgccaaatacataacg

SEQ ID NO: 15207 - DNA, 600 bp, Chicken  19866894221391_4
ttctcatttgtgttctatctctttacaatattcgcagcatcttaataatttgaaagggtacttttttttctcagcrtaagctacagttaatcttcctggagtgcttgttaagtggatactgcctcagctgttggctgcttgaaacctggcactgatcctaacaaagcaccaaaggcatgcaccagtggccaggtaatgcagacrctgtagtgccttatttcttctttgaatttaaattcctttcctggacasctgctcagtctttgagctttgctctcttttgctttagaggaccttcaytctaacgagaatgacttacagtttcaatatccatgaacaggatttttagaggagaggtatctctaaaacctatttttagggggaaaaagaattgctttcagatatgaaaggagtagaatacatttttcacttcactttcccacatccacaatttcttgaaaaataaaaccagaaacacatgcagtacctcttagaatcaaaggactagctccagcattaataaaagccattggaaatgccaaatacataacgtattttaaaatgcagttcttaattcatcattttctaaagcaggacttg

SEQ ID NO: 15208 - DNA, 600 bp, Chicken  19866894221393_1
aattaaggcagcttttgagcaaatacattttatcttctctgggagctgaaggaaccaggatatgagcctacgaaaggccgggctgtaatggatacaccctgccccttctctctttgaggcatgggaaaggtcaacttttgtcctctaaaatgtgtcactgctataaatatgactgcataatttattgcaaattgtttagcaaatttattgcaaactattaataaacctccttgaaacagcacaatgagcgcgtgcaataaacaaggaaaatatttgcttgattcaaaccacattggacgmtgttaaattaatgttgaatagatacattttgaaggcccaaagggatgagtgcaacccgcgaccggatgctgcatcgctcgccctgagcacacatgtcagaaaatgtcgaggaagtgaccgaacctttttgtcaatggcttaaagctgagataagcctcgagtgtttaaattggcaattctaatagctacctgaatccaattcaattcacagcagcttggcttgtaaggcaatcggtgatacagtgttaatgccaactaatctgataaaaattgacacaatgacaacgttgggccattagt

SEQ ID NO: 15209 - DNA, 600 bp, Chicken  19866894221394_1
gtattgtgtctgtctagatgtattgttttcttagggtttttacactgtgagagactccatggttcaaaaatcaattctacatcattttcttcaacttctgctctaatacttttattgcatattcttggaaaggcttagatcagactccaggatgttagcacaaatccaatgaaatctagtctactaagaatgatcttcaaaacataaaatcagcgtgtatttcaactcctcttgttgctatttaaaacattattttctgtccacttgtgtattggctgaatgtaatatctcagttgaaaraatgtgttctgcttgcacaatggcttcaatacagcagtttgttcctgcacatagttgacagccatactgcaccgcttttggtttatcagtgctgagtgagtcagcgggatgtcagctggcagtgaggtggcaggggcaggcagcaaacctgtactgttttccactgcgctgtaacacatgggaggaaatgcaggttgccatcagccctaccacagcctggatctgagctcatttctgcctgtcagacagatctgtgctggaaagttggattttaggcaaagacagtaaatagcactggat

SEQ ID NO: 15210 - DNA, 599 bp, Chicken  19866894221407_1
  misc_feature (1)..(74): n is any nucleotide
nnnnnnnnnnnnnnnnnnnnnnnnnnnnnnnnnnnnnnnnnnnnnnnnnnnnnnnnnnnnnnnnnnnnnnnnnntgaagcatatggcggattgcagttttcaggtgctgtaagcttcttggaaacaccagaaaaagcaagaaggtgtgaaaagttggatttcacaagttcagatttgttgctagttctgcctttggagtcagattgataaaggtaaaaaggtgcctcttagaatctggtgtggccctcagcagagggtctgttgaatggctctcgctgagctgatgcatgtgttctgaaygatgtttcattaaattcctgcaagatkttacagtaggcactgctggcgctgtgaaatcctctgcaaagagccatagrtggcaagaataacctgctttagaaatctgttgtgttagggacagcaaaaatgaggcgtttgcattgtgtttcccagtgcacagtattccatttcccagtttggagagagatttccatactttccgatgtctctgtatgagatagagacattgcaaatgaaaatgtctttatgcctagtaatggtaaataagaagactagaggaagttctgggagaaacaaca

SEQ ID NO: 15211 - DNA, 599 bp, Chicken  19866894221407_2
  misc_feature (1)..(47): n is any nucleotide
nnnnnnnnnnnnnnnnnnnnnnnnnnnnnnnnnnnnnnnnnnnnnnntgaagcatatggcggattgcagttttcaggtgctgtaagcttcttggaaacaccagaaaaagcaagaaggtgtgaaaagttggatttcacaagttcagatttgttgctagttctgcctttggagtcagattgataaaggtaaaaaggtgcctcttagaatctggtgtggccctcagcagagggtctgttgaatggctctcgctgagctgatgcatgtgttctgaaygatgtttcattaaattcctgcaagatkttacagtaggcactgctggcgctgtgaaatcctctgcaaagagccatagrtggcaagaataacctgctttagaaatctgttgtgttagggacagcaaaaatgaggcgtttgcattgtgtttcccagtgcacagtattccatttcccagtttggagagagatttccatactttccgatgtctctgtatgagatagagacattgcaaatgaaaatgtctttatgcctagtaatggtaaataagaagactagaggaagttctgggagaaacaacagaagatggtaaagcacagcaagggatt

SEQ ID NO: 15212 - DNA, 600 bp, Chicken  19866894221407_3
agcatatggcggattgcagttttcaggtgctgtaagcttcttggaaacaccagaaaaagcaagaaggtgtgaaaagttggatttcacaagttcagatttgttgctagttctgcctttggagtcagattgataaaggtaaaaaggtgcctcttagaatctggtgtggccctcagcagagggtctgttgaatggctctcgctgagctgatgcatgtgttctgaaygatgtttcattaaattcctgcaagatkttacagtaggcactgctggcgctgtgaaatcctctgcaaagagccatagrtggcaagaataacctgctttagaaatctgttgtgttagggacagcaaaaatgaggcgtttgcattgtgtttcccagtgcacagtattccatttcccagtttggagagagatttccatactttccgatgtctctgtatgagatagagacattgcaaatgaaaatgtctttatgcctagtaatggtaaataagaagactagaggaagttctgggagaaacaacagaagatggtaaagcacagcaagggatttaggaaaaggacaacagaagtgactgtgttctgcacagtgaaattgctgct

SEQ ID NO: 15213 - DNA, 600 bp, Chicken  19866894221407_4
aataagaagactagaggaagttctgggagaaacaacagaagatggtaaagcacagcaagggatttaggaaaaggacaacagaagtgactgtgttctgcacagtgaaattgctgcttagggttggaggagcgttacttgccaataataagatttgaaagccttaagcattacagctggaggaaataccaacctgatttattggcatgcaattaatgaagtaatgtggtcgaggaaaagtgataccgatcaatgagcgcttcctgaccatgagtgccactggagcagcagtgcaaagagccygttaccaacacatcttaaaaccagactggacaaagcattgagtgctgcagcaggaaaccagcctgcgccggtgggcaatacagtaagcacgctgttttacatcctcaggctcccagctaattaacggctcctaaatgacttgtgttgattccgctagaaagcggcgaggtggactgatccacttgaaagtctcctgtaaatgtgraacgttgctgcaatctgaaagaagcaattttcagcctcccaaaatgaggcttgcttgcagaaaaacctctctgcrggagctgcaccccttaggag

SEQ ID NO: 15214 - DNA, 600 bp, Chicken  19866894221407_5
gcaattaatgaagtaatgtggtcgaggaaaagtgataccgatcaatgagcgcttcctgaccatgagtgccactggagcagcagtgcaaagagccygttaccaacacatcttaaaaccagactggacaaagcattgagtgctgcagcaggaaaccagcctgcgccggtgggcaatacagtaagcacgctgttttacatcctcaggctcccagctaattaacggctcctaaatgacttgtgttgattccgctagaaagcggcgaggtggactgatccacttgaaagtctcctgtaaatgtgraacgttgctgcaatctgaaagaagcaattttcagcctcccaaaatgaggcttgcttgcagaaaaacctctctgcrggagctgcaccccttaggagcagcgggaggcacagcatgatgagccgggccaggccccatgctgggcacctccgagagaggaaacaaattacctgtgctccgcattgtcattatccctcacttgagaaacccacttctccctccctcatctccacagccccaggaagcacctgtcaagtctgtatttcttaatttgggtttattttctcggtcatgaatttttat

SEQ ID NO: 15215 - DNA, 600 bp, Chicken  19866894221407_6
agcagcagtgcaaagagccygttaccaacacatcttaaaaccagactggacaaagcattgagtgctgcagcaggaaaccagcctgcgccggtgggcaatacagtaagcacgctgttttacatcctcaggctcccagctaattaacggctcctaaatgacttgtgttgattccgctagaaagcggcgaggtggactgatccacttgaaagtctcctgtaaatgtgraacgttgctgcaatctgaaagaagcaattttcagcctcccaaaatgaggcttgcttgcagaaaaacctctctgcrggagctgcaccccttaggagcagcgggaggcacagcatgatgagccgggccaggccccatgctgggcacctccgagagaggaaacaaattacctgtgctccgcattgtcattatccctcacttgagaaacccacttctccctccctcatctccacagccccaggaagcacctgtcaagtctgtatttcttaatttgggtttattttctcggtcatgaatttttatttcctaaggtttttgaaggctcctggttttactattagcagcaaatccatcggcaccgtgcatctttccagacaa

SEQ ID NO: 15216 - DNA, 600 bp, Chicken  19866894221416_1
ctcttttcaagagcgagtcctttacagccgctaagtgaagtcaggggagagcgcgactgagttcggagcatttccactatgggactggatacgagcactgaacaaccagattcgaaatgttttaatcgaaaaccgtttttgctgactttggtttttaatttctttcatgttttcttctgccaaactggaggaaccttccctgattttttctttagtggcattcagaggaagaccagaggatgaaaatcctgcattttctcactttactgctttggcatttgacttggctgtctctggatygtgttcctggagcactgagtaactccgaagcaggccagagtaatccagggtctaaaacagatctgttaaaagcagaaggaaaagagaggactgcctcagcacgggcgggcgcgccgcgggctgcgaaccatggatttagcaccgggacctcgaaggcgagggctaaaagcaacgctgctcaggctggagctctgctggccaagaacgatgaatcacagagggttctttcaagaacagcagtcacagaggcaaaggtaggacatctcccgagcagaccttctgcagtaaggacggtgactc

SEQ ID NO: 15217 - DNA, 600 bp, Chicken  19866894221429_1
ttaaattcggctcttcctttcaactctttggaacttgcagtgttgttctcaagagattattaggtgatggagcaaatacttatttctctttcaggaaatgggaaaataagtagctgtgcggctgctgagggaagttttacctcccttactgggcttttggaagttgaacctctgcactttacatgtgtttcaacaagtgatggaactagaatagaaagggacgatgcaagtacgtttactggtatatacaatttttcattttttctacttagcataattctacagtatgagatctttaaytggacttaatgagcagctgtttcacaactggattgtctgtgggttttaaatgttgggtttttttaataactactgtacgtcagtttattcttagagtttaacaaactagatttcaaatgtatgaattggaakraatgtgtttctgtatgtgagtgtaacgtaagaatttgcatgtatgccttgcagcctagtgtggcaaaagcatttgaaggctttaggaggatcttctgtaatgaaaatgttgcatgtacgctgtgcgcagtctataaaccatatactttgcaattcaatgtcacgtta

SEQ ID NO: 15218 - DNA, 600 bp, Chicken  19866894221429_2
agttttacctcccttactgggcttttggaagttgaacctctgcactttacatgtgtttcaacaagtgatggaactagaatagaaagggacgatgcaagtacgtttactggtatatacaatttttcattttttctacttagcataattctacagtatgagatctttaaytggacttaatgagcagctgtttcacaactggattgtctgtgggttttaaatgttgggtttttttaataactactgtacgtcagtttattcttagagtttaacaaactagatttcaaatgtatgaattggaakraatgtgtttctgtatgtgagtgtaacgtaagaatttgcatgtatgccttgcagcctagtgtggcaaaagcatttgaaggctttaggaggatcttctgtaatgaaaatgttgcatgtacgctgtgcgcagtctataaaccatatactttgcaattcaatgtcacgttactttgtaagaagtctaaaaagaaaccttacttagtttttacgtcgctcttactaactattaaggaattcaatatgtttattatcatctctgttctacatacatgattttgtttttgtttgttttttgtttgt

SEQ ID NO: 15219 - DNA, 600 bp, Chicken  19866894221429_3
gttttacctcccttactgggcttttggaagttgaacctctgcactttacatgtgtttcaacaagtgatggaactagaatagaaagggacgatgcaagtacgtttactggtatatacaatttttcattttttctacttagcataattctacagtatgagatctttaaytggacttaatgagcagctgtttcacaactggattgtctgtgggttttaaatgttgggtttttttaataactactgtacgtcagtttattcttagagtttaacaaactagatttcaaatgtatgaattggaakraatgtgtttctgtatgtgagtgtaacgtaagaatttgcatgtatgccttgcagcctagtgtggcaaaagcatttgaaggctttaggaggatcttctgtaatgaaaatgttgcatgtacgctgtgcgcagtctataaaccatatactttgcaattcaatgtcacgttactttgtaagaagtctaaaaagaaaccttacttagtttttacgtcgctcttactaactattaaggaattcaatatgtttattatcatctctgttctacatacatgattttgtttttgtttgttttttgtttgtt

SEQ ID NO: 15220 - DNA, 600 bp, Chicken  19866894221429_4
tgttttttgtttgttccatgccagtgagtacctttggggttaccccagcagttggtggtctctcatctggaacagttggggaagcctcgacagcactgagttcagcagcccaggtagctttgcagtctctctctcatgcaatggcctcagccgagcaacagctccaggtgctgcaagagaaacagcagcagcttttgaagcttcagcaacaggttggaggctatttggctattttttaatgctgtctctacacttcaaaagctgaggaaagtaattggagagctagtcacttttcctttwtttttttttttccttttttccttctttttcttttttccatagtgcatttgtgaaaggaacagctctggaccgaggattccctctcattaagcaaaacactgagtttcttcctgctgttttggtcttcagacttgttttttgtgtattttgagagtgggggaatttattatcaaaactaaatcttaatacataggaacatcaatctgtgaaattaagaaggcccgctgaaatgaaaagcattgttgcagatgtggggaagtaccagtgataaagccattatcagaatgcagtttgtgttga

SEQ ID NO: 15221 - DNA, 599 bp, Chicken  19866894221431_1
  misc_feature (1)..(41): n is any nucleotide
nnnnnnnnnnnnnnnnnnnnnnnnnnnnnnnnnnnnnnnnncttaggggttcttttttgtatagcaggagttcatgctggtcaaactaagtggtgagccaaatctggtcatttacattgataacttaattgatggcatatttgatatacactatgatgttataagacataaaagaacatttatatatttgataaagacatattagttaaaggaataaggctagagaggtccagatgggggtgagagaagagcaggcacttgtgagttgtttgttacagatacctatgaaccttctacctrtactagtgttctactgtgtgcttgtgcttgctaaaggctgctcagagactgggagttcagctttgtgagggacaattccagggtttgaaaggaagcagtggggaaacaagaagatcttacctaaaatctcttcatacgtactaaggaaaaggaaaataaataagatcctaacaaacaatagttgtcaacctatctttgtggaccaatccttgaatatttaacagtttttccctacagttctatgtttttctttagccttaaaaaataaatgttatcatttaagaagtagctggtctgtc

SEQ ID NO: 15222 - DNA, 600 bp, Chicken  19866894221431_2
acagttctatgtttttctttagccttaaaaaataaatgttatcatttaagaagtagctggtctgtctgtgttattctcagatactactattttagtgaattactgtatgtagccaatgtgtagccacaagaaaataagtaactaactgcatgaaaatgatttattgcaattaattcaatttaacaataaaaaattgagaagaacagaaaaattacctggtatgtcatgaatcaaaaaagattaatacagtttgatagttaaaaatattccatgcaaaatagtaataataataaaaaaaawttggtaatgtacaccataaaattgcactcagaaaataaaacagcacactcttcacaggtattctagaaacattcagctccaggccatgtacagtagagtttaaaatataagtactcttttaacagttcagctctacctcgggttccatcatcttatttttttcagtccgttgctcagtaacattgtgtgtgctaaccaaggcatgtatacacaaggtccctcatgctccttgttaaagctgtcattgatagaaacttcatgattttgaagcacagcaaaagacgctgtcctgggtttgtc

SEQ ID NO: 15223 - DNA, 600 bp, Chicken  19866894221432_1
ttcttcccaccctgtctgctgtatgagatgatcctccagacattactgaatttctgtaaaacaaataactcttcaggaacagtttgagatgggcaccaggaggtacaaactgagtcttttttctgtatggcactctgggccatagacagaaacaccgtgaatcttataagtaagggataaaactacacacatctaacggtagatttcaagttatgtgtcaccaaattaaggagctgcttcatcagcacctgcagccatcacatgcctttccattgatggcaccagataaatacccattgmagaaagaaatgctgcctggagtttccttttccttcttttcttaaaataatttcctgcagtaatgacagcacacaatgagtacacacaaatgtgtgttctgttctccaaatctctttggaaggaaaacaagggaatacaaaagcagggacagcagaagctgcagacagaccttcgcaagtgaccatgtgccaggcttcatggtcacattctgagtgcagctgcgtggtgtaaatccagagtaactccttcctttggattcagtttatccacayatacccaggtgcagtccgagcagtccta

SEQ ID NO: 15224 - DNA, 600 bp, Chicken  19866894221432_2
ttgatggcaccagataaatacccattgmagaaagaaatgctgcctggagtttccttttccttcttttcttaaaataatttcctgcagtaatgacagcacacaatgagtacacacaaatgtgtgttctgttctccaaatctctttggaaggaaaacaagggaatacaaaagcagggacagcagaagctgcagacagaccttcgcaagtgaccatgtgccaggcttcatggtcacattctgagtgcagctgcgtggtgtaaatccagagtaactccttcctttggattcagtttatccacayatacccaggtgcagtccgagcagtcctaaactcagattcctcacatgtttagagggctttgaaaacagcttcagcaaacagtctctaggtcagtgcagattaaatctaaggcacagtctgcacttcaaaagttgtacagctgtgtcagggaagtgactgcaaaaccttcttgtggaggtgattgtgctggtaggagtcccagtgtaaagccagttgtactgccaggaaggccttcacagcagtacagcccgtgttgcattgctggaccactgctacatcagtacaagcacttctatccca

SEQ ID NO: 15225 - DNA, 600 bp, Chicken  19866894221433_1
tttcacccatttttccaaacgatgtggattactatgctactaacctcactacacccactcccacctcatgtatgtggtctaacatgtttgcaaaaacagtgtgtgtgtgctcagaagaataacggtggctgaattcctcctcctaaaaatcctgttaatccagtcagagttgacatattatgctggttatgctatcagagccatgcatggcctgcaaatccaaggtctaccagtgtggccggtgctttaaagctcaaaagctaagcgattactcctatattatgttgaaaattggatatwttttttttaactagctttgattatagttttgttatatataaaaatcaaagcatgtgaagagaaataagaagaaaaaagaaaatcctagtgtcagaaatgcagtawctctttcctctgcagccttcctttttgaaacagtttcattgagtcatgactgtgtttgctgaaaagagaatttcttgcatttttaaaggatgagaaatacattttcattctgtaatgtaggacctctcacgtcaggtgcaccttgcttgatttgcatgtgaattctgaacaattcttgttttatgtgacacttct

SEQ ID NO: 15226 - DNA, 600 bp, Chicken  19866894221433_2
tgtgctcagaagaataacggtggctgaattcctcctcctaaaaatcctgttaatccagtcagagttgacatattatgctggttatgctatcagagccatgcatggcctgcaaatccaaggtctaccagtgtggccggtgctttaaagctcaaaagctaagcgattactcctatattatgttgaaaattggatatwttttttttaactagctttgattatagttttgttatatataaaaatcaaagcatgtgaagagaaataagaagaaaaaagaaaatcctagtgtcagaaatgcagtawctctttcctctgcagccttcctttttgaaacagtttcattgagtcatgactgtgtttgctgaaaagagaatttcttgcatttttaaaggatgagaaatacattttcattctgtaatgtaggacctctcacgtcaggtgcaccttgcttgatttgcatgtgaattctgaacaattcttgttttatgtgacacttctgaaatgtctgtctgtttttcttttctttctaattctcaagctcactatttggataagatagtgaaaggtactgtatatttgctctttgatgacatgcctatacct

SEQ ID NO: 15227 - DNA, 600 bp, Chicken  19866894221452_1
ttgctcccatctaattaatatggatagggcattaagcctttttggactctggtggttttcatttcatgactattaatgattttaatgaactggactaattcagtagttttcattctagtgtttcagagctttgttcatcacaattttcaggtttataattggtttccaggtcttaacagtggtcattgatcagcttcagcagtttcttttacgacccagtaggaacataagaaaagtttttaaccctttgctagcacaagggcgcaccaaaactgcctcagtatccagagaaggaagacrtgatctgggagttcctttaatgtgccaaattgggtctgaaagtgagctgtgtagaatgttgccactgaaggtgcgaggcagatggaaatcaaatgcacaaggtgaaattctgtcaatcttaaagtatagttatggcatagagtttacaaaacagggagcttctctctgtgctgttcctcatggtagattttatatcaatactgaactattttaaagcattgctacactaaatatatgtattgcttatctgatatatatgttccaaatgactgtgaaaagatggaggttattcattcataa

SEQ ID NO: 15228 - DNA, 600 bp, Chicken  19866894221456_1
gtgaagttgatgcaagcaatcatatttattcagaactctgtaataattgcagtgtgcagttcagccttagagtccaacattggtttctaataaacgttatggtgtaaaattggagttccgttttgacatcagtacatgaacgtgaccaagaggctaaagctaaattatatgtgttacggaggcccagctgttaaagcatcttttcatacttctgataattttctttatcttcccttcagttcttttcacacatttgtatgctgtctagagtagccagattcaggttttgtagcatcaccytttgctcctacatctccctaaccttaaactcctcctagcttttgagtcttatttaaagaagtctcttccacaaactactaatcagtgcctttgaaaggcagtaccaaatatatttcagtgcatataggtatatatgtagtgcataggcacatagtgcataggtacccatggagcttcatctctgccacctgaatcccatccaggctttttcatgtttatagtcatcagtcatatttcatgtttcctgggtagaagtctatgtttatttcaacctctttactcatttctttgttgacagat

SEQ ID NO: 15229 - DNA, 600 bp, Chicken  19866894221457_1
aaaatgctgtggtttgaccaactgcaaagtgaagcaggaaagcagaaagggagattaccaaaatcaggaatgctccataaaaacctcagcttctgcttggtgatgactgttctttcctcatagttccaacaaaaggactgaaaacgtgcaatgagcgcaatttacatcctcagaaagttgatggaaaagaaaatgaacgaaaaggtgttttgttctcttctgaaactgtgcttccaggtcattcttgttagctttcaatgcttggaggtgacaatgtgggaaatagaggaggaaggtagmagtgggctctgctgcaagtcccagccggctcctggccacgctccctctgctcctgtaggcagcacaggccgggcactcagccctaagtcctgggctgacacaggcttctsacagggcttatgaaaagaaaaagggaacaacccaaggaaaaggctccaagccccatggcactcctgatacataagtgctggcagcactacttccaccgctgccaggctcgatagtttatcttctcttgacgttgctgcccctccccacttgtggtcaataattcactcattgcttctcagcacacacacc

SEQ ID NO: 15230 - DNA, 600 bp, Chicken  19866894221457_2
tctttcctcatagttccaacaaaaggactgaaaacgtgcaatgagcgcaatttacatcctcagaaagttgatggaaaagaaaatgaacgaaaaggtgttttgttctcttctgaaactgtgcttccaggtcattcttgttagctttcaatgcttggaggtgacaatgtgggaaatagaggaggaaggtagmagtgggctctgctgcaagtcccagccggctcctggccacgctccctctgctcctgtaggcagcacaggccgggcactcagccctaagtcctgggctgacacaggcttctsacagggcttatgaaaagaaaaagggaacaacccaaggaaaaggctccaagccccatggcactcctgatacataagtgctggcagcactacttccaccgctgccaggctcgatagtttatcttctcttgacgttgctgcccctccccacttgtggtcaataattcactcattgcttctcagcacacacacccacacctcaccccttgtcgcctgccctacccctatggctcacatgctatttatttcaacagcttcagcatgctgccttctgagcagcgctccccaacccattgttaaacc

SEQ ID NO: 15231 - DNA, 600 bp, Chicken  19866894221458_1
aggcttggtgtcagaaaaataagatcttggacagtcacttttagaagtctataatcttagcaagtatttctcataaatttttgtatgtgagtatagtaagaacacaaagtattcatatgatcaaaattatcttatgacaccagagctttaccagaaaatagacaagaagaaaccacagacaccatgtggtctaaatctggtgcttcaatggaattttgagttaatccagcactttcagctcttcctctagaggccatgtactggtgcattcatagtagaagtcttccctaaactcttgasaacagttaagtaacaaaataacaggttacaatggttttcacagctctgactcttcttccttcattttagtcaggaaagcaccaaacatggaaagtcatttcctaataggaaacatgaatagtgtgttcaaaagcacatgtgctttggtggtaataaaagaacaaatggtaggtcagtgttggaggaatttttaaatatctagctatagcactatttgtatgtacagctcctgaacttctctgcaaagagctgaaattatcttactaaaaaaaatagtagccctctgcttgaaaaagcaat

SEQ ID NO: 15232 - DNA, 599 bp, Chicken  19866894221459_1
  misc_feature (1)..(179): n is any nucleotide
nnnnnnnnnnnnnnnnnnnnnnnnnnnnnnnnnnnnnnnnnnnnnnnnnnnnnnnnnnnnnnnnnnnnnnnnnnnnnnnnnnnnnnnnnnnnnnnnnnnnnnnnnnnnnnnnnnnnnnnnnnnnnnnnnnnnnnnnnnnnnnnnnnnnnnnnnnnnnnnnnnnnnnnnnnnnnnnnnnntgcaactatcctaacatccacaacaaggagaacttcttaacgctttagataaggagaaccaagaaaacaggttttgttaaagatgatacgagcagcattaactgcagatggactggaatgytctttaaccaaccctacacatccactgttggcttccagcccctggggccctgctcaccaaatgcagcgctgtccattggggtccatgccagtcgatggctcatccagcagcaggaccgaggggttgcccagcatgcacacagcaaagcacagctatggtagggagaggggttggggtcagaccttctgcagccccagcactgtgtcttcaaggagctgcaggcagcattgcagtctttacaaacatcaaacttttgattgataggagacagggactcggaaggtgtgatgtgatgctct

SEQ ID NO: 15233 - DNA, 600 bp, Chicken  19866894221459_2
gttggcttccagcccctggggccctgctcaccaaatgcagcgctgtccattggggtccatgccagtcgatggctcatccagcagcaggaccgaggggttgcccagcatgcacacagcaaagcacagctatggtagggagaggggttggggtcagaccttctgcagccccagcactgtgtcttcaaggagctgcaggcagcattgcagtctttacaaacatcaaacttttgattgataggagacagggactcggaaggtgtgatgtgatgctctcccgggtgggtgggagcacaggtaggycccactgctcccggagggcatttttcattcatgctatgaacattacagtgctcattataggaaaaagaaaaaaaaaaaaagcacctttctggttatcccagcaggaagttttctggttggcttttttaaatagtcttgaagctgcagagcattcactattctgtgagaaagggaaaaaaggaagctgttattcctagctgggtaccctaaccagaagttcccaaaacaataacaaaaagggactttcttatctctgacttttggctcctgcttgatttcagtaaattgtgttataaaaac

SEQ ID NO: 15234 - DNA, 600 bp, Chicken  19866894221459_3
atggctcatccagcagcaggaccgaggggttgcccagcatgcacacagcaaagcacagctatggtagggagaggggttggggtcagaccttctgcagccccagcactgtgtcttcaaggagctgcaggcagcattgcagtctttacaaacatcaaacttttgattgataggagacagggactcggaaggtgtgatgtgatgctctcccgggtgggtgggagcacaggtaggycccactgctcccggagggcatttttcattcatgctatgaacattacagtgctcattataggaaaaagyaaaaaaaaaaaagcacctttctggttatcccagcaggaagttttctggttggcttttttaaatagtcttgaagctgcagagcattcactattctgtgagaaagggaaaaaaggaagctgttattcctagctgggtaccctaaccagaagttcccaaaacaataacaaaaagggactttcttatctctgacttttggctcctgcttgatttcagtaaattgtgttataaaaacatgagtggatgcttatagagtcattcagactggaaaagacctctaagatccccaaatccaaccccaac

SEQ ID NO: 15235 - DNA, 600 bp, Chicken  19866894221460_1
aaaactctgacctaagcttcctccccatgcctgcattgctacctgcgtgcatggagaaattactgagattggagaccgcctaaagtcagcattaagtgccttgtgaatttcacctactgctgcttcctggtatttcttccacactcttgggatacttttctgagggtctgacggggtcataacagtttcagccttttacattcagtccgtaagactgagattagaacagcagtgcacttgtgattgcagccttcaaaaaactgaataaatcggtttctcatgttgctgtagcacctgagraaaaaaaatgcatgattgtgcacagaatgtgtcacagaagtgacctaaggtcagtctgccaaaaagtttcactgccaggaataaacccagtgcgagattctgttggcagtgggsaggaaactaaaagcttctgtccacagagcattccctgcgtgctgcttttcggggctggatttggaggagcagtgtgcagagcaagtaatcaagtgaggagctctgccygtctctagaattttcagggaaacttgttgctgtcagttgttacttattgtggccacacccaagagcgattgagtcagt

SEQ ID NO: 15236 - DNA, 600 bp, Chicken  19866894221460_2
tactgctgcttcctggtatttcttccacactcttgggatacttttctgagggtctgacggggtcataacagtttcagccttttacattcagtccgtaagactgagattagaacagcagtgcacttgtgattgcagccttcaaaaaactgaataaatcggtttctcatgttgctgtagcacctgagraaaaaaaatgcatgattgtgcacagaatgtgtcacagaagtgacctaaggtcagtctgccaaaaagtttcactgccaggaataaacccagtgcgagattctgttggcagtgggsaggaaactaaaagcttctgtccacagagcattccctgcgtgctgcttttcggggctggatttggaggagcagtgtgcagagcaagtaatcaagtgaggagctctgccygtctctagaattttcagggaaacttgttgctgtcagttgttacttattgtggccacacccaagagcgattgagtcagtgtttggaatttttttctttctttttttttttttttctggaggtgggtgagggagtgtgaaatcagtagtaacgaatcttagggttttagatgayatctgttgaggatggggact

SEQ ID NO: 15237 - DNA, 600 bp, Chicken  19866894221460_3
agaacagcagtgcacttgtgattgcagccttcaaaaaactgaataaatcggtttctcatgttgctgtagcacctgagraaaaaaaatgcatgattgtgcacagaatgtgtcacagaagtgacctaaggtcagtctgccaaaaagtttcactgccaggaataaacccagtgcgagattctgttggcagtgggsaggaaactaaaagcttctgtccacagagcattccctgcgtgctgcttttcggggctggatttggaggagcagtgtgcagagcaagtaatcaagtgaggagctctgccygtctctagaattttcagggaaacttgttgctgtcagttgttacttattgtggccacacccaagagcgattgagtcagtgtttggaatttttttctttctttttttttttttttctggaggtgggtgagggagtgtgaaatcagtagtaacgaatcttagggttttagatgayatctgttgaggatggggactgtgtacagtggtagaacggcctccagctcgttagaagcatggccatgaaatgtgcttctggtcgttctccgagttgcaaagatgtcatcgaggaaaaatgccacgctg

SEQ ID NO: 15238 - DNA, 600 bp, Chicken  19866894221460_4
acagaatgtgtcacagaagtgacctaaggtcagtctgccaaaaagtttcactgccaggaataaacccagtgcgagattctgttggcagtgggsaggaaactaaaagcttctgtccacagagcattccctgcgtgctgcttttcggggctggatttggaggagcagtgtgcagagcaagtaatcaagtgaggagctctgccygtctctagaattttcagggaaacttgttgctgtcagttgttacttattgtggccacacccaagagcgattgagtcagtgtttggaatttttttctttcyttttttttttttttctggaggtgggtgagggagtgtgaaatcagtagtaacgaatcttagggttttagatgayatctgttgaggatggggactgtgtacagtggtagaacggcctccagctcgttagaagcatggccatgaaatgtgcttctggtcgttctccgagttgcaaagatgtcatcgaggaaaaatgccacgctgcccctcaggcctgcagcccttctgcctccgcgcctccacagtgcctgaaggagcggagcacggagcctgacagggtactgcaacccagtctggttgtga

SEQ ID NO: 15239 - DNA, 600 bp, Chicken  19866894221460_5
cagaatgtgtcacagaagtgacctaaggtcagtctgccaaaaagtttcactgccaggaataaacccagtgcgagattctgttggcagtgggsaggaaactaaaagcttctgtccacagagcattccctgcgtgctgcttttcggggctggatttggaggagcagtgtgcagagcaagtaatcaagtgaggagctctgccygtctctagaattttcagggaaacttgttgctgtcagttgttacttattgtggccacacccaagagcgattgagtcagtgtttggaatttttttctttctytttttttttttttctggaggtgggtgagggagtgtgaaatcagtagtaacgaatcttagggttttagatgayatctgttgaggatggggactgtgtacagtggtagaacggcctccagctcgttagaagcatggccatgaaatgtgcttctggtcgttctccgagttgcaaagatgtcatcgaggaaaaatgccacgctgcccctcaggcctgcagcccttctgcctccgcgcctccacagtgcctgaaggagcggagcacggagcctgacagggtactgcaacccagtctggttgtgat

SEQ ID NO: 15240 - DNA, 600 bp, Chicken  19866894221460_6
agaatgtgtcacagaagtgacctaaggtcagtctgccaaaaagtttcactgccaggaataaacccagtgcgagattctgttggcagtgggsaggaaactaaaagcttctgtccacagagcattccctgcgtgctgcttttcggggctggatttggaggagcagtgtgcagagcaagtaatcaagtgaggagctctgccygtctctagaattttcagggaaacttgttgctgtcagttgttacttattgtggccacacccaagagcgattgagtcagtgtttggaatttttttctttcttyttttttttttttctggaggtgggtgagggagtgtgaaatcagtagtaacgaatcttagggttttagatgayatctgttgaggatggggactgtgtacagtggtagaacggcctccagctcgttagaagcatggccatgaaatgtgcttctggtcgttctccgagttgcaaagatgtcatcgaggaaaaatgccacgctgcccctcaggcctgcagcccttctgcctccgcgcctccacagtgcctgaaggagcggagcacggagcctgacagggtactgcaacccagtctggttgtgatg

SEQ ID NO: 15241 - DNA, 600 bp, Chicken  19866894221460_7
agattctgttggcagtgggsaggaaactaaaagcttctgtccacagagcattccctgcgtgctgcttttcggggctggatttggaggagcagtgtgcagagcaagtaatcaagtgaggagctctgccygtctctagaattttcagggaaacttgttgctgtcagttgttacttattgtggccacacccaagagcgattgagtcagtgtttggaatttttttctttctttttttttttttttctggaggtgggtgagggagtgtgaaatcagtagtaacgaatcttagggttttagatgayatctgttgaggatggggactgtgtacagtggtagaacggcctccagctcgttagaagcatggccatgaaatgtgcttctggtcgttctccgagttgcaaagatgtcatcgaggaaaaatgccacgctgcccctcaggcctgcagcccttctgcctccgcgcctccacagtgcctgaaggagcggagcacggagcctgacagggtactgcaacccagtctggttgtgatgagtaaattgcatttctacgtgtgtaaacgtacaagcagtgtggtgctacctggttgtttaaacctttcaag

SEQ ID NO: 15242 - DNA, 600 bp, Chicken  19866894221464_1
tataatcactgcttgttgtattgatgcccaagataaaatgcttggatatgttgctttttttgggcagacttcctgtcttcactcacaatcaaatcaagcaaagtttgagctagaaatcttctcctgaagaattaatttattgtttggttccccctccccccccaaagtaagtgaatcttaatgtcttttataatttttacaggaatagtaaatgtctgtgctcactttcaggggacctcttatattagatcctctgctttatgtcttcctgtgtgcatttctgttccagtgttatttgtstttctcccactgtgaagaaaaaggaggcgttgtaagagttatatgtatgtgtgccagattgatatctatatatgtgttttttttccccttctgaagctgtagaactgggttgcatagactgtgatgtaaagattacctctaaaagcgtttgtgtccaaaatctagagcaaaggatgtgatttgtccttttgcaagtaatgtagacaactgtagatagcttatgataaagcgaagctggtttctctaacctggatctgaactgtttagagctttagattaaaatcagtgtgtcaaattgta

SEQ ID NO: 15243 - DNA, 600 bp, Chicken  19866894221464_2
gccagccaaagtaacatctgatatttaaactcattatttgtgtatctgaaacagtttgcttgtatcatagcttaaatagaagttaatgtaatcagctactccatctgcgtttgaaatgagggtggcgagctagagatgatgagccagtttgctctcggatttcttcaaaaatgaagcatctgtctctgcttgcggttgactgcaagtctatttgccatgtaaaagtcaggtatttcaatgctatagaggacatcatatactctttagtggctggaagctgaagaaatgattctgctaacsaaaaaaagcttgatcaagggacaagagttcttggcagtatctgaagaggattgtagactgaggggggggggcgggaattgcacagctgagaagcagaggaggttaaaaatatctttaagcctttttccttaaaggaagagagatattccatgatttaaattttgaaggaaataaattcattttgggtacaactgcagagaccaactgttctggtgagtgttaggaggcctttaaaaccaatcaccatctggttcagaaacttttaaagcggttaggtgatatggcatattcagtttaagg

SEQ ID NO: 15244 - DNA, 600 bp, Chicken  19866894221469_1
aaaaatgttcctctcagtcttagagataagaaatgaaaaaattgttgtctagagagaaagcactgtagaaatactcttgggcatcaaatttcttttaaaataaaatgagatggacatctggccaccttaaacacatgcaaaaatttcactgtcaaactctaggcatgtggactgaatataaaaatagatcagaaagataaaatcatttataatttgtacatacattatagtttacattttaaaataatattgcaattggagaaagaattttgtcagaaagtagtttggctaaaaaactgwgataggcttggaattcctaaactgtaatatgcccttgatttatggaaatctgacccagtgaaaaatgaaatcaaaaggaactgaaattcttgcagttaaagtgaatgcttttgcagtgaatctgttcaccactgygtatgctttgtcagtttgaataagttcacaagcagctgtcatatatctttagccagtgtttccttgccacatacaaagaattctgtcaccaaaactggactgaatatcattagcagtcgtgcaaaccacaaagatttctcagaatgtttgttagtgacatttctg

SEQ ID NO: 15245 - DNA, 600 bp, Chicken  19866894221469_2
tgcaaaaatttcactgtcaaactctaggcatgtggactgaatataaaaatagatcagaaagataaaatcatttataatttgtacatacattatagtttacattttaaaataatattgcaattggagaaagaattttgtcagaaagtagtttggctaaaaaactgwgataggcttggaattcctaaactgtaatatgcccttgatttatggaaatctgacccagtgaaaaatgaaatcaaaaggaactgaaattcttgcagttaaagtgaatgcttttgcagtgaatctgttcaccactgygtatgctttgtcagtttgaataagttcacaagcagctgtcatatatctttagccagtgtttccttgccacatacaaagaattctgtcaccaaaactggactgaatatcattagcagtcgtgcaaaccacaaagatttctcagaatgtttgttagtgacatttctgtaatatttcttgaacacatgcaagatggcaccctgccaccatgtgataatctgctaatactcaggacgggaatgatatagatgcattttatcacactgtcttccaaagtagcatagctgagttttactatggtgt

SEQ ID NO: 15246 - DNA, 600 bp, Chicken  19866894221473_1
agagaaagggggcaaggagaggagaagagtctacttaatgacaaagtagagatgcttaagggaaagctgaagtgtagacacagtctgaactctgaagccctcagatctttgttatacaaatagactcgctcctctggcaggccacacaactgtgctctcagatcactccctgatagttgcaaggaatgtgtgtgctcaggaacatgctgggtcaataaaacagtttcataatgaataagctggctcacaataggaaaagctttagaagcttccacagaaatgcaatataccgatgtgctmatgagatctaacattgctctttgataatatttcctttggattcacgaggaatagttactgactctgcttccctgaaggtctcactgtgraagaggtctacggcagagcctgatcattaaagcacacatttggtattgaatctcttgtgaaggcttctgtcacaagaataccgtgccaaacttcacctgactacattygaaggagctctcgtactttatcacctgttgctctagctcttcttccagcctccatttttgctgggtctagctctcccttccaggcagttcaactgtatctgag

SEQ ID NO: 15247 - DNA, 600 bp, Chicken  19866894221473_2
ctctgaagccctcagatctttgttatacaaatagactcgctcctctggcaggccacacaactgtgctctcagatcactccctgatagttgcaaggaatgtgtgtgctcaggaacatgctgggtcaataaaacagtttcataatgaataagctggctcacaataggaaaagctttagaagcttccacagaaatgcaatataccgatgtgctmatgagatctaacattgctctttgataatatttcctttggattcacgaggaatagttactgactctgcttccctgaaggtctcactgtgraagaggtctacggcagagcctgatcattaaagcacacatttggtattgaatctcttgtgaaggcttctgtcacaagaataccgtgccaaacttcacctgactacattygaaggagctctcgtactttatcacctgttgctctagctcttcttccagcctccatttttgctgggtctagctctcccttccaggcagttcaactgtatctgagacagtgggtcctttgatgttttttttttttttaagttctgcttcttgggagaacttctgagatgcttcatccattagctactgttgcat

SEQ ID NO: 15248 - DNA, 600 bp, Chicken  19866894221473_3
aggaacatgctgggtcaataaaacagtttcataatgaataagctggctcacaataggaaaagctttagaagcttccacagaaatgcaatataccgatgtgctmatgagatctaacattgctctttgataatatttcctttggattcacgaggaatagttactgactctgcttccctgaaggtctcactgtgraagaggtctacggcagagcctgatcattaaagcacacatttggtattgaatctcttgtgaaggcttctgtcacaagaataccgtgccaaacttcacctgactacattygaaggagctctcgtactttatcacctgttgctctagctcttcttccagcctccatttttgctgggtctagctctcccttccaggcagttcaactgtatctgagacagtgggtcctttgatgttttttttttttttaagttctgcttcttgggagaacttctgagatgcttcatccattagctactgttgcatttaagcatagtctgtattttctttatggatggtatcttggtacattcagaatcctaagccatgtccaggtcttctcttcgtgttctcctttctgacacaggctaatct

SEQ ID NO: 15249 - DNA, 600 bp, Chicken  19866894221478_1
cactgaagctgcagcttgtggagaggagcccattttgagacgggaggcctggggagctgctgcccatgtagtcccatgtagagcagtttctacataagtagaagagcagtgtgggacccatgttatggagctgtgttggagtgatgcttggagagctacagcctgtgggaagcctgtgtgggatcaattgagtaaggatggcatcccttgggagggatcttatgcagagcaggggtaaagagtgatcaagaaggagcagaagagaggaaatattacagactgtccagagcccccattccygtttcccctgcactgcttgcagggagaaagtagaaaaggatggattggaggaagaaactgtttttttgtttccttttgttcacactctactttgttagtgatagtaacaaattacagtaatctgcctatgttgtgactattttgttggtgataataattgatgagggatctccctgtccttatctcaaaacttgagccctttttcatcatattttcttccccatttcctttcatgagggagactgagagaatggcatgatggagattagctgcccatcagggtaaaaccaccacatggta

SEQ ID NO: 15250 - DNA, 600 bp, Chicken  19866894221481_1
agactctttgcctttgtttttcccacagttttatgtcacaactggggtccaggctgctcaaatgaggcgtatctgtcagccctacaggatcgtcactcttcaaacctcaaatcatattcttgcagatacagagactctggctccaacctaacgacactttcaggggtaaaaaaaattacagattggacaataaaagtgtgtgttttatacattagttattgttttactttgcaagtcggtttgaaacaaattaggaagaaggaaatgctttaaatctgaaatacgtgtgggtttattttragcgtttttcaaacaggaatgtttctattggctcacttcacactacatttagtttgttcatttctttccagaagagacttttgcaaccatgtttcctagatcttaacaataagaacagatctttctttcaagtcctgggctattcacactgagctgcacttttccaccttcaggccctctaaaatgttatccaatggggcaaaatatggctcaacatgtgtacagaccccgcctttcaccttcgggtcagttttcacctctacagccccaaacatacaattcttccattgttaagcgtta

SEQ ID NO: 15251 - DNA, 521 bp, Chicken  19866894221482_1
ttcacctgtgcattggagattcttgggatagtctaaagaagaaataaaggactggggacaagatacaacctgcaggcaataagcatatgggatcttagcaccattatttctatggctatcataggaatttatccttggtgaataaactttgcttaagactctaagcagttggaataaaagacaaaacctgagtaaggcacaaatctaacaaactgaagctatataaatggttgtcaatgggggttttatttgtttatctctttaaatttattaaaaagcagcaacaacaaaaaatcaaawttttgcttcaggcaaaaacatctcatgcacactagtttctggaaaagctggaaacatcaggaaatatctgccaaaaaaaatgtgaaatcaaagatacgtttcaaattgagatatgattttgaataaaaagcagcattatttacctataaaaccctgaaatcaaatgtgtccatgttggatttaaactttattaaattactcttaattaaatacttatcaag

SEQ ID NO: 15252 - DNA, 600 bp, Chicken  19866894221484_1
atgagcctatgagacttcgagtctacgagccaatgagccaatgagtctatgagcctatgagtccatgactctatgagcctagaagcctaggagtctataagcctatgagcccatgagcctacgagtctatgagtctacaagccaacgagtctgagccgatgagtctatgagtctcttagtctatgagcctatgactctttgaatctatgagcctgagtctatgaatctgtcagcctacatgtctatgagcctatgagtctacgagcctatgagcagtctgagtctatgagcctgagtccrtaactctatgagcctaagagtctgtgagcctatgagcagtctatgagcagtctatgagtctgagtctataactctatgagccctatgagtctgtgagcctatgaacctatgagtcgatgagtttatgagccgatgagcctatgagcctatgggtctacaagcctatgagtctatgagcagtctatgagcccatgagcagtctatgagcctatgagcccataactctatgagcctatttccctatgaatctgtgagccaatgagcagtctatgagcagtctatgagcagtctatgagccta

SEQ ID NO: 15253 - DNA, 599 bp, Chicken  19866894221485_1
  misc_feature (1)..(78): n is any nucleotide
nnnnnnnnnnnnnnnnnnnnnnnnnnnnnnnnnnnnnnnnnnnnnnnnnnnnnnnnnnnnnnnnnnnnnnnnnnnnnnccccatagacttctacacattcagcctcatgaggcagtctcagacttgctctgttctttcacttggagcaattttgctcctccaacctctgcctagaagttcaggaacatgagaaataggggatggtgctcatccgccccccaaggagtgtgtcaggatgaagcaaggcaccacctccagcttgctgcaggctgcagggggccaggctaactgggggcaagkgggttcggtctgctcacaccacacttctgttttcatcacttcattatatctcacggtttggccctggatgttctgtccctggggtaccgaaatgctgcagaaatccccccagacctaatctcaccggattaaggtttgcagccttattatagtatacaagataagggcttattaaacagcgtgaaagtaaccttggtgaaggggatttcaaaacctcgcggagcaaagtcttgagatatgaacagcgagaaatctgctggggttacttcatattcctgggtaatgcttatctcttttat

SEQ ID NO: 15254 - DNA, 600 bp, Chicken  19866894221494_1
agcaatttaaatgtgggtatgaatggttattgttttattcagaagttcccactcatgtggcctactgtaaggctggattaaattattaatttctggagatcctaatggaaagaggggaagggaatattattcaaagagctcatttggaaaccaaaatgccattagggcatggaggtttccaatttggactgagcaaagaatgatacatcagctgttcttttttaattccctgtctcactgtgttcttaaagcatgagtgggatgctctctgactgcaggtggagggaatagatttatttkgtgctggaaataatgaacttgcctgtgtttgtgtgtttggtcaaacgtggggcttttgcatcagctttacttgatgtgacacgtggtcctcaagtgctttcccagacaaggccagggtgtgtaatcctaaccatgcctgacaagggagtgcttggaaacacttttctatgatatgcaaatgcagcatctcctgaaagtcgatccaggcccaggcagaggcataaaaaaagccccaaccactccaactttaaatagaattcaggatgagtttggaatattgctgttaatgtgagttccaga

SEQ ID NO: 15255 - DNA, 599 bp, Chicken  19866894221497_1
  misc_feature (1)..(82): n is any nucleotide
nnnnnnnnnnnnnnnnnnnnnnnnnnnnnnnnnnnnnnnnnnnnnnnnnnnnnnnnnnnnnnnnnnnnnnnnnnnnnnnnnncagtgaatgaaaggagctcactgcttccctagggcagaacctggtttatgttaggttaccctgttacgtgctcagagaactgctgttgatggctgtgacttttactcagaaagaacaaggtgtgctctaatcctttgtcatacagtttatccttccttcagacttgcaagcaatgaaatgatgtttatttagcccagcagcactgaatgtaactgacycctccctgggatggaggcatagtgctcactgttcttggcacttagcagaggacctttaagcatgtgcctgggtagtgtggcactttggaatctgtatcataggctgatgttctttctggaagaacaagacaccatttatttttcgaacagaaaygtcattacagcatgttaaaaatgagtggtctgaatacttggttacagagcgctttgttagcgtgttttgatattgtgtgtatgttagaattgtgtatgtcagtgtttaatacattttgaaatgtatatgattttatatcaaagtc

SEQ ID NO: 15256 - DNA, 600 bp, Chicken  19866894221497_2
cagagaactgctgttgatggctgtgacttttactcagaaagaacaaggtgtgctctaatcctttgtcatacagtttatccttccttcagacttgcaagcaatgaaatgatgtttatttagcccagcagcactgaatgtaactgacycctccctgggatggaggcatagtgctcactgttcttggcacttagcagaggacctttaagcatgtgcctgggtagtgtggcactttggaatctgtatcataggctgatgttctttctggaagaacaagacaccatttatttttcgaacagaaaygtcattacagcatgttaaaaatgagtggtctgaatacttggttacagagcgctttgttagcgtgttttgatattgtgtgtatgttagaattgtgtatgtcagtgtttaatacattttgaaatgtatatgattttatatcaaagtcaaaacctatgaatgaacgaggagcatatctgcttgttttcagtagcaagatagcctgtactttgtattcattgagactgccagggagcctggagtgcaagctagtagcagcaatggataatgtgtccttttgtcttgtaccattagttgttttag

SEQ ID NO: 15257 - DNA, 600 bp, Chicken  19866894221499_1
tcctcaaaacgggcatttttatgatgctacggtcatacaaagacattctcaattgagaaatgtaaagattccaagattcagaccacaggctaagatgattttacctggctgagtggcagtttggaaatgacgttgggttttggtaccatgtgaatagggaacccagaaagactgcttcatatggaaggtaacaaacacgtggtacaagtggttgaagcaacaagtagaaataaacacaaaagagatcttgacttttttcctgcatgaaaaggctattgagggtctttctgaaacagaagrcaggcagatggggccagaagtgccatttaagatccccaagcaatgatttataaacaaygtatggaatgccatgcaccgtgtactttggtaatggagagaaaattcagactacctaatcagaatgggaaaatattcttttggtgtcaattaccagagctgtaagtgacttttccccactgaaaatgtgcacgcactaacctgtcccatttgtctttctgcctctgcaacggaaacaaaagaaaaggatcccaggctcaaatgacaaacaaggcaagtcacatggagaggggctgctaacaa

SEQ ID NO: 15258 - DNA, 600 bp, Chicken  19866894221499_2
aatgtaaagattccaagattcagaccacaggctaagatgattttacctggctgagtggcagtttggaaatgacgttgggttttggtaccatgtgaatagggaacccagaaagactgcttcatatggaaggtaacaaacacgtggtacaagtggttgaagcaacaagtagaaataaacacaaaagagatcttgacttttttcctgcatgaaaaggctattgagggtctttctgaaacagaagrcaggcagatggggccagaagtgccatttaagatccccaagcaatgatttataaacaaygtatggaatgccatgcaccgtgtactttggtaatggagagaaaattcagactacctaatcagaatgggaaaatattcttttggtgtcaattaccagagctgtaagtgacttttccccactgaaaatgtgcacgcactaacctgtcccatttgtctttctgcctctgcaacggaaacaaaagaaaaggatcccaggctcaaatgacaaacaaggcaagtcacatggagaggggctgctaacaacgttgttgcttgacttgctgaactagttaattctataatttattcttgctgctagact

SEQ ID NO: 15259 - DNA, 599 bp, Chicken  19866894221507_1
  misc_feature (1)..(78): n is any nucleotide
nnnnnnnnnnnnnnnnnnnnnnnnnnnnnnnnnnnnnnnnnnnnnnnnnnnnnnnnnnnnnnnnnnnnnnnnnnnnnnatatagttcctgagagatgactgtaactactccagaaaatctattcctgtgtttaactgtccttatcaatagatatttttcctaataactaatcaaaatctagcttgcttcgctcttcttcagagaaggcagcacaaggaatgaggaatgcattgcatgagtcgtttattggtggactgttatcaggtctttcatgcattatgttctttgtcatctctttaytgtttcctgttcgtctcctcacagctcctgcctgtgaaggtggtgccaaagcagaggcagttcactagatgaagtctttacagtgcttattagagcagaagggatcactctgcttgtcctagaggtggtacttctgtttgtacatcttgttttgtgaaagggcttctgctaaacatggratctttggataaagaccaaactgcacatccagtctggacagtaagggtacagatgtcaacgtttaacttgatgcttgctgctttcctgtcctcattacagcaaatatgctggctttgaaa

SEQ ID NO: 15260 - DNA, 600 bp, Chicken  19866894221507_2
agcttgcttcgctcttcttcagagaaggcagcacaaggaatgaggaatgcattgcatgagtcgtttattggtggactgttatcaggtctttcatgcattatgttctttgtcatctctttaytgtttcctgttcgtctcctcacagctcctgcctgtgaaggtggtgccaaagcagaggcagttcactagatgaagtctttacagtgcttattagagcagaagggatcactctgcttgtcctagaggtggtacttctgtttgtacatcttgttttgtgaaagggcttctgctaaacatggratctttggataaagaccaaactgcacatccagtctggacagtaagggtacagatgtcaacgtttaacttgatgcttgctgctttcctgtcctcattacagcaaatatgctggctttgaaagttctaaggagtcttaaaatcactgtctctcagttacaatgtgttaatttatttgccttttacttattctgtacgatatgccaaaacatcttaattgcaaacacttaaagatttcctgtactgcatcttacttcccgttagggcttctaagggctagaactttggacccagctctgtgct

SEQ ID NO: 15261 - DNA, 599 bp, Chicken  19866894221513_1
  misc_feature (1)..(195): n is any nucleotide
nnnnnnnnnnnnnnnnnnnnnnnnnnnnnnnnnnnnnnnnnnnnnnnnnnnnnnnnnnnnnnnnnnnnnnnnnnnnnnnnnnnnnnnnnnnnnnnnnnnnnnnnnnnnnnnnnnnnnnnnnnnnnnnnnnnnnnnnnnnnnnnnnnnnnnnnnnnnnnnnnnnnnnnnnnnnnnnnnnnnnnnnnnnnnnnnnnnatgactgcagcctctcctggagctgtgcgtgcagttcgtacaccattctgtctttagagggctcagcaagtcttcagtgcaaatccttgctcaccacatcatcakcttttgtctccacaccaatgtgtgcagaggagacaggcragggaagctctgcacgctgcagcaattcagaggcagcacgtccttctcttggtccaacgtggaccgagtgctgtctggctgtagggggggagtgcacccctgttctgtagtgccaacgtgtctctgagctccatgcttgcagcgtttcaacgtgtagcggctgtttgcagttctgtgatgctacagaggagggtttggctctgtgttgtgtaacgcagggtcttttgtcgcatcttgtctgcctcttattttagacctca

SEQ ID NO: 15262 - DNA, 599 bp, Chicken  19866894221513_2
  misc_feature (1)..(156): n is any nucleotide
nnnnnnnnnnnnnnnnnnnnnnnnnnnnnnnnnnnnnnnnnnnnnnnnnnnnnnnnnnnnnnnnnnnnnnnnnnnnnnnnnnnnnnnnnnnnnnnnnnnnnnnnnnnnnnnnnnnnnnnnnnnnnnnnnnnnnnnnnnnnnnnnnnnnnnnnnnnnatgactgcagcctctcctggagctgtgcgtgcagttcgtacaccattctgtctttagagggctcagcaagtcttcagtgcaaatccttgctcaccacatcatcakcttttgtctccacaccaatgtgtgcagaggagacaggcragggaagctctgcacgctgcagcaattcagaggcagcacgtccttctcttggtccaacgtggaccgagtgctgtctggctgtagggggggagtgcacccctgttctgtagtgccaacgtgtctctgagctccatgcttgcagcgtttcaacgtgtagcggctgtttgcagttctgtgatgctacagaggagggtttggctctgtgttgtgtaacgcagggtcttttgtcgcatcttgtctgcctcttattttagacctcagcagcgcatttgagctatttcagtgctcgcgaaggaagg

SEQ ID NO: 15263 - DNA, 600 bp, Chicken  19866894221514_1
tttacatccatttatgctaactgaaattatatatacccactgaatgaacagtcccacattatacctgcccagaccaactcaccctggctgtgtgtcatcggtcacacaatggtatgtaaaagttccaaacatctgcacccccaggattccatacaggagaagaaagaagagaaggaaaattgaaacactccagatttgctctccagaacgcctggcaaaagaaacgaacagcacaatgaatgcacaggcaacatgaagccatctctgaaaaactgtagaataggaaatatgctcacacakggagcagcatttcatcccacagaaaatttgtccttaaaactgatctcttgctatgtgccagaggtagacaatggagccacaatttttctaaacccctaagttaaaacaatgtacagaagggagaataaaagtaaataaaatgtgaacattagtttttgtaaaatagcatctaaataattacataggcgagacgatgaagtaaagcttatattaaataattaagagaactctttcacattactatgactttcactattacaagttgtacagaatatatttgtgcatattcttgtacatgtc

SEQ ID NO: 15264 - DNA, 600 bp, Chicken  19866894221518_1
ttagaagcataatagcatgacaaaaaaatatcattatactaccacagatcctcctcactggggcagaacagcagaccagagaattggcctcaaaacagcatcaaaaaaaataagcctcaaagagacctctggaagaaatcatctggtccaattcagtgcctggaggcacaaacaagtgggtgcttttcacttctgacagctactcgtccagcctgctcttgaacaaccccttgtgacagaaatcccacagcgtccctcaggcaagctttaacactgtgtgcaagaaatgatctctctctytgggagtaagaaacacagtgcacaaaaaaatttgttgtattgggccacctactccaaccaggggaaaggggaaagcaggaagaaatttaggcctattttaaggattccgtggtttagcatcatatcataccatgagcttttactactgaacagcactcacatgaataaagcatgagtttacaataagtatttaatttcatacaactgtggttaactcctactatgtttaccacataacctaccctgtggttaagcctgtaaaaacctgaggcattactcctccaggaaaatacagtgctg

SEQ ID NO: 15265 - DNA, 600 bp, Chicken  19866894221518_2
aaagtcaagacaacacctgtaaacctgaaagacagaggacaaaaagtctataagaaggtccagaaattacatgcttgtcttaaaagagattgttaaattaagtacaaggttgaataactttattttaaaatattctgagtatgtttgttagacactgacaaaataaagtgaaatctgtgtctactgtattatttagatgaattatcctgcaagaacttcatctaaaacctttttgtgtgacgtatttctttgaaaccacctatggagaaataatgatatctaatctggataacatctatraatagaatcttttctaacctgcatgtaagtgtagcagatacaaattctaagcaattagaattttcttatttacaaaaaagaatcccacagtgctcatatacaaaagcattaagatggtgaagggaaaggagactgacaactatcctgctcatccaattaaaaaatgttgttctacttgtaactttccaaatcagtagaccatctaataaaacttgggatagttttggcagtgtgatttcttaattaatacagtgaagtctaactctgggagaattatgttttcatttatcagaatgcttt

SEQ ID NO: 15266 - DNA, 600 bp, Chicken  19866894221523_1
cacaatggtcaaactaccagactagagggatgcttccacccagtgtatccccagagcccaggagatgccctaagacagaatgcttctttcccagaagagcacagagaagtgggacagcaatcccacctcacttgctctcccaaaaggccacatgattaaattgataaaaaattaaaaattaaatgataaaaaagaccaaggtttcaataaagtttgttgaggaaaaagaggtttacactgctactgcctgcatcaactaataacaagtaatgtcaaggaataaaattcatatgaaaacasgttcttgttaactacagaagaaaaaaaaaaacaggtttgcaactcaggtttgtaattaggtattatgccaccctggaatcatagaatcataaaggttagaaaagactgctaagatcatctactccaacccatgcctgtgatcactctataccatgtcactcggtgggatatccatgtttcttagaaaacctccacagatgatgactccatcacctccctgggcatcctactccaatgtcttgcccctttttgagaataattctttcctaatatccaacctgaacctcccgtggtgcaatt

SEQ ID NO: 15267 - DNA, 600 bp, Chicken  19866894221526_1
ggggatcgaggcagggaaagatagggctggagaacagtttgggatcgggttgggagttaaataaacctaactgctgtcctcttacttgtattgctgcagccccccacttgcacctgggcatcatcgattctgaacacccagcgcccggggatacccacatttgtcgtcatctccacgtcagcgatgtcgtcagtgcgggatccggggatgttgaagtagcgctttccatcaccggcgttaaaacctgcctgggaggacaagggcagaaagcaaagagccatcaatacctcagaacagcayccgaggggccgcrgcacgagggggtgcgctgatggaccrcgcaccgccgccaccacccgggttcttactgcatccctgcagtgatggatcatcccctgggatgactgcttttccccgtgcccaggagcacaggctcacagcacccacagcccagaggcacggggtaagaaggacgtttcttcccctgaggttccactcctcctcgcaggagctcccggagggctgctcactggccaaggtgtgctgccactgctctgtttacgttcataaaacccaccctgctcctgaattcggggattc

SEQ ID NO: 15268 - DNA, 600 bp, Chicken  19866894221526_2
gggaaagatagggctggagaacagtttgggatcgggttgggagttaaataaacctaactgctgtcctcttacttgtattgctgcagccccccacttgcacctgggcatcatcgattctgaacacccagcgcccggggatacccacatttgtcgtcatctccacgtcagcgatgtcgtcagtgcgggatccggggatgttgaagtagcgctttccatcaccggcgttaaaacctgcctgggaggacaagggcagaaagcaaagagccatcaatacctcagaacagcayccgaggggccgcrgcacgagggggtgcgctgatggaccrcgcaccgccgccaccacccgggttcttactgcatccctgcagtgatggatcatcccctgggatgactgcttttccccgtgcccaggagcacaggctcacagcacccacagcccagaggcacggggtaagaaggacgtttcttcccctgaggttccactcctcctcgcaggagctcccggagggctgctcactggccaaggtgtgctgccactgctctgtttacgttcataaaacccaccctgctcctgaattcggggattcaaaacgtgtctct

SEQ ID NO: 15269 - DNA, 600 bp, Chicken  19866894221526_3
tgggatcgggttgggagttaaataaacctaactgctgtcctcttacttgtattgctgcagccccccacttgcacctgggcatcatcgattctgaacacccagcgcccggggatacccacatttgtcgtcatctccacgtcagcgatgtcgtcagtgcgggatccggggatgttgaagtagcgctttccatcaccggcgttaaaacctgcctgggaggacaagggcagaaagcaaagagccatcaatacctcagaacagcayccgaggggccgcrgcacgagggggtgcgctgatggaccrcgcaccgccgccaccacccgggttcttactgcatccctgcagtgatggatcatcccctgggatgactgcttttccccgtgcccaggagcacaggctcacagcacccacagcccagaggcacggggtaagaaggacgtttcttcccctgaggttccactcctcctcgcaggagctcccggagggctgctcactggccaaggtgtgctgccactgctctgtttacgttcataaaacccaccctgctcctgaattcggggattcaaaacgtgtctctttcctctacacctgcgatttcctgca

SEQ ID NO: 15270 - DNA, 600 bp, Chicken  19866894221527_1
tctatgtctttctttagctctgcttcttgatgccagccctttactcctgtgaggtatctgttagtttctagtactgctgacagcttgctctttcctgtccctccactgtttcctgtccatattcccaagctttctctgtccatttatttggcaggaaggcacaatttctttctctctccatatggctctgcctggtcctcatcacagcaggcattacagacgtaccagcagccttccctcctattgggtgcaatatatggtatttacccagtcatctatgaaatcaaatcatatatttcraccactcactacagttggccaaaggcaggaaagtgtcacaaaaacagcagacttatagaaaatctcatgaacaatgattgaagaggacaacatctgttamatatgtgggcatcctacaggaatagttacaacaccattacagtagaaaaaaactaaacagagtctgaacacacatgtgaaagaatcttaatcaaaactaatatgattaaaactatatgacaggagttagggtaagcttcacctacagcactgctatcgttcagattcctagaataagtggatcattatagctacttgttt

SEQ ID NO: 15271 - DNA, 600 bp, Chicken  19866894221527_2
ctccactgtttcctgtccatattcccaagctttctctgtccatttatttggcaggaaggcacaatttctttctctctccatatggctctgcctggtcctcatcacagcaggcattacagacgtaccagcagccttccctcctattgggtgcaatatatggtatttacccagtcatctatgaaatcaaatcatatatttcraccactcactacagttggccaaaggcaggaaagtgtcacaaaaacagcagacttatagaaaatctcatgaacaatgattgaagaggacaacatctgttamatatgtgggcatcctacaggaatagttacaacaccattacagtagaaaaaaactaaacagagtctgaacacacatgtgaaagaatcttaatcaaaactaatatgattaaaactatatgacaggagttagggtaagcttcacctacagcactgctatcgttcagattcctagaataagtggatcattatagctacttgttttaatgcaactacattatcctgattgcaatttctatattaccttctcatagaataaatatatattttttctgactagatcaaaatccttttggtgatataa

SEQ ID NO: 15272 - DNA, 600 bp, Chicken  19866894221531_1
tttgagaaatgctctgtgcttccctgcagtgcagggtctgccatcccagcagctgaaaactccacggggggttgtcattcatcagagcagtactgcctcccactcctcaaacaaggcaggagaccgtggaaaattctagtgagtgatgcaggtgtaccaataaacgagatgattctagggatgtgctttggcttgtccggaggctgacgggaatgaaacctgccaatgcaaaaggacacagtaatctgttagcctgatttaaagctggcctccaagctggccttcctgttttgaaatgaygtggaaaagttcggtgataattaagtgttatcaaaagtttgttttwaaaaaaaattagtcccccaaatagttaattattccaggaagagaaagtaataaaaatctgcagggaaaaatatctatctagattggaaagttgattatgtgattgtatcagaggcacagatgtacgtgtacgttatagtctcttagaaatatgtcatcttcccagaagaacctgactgcaaattgcagaaatcytctgttactgctttccacccctcttgaaaatgttttgggtgtgtcctgtgcctcagaaga

SEQ ID NO: 15273 - DNA, 600 bp, Chicken  19866894221531_2
cagcagctgaaaactccacggggggttgtcattcatcagagcagtactgcctcccactcctcaaacaaggcaggagaccgtggaaaattctagtgagtgatgcaggtgtaccaataaacgagatgattctagggatgtgctttggcttgtccggaggctgacgggaatgaaacctgccaatgcaaaaggacacagtaatctgttagcctgatttaaagctggcctccaagctggccttcctgttttgaaatgaygtggaaaagttcggtgataattaagtgttatcaaaagtttgttttwaaaaaaaattagtcccccaaatagttaattattccaggaagagaaagtaataaaaatctgcagggaaaaatatctatctagattggaaagttgattatgtgattgtatcagaggcacagatgtacgtgtacgttatagtctcttagaaatatgtcatcttcccagaagaacctgactgcaaattgcagaaatcytctgttactgctttccacccctcttgaaaatgttttgggtgtgtcctgtgcctcagaagaaggtgagattgctgttggaaggcctggccttggagaacgtgagggc

SEQ ID NO: 15274 - DNA, 600 bp, Chicken  19866894221531_3
gtaatctgttagcctgatttaaagctggcctccaagctggccttcctgttttgaaatgaygtggaaaagttcggtgataattaagtgttatcaaaagtttgttttwaaaaaaaattagtcccccaaatagttaattattccaggaagagaaagtaataaaaatctgcagggaaaaatatctatctagattggaaagttgattatgtgattgtatcagaggcacagatgtacgtgtacgttatagtctcttagaaatatgtcatcttcccagaagaacctgactgcaaattgcagaaatcytctgttactgctttccacccctcttgaaaatgttttgggtgtgtcctgtgcctcagaagaaggtgagattgctgttggaaggcctggccttggagaacgtgagggccactggaatagctgggcaaaggacttgagcaacagcagatgtcctgtttcacttcactgcacttaattgtgtaagagttttcttttgcccagcgtgattgattctgtttttcccttgatgtctgtgaggttataacttttggcaacccactaactattttgattacttttggagactgaaaataaagtgacaaa

SEQ ID NO: 15275 - DNA, 599 bp, Chicken  19866894221533_1
  misc_feature (1)..(93): n is any nucleotide
nnnnnnnnnnnnnnnnnnnnnnnnnnnnnnnnnnnnnnnnnnnnnnnnnnnnnnnnnnnnnnnnnnnnnnnnnnnnnnnnnnnnnnnnnnnnnatagcatggtagcatccttagtttggtgccttagtgatgacagagctgttttccaaatctgtagtagtaaagaaatggcatagattcatgttttagagttgtaatgccctgtactgtttgtggctcagtatgaatgctctggtcccatgtgtaagagctgaaatcagaaccaaccttcatctgcaaacaggtagtattactgaatgrtcttgctgaataaacgacatgattgacaaacactttacttctttgragactctgagtttaaaatcaagaggtctgaaaatagaagttgaagcggctactgataaagtctcagccacgtttccccaagggcatttctaagaaattttattttcagacctggtgaaaggagtgaatcaactgatacatcccagaacatttctctccttcttttgagtccttcataacaaacacaggatgcaataaaagcagccattccctgaagagaatcagtcatctatttaactgcatttcctttctca

SEQ ID NO: 15276 - DNA, 599 bp, Chicken  19866894221533_2
  misc_feature (1)..(47): n is any nucleotide
nnnnnnnnnnnnnnnnnnnnnnnnnnnnnnnnnnnnnnnnnnnnnnnatagcatggtagcatccttagtttggtgccttagtgatgacagagctgttttccaaatctgtagtagtaaagaaatggcatagattcatgttttagagttgtaatgccctgtactgtttgtggctcagtatgaatgctctggtcccatgtgtaagagctgaaatcagaaccaaccttcatctgcaaacaggtagtattactgaatgrtcttgctgaataaacgacatgattgacaaacactttacttctttgragactctgagtttaaaatcaagaggtctgaaaatagaagttgaagcggctactgataaagtctcagccacgtttccccaagggcatttctaagaaattttattttcagacctggtgaaaggagtgaatcaactgatacatcccagaacatttctctccttcttttgagtccttcataacaaacacaggatgcaataaaagcagccattccctgaagagaatcagtcatctatttaactgcatttcctttctcaaacagagatcagatactgtacaagaaagcacaaaagacattacaaa

SEQ ID NO: 15277 - DNA, 600 bp, Chicken  19866894221549_1
aaaatgactgcagttcctgccattatggtaatagacaaaagtaatgcagcctgctgcaatactaagggaactgctgtagattacattttactatcccttcgtaactgctgcatttaattacttggatgacattcctactgttctgcgaaggagattttataacttatcagtgtagttccgcaagagaatcatttggcccaggacaagagagcacttccctaactacttaaacacaggcacttcagaagaggcaaaatggaagtcattattcaacaacagacttcttgttactgtatggtrggaagtgcttagtgaattgaatgaataacattcaagttataagcatccactgttttcgtatcttacccagaaacatcaaaagctacaaagccaaaattattctaaatgcatttcccttcagttctcagtatcatacacaggcttagtgggtgacaaagtgatacttgccaaaaactggtgttagttgttattgtattggcccaaaagagcaatcatcattttagctaataaggttataatgactcttcctgccattacagttcatacttggcagaagacctacagcaggtggattgagac

SEQ ID NO: 15278 - DNA, 600 bp, Chicken  19866894221551_1
tgtccttcatggctgcctgggcacactgctgactcatgcccaatttgctgttgaccaggacccccaacccctttcagggggactgctctccagtgtcccgtcctgcagtcagtgtttatgtccagggttgttccttcccaggtgcagaatcaggcactcgttcttgttatacttcatgtggttggtgcttgcccatttctctctcttttccacagcactctgcaagtcctctccaccttcagtggaagcaacagaaactcccagttcaatatcatctgcaaatatgctcaaaacaccttytagtcctgcatgcaagtcattgatgaaaacatcaaagagaagtggtcctcgaatggaggcctggggaaccctgcttgtgaccatccaccagctggatggaacacttttactgtaagcctttgagccccatccattggccaaatgctcacccacaacattgtttttctgtctaatcctgtgcaggacattctgtccagagtattctgtgaggaacagtatcaaatgctccactgaaatccaaaatgacaacatcagtttgcttcccttgttcatctaaatgcatccatcattctcttcatc

SEQ ID NO: 15279 - DNA, 599 bp, Chicken  19866894221553_1
  misc_feature (1)..(178): n is any nucleotide
nnnnnnnnnnnnnnnnnnnnnnnnnnnnnnnnnnnnnnnnnnnnnnnnnnnnnnnnnnnnnnnnnnnnnnnnnnnnnnnnnnnnnnnnnnnnnnnnnnnnnnnnnnnnnnnnnnnnnnnnnnnnnnnnnnnnnnnnnnnnnnnnnnnnnnnnnnnnnnnnnnnnnnnnnnnnnnnnnncagggatgagttttattccttatcttgtttggttgggatttttgggaagtgggatgtactgatgatttttcaccaatatatgataggaaaggctgtgtgacaaggcaagccaagaattctgwaatgtattgaatattacctccagcctttgagtaatatgaacaattataaataaagcagtaaggaaagcaagatggccccagagaagtatggtgctaaatgttgcctatacaagcaatgcaatgatgtaacagtaggccttcaagatgcgtggtttaaaataaggcaagtggtctggaaataatcaaatgcataatgctatagaagcatacaaagtaatgcaagaccaaacatgtgcaatttaggacctaattccaggtgtcataaaatgtacatccaaaaggtaaagcatattaagtct

SEQ ID NO: 15280 - DNA, 600 bp, Chicken  19866894221553_2
aggaaagcaagatggccccagagaagtatggtgctaaatgttgcctatacaagcaatgcaatgatgtaacagtaggccttcaagatgcgtggtttaaaataaggcaagtggtctggaaataatcaaatgcataatgctatagaagcatacaaagtaatgcaagaccaaacatgtgcaatttaggacctaattccaggtgtcataaaatgtacatccaaaaggtaaagcatattaagtcttctgtgagacatggacttggcagtactttgctttaatcccacttttcatgacttaaaaccrtaacctcttaaaatggaatcttgcctcagtgctgtttttatccatatttgttttatttctgactttattcatggtcttctccrctcttcagctggggccagcttaaacacttggttattttcagattatctctgtgcctgaggtgmttttcactcctggtgtgatgcctgcatgaagctgtcaagctaagacactatttcagtaaaaaatgaccagaattgatacttagcacagtgttattcactagttctcacttggtaaattggtattttttttcattattaccttatccttggtccc

SEQ ID NO: 15281 - DNA, 550 bp, Chicken  19866894221553_3
gatgcgtggtttaaaataaggcaagtggtctggaaataatcaaatgcataatgctatagaagcatacaaagtaatgcaagaccaaacatgtgcaatttaggacctaattccaggtgtcataaaatgtacatccaaaaggtaaagcatattaagtcttctgtgagacatggacttggcagtactttgctttaatcccacttttcatgacttaaaaccrtaacctcttaaaatggaatcttgcctcagtgctgtttttatccatatttgttttatttctgactttattcatggtcttctccrctcttcagctggggccagcttaaacacttggttattttcagattatctctgtgcctgaggtgmttttcactcctggtgtgatgcctgcatgaagctgtcaagctaagacactatttcagtaaaaaatgaccagaattgatacttagcacagtgttattcactagttctcacttggtaaattggtattttttttcattattaccttatccttggtccctgagctctggttcttgtctatccaatgatgcat

SEQ ID NO: 15282 - DNA, 487 bp, Chicken  19866894221553_4
atacaaagtaatgcaagaccaaacatgtgcaatttaggacctaattccaggtgtcataaaatgtacatccaaaaggtaaagcatattaagtcttctgtgagacatggacttggcagtactttgctttaatcccacttttcatgacttaaaaccrtaacctcttaaaatggaatcttgcctcagtgctgtttttatccatatttgttttatttctgactttattcatggtcttctccrctcttcagctggggccagcttaaacacttggttattttcagattatctctgtgcctgaggtgmttttcactcctggtgtgatgcctgcatgaagctgtcaagctaagacactatttcagtaaaaaatgaccagaattgatacttagcacagtgttattcactagttctcacttggtaaattggtattttttttcattattaccttatccttggtccctgagctctggttcttgtctatccaatgatgcat

SEQ ID NO: 15283 - DNA, 599 bp, Chicken  19866894221556_1
  misc_feature (1)..(176): n is any nucleotide
nnnnnnnnnnnnnnnnnnnnnnnnnnnnnnnnnnnnnnnnnnnnnnnnnnnnnnnnnnnnnnnnnnnnnnnnnnnnnnnnnnnnnnnnnnnnnnnnnnnnnnnnnnnnnnnnnnnnnnnnnnnnnnnnnnnnnnnnnnnnnnnnnnnnnnnnnnnnnnnnnnnnnnnnnnnnnnnnggtactaagacattcaggtactcaaagggctgaagagagggtgaagtaggaaagacatgagtagacagtagtttccgtttcagaagagatccgtggaaagaagaaaataaacattttaggtttrttgttttaatattatccttaaattcacctttttcacattctagagcagtaaagaagtacttctgtgaagaagaataggaatcacacttgataatgcaagaaatattgaacactgaataaactgatgagagtataatcagagcattcttttgcaattaatttctgatgaatatctccatacaaaaattatatctgggatctatctgcacaggaaaagaatggaatgatccccaaggctgactctactgaacagagtgcaaaactaggaggacttttaagtgtgcattttaaaagacaact

SEQ ID NO: 15284 - DNA, 600 bp, Chicken  19866894221556_2
aaatattgaacactgaataaactgatgagagtataatcagagcattcttttgcaattaatttctgatgaatatctccatacaaaaattatatctgggatctatctgcacaggaaaagaatggaatgatccccaaggctgactctactgaacagagtgcaaaactaggaggacttttaagtgtgcattttaaaagacaactcccatagtttcagtagcttagcagtaactgagataaacagattcagaattgctgtgaacccttctaaccttcatataacacactaacaggaagataaacragatcaccggagttcagattcccagctgtgatcagtagttatcaacaatttacagaccaaagctattcagaccgatgagggctttctctaccacaagctctgttttttaggatctggcttacagagctcagttaggtttaattgcataagcatttacaaacactgctattatgcagtggcagttgtaaatagtagaaagagaaaatcaggatacagaggttgaaaaccagtgtctcacagacctccacataccttctcctggatatagaatttaaggagcaaaacagttcagggtcaaat

SEQ ID NO: 15285 - DNA, 600 bp, Chicken  19866894221560_1
tcagcgttctcctctaccgtcggcggccccacctcgggggagagctgggcggtccccggggttgcaaactggccacgacgttgctcttcgtcagcctgtggctgctgtacatcctctttgccaccctggaggcctattgctacatcaaggggttttaggcggcggagagacggtgccgccgagggagggaccccctcctccattacctcaccggacaccggccctggatgcacggtttcagcaggagggacggctgtcagcccgccgccctgacggctgggtaccgggatgggcagatcyatcacggggcgaaaaagaaatccacaaaaaccaccccaaaaatgatgcaaaagaaaagaaagcaacaatggcaagtgtttaaaagaacaaaatgaagtgaacccagccactgaccccagttgatgtgactaagaagtctcagccatctcccacggccacctctcccacaggttcgtttcctctgctccagagcacccctccgctgtaaggagatgctttcttgttttttctctttaggaattgcagaagtctgataggaaatttgagttattttttttcttttgcctattgctttttagt

SEQ ID NO: 15286 - DNA, 600 bp, Chicken  19866894221563_1
tgcagtgcctaagacatcagtggcagctgtttatatagggatgatgactcctgtctctatctgcttcagaaaatgcccctggaggaccttggactgcgtgcagatatcactagagcaagaaccctgtagctcttggtagcatgttttcattttcacttggtttcttgtgcagcaaggcaactgcacactcacaggagacagagcagtcagatggttatatgcaggatctccagctctcaccatcctcctgactgtccaggcacagtgtcctcagctcagaaacaaaagcagaagcttgtygatcccttgacccagacagtttagccctccacccccatgtttctgtgctgttgctcagccctcrggaagctttggacactatcagtcaggcgtctgcctggatggtgggctgcctgtagcagaggtggtgactgtgtctgcacatgtagagctgrctcccttgcccagacctgcattagggcctgctaccacccaacttttcccagtacaccacagctgtccacactgacctctgtgaaaaagccccccgttaaggacatatagggagaaggrtaagtggagaagatcgatgctgtggca

SEQ ID NO: 15287 - DNA, 600 bp, Chicken  19866894221563_2
ttcagaaaatgcccctggaggaccttggactgcgtgcagatatcactagagcaagaaccctgtagctcttggtagcatgttttcattttcacttggtttcttgtgcagcaaggcaactgcacactcacaggagacagagcagtcagatggttatatgcaggatctccagctctcaccatcctcctgactgtccaggcacagtgtcctcagctcagaaacaaaagcagaagcttgtygatcccttgacccagacagtttagccctccacccccatgtttctgtgctgttgctcagccctcrggaagctttggacactatcagtcaggcgtctgcctggatggtgggctgcctgtagcagaggtggtgactgtgtctgcacatgtagagctgrctcccttgcccagacctgcattagggcctgctaccacccaacttttcccagtacaccacagctgtccacactgacctctgtgaaaaagccccccgttaaggacatatagggagaaggrtaagtggagaagatcgatgctgtggcagttggtcctgtcaccgtaaaattcccgttggtgtagtcatgcagtgcatctagaagagttgaga

SEQ ID NO: 15288 - DNA, 600 bp, Chicken  19866894221563_3
cttggtttcttgtgcagcaaggcaactgcacactcacaggagacagagcagtcagatggttatatgcaggatctccagctctcaccatcctcctgactgtccaggcacagtgtcctcagctcagaaacaaaagcagaagcttgtygatcccttgacccagacagtttagccctccacccccatgtttctgtgctgttgctcagccctcrggaagctttggacactatcagtcaggcgtctgcctggatggtgggctgcctgtagcagaggtggtgactgtgtctgcacatgtagagctgrctcccttgcccagacctgcattagggcctgctaccacccaacttttcccagtacaccacagctgtccacactgacctctgtgaaaaagccccccgttaaggacatatagggagaaggrtaagtggagaagatcgatgctgtggcagttggtcctgtcaccgtaaaattcccgttggtgtagtcatgcagtgcatctagaagagttgagaattacaggaataaggacagtggccagcacagagttcatcacacatggagtgttcagaagtccacccactgcagttaacacagaggcaatga

SEQ ID NO: 15289 - DNA, 600 bp, Chicken  19866894221563_4
gctcagaaacaaaagcagaagcttgtygatcccttgacccagacagtttagccctccacccccatgtttctgtgctgttgctcagccctcrggaagctttggacactatcagtcaggcgtctgcctggatggtgggctgcctgtagcagaggtggtgactgtgtctgcacatgtagagctgrctcccttgcccagacctgcattagggcctgctaccacccaacttttcccagtacaccacagctgtccacactgacctctgtgaaaaagccccccgttaaggacatatagggagaaggrtaagtggagaagatcgatgctgtggcagttggtcctgtcaccgtaaaattcccgttggtgtagtcatgcagtgcatctagaagagttgagaattacaggaataaggacagtggccagcacagagttcatcacacatggagtgttcagaagtccacccactgcagttaacacagaggcaatgagagatagatgggatggaatcaacacactccttgaaggacacaatctcagtgatatctgtcaccacagactttagcctgcagctgtttctttatgcaggccaactccctaccccttctc

SEQ ID NO: 15290 - DNA, 600 bp, Chicken  19866894221582_1
tccacaccagtaatccccactgaccagcaccacaacagtactggccctcctggccaggagctgagccaggtcacctctatgcccaaggccagccctcctcacagaggacccttcacagcaacatcatgacatgacacaaatccaactgtggggctgctgctgcctgaagcatacagatcatacagtgctaaatgcacatcttcaggagtttaactgcacaatttgacaaatagcattactggcaggtaggtccccatgtctggacagaagtctgcttgatttcagggttgttccatccasttcctacctaaatgtggccctggtcatgccacaacagcagtcactttcccgtaggggacaggtcccacatatcttaagacttggaagcattttgtatttaataagcatagcactctcgatgcacacaacagaagccaagttgagattttctttttcagatgttctacctttcagattttatatgtaaattgcaaattccagacacgtatcagactactttctcaattcattcacacagcatgagcggcaggatgtttgaaaayattttgtgctttgcacttccagatgagatacagggga

SEQ ID NO: 15291 - DNA, 600 bp, Chicken  19866894221582_2
acagaagtctgcttgatttcagggttgttccatccasttcctacctaaatgtggccctggtcatgccacaacagcagtcactttcccgtaggggacaggtcccacatatcttaagacttggaagcattttgtatttaataagcatagcactctcgatgcacacaacagaagccaagttgagattttctttttcagatgttctacctttcagattttatatgtaaattgcaaattccagacacgtatcagactactttctcaattcattcacacagcatgagcggcaggatgtttgaaaayattttgtgctttgcacttccagatgagatacaggggaaaaatgcaaattggctctttaaaaacaaggaaggcagataaggcaattcaatggccaatatggttgggatggctcccatttacgttctgtacacagtcaacctgaatgctaacaaacaagtctgtgctctgggcaagggtaataaaaagggaaggtgctgtaaaaagaatagtttgaacggtttgccctcaactgataaagaaagaagcaaacagaacaattgtatggaaacgtgcttggctggtgaaagcacaatgtctatt

SEQ ID NO: 15292 - DNA, 600 bp, Chicken  19866894221583_1
agaagaattgacagggctgttatgagagaaagggctgagatgcagaaaagcattacatgagaaaagattcaaggcaatcagctcttcattcaatgatacttcacaatgtcaaattatctaaaagtcacatccactctaaatttcacacagaaagaactctcttgcaaaacacagacgataacaccacttcattacactccatcctttccgtgccattctgctctcatgtggcacagcgttctccaaaagcctgctcggagcaatgaaattatttttttaatgaaataagctcaaagtgcrgtaaaaatgacactgtgacattaaaggtcacagggtaaagaacagaaygcttcaaatggaaaagaagcaatataagtagcggaacaaatgacttgtggaggaatacgtgccattatgtctgactaacacacacagctcgaggagatagcgggagcttaggacagcaggctcaaacaggcagtaacaacccagttttgaagtgttttggaagtctttgaagctgttcactctaagaggaacggcaactttttagaacagctcctgatgtgatcacgggccttgcagttattcagggctttt

SEQ ID NO: 15293 - DNA, 600 bp, Chicken  19866894221583_2
agcattacatgagaaaagattcaaggcaatcagctcttcattcaatgatacttcacaatgtcaaattatctaaaagtcacatccactctaaatttcacacagaaagaactctcttgcaaaacacagacgataacaccacttcattacactccatcctttccgtgccattctgctctcatgtggcacagcgttctccaaaagcctgctcggagcaatgaaattatttttttaatgaaataagctcaaagtgcrgtaaaaatgacactgtgacattaaaggtcacagggtaaagaacagaaygcttcaaatggaaaagaagcaatataagtagcggaacaaatgacttgtggaggaatacgtgccattatgtctgactaacacacacagctcgaggagatagcgggagcttaggacagcaggctcaaacaggcagtaacaacccagttttgaagtgttttggaagtctttgaagctgttcactctaagaggaacggcaactttttagaacagctcctgatgtgatcacgggccttgcagttattcagggctttttctagtattagctgcagaaaacactgctaaaaattaaacatgagtaca

SEQ ID NO: 15294 - DNA, 599 bp, Chicken  19866894221587_1
  misc_feature (1)..(54): n is any nucleotide
nnnnnnnnnnnnnnnnnnnnnnnnnnnnnnnnnnnnnnnnnnnnnnnnnnnnnnagagagagccctgctgcagcttccgcataggccccatggtgcattcttgcaccagagagcagtcatgctgcacgaatgctcagcaaatccagtgcagctcagcgtgttctgggtgtctcttgaagctgggtgagaagcagtgttactgcctgcggctgcagaactgtgttgtcacattggctggggaagtgtttcctgggttggactctgttgaacctggtgctcacggggaactgtgcttcagcyagcactgagctgcaaacacagacatatgtgtcctccaggaaggacagaagatacattcatcatctcccactgcatgtgcagggccaaaaagtggtttgcagtaataagacaccaacttcaaaagagccccaaaagtttgtagttaatgtttgtagttaattaaatctgcatagcarcttcttttgattgcatggagaaatctcagacagaagtaatctgagtagcaggatatccctgtggtaagtactcaaagaaatctgcctaattctaccaaatgcagaattttctttgcacgcagg

SEQ ID NO: 15295 - DNA, 600 bp, Chicken  19866894221587_2
aagctgggtgagaagcagtgttactgcctgcggctgcagaactgtgttgtcacattggctggggaagtgtttcctgggttggactctgttgaacctggtgctcacggggaactgtgcttcagcyagcactgagctgcaaacacagacatatgtgtcctccaggaaggacagaagatacattcatcatctcccactgcatgtgcagggccaaaaagtggtttgcagtaataagacaccaacttcaaaagagccccaaaagtttgtagttaatgtttgtagttaattaaatctgcatagcarcttcttttgattgcatggagaaatctcagacagaagtaatctgagtagcaggatatccctgtggtaagtactcaaagaaatctgcctaattctaccaaatgcagaattttctttgcacgcaggcagatgcctctgattattctgtcctgtgctatgctttcctttatgcctatatacttgttttctatcctgagactgtggcttggcccaccgtagcctgggtcagcagcaaactcagagtcccttctccaaaatcatagaaaccagmccctgttctctgcagtggttgtacaacttggg

SEQ ID NO: 15296 - DNA, 600 bp, Chicken  19866894221587_3
aatgtttgtagttaattaaatctgcatagcarcttcttttgattgcatggagaaatctcagacagaagtaatctgagtagcaggatatccctgtggtaagtactcaaagaaatctgcctaattctaccaaatgcagaattttctttgcacgcaggcagatgcctctgattattctgtcctgtgctatgctttcctttatgcctatatacttgttttctatcctgagactgtggcttggcccaccgtagcctgggtcagcagcaaactcagagtcccttctccaaaatcatagaaaccagmccctgttctctgcagtggttgtacaacttggggcgctgcctgatgcactccaccaggacagctaggagggctcagggtgcttaggtggctcccagtaactcaaaggaaggagctagtgggcaactttggaaacagtgtgagtggcacaagtgaggaaggttatattctggaggagaagttcgtaagatgacagagccaaatgactggaatgctgaagtggagagaaaatcaagtaggcacctttctactgaccacaagcccacagttgtcagaagcacactgcatactcctccattgctt

SEQ ID NO: 15297 - DNA, 600 bp, Chicken  19866894221590_1
gacagagagcccaaaaaaggtcactgctccgagactccacaatggagcactgtaagaagaaacaaacgccatggctcatatgcttcagaagctcaaaggaaacataaaatactaatttagtattggaaaatactgttttcccttctacttttatgtttctacttaaaattagatttagtcttgtgctggagagaagggataattcccaataacgttattcccgcaggattttcttgttacaacacacaaaaaggaagacagtattgcaactgatccaaaaacctagcagcttacaataamgtcactgcaatgtgactgtgactgctgatgctaaatgcttcagtctttagaaagagtgtctatacgctctaaaccataggcattcaggaagcaagccatggagttcatccagcatgcacactgcaaatgaagtgctgcatttgtaagtcatcacttccacatgcaatctaccttagattgtgccgtaacacagcactaacgaacttgtaaacgtgtrtaggagtttcaccctatgcaattgcagttaactgcaacaaggatyggggctcacaaygttcctgttcaggaccattgcaaaga

SEQ ID NO: 15298 - DNA, 600 bp, Chicken  19866894221590_2
ttcccgcaggattttcttgttacaacacacaaaaaggaagacagtattgcaactgatccaaaaacctagcagcttacaataamgtcactgcaatgtgactgtgactgctgatgctaaatgcttcagtctttagaaagagtgtctatacgctctaaaccataggcattcaggaagcaagccatggagttcatccagcatgcacactgcaaatgaagtgctgcatttgtaagtcatcacttccacatgcaatctaccttagattgtgccgtaacacagcactaacgaacttgtaaacgtgtrtaggagtttcaccctatgcaattgcagttaactgcaacaaggatyggggctcacaaygttcctgttcaggaccattgcaaagaagctactttcattatacgttcagtcaatgtaataaagaccccacaggatcagacttaccctcctttctgatctctgcaggaacattgctgatacttagttcctcgatatccagctgccagagattagccagctgtccaagttctggaggaagctctcggataccagggttactgtacaaaaacaaatacatctaccaacaaccaggctttgtgtcta

SEQ ID NO: 15299 - DNA, 600 bp, Chicken  19866894221590_3
attgcaactgatccaaaaacctagcagcttacaataamgtcactgcaatgtgactgtgactgctgatgctaaatgcttcagtctttagaaagagtgtctatacgctctaaaccataggcattcaggaagcaagccatggagttcatccagcatgcacactgcaaatgaagtgctgcatttgtaagtcatcacttccacatgcaatctaccttagattgtgccgtaacacagcactaacgaacttgtaaacgtgtrtaggagtttcaccctatgcaattgcagttaactgcaacaaggatyggggctcacaaygttcctgttcaggaccattgcaaagaagctactttcattatacgttcagtcaatgtaataaagaccccacaggatcagacttaccctcctttctgatctctgcaggaacattgctgatacttagttcctcgatatccagctgccagagattagccagctgtccaagttctggaggaagctctcggataccagggttactgtacaaaaacaaatacatctaccaacaaccaggctttgtgtctaagtagcttctctcacggactctcacattacactattctctcctcg

SEQ ID NO: 15300 - DNA, 600 bp, Chicken  19866894221590_4
ccaaaaacctagcagcttacaataamgtcactgcaatgtgactgtgactgctgatgctaaatgcttcagtctttagaaagagtgtctatacgctctaaaccataggcattcaggaagcaagccatggagttcatccagcatgcacactgcaaatgaagtgctgcatttgtaagtcatcacttccacatgcaatctaccttagattgtgccgtaacacagcactaacgaacttgtaaacgtgtrtaggagtttcaccctatgcaattgcagttaactgcaacaaggatyggggctcacaaygttcctgttcaggaccattgcaaagaagctactttcattatacgttcagtcaatgtaataaagaccccacaggatcagacttaccctcctttctgatctctgcaggaacattgctgatacttagttcctcgatatccagctgccagagattagccagctgtccaagttctggaggaagctctcggataccagggttactgtacaaaaacaaatacatctaccaacaaccaggctttgtgtctaagtagcttctctcacggactctcacattacactattctctcctcgtagaaatcttcc

SEQ ID NO: 15301 - DNA, 436 bp, Chicken  19866894221595_1
tagcagcaaaataaaagtctgtttattaaaaaaaaaaaaaaaaaaggaaaattgatttattttcttaaatatggaaataatttctatcaggaacaacagtgtgtcggtccttacaggtccaggggggactctcctaagtgcaccatactggaagaaatcagatatctgtctgattcattaaaaacgtgtaaactatcttccttggataaggtccgcaatgtaccactttaactgcctttgccatagcaaaggcaaaattctgacaaacttctattgctttctgcctcttgaaacaaagckttagcagcactgaatgcacttatattcagagtggatagaagagtggattcaagcaccacaccacagagagcagagatctgcggagctccagctaggagcagcctcgacctctgcagtaatcagctgccgcccacgt

SEQ ID NO: 15302 - DNA, 600 bp, Chicken  19866894221597_1
gcataaatggaaacgaataaataggtctctttccccagcaacctggtagctctcaagaagctgacacatttaaacctttcactgagttcagtgtatgcagattgaggaatgccccatgtccccactgaactgtggttattcagatgtgcaccttttattcaaatccatgagatgagactgtttattaggttttgggattcttatatcctgctcctatcttccagggtgcttaattacttctgaatcagcaataacctcattggcctcctacttcagaatcttttgtatttcttttcctcyatttttgttaatttccaccaaaaaaaatctccccagtgtgtacatgtagaacaagaagaaaaaatccagatgaagaaatacaggaattttacagtcactagacactcactctgagaggtagggaaagatctcacaattctcatccctgtattgtacagctaaccatagcaactctgatggaaagaaacgtaacatacctactcccatttcaagtaaacgctcacatatcaacatttagatcctctcatgaattttgtttcatttcctccttacctccaaatttgccaagtttttactcta

SEQ ID NO: 15303 - DNA, 600 bp, Chicken  19866894221608_1
aacacagaggtccctgccagcctcagccattctggaattctgtgagttacaatataatcagactaccagtgtttgaatatcaaatattatttggcaataattatttctcttcaataaataacaaaaattcaatcagatggtttcactgtaatctaaggaaagtcatccttcagacctattcaactttctttgggcaaacactcatattctgctgtcattaatattaaaactagtggcaagaaaacaatctacttcagatgtgacccttcatgttagtcagtcaaatcaatagtcttgatrtcaaagtgaggtatatagagaatttttatttcaatcagaattgaatctccaaatagtcctatttctttgctttcacttacagtgtagagctgttacagagtacataatctgggttcctgatgaaactaaagtggaagcattgctataagagtgcagttaatgtgctccacactcctatgggtattcagtccatgggaacaggctggagctggtccaaaatagcctcttcactctaaagaacatacagggtggacagcaggtccttggcatccagtgtttgattctatagattctatagac

SEQ ID NO: 15304 - DNA, 600 bp, Chicken  19866894221612_1
gatgcacatgtttttaacagataccaaagcctattttctgttattttttcaggaggatgaacttctgttcaacagtccatcccttagtagaagtaagttcaaagaaatatcaagcgaatgtcactaatccttttgaattagtggtgcaagttcatgaggtcacttgtgaaagtgatgtaatatgcagaaaaccttgaaaaactgaacatatgttatatgtgaagctagaaacaaagtaaactggaacgttgaaatgaaaccaagtgacgtgcattctgtatccacatcaaaggtctggaygaaatgcattaaagacaaggacacagagctggtratgtctctattttttcagactgtagcatcatatagaaattaygcattgtgttgcaaccactctgacctcataacttgtagcrtgaggtttggacttagggaggattaacatcaatgggacagttgcaaataggggtattttgcttgtttatttatttaccttcatgattaaatgcattacatttatggatctggtgataccatttagtgaaacccatgcattaaatatcagttaaaaaaaaaaaagtgtatttttataaaacaatt

SEQ ID NO: 15305 - DNA, 600 bp, Chicken  19866894221612_2
tttctgttattttttcaggaggatgaacttctgttcaacagtccatcccttagtagaagtaagttcaaagaaatatcaagcgaatgtcactaatccttttgaattagtggtgcaagttcatgaggtcacttgtgaaagtgatgtaatatgcagaaaaccttgaaaaactgaacatatgttatatgtgaagctagaaacaaagtaaactggaacgttgaaatgaaaccaagtgacgtgcattctgtatccacatcaaaggtctggaygaaatgcattaaagacaaggacacagagctggtratgtctctattttttcagactgtagcatcatatagaaattaygcattgtgttgcaaccactctgacctcataacttgtagcrtgaggtttggacttagggaggattaacatcaatgggacagttgcaaataggggtattttgcttgtttatttatttaccttcatgattaaatgcattacatttatggatctggtgataccatttagtgaaacccatgcattaaatatcagttaaaaaaaaaaaagtgtatttttataaaacaatttttttgtagatattgtggaacaagaaagaaaaaa

SEQ ID NO: 15306 - DNA, 600 bp, Chicken  19866894221612_3
ccatcccttagtagaagtaagttcaaagaaatatcaagcgaatgtcactaatccttttgaattagtggtgcaagttcatgaggtcacttgtgaaagtgatgtaatatgcagaaaaccttgaaaaactgaacatatgttatatgtgaagctagaaacaaagtaaactggaacgttgaaatgaaaccaagtgacgtgcattctgtatccacatcaaaggtctggaygaaatgcattaaagacaaggacacagagctggtratgtctctattttttcagactgtagcatcatatagaaattaygcattgtgttgcaaccactctgacctcataacttgtagcrtgaggtttggacttagggaggattaacatcaatgggacagttgcaaataggggtattttgcttgtttatttatttaccttcatgattaaatgcattacatttatggatctggtgataccatttagtgaaacccatgcattaaatatcagttaaaaaaaaaaaagtgtatttttataaaacaatttttttgtagatattgtggaacaagaaagaaaaaaggtactggtcaaatatgctaagatcttcagggaattatagcc

SEQ ID NO: 15307 - DNA, 600 bp, Chicken  19866894221612_4
aatgtcactaatccttttgaattagtggtgcaagttcatgaggtcacttgtgaaagtgatgtaatatgcagaaaaccttgaaaaactgaacatatgttatatgtgaagctagaaacaaagtaaactggaacgttgaaatgaaaccaagtgacgtgcattctgtatccacatcaaaggtctggaygaaatgcattaaagacaaggacacagagctggtratgtctctattttttcagactgtagcatcatatagaaattaygcattgtgttgcaaccactctgacctcataacttgtagcrtgaggtttggacttagggaggattaacatcaatgggacagttgcaaataggggtattttgcttgtttatttatttaccttcatgattaaatgcattacatttatggatctggtgataccatttagtgaaacccatgcattaaatatcagttaaaaaaaaaaaagtgtatttttataaaacaatttttttgtagatattgtggaacaagaaagaaaaaaggtactggtcaaatatgctaagatcttcagggaattatagccgaacaactaaaatgcttttaggagctaagctaatggtagc

SEQ ID NO: 15308 - DNA, 600 bp, Chicken  19866894221614_1
gaagaaaaagaagtttttaggccagatttcacaccatctgttgcttcatcagagcaactgctacgcaaggggaaggagcagcaggaactacagaggctcttccaaacgctacatcgcagaaactgtgtcaggcactcacctgctcggtcatagaggatgtgtgatcgctgcagaccttccttcacgtgttcttccgttatcaggactccattcacagaacaaccctcggtaaagctcagcagagtggtcttccctgctgccagtcgggcctgaactgctaactgaagtccattcaatccmgtcctcgcatcaccgtcacaaaggtaggcgagagtactcagagccttctcctctatgtacacaggtaatctgcaacaagaagatcttgtggcattatcccacctcgtgccctctctcattgcgcagcgtgctaggtaaggcgtttctttcttcatggagtctgttgagaggcaacggggtttacaccagcactccagattaactgtaccttcttcaaggagtttcaaacatcctcttggtgtttgaatgaggaaagagcataatggagcaagacggtcaagtattgcatacagcaaaatt

SEQ ID NO: 15309 - DNA, 599 bp, Chicken  19866894221618_1
  misc_feature (1)..(201): n is any nucleotide
nnnnnnnnnnnnnnnnnnnnnnnnnnnnnnnnnnnnnnnnnnnnnnnnnnnnnnnnnnnnnnnnnnnnnnnnnnnnnnnnnnnnnnnnnnnnnnnnnnnnnnnnnnnnnnnnnnnnnnnnnnnnnnnnnnnnnnnnnnnnnnnnnnnnnnnnnnnnnnnnnnnnnnnnnnnnnnnnnnnnnnnnnnnnnnnnnnnnnnnnnttaagatttatacttaaattgatagttacctcaaaaagaaagagtcctctaaaagaatgactttgtttggaaaagttgaaagcattacaagtcttttcrgagactttccaaatatttctgtagtgggactgacctgaatttccccaaaagtgatgattgtgatagggaacaaagggaatagagactttctttagtctgaaatgttaacagaagttctgaatacagcgtagtcagtctgaaatgttgtttttcttctgaaagtcwgcaagcttcctcgttgttttggggtgagctgtagttacatgaagacrgattcactcctgaaactagaaacttaacaattggaaagttctstcctttgtgtacctttgcctttcattagaccacttgtttgtctg

SEQ ID NO: 15310 - DNA, 599 bp, Chicken  19866894221618_2
  misc_feature (1)..(36): n is any nucleotide
nnnnnnnnnnnnnnnnnnnnnnnnnnnnnnnnnnnnttaagatttatacttaaattgatagttacctcaaaaagaaagagtcctctaaaagaatgactttgtttggaaaagttgaaagcattacaagtcttttcrgagactttccaaatatttctgtagtgggactgacctgaatttccccaaaagtgatgattgtgatagggaacaaagggaatagagactttctttagtctgaaatgttaacagaagttctgaatacagcgtagtcagtctgaaatgttgtttttcttctgaaagtcwgcaagcttcctcgttgttttggggtgagctgtagttacatgaagacrgattcactcctgaaactagaaacttaacaattggaaagttctstcctttgtgtacctttgcctttcattagaccacttgtttgtctgttggtgggtcacaggtgacttcctcaagagcatgtgaaatcttggtaatttagtgttgttttttcctttgagaaattaattatcctcaaagcttcttgggatgttgccctattctgtccagctgggagaatagtgaacataatttgacaactaatttccacagca

SEQ ID NO: 15311 - DNA, 600 bp, Chicken  19866894221618_3
acttaaattgatagttacctcaaaaagaaagagtcctctaaaagaatgactttgtttggaaaagttgaaagcattacaagtcttttcrgagactttccaaatatttctgtagtgggactgacctgaatttccccaaaagtgatgattgtgatagggaacaaagggaatagagactttctttagtctgaaatgttaacagaagttctgaatacagcgtagtcagtctgaaatgttgtttttcttctgaaagtcwgcaagcttcctcgttgttttggggtgagctgtagttacatgaagacrgattcactcctgaaactagaaacttaacaattggaaagttctstcctttgtgtacctttgcctttcattagaccacttgtttgtctgttggtgggtcacaggtgacttcctcaagagcatgtgaaatcttggtaatttagtgttgttttttcctttgagaaattaattatcctcaaagcttcttgggatgttgccctattctgtccagctgggagaatagtgaacataatttgacaactaatttccacagcaaattatgtgcactgatctgcgttacttgctggaaggagattgtatggg

SEQ ID NO: 15312 - DNA, 600 bp, Chicken  19866894221618_4
gaatgactttgtttggaaaagttgaaagcattacaagtcttttcrgagactttccaaatatttctgtagtgggactgacctgaatttccccaaaagtgatgattgtgatagggaacaaagggaatagagactttctttagtctgaaatgttaacagaagttctgaatacagcgtagtcagtctgaaatgttgtttttcttctgaaagtcwgcaagcttcctcgttgttttggggtgagctgtagttacatgaagacrgattcactcctgaaactagaaacttaacaattggaaagttctstcctttgtgtacctttgcctttcattagaccacttgtttgtctgttggtgggtcacaggtgacttcctcaagagcatgtgaaatcttggtaatttagtgttgttttttcctttgagaaattaattatcctcaaagcttcttgggatgttgccctattctgtccagctgggagaatagtgaacataatttgacaactaatttccacagcaaattatgtgcactgatctgcgttacttgctggaaggagattgtatgggattttgccttgtaggtggattgagtttgtctttaatttgttgg

SEQ ID NO: 15313 - DNA, 542 bp, Chicken  19866894221618_5
gcctttcattagaccacttgtttgtctgttggtgggtcacaggtgacttcctcaagagcatgtgaaatcttggtaatttagtgttgttttttcctttgagaaattaattatcctcaaagcttcttgggatgttgccctattctgtccagctgggagaatagtgaacataatttgacaactaatttccacagcaaattatgtgcactgatctgcgttacttgctggaaggagattgtatgggattttgccttgtaggtggattgagtttgtctttaatttgttggtttgtttgttgttgcsttttttttctcttgctgcagtataatgacagactttgcctaaaatgatgaaatgttggtttctagccaaagatttaaaccaacatatgtgtattttccactaggaaactttatattagctcattagcatctttcacagctgaaataacacagtgagccaatgtgaatcaaacattcccagggggctaatttccaccgactgattggagagtgagaaaacaaagaataagaggtcagcctgca

SEQ ID NO: 15314 - DNA, 599 bp, Chicken  19866894221619_1
  misc_feature (1)..(263): n is any nucleotide
nnnnnnnnnnnnnnnnnnnnnnnnnnnnnnnnnnnnnnnnnnnnnnnnnnnnnnnnnnnnnnnnnnnnnnnnnnnnnnnnnnnnnnnnnnnnnnnnnnnnnnnnnnnnnnnnnnnnnnnnnnnnnnnnnnnnnnnnnnnnnnnnnnnnnnnnnnnnnnnnnnnnnnnnnnnnnnnnnnnnnnnnnnnnnnnnnnnnnnnnnnnnnnnnnnnnnnnnnnnnnnnnnnnnnnnnnnnnnnnnnnnnnnnnnnnnnnnnnnnnnnntgcagagtagatggagagagcctcttttcagtggtgstcagtacaggaagcagtgggcacaaactggtacactagaggttccatctaaatatcaggaagcaactccttgcaaacataaagtggtagctaaaactgaggaaagagcagcatgaagtaaaccagaaatgagtagaagatctcagacatttgcagacccttttgcatctcccaaatttgtgtccactgtgttcatcttcaaaatttatgaatccaaaaatatgrctgaaaattattatttttttccctgaaaatggttgtttttgttattctttcagacaagaagaggtatgtatttcc

SEQ ID NO: 15315 - DNA, 599 bp, Chicken  19866894221619_2
  misc_feature (1)..(39): n is any nucleotide
nnnnnnnnnnnnnnnnnnnnnnnnnnnnnnnnnnnnnnntgcagagtagatggagagagcctcttttcagtggtgstcagtacaggaagcagtgggcacaaactggtacactagaggttccatctaaatatcaggaagcaactccttgcaaacataaagtggtagctaaaactgaggaaagagcagcatgaagtaaaccagaaatgagtagaagatctcagacatttgcagacccttttgcatctcccaaatttgtgtccactgtgttcatcttcaaaatttatgaatccaaaaatatgrctgaaaattattatttttttccctgaaaatggttgtttttgttattctttcagacaagaagaggtatgtatttcccagttatagttctacacagtaagctcccagttgtgtatatatgtatttgcatgtgtatatatacatacacatatgtatacttatacatacaaatacatatattcatctacaccaaaacaaagagatacacacagcaattgttcacaacgtgctgatcgatgtccagtcatgtgtatgcatacaaaaaaagagtatatatacacatatatattattatcattact

SEQ ID NO: 15316 - DNA, 600 bp, Chicken  19866894221619_3
tttcccagttatagttctacacagtaagctcccagttgtgtatatatgtatttgcatgtgtatatatacatacacatatgtatacttatacatacaaatacatatattcatctacaccaaaacaaagagatacacacagcaattgttcacaacgtgctgatcgatgtccagtcatgtgtatgcatacaaaaaaagagtatatatacacatatatattattatcattactgttatttctctcttccttttctgtcctagtaaatagtttttatacttgactatgagttctatctttttttyccctaattctcagcccataccactgggagcaggggaaatcagcaaaaggctgtgtggtatttagcttcctgccaggttaaagcacaccacatatgcagcagaagttacaggctccccgttaaataaataaataaayaaacaaaacttatcccttattttaatttttgaatcatagagcactgtgaaattaaatatgctaagttacaattttagctatcattatcactggactctaggaaattaaaataatcacaagccaaattcctcaaaaatctcctggctgccactaaactgctttct

SEQ ID NO: 15317 - DNA, 600 bp, Chicken  19866894221619_4
cagcaattgttcacaacgtgctgatcgatgtccagtcatgtgtatgcatacaaaaaaagagtatatatacacatatatattattatcattactgttatttctctcttccttttctgtcctagtaaatagtttttatacttgactatgagttctatctttttttyccctaattctcagcccataccactgggagcaggggaaatcagcaaaaggctgtgtggtatttagcttcctgccaggttaaagcacaccacatatgcagcagaagttacaggctccccgttaaataaataaataaayaaacaaaacttatcccttattttaatttttgaatcatagagcactgtgaaattaaatatgctaagttacaattttagctatcattatcactggactctaggaaattaaaataatcacaagccaaattcctcaaaaatctcctggctgccactaaactgctttctgttcagtctttgaagtgaaacagatgtctaagtatggcttggaaaaaaaggcaagagagtgttgtgcttcattcatgggatgatattttaaatttcagtgggtatatagaagcatgcacagaggtaacaaacatat

SEQ ID NO: 15318 - DNA, 600 bp, Chicken  19866894221626_1
gactgtatgttggaataaatagcacgtttgtgcaggtgcagatagctcaggtttgaggagctacaaggttaaaattcagaataaacttgacacgtttgaaaaactgtctggccttaaatgaaaatagaagtgtaagcgattgctcttgggcaggggtaatcatctgctcaaattcaggcaaggggaagaacggtatgctaccgataggctggaaaaaatttggagggtgcaatgaatcacgagctcagcaatgtcagccttttgcaagagaaccaaacatcacgatgcagtgctgagacrggacagcatcatctgcgagtggcatgagctttccatgccactcacagcattcataggatatttgcttgtgtacagtgctcagttttggacagtactgtgcgacagtagagtaggctcgcagaagtgttggtgagacctttgttactacttggccgagaaaagcaccttcatgaagatgtgtagatttttaaagaccagattagactaacattccccaggaattatttttctatggatgatcaaatctcaaagcagggaagcaggccaagtggctttttgaacatttcctgttttatccct

SEQ ID NO: 15319 - DNA, 600 bp, Chicken  19866894221636_1
ttggaatagaatgtgtggtgtgcaccaagtgtaatgttttaggagagctagcactcagctatcttgatttatgtagtatcagctattagaaaaatttatgtgacactgagctaatcattaatcatggtttaattgagttgatttactgatatgaggcagagaaagagtgtccttcagcacaggtatcttgcaattccagatgtgttgcaaagaagaaatgactttcactttttaggaaaatagtgaaatatactgtaatagacaaaagtatcacctataatatagattcaaatttaaagytccagtaattcagtagataaggtcttgatataaccaacgtctgagataaaaacatctgagcagcagtagtctgcaaaggrgagagctgtaatgcaaacttaatttcttatgaatttctttgcattakgtggtttattaattgaacccatctggcttatgagacagagagtcactcaagatctttttgaaattcaggggtctgagcagttctccaaccaaaataatgaactaaaaagaaatttycaaacagaaagaccgagggtaataaaatgttatcatcaaagttgcttgaagtgctat

SEQ ID NO: 15320 - DNA, 600 bp, Chicken  19866894221636_2
agctattagaaaaatttatgtgacactgagctaatcattaatcatggtttaattgagttgatttactgatatgaggcagagaaagagtgtccttcagcacaggtatcttgcaattccagatgtgttgcaaagaagaaatgactttcactttttaggaaaatagtgaaatatactgtaatagacaaaagtatcacctataatatagattcaaatttaaagytccagtaattcagtagataaggtcttgatataaccaacgtctgagataaaaacatctgagcagcagtagtctgcaaaggrgagagctgtaatgcaaacttaatttcttatgaatttctttgcattakgtggtttattaattgaacccatctggcttatgagacagagagtcactcaagatctttttgaaattcaggggtctgagcagttctccaaccaaaataatgaactaaaaagaaatttycaaacagaaagaccgagggtaataaaatgttatcatcaaagttgcttgaagtgctataatttgtttttatttttctcttactaatttctaccgtcttacacattttgtgtgaagaaattctgattggtcagtttgtg

SEQ ID NO: 15321 - DNA, 600 bp, Chicken  19866894221636_3
tttaattgagttgatttactgatatgaggcagagaaagagtgtccttcagcacaggtatcttgcaattccagatgtgttgcaaagaagaaatgactttcactttttaggaaaatagtgaaatatactgtaatagacaaaagtatcacctataatatagattcaaatttaaagytccagtaattcagtagataaggtcttgatataaccaacgtctgagataaaaacatctgagcagcagtagtctgcaaaggrgagagctgtaatgcaaacttaatttcttatgaatttctttgcattakgtggtttattaattgaacccatctggcttatgagacagagagtcactcaagatctttttgaaattcaggggtctgagcagttctccaaccaaaataatgaactaaaaagaaatttycaaacagaaagaccgagggtaataaaatgttatcatcaaagttgcttgaagtgctataatttgtttttatttttctcttactaatttctaccgtcttacacattttgtgtgaagaaattctgattggtcagtttgtgcataatttaaatgatatttctgcttttggttatgttatttcttaaat

SEQ ID NO: 15322 - DNA, 600 bp, Chicken  19866894221636_4
tgaaatatactgtaatagacaaaagtatcacctataatatagattcaaatttaaagytccagtaattcagtagataaggtcttgatataaccaacgtctgagataaaaacatctgagcagcagtagtctgcaaaggrgagagctgtaatgcaaacttaatttcttatgaatttctttgcattakgtggtttattaattgaacccatctggcttatgagacagagagtcactcaagatctttttgaaattcaggggtctgagcagttctccaaccaaaataatgaactaaaaagaaatttycaaacagaaagaccgagggtaataaaatgttatcatcaaagttgcttgaagtgctataatttgtttttatttttctcttactaatttctaccgtcttacacattttgtgtgaagaaattctgattggtcagtttgtgcataatttaaatgatatttctgcttttggttatgttatttcttaaataagatttctaatgtaaatacttatatttatgacagtaaacacaaatttgagcaggcttagctgagtcagattctgtttttactttttgttaataggccggatagaaagtatattta

SEQ ID NO: 15323 - DNA, 600 bp, Chicken  19866894221637_1
aaaaaggtatcttgaaagagatagtccctttatctacaactgttaataataaatcaaatctaaaacatttcttctgacagctgcttgaagtagagccatctaaatattgtaggataactcaaattttagccagttttgtaaaagctgcaactgtctctcatatcagattcaactagagataagatatgcttcctactcaattattttgctacctaaattacaggtgatagaaaaaaaatccatatttttcttgtttaagtattatgacatcttcaggcttcttaggagagatgcctgctrtagattacattcaattaaaatacccgaatgttaaataaaagaggtttcactgtaagaatccaagactttaccaaaaagcctgaaaggacaccacaaattgagaaacaatttaataaatgcattattattaagtctcagagacagtacactaaaaaacatctgcttctgagccaaaggcaactcaaagccatgctaccctctcataaaaaatgttgctgatctgctgtttgaaaacctaattagattttacgtggcaacaggcaggcaacagtggctaagactgcagagtatctataccaa

SEQ ID NO: 15324 - DNA, 600 bp, Chicken  19866894221638_1
gtgtgtgctgtgtttttcacagctatgcttatacatctatcacggtgttctgtcctcacacaaaaacttggcaccaaataaagcagatattcacagactgaaaatccacgcagggctcgaacaaaattaaacaaacacagcaacaataacagcaacagcaacaacaaaacacagtgctgaggagaccagagaggaattctgcaccaagggcagagctgggaatatatttatgctggatgtcaaattcgtgaatatttcaatttgtttcagcacaaaagcctcaagttaaatatttaaatktaacatgtagaagtttacatctcgactgaagtctagcaataccaaaagaagatgcacaggaaatccccacaatgaatcaagtgctgttttggctcagtgaaagctctacttccattctgaaagttaaatgctattatttgctcaacacgtaagttggtgatgaaagagctgatagcatattttagaactgttaccttggttgtacacacaacaagcacatcagaaagaatattagcatgtctctgtactctcatgcaccaagatatgaaaaaaaaaccgagataaaatatctgaaggtac

SEQ ID NO: 15325 - DNA, 599 bp, Chicken  19866894221640_1
  misc_feature (1)..(153): n is any nucleotide
nnnnnnnnnnnnnnnnnnnnnnnnnnnnnnnnnnnnnnnnnnnnnnnnnnnnnnnnnnnnnnnnnnnnnnnnnnnnnnnnnnnnnnnnnnnnnnnnnnnnnnnnnnnnnnnnnnnnnnnnnnnnnnnnnnnnnnnnnnnnnnnnnnnnnnnnntcgtagaattgctgccattcacatctataatactgcttcagggaggagtgaaagatttaaatatttttcagagctctgcaaagaatgcagtatttttgtttgccaaaagcaatcacataagccagtaggctaactccccagcatgcrcaaagcaataccacatagccatggaattacaaacctctcatttttcacttcatcttcagagcttcacttctgtttcctcaaaagaaaaaagtttaatatatcactcatgtccttctacctcttaacaaagcatctcctggaggagcccatctacaccccacaggataacgctctttgggccatctgtctcagctcacgtgtacacacagttctcgcacacccttgtccatctgccgcacagctgagctgcgtgctggttttgtggaaagcaggtgacgcacctgacctcaggactgaca

SEQ ID NO: 15326 - DNA, 600 bp, Chicken  19866894221640_2
ctaggacattgctggagttacaatctaggatttagaatccagttcttgaagttatttaaatatatacataataaggttatttcactgctttaatattgctcttaggagacttgctttttttgttgttgttttgttttacataataaaaattgcataaatgaaaagtttgcagttcctgagataaagcaacccctccaataggacagaaattgaataagtaaaatatttattataaaatcattaaaggcattcggaaattcagactcaaaatatagacatttatgaaatgattaatgacastgggttagagaagagctgaaggacactcatggcacgtatttcagatatgatgtacattttctttatgtttgttttttttggctgagaaaaatcttcattttcacactctagcaagagaggatttgaattcacagctgactctaatatggagattaagccaatcaaaactctcttttatgcagaattcttctgtggggtctgcactgtgggttaaaagacaattcaaagtgaaattgaaagaaaaatgtgcagtcttcagggacaaatttcctttaaccatttccctttttaaagaattga

SEQ ID NO: 15327 - DNA, 599 bp, Chicken  19866894221647_1
  misc_feature (1)..(71): n is any nucleotide
nnnnnnnnnnnnnnnnnnnnnnnnnnnnnnnnnnnnnnnnnnnnnnnnnnnnnnnnnnnnnnnnnnnnnnnaaaacatcgtataatttttatatcactgatatgattgctctttgtttcacagctgaattggcaagaagcagcaacttagagttttaacagtgtgaagtgccttgtgcatttccagacacataaaagtgtaataataacaataagttgtggtggtgaatgtaaaaacatcatgtaggcaagaatggataaagcacaccctctaactagggacaagttattatcactagayattcaaattagtcatagctgacttcagctcttctcccacaggctcacaatgtttactgaaattaatctgagtgtcaggcaggaagtcagtgctaggactacttctgctttcaaacctattctcatatgccttcttttcgaattaaacaactgaatgtatcctaaggtgtttctgtctggggaaagttgtaaagttgactcaatttcttcccttttcatcttctctytttgtcaactttgtaagtgagttctagtttggcttgagctttaccacaaaacttgtaatgcagtgatgtttga

SEQ ID NO: 15328 - DNA, 600 bp, Chicken  19866894221647_2
aatgtaaaaacatcatgtaggcaagaatggataaagcacaccctctaactagggacaagttattatcactagayattcaaattagtcatagctgacttcagctcttctcccacaggctcacaatgtttactgaaattaatctgagtgtcaggcaggaagtcagtgctaggactacttctgctttcaaacctattctcatatgccttcttttcgaattaaacaactgaatgtatcctaaggtgtttctgtctggggaaagttgtaaagttgactcaatttcttcccttttcatcttctctytttgtcaactttgtaagtgagttctagtttggcttgagctttaccacaaaacttgtaatgcagtgatgtttgagtaccaatacctttttgaaaatagaatgtcatttagaaatataattttctttcttttacatcactgacctccacgacattactgatgaatctgagaaaaatcattaaggatcatatctattttttaaggattgggttatacatctctcagaatgttttatttgaatcctactgttcatcctagaaggtcctggactattaccatggactaatctctccctgtcactg

SEQ ID NO: 15329 - DNA, 599 bp, Chicken  19866894221648_1
  misc_feature (1)..(124): n is any nucleotide
nnnnnnnnnnnnnnnnnnnnnnnnnnnnnnnnnnnnnnnnnnnnnnnnnnnnnnnnnnnnnnnnnnnnnnnnnnnnnnnnnnnnnnnnnnnnnnnnnnnnnnnnnnnnnnnnnnnnnnnnnnnnctaaacttgggtacccaaaaagaaaactgtatggagagaatggaaaatgggacgggaaaattacacagggggcaatgttgcatgttgccatagctcctaccagataccttcagccttatgtaacactaagtgtatgtgtgctatacggagcttttcccttgcatacctggatgagytggaagggcctatcctttagaatgaggtgctgagcgtgtttccaatgtattcctgtatcatccaggaggccttctagcaggaaaagggagatgtactgcaattttataaaagggtagtggcagggaaaagggagatggaagggaaattccagaaaggccctctggatttgctcaggcacacctagacttgccctctattgggatttacctgtagcatgtacatcattaagatgctttattattttttaaaattaattttattttcctttgcaggtcaccttttaagctgctatttcctg

SEQ ID NO: 15330 - DNA, 600 bp, Chicken  19866894221654_1
ctacttaaatgataagtatagagaaatcatttcagatctgattatctcctggtgcatttactttaaagacccctcgagtttgtaaactacagtctgatttgtttatttacttgtttttctatttttctcctactttgcaatattctaagcaggagtacttattcctacttgactgaaaaataattatctgactatctttatacagtatcattacaagaaattgcttactaccctaccacttccactgagaatgaatatttaaatgactgtacattactaaatatatttttctgctatttktaagcctgttgcaaagaggaaaacagatttaataactcaaattgatatctagtaagaaagtacactttttggaagcccagattaagttgggacacgaacttacagaagaattgtgaattctgatttcttatcacatgcaacctactacactgagatgcaacctcctaagaaactgccctttaaaaagtctctattgattatttccttcagttttttaaagattcacagttcactctctgcttcttagggaactcttcttctccaatggaaaagctctaattaaccactggaaataaaaac

SEQ ID NO: 15331 - DNA, 599 bp, Chicken  19866894221655_1
  misc_feature (1)..(176): n is any nucleotide
nnnnnnnnnnnnnnnnnnnnnnnnnnnnnnnnnnnnnnnnnnnnnnnnnnnnnnnnnnnnnnnnnnnnnnnnnnnnnnnnnnnnnnnnnnnnnnnnnnnnnnnnnnnnnnnnnnnnnnnnnnnnnnnnnnnnnnnnnnnnnnnnnnnnnnnnnnnnnnnnnnnnnnnnnnnnnnnntacagacagtaaagacccaaacttcagcactattaaagaggaagcagaaaagaggattatgaatactgaaacaacaacttagtaggcaaagttagaaagaagaggaggaacttttgaagagaastgcataaaagaacgraaaggagaaaaagraaaaaatataaacatagtttagcaagctaagggaaaaactactgaaaaaataatcctaactactggaagaattcacagaagctgtgtaagtgtaaaaaaacaaacaaacaaaaaacagaaaaagttcaacagaaaacctcacaactttccagtttatgaagtaagattgccagctgctcacagagagctaactgcattggctttgtctccagtacaagtgactttttttcaacagcagtatcacatttccttgcaattgtactactggta

SEQ ID NO: 15332 - DNA, 599 bp, Chicken  19866894221655_2
  misc_feature (1)..(161): n is any nucleotide
nnnnnnnnnnnnnnnnnnnnnnnnnnnnnnnnnnnnnnnnnnnnnnnnnnnnnnnnnnnnnnnnnnnnnnnnnnnnnnnnnnnnnnnnnnnnnnnnnnnnnnnnnnnnnnnnnnnnnnnnnnnnnnnnnnnnnnnnnnnnnnnnnnnnnnnnnnnnnnnnntacagacagtaaagacccaaacttcagcactattaaagaggaagcagaaaagaggattatgaatactgaaacaacaacttagtaggcaaagttagaaagaagaggaggaacttttgaagagaastgcataaaagaacgraaaggagaaaaagraaaaaatataaacatagtttagcaagctaagggaaaaactactgaaaaaataatcctaactactggaagaattcacagaagctgtgtaagtgtaaaaaaacaaacaaacaaaaaacagaaaaagttcaacagaaaacctcacaactttccagtttatgaagtaagattgccagctgctcacagagagctaactgcattggctttgtctccagtacaagtgactttttttcaacagcagtatcacatttccttgcaattgtactactggtatggaaatgaaaagta

SEQ ID NO: 15333 - DNA, 599 bp, Chicken  19866894221655_3
  misc_feature (1)..(147): n is any nucleotide
nnnnnnnnnnnnnnnnnnnnnnnnnnnnnnnnnnnnnnnnnnnnnnnnnnnnnnnnnnnnnnnnnnnnnnnnnnnnnnnnnnnnnnnnnnnnnnnnnnnnnnnnnnnnnnnnnnnnnnnnnnnnnnnnnnnnnnnnnnnnnnnnnnntacagacagtaaagacccaaacttcagcactattaaagaggaagcagaaaagaggattatgaatactgaaacaacaacttagtaggcaaagttagaaagaagaggaggaacttttgaagagaastgcataaaagaacgraaaggagaaaaagraaaaaatataaacatagtttagcaagctaagggaaaaactactgaaaaaataatcctaactactggaagaattcacagaagctgtgtaagtgtaaaaaaacaaacaaacaaaaaacagaaaaagttcaacagaaaacctcacaactttccagtttatgaagtaagattgccagctgctcacagagagctaactgcattggctttgtctccagtacaagtgactttttttcaacagcagtatcacatttccttgcaattgtactactggtatggaaatgaaaagtaactcagcyacaaaa

SEQ ID NO: 15334 - DNA, 600 bp, Chicken  19866894221655_4
aaaaagraaaaaatataaacatagtttagcaagctaagggaaaaactactgaaaaaataatcctaactactggaagaattcacagaagctgtgtaagtgtaaaaaaacaaacaaacaaaaaacagaaaaagttcaacagaaaacctcacaactttccagtttatgaagtaagattgccagctgctcacagagagctaactgcattggctttgtctccagtacaagtgactttttttcaacagcagtatcacatttccttgcaattgtactactggtatggaaatgaaaagtaactcagcyacaaaagctgcgtagttgacccacccagcaacaaagcatggaaaatcttaaaaaaagttctyaaacttctgcttcaaactcatctgtgataaggaaatcggctgttcagctggggctaattctgactgctgcacagtggaggcattctaagccatctcagtggacagtatttccttgagaatatatggaaaagagaaggagacagcawcaggacagctccttccagaagaggggaggagctggagaatctgcttttctacaagtttttactactcaaacttataacttttgttatttgac

SEQ ID NO: 15335 - DNA, 600 bp, Chicken  19866894221655_5
ctaactactggaagaattcacagaagctgtgtaagtgtaaaaaaacaaacaaacaaaaaacagaaaaagttcaacagaaaacctcacaactttccagtttatgaagtaagattgccagctgctcacagagagctaactgcattggctttgtctccagtacaagtgactttttttcaacagcagtatcacatttccttgcaattgtactactggtatggaaatgaaaagtaactcagcyacaaaagctgcgtagttgacccacccagcaacaaagcatggaaaatcttaaaaaaagttctyaaacttctgcttcaaactcatctgtgataaggaaatcggctgttcagctggggctaattctgactgctgcacagtggaggcattctaagccatctcagtggacagtatttccttgagaatatatggaaaagagaaggagacagcawcaggacagctccttccagaagaggggaggagctggagaatctgcttttctacaagtttttactactcaaacttataacttttgttatttgacaagttcaaaaataaaagattcaactaacgaatgcagaaaattcaaaatgtgattttaatgcg

SEQ ID NO: 15336 - DNA, 600 bp, Chicken  19866894221655_6
tttgtctccagtacaagtgactttttttcaacagcagtatcacatttccttgcaattgtactactggtatggaaatgaaaagtaactcagcyacaaaagctgcgtagttgacccacccagcaacaaagcatggaaaatcttaaaaaaagttctyaaacttctgcttcaaactcatctgtgataaggaaatcggctgttcagctggggctaattctgactgctgcacagtggaggcattctaagccatctcagtggacagtatttccttgagaatatatggaaaagagaaggagacagcawcaggacagctccttccagaagaggggaggagctggagaatctgcttttctacaagtttttactactcaaacttataacttttgttatttgacaagttcaaaaataaaagattcaactaacgaatgcagaaaattcaaaatgtgattttaatgcgagcaatccatctttctaaaatccttactttcatgatccatgaaagttacatggctacatgacacaccggatcagtaggaaagtttgtgagcaacttctctgtgaaacagctgaaataaatgtcggcaaaaaaccatgcaggttgtt

SEQ ID NO: 15337 - DNA, 600 bp, Chicken  19866894221657_1
ggcgaggcgaggcgtggcaggcgaggtggggtggggcaaggcgaggggaagcaaggcggggctaggcgaggcaaggcgggacgaggcggggcggggcgagacggggcgatgttgggtgaggcgggacagggtagggtgaggtggggcaaggcagggcggggagaggcgtggcagcgcgaggcaaggcaaggcaaggcgaggtgaggggatgcaaggtggggctaggcaaggcgaggcgagtggaggtggggcggggctatgcgttgcgaggtgggagaggcggggagaggttggcgaggkggagcgaggcgaggcgaggcgaggcggggcctggcggggcgaggctaggcggggtagggcgaggtggggcgaggcagggctgggagaggcgtggcagcgcgaggcggggcgaggtggttcgaggctaggcgaggcggggcgaggcggtgcgaggagaggcaaggcggggcgtagctaggcgaagtggggcagggcagggcggggctaggctaggcaagacggggcgaggcatggcggggcggtgcgagacggggcgatgttggatgaggcgggacagggtggggctaggcggggcaaggc

SEQ ID NO: 15338 - DNA, 600 bp, Chicken  19866894221663_1
tcgagtgtgtcaaacatggtttagtttcgagctagcattgtggttgaaaactttgaaacttgtcctctaaactttatttaacaaaaaacaaaacaacaactttgcttcttttcttggtatggaaagtttttgaggtggtacagtgtctttttatttaaacgtagttgtcagtctaaaaatcaaatggatttttagtgtgtatgttaataatatcacagtgaatgtgagatcagaattgcatcattgaggcatttgagcagcttttcctgctttcacacaggttaaaaagagttctgcagkttgttttcmggttatgttgaacacttttctttgacaatgatttttcagtctgttgttgtgttgacttctctttgaagtaagaggagtttaatgaaaatcagccgtgttttttttcttttgtttttggtcagggtttgtttttgatacttggcataaaggagagtttaaggtgaaagcagtgtaaaagatgacagaactgaccctattaccggatacttcatttttcagatggtgacttgtcttgtgagcatttgtcaaaagaagctttggttgttgcctgactaatgcttttttctttgc

SEQ ID NO: 15339 - DNA, 600 bp, Chicken  19866894221663_2
tcaaacatggtttagtttcgagctagcattgtggttgaaaactttgaaacttgtcctctaaactttatttaacaaaaaacaaaacaacaactttgcttcttttcttggtatggaaagtttttgaggtggtacagtgtctttttatttaaacgtagttgtcagtctaaaaatcaaatggatttttagtgtgtatgttaataatatcacagtgaatgtgagatcagaattgcatcattgaggcatttgagcagcttttcctgctttcacacaggttaaaaagagttctgcagtttgttttcmggttatgttgaacacttttctttgacaatgatttttcagtctgttgttgtgttgacttctctttgaagtaagaggagtttaatgaaaatcagccgtgttttttttcttttgtttttggtcagggtttgtttttgatacttggcataaaggagagtttaaggtgaaagcagtgtaaaagatgacagaactgaccctattaccggatacttcatttttcagatggtgacttgtcttgtgagcatttgtcaaaagaagctttggttgttgcctgactaatgcttttttctttgctttctaagg

SEQ ID NO: 15340 - DNA, 600 bp, Chicken  19866894221663_3
gtgttttttttcttttgtttttggtcagggtttgtttttgatacttggcataaaggagagtttaaggtgaaagcagtgtaaaagatgacagaactgaccctattaccggatacttcatttttcagatggtgacttgtcttgtgagcatttgtcaaaagaagctttggttgttgcctgactaatgcttttttctttgctttctaaggtgtctcctgaattctcactatgtctgatggggactatgattacctcataaaattcctagcacttggtgactctggagtaggaaagaccagcctwctttaccagtatacagatggcaaatttaattccaagtttatcacaactgtgggcatcgacttccgggaaaagagagtggtgagtttttgcaagcagtgtgctacttcgcaatggttggtyttttgttgctggtggctggaatctacttactgatctatttaatctgacctgctaatccttatgtgtaagtgtgccatctatagttactatgtacttaaaattgtgataaggaaattattttattttgcctggttttatttgtgcacgtgtctgttttctccaaggttaaaaaaaaaaact

SEQ ID NO: 15341 - DNA, 600 bp, Chicken  19866894221663_4
ttcagatggtgacttgtcttgtgagcatttgtcaaaagaagctttggttgttgcctgactaatgcttttttctttgctttctaaggtgtctcctgaattctcactatgtctgatggggactatgattacctcataaaattcctagcacttggtgactctggagtaggaaagaccagcctwctttaccagtatacagatggcaaatttaattccaagtttatcacaactgtgggcatcgacttccgggaaaagagagtggtgagtttttgcaagcagtgtgctacttcgcaatggttggtyttttgttgctggtggctggaatctacttactgatctatttaatctgacctgctaatccttatgtgtaagtgtgccatctatagttactatgtacttaaaattgtgataaggaaattattttattttgcctggttttatttgtgcacgtgtctgttttctccaaggttaaaaaaaaaaactgattgccagcaaccattttgtagactcagcaacatccctgagcagtgtctattcagtgagttgtgctcatagtaactggagtagtgccttattgaactccctatatgaggaagaattggg

SEQ ID NO: 15342 - DNA, 600 bp, Chicken  19866894221665_1
cacctctgggacttgtttacctacatataatgactagtaagagcataaattcttgccacagacttctgggaagccagacccctgagttcatcctcctgttaaggaagaaacaacagtgtttatccctacttaataacttcatctcatagtcatgatgtgtgcatccaagttctgcctactaagctgggaaggcaagcactgccatccgtgccagtgcagacaaacatacagagtaaactggtgggaagtggggaaacctccttgtgcagcccttggctgctgtgttttatctgttagtcktccgccaacatctcacgtgctggaataggacctgtttcattaagtgagtaaacttccatcagacaaagatgcgtaagctaacttgaaatccgggagaagcttcaccagtattttcaagagaaacttgctaggagatggcagcaggcacggctccatctcactccytgaaatatccctgggccagactgctcttctcctttrcttccgtatgaatcaaacttatgaatgcatcagctctttcatagagggcgaaactacactgggactccatgcacatggagcatcccatctctcaggccg

SEQ ID NO: 15343 - DNA, 600 bp, Chicken  19866894221665_2
caagttctgcctactaagctgggaaggcaagcactgccatccgtgccagtgcagacaaacatacagagtaaactggtgggaagtggggaaacctccttgtgcagcccttggctgctgtgttttatctgttagtcktccgccaacatctcacgtgctggaataggacctgtttcattaagtgagtaaacttccatcagacaaagatgcgtaagctaacttgaaatccgggagaagcttcaccagtattttcaagagaaacttgctaggagatggcagcaggcacggctccatctcactccytgaaatatccctgggccagactgctcttctcctttrcttccgtatgaatcaaacttatgaatgcatcagctctttcatagagggcgaaactacactgggactccatgcacatggagcatcccatctctcaggccgcacagcagagcacagagttgatggcctcctctgttgggcccaggcagcagggcctcgtgctgatgagtcccagctagctaactgcagcaagtacacagccagggagacttcagtaacactgcttagcacttacacagtacttgacatccccaagccctcagcaaa

SEQ ID NO: 15344 - DNA, 600 bp, Chicken  19866894221665_3
ccatccgtgccagtgcagacaaacatacagagtaaactggtgggaagtggggaaacctccttgtgcagcccttggctgctgtgttttatctgttagtcktccgccaacatctcacgtgctggaataggacctgtttcattaagtgagtaaacttccatcagacaaagatgcgtaagctaacttgaaatccgggagaagcttcaccagtattttcaagagaaacttgctaggagatggcagcaggcacggctccatctcactccytgaaatatccctgggccagactgctcttctcctttrcttccgtatgaatcaaacttatgaatgcatcagctctttcatagagggcgaaactacactgggactccatgcacatggagcatcccatctctcaggccgcacagcagagcacagagttgatggcctcctctgttgggcccaggcagcagggcctcgtgctgatgagtcccagctagctaactgcagcaagtacacagccagggagacttcagtaacactgcttagcacttacacagtacttgacatccccaagccctcagcaaacagcatctcaacccccaaagcaccccacgaggtaat

SEQ ID NO: 15345 - DNA, 600 bp, Chicken  19866894221667_1
acagccatgccctgcatcaaaacagacaaatttctctctctggggagtgaaatgccactagagttgcaactgctgggtttgtaagtcctcctgccaccctcatttggaccagactctcgagatggacacattaagatcacaagggaactgttttacttcatcagagggcaggagacagaacgaaaactaccttttctttctgctgtttctcataggagagaacaacgtgaaaattgcaccaagttcatatcaatgtgcagcagcatgagaaagggcagcctgagccaagtgaggaggggrcagagagaaamaggggccagggagcagcactgaatggctgccatgtgttagagggatgtggttaatgaggacagataggcaaaggtctctcagcagcaccgcctttccccactgaagttttcatgagttttcactacagattttttttaggagctgccctcccttgcaccctacttgacaagcagtgcacacccacacacctccacatcccatgggaatgaaaataaccttcacgaaacagaaggagtaaaaccgaaatgggggggagccaatgccagtttacaaccatgcaaccaccag

SEQ ID NO: 15346 - DNA, 594 bp, Chicken  19866894221667_2
ctgcatcaaaacagacaaatttctctctctggggagtgaaatgccactagagttgcaactgctgggtttgtaagtcctcctgccaccctcatttggaccagactctcgagatggacacattaagatcacaagggaactgttttacttcatcagagggcaggagacagaacgaaaactaccttttctttctgctgtttctcataggagagaacaacgtgaaaattgcaccaagttcatatcaatgtgcagcagcatgagaaagggcagcctgagccaagtgaggaggggrcagagagaaamaggggccagggagcagcactgaatggctgccatgtgttagagggatgtggttaatgaggacagataggcaaaggtctctcagcagcaccgcctttccccactgaagttttcatgagttttcactacagattttttttaggagctgccctcccttgcaccctacttgacaagcagtgcacacccacacacctccacatcccatgggaatgaaaataaccttcacgaaacagaaggagtaaaaccgaaatgggggggagccaatgccagtttacaaccatgcaaccaccaggcccc

SEQ ID NO: 15347 - DNA, 599 bp, Chicken  19866894221682_1
  misc_feature (1)..(34): n is any nucleotide
nnnnnnnnnnnnnnnnnnnnnnnnnnnnnnnnnncaaagccctatgtttatgctgtgaatagtgctgttcccagctggaacctgtataaaaacaggaaagcaaagcaaaagggaaagatgacaagaaagcttctgacaaggagagtgctgcggtgtaggcccaaacttgttgtcatctgttagtcgaattcggagtgcatttctctgcaaggcagatgcccaggtccctccggcagcgctgagctgttggtggcagggctcagccctgctcctgcacgagcactgccttcccccagcacrctgcatccaggcctgagggtgcaataagacactgaaggcggtgagtctgtgctgctggatacgcatccaaatcatgctttgtcctggcgctgcgcgtgaggtgtgccctgatcagaggtaccctcatgttgccaagttttgttgtataattaaataaggaaaaaaaaaaccggcaggagctctgaggagaactagcagactgttggtgaccttggcaagctatttagtaaagaaggagctgtatgaatcatactctgtgcgtgagggaatatttggaatactctctgtgaacagggatg

SEQ ID NO: 15348 - DNA, 600 bp, Chicken  19866894221696_1
ctggattgtgctaattttctttatgacttttttaatgaataactcatctttttaaatgatactttatattgcagtgtacatataaaatatcattttacctctttctatcttttcttaacaataattcaaacaatacaatatatatatacttttatcaatataaaatatctacctatgtttctgtatgtacattacaaaagtttctgttgtataaagtaaaaagcaattaaattttatgaacatagaaaagtcattgggatagctttaactttagatgaagtctgagcactcaaactgaaytatttcataatacatgaatgaggtgaataaatgaccatttggttgtaaataacagcagtctcaagagtgacaaataagccaatcacagaaggaaatatttagaagaattattttgagttgagcagaaatgggaaatttgctttgaattccagacagtctggagcctgagccaactctagccgaagtcagtcaggaatggatctgggtgtgaattctcaggtaatggcaatagaaatgcacaacagttgaagacaaaatggcctccaaagccaactataaatattttctggatgactggca

SEQ ID NO: 15349 - DNA, 600 bp, Chicken  19866894221700_1
gaacgcccgtgcaaaggttcagagccctgatttgaatttttgggcttgtttgtgtttcaaaagcaaagccactgaactgcatcttgaaaaacatactccagcgcaggcttcctccaaacacagccaaggtttgatcaaaaggttctcaggtctgcggcccttctgacaaacctgatgaatgtttgcacttgcaaagtaaaccccaaaccaagggaatttgcatgggctcgccatggagatttcttttttccagctcttgccaaaatcccatctctgtcctgggactgggctttggcggcyggcgttctgctatttgtattgatatacctgccagcaggcacaaaaaacaaatacctacacccagacaaaatatctggctgtgtttgtaaagccccaaataagaagccatgttgtattttggtttgatggcaatgcccgtctgtatggatcaggccacgcggtgtttgcttgtccaaaacactgagataatcccttctgcacagagaaatacattttaattacggagcaataaatacggtgcctgtttttgctgggtgcgttttctatcagcggacaaaagctgacattcgttttgctgat

SEQ ID NO: 15350 - DNA, 600 bp, Chicken  19866894221704_1
cagtgttagtaaattagggaatacaaagttcaaagtttcctatcataagaaaacacctatgctaccttgcctctcgtgccacccaagtgctaaaagcatgatttcctttctatgtattctgacctttaacaatgtgagtaacagaacattgatttcaaagcttctttcatgtacatgtctagctctttgtagctttgctgactattcactgaatgcaaacagcatattgtgagatagaatctttcagaaagttcaaaaattgactggtttttatatttgttaaaatatttataaaattgygaatgtatggaacattcctgcacaagtatcacatttaacacctaatgaaagatgtaaagtagtctaaccactaggtaaatacagctcttagactctattttttgtgggatgttggctgcaattcctctacatgtaaggataatatttttcctgctagcatacaatgrtggattgaatttagagcatcatgaaaatgctacattctctgagttactagtttttgacagctttctgctcttttcttataattctgatgtccttgacagtagtatctggtcagaccagcaacatgagtctgca

SEQ ID NO: 15351 - DNA, 466 bp, Chicken  19866894221704_2
catgtacatgtctagctctttgtagctttgctgactattcactgaatgcaaacagcatattgtgagatagaatctttcagaaagttcaaaaattgactggtttttatatttgttaaaatatttataaaattgygaatgtatggaacattcctgcacaagtatcacatttaacacctaatgaaagatgtaaagtagtctaaccactaggtaaatacagctcttagactctattttttgtgggatgttggctgcaattcctctacatgtaaggataatatttttcctgctagcatacaatgrtggattgaatttagagcatcatgaaaatgctacattctctgagttactagtttttgacagctttctgctcttttcttataattctgatgtccttgacagtagtatctggtcagaccagcaacatgagtctgcaagcctaaaattctatctaaataagtggattggg

SEQ ID NO: 15352 - DNA, 600 bp, Chicken  19866894221708_1
tcaagaaaataagattcctcactaacacatttcctcctggttattttagtctacctttatcacaagatttaattcttctataaaaaaatgataaaaaaaataaaaaatattccttttttaataaacctatcatccaatgagcctagcaatcttaagtcttccttctcaacctctttgcactatattgctgcttgtgttcaggctgctgatacaaacttagccagagcagtcatggcctgctcttaattcttggtcattacattgctgccttttgtttggagtcatccactgatagaaaayccacacataataaatcttcttcatattggaaaataggctatctctaacaaaaattgctggctgaactttttggaatttatctgttcttagtttctcagtgtcagctttcctgtaagagytgacttcaggcttaattctctctccagtttcttttgrgatatttctttactggaaaccaaaatgtccacataatttgtcacatgcctaaaaaaattcagacagcatgttcattttgatttcctgtgagaaatgacaattaaaaagwtgatttttttccccctaaagatggtggaatggatt

SEQ ID NO: 15353 - DNA, 600 bp, Chicken  19866894221708_2
aataaacctatcatccaatgagcctagcaatcttaagtcttccttctcaacctctttgcactatattgctgcttgtgttcaggctgctgatacaaacttagccagagcagtcatggcctgctcttaattcttggtcattacattgctgccttttgtttggagtcatccactgatagaaaayccacacataataaatcttcttcatattggaaaataggctatctctaacaaaaattgctggctgaactttttggaatttatctgttcttagtttctcagtgtcagctttcctgtaagagytgacttcaggcttaattctctctccagtttcttttgrgatatttctttactggaaaccaaaatgtccacataatttgtcacatgcctaaaaaaattcagacagcatgttcattttgatttcctgtgagaaatgacaattaaaaagwtgatttttttccccctaaagatggtggaatggattcctaggatgacctcttataggaaacatcttcatgcagaaaaaaagttgtgttgtacctcctccaaaactgaagtttacagtggaaataaggacaccgctgaggactgaattacaatcag

SEQ ID NO: 15354 - DNA, 600 bp, Chicken  19866894221708_3
tcttccttctcaacctctttgcactatattgctgcttgtgttcaggctgctgatacaaacttagccagagcagtcatggcctgctcttaattcttggtcattacattgctgccttttgtttggagtcatccactgatagaaaayccacacataataaatcttcttcatattggaaaataggctatctctaacaaaaattgctggctgaactttttggaatttatctgttcttagtttctcagtgtcagctttcctgtaagagytgacttcaggcttaattctctctccagtttcttttgrgatatttctttactggaaaccaaaatgtccacataatttgtcacatgcctaaaaaaattcagacagcatgttcattttgatttcctgtgagaaatgacaattaaaaagwtgatttttttccccctaaagatggtggaatggattcctaggatgacctcttataggaaacatcttcatgcagaaaaaaagttgtgttgtacctcctccaaaactgaagtttacagtggaaataaggacaccgctgaggactgaattacaatcagaaaaatacactgaagctttgatgaaaactctccttta

SEQ ID NO: 15355 - DNA, 600 bp, Chicken  19866894221708_4
tgccttttgtttggagtcatccactgatagaaaayccacacataataaatcttcttcatattggaaaataggctatctctaacaaaaattgctggctgaactttttggaatttatctgttcttagtttctcagtgtcagctttcctgtaagagytgacttcaggcttaattctctctccagtttcttttgrgatatttctttactggaaaccaaaatgtccacataatttgtcacatgcctaaaaaaattcagacagcatgttcattttgatttcctgtgagaaatgacaattaaaaagwtgatttttttccccctaaagatggtggaatggattcctaggatgacctcttataggaaacatcttcatgcagaaaaaaagttgtgttgtacctcctccaaaactgaagtttacagtggaaataaggacaccgctgaggactgaattacaatcagaaaaatacactgaagctttgatgaaaactctcctttattcaccaaaatgctttttaatgaattttgagactatggtagcgtcactgtcacttatctaagattatgcttcttactcctcttctgagcctgaactatgcttgttccat

SEQ ID NO: 15356 - DNA, 600 bp, Chicken  19866894221708_5
ttttgtttggagtcatccactgatagaaaayccacacataataaatcttcttcatattggaaaataggctatctctaacaaaaattgctggctgaactttttggaatttatctgttcttagtttctcagtgtcagctttcctgtaagagytgacttcaggcttaattctctctccagtttcttttgrgatatttctttactggaaaccaaaatgtccacataatttgtcacatgcctaaaaaaattcagacagcatgttcattttgatttcctgtgagaaatgacaattaaaaagwtgawttttttccccctaaagatggtggaatggattcctaggatgacctcttataggaaacatcttcatgcagaaaaaaagttgtgttgtacctcctccaaaactgaagtttacagtggaaataaggacaccgctgaggactgaattacaatcagaaaaatacactgaagctttgatgaaaactctcctttattcaccaaaatgctttttaatgaattttgagactatggtagcgtcactgtcacttatctaagattatgcttcttactcctcttctgagcctgaactatgcttgttccattaca

SEQ ID NO: 15357 - DNA, 453 bp, Chicken  19866894221708_6
ttcaatttacatctcatgtactcatgagaccttactctttgagggcaaaatgaatgatgtttaaccacttacagtttctacgagtctattagaatgtattgatattgccaggcacatggtaactgttttaaagatataatgttttctaaaattaaagaagtaaattggtactattagccatatctgcatgaaaaaaaccacaaacccacattgattcctacagttatgtggcaatggggggaactttccagcattgctgcaagaggaaaaaacagtgattattagcaatattatggaatmtcagaaaattaggaggattttgtacacagcgtggaatgtcccactggacagatattttaaggtaatcaaaatacattgttaagctgtcatattaaaagtctgagccattcagatgtattattttacttacattatttttctccgttctactta

SEQ ID NO: 15358 - DNA, 599 bp, Chicken  19866894221713_1
  misc_feature (1)..(175): n is any nucleotide
nnnnnnnnnnnnnnnnnnnnnnnnnnnnnnnnnnnnnnnnnnnnnnnnnnnnnnnnnnnnnnnnnnnnnnnnnnnnnnnnnnnnnnnnnnnnnnnnnnnnnnnnnnnnnnnnnnnnnnnnnnnnnnnnnnnnnnnnnnnnnnnnnnnnnnnnnnnnnnnnnnnnnnnnnnnnnnnaatacagaagcacgaggcaatgatgaactgatgtgaggcagagctttaggccagcacaacgaacggaagtactttaactgtaggctgccctgaaagaaatccttccttttttcttttcctttttytttttyttttttttcattttctcaaacttatctttaatgagattacaggaaacaaatgggttgtaggctccatccatcaaggagaaatgccaccaataaataaataaataaataaataaaaatggcatcccaacagaagttctgtcttcttccattcacacagcttcccaaccaaaagacccctcgccaaaaatgtgtaagtcagtcacacacctctaattaccactgccaggcctcactcagcaatacttctcyacgaagagtcccatgaagtcaccagggagccctgaataggttcc

SEQ ID NO: 15359 - DNA, 599 bp, Chicken  19866894221713_2
  misc_feature (1)..(169): n is any nucleotide
nnnnnnnnnnnnnnnnnnnnnnnnnnnnnnnnnnnnnnnnnnnnnnnnnnnnnnnnnnnnnnnnnnnnnnnnnnnnnnnnnnnnnnnnnnnnnnnnnnnnnnnnnnnnnnnnnnnnnnnnnnnnnnnnnnnnnnnnnnnnnnnnnnnnnnnnnnnnnnnnnnnnnnnnnaatacagaagcacgaggcaatgatgaactgatgtgaggcagagctttaggccagcacaacgaacggaagtactttaactgtaggctgccctgaaagaaatccttccttttttcttttcctttttytttttyttttttttcattttctcaaacttatctttaatgagattacaggaaacaaatgggttgtaggctccatccatcaaggagaaatgccaccaataaataaataaataaataaataaaaatggcatcccaacagaagttctgtcttcttccattcacacagcttcccaaccaaaagacccctcgccaaaaatgtgtaagtcagtcacacacctctaattaccactgccaggcctcactcagcaatacttctcyacgaagagtcccatgaagtcaccagggagccctgaataggttccatgcag

SEQ ID NO: 15360 - DNA, 600 bp, Chicken  19866894221713_3
taggctgccctgaaagaaatccttccttttttcttttcctttttytttttyttttttttcattttctcaaacttatctttaatgagattacaggaaacaaatgggttgtaggctccatccatcaaggagaaatgccaccaataaataaataaataaataaataaaaatggcatcccaacagaagttctgtcttcttccattcacacagcttcccaaccaaaagacccctcgccaaaaatgtgtaagtcagtcacacacctctaattaccactgccaggcctcactcagcaatacttctcyacgaagagtcccatgaagtcaccagggagccctgaataggttccatgcagctgctactgagcrtgtaccagagctgccagaggaatatcgcatcttgaagggctccatgaagaagaccatgtttagcacaagatcacaacggattgaaccttcatttgctgagccaagtgtaaagagcacttgaataaagctcaaaaagctatctgcatgctttgtagtgacatttacagttttagcgcacgcggatctccgtttgatgattcgcacaataaacacattatttgccctcggcaattaatg

SEQ ID NO: 15361 - DNA, 600 bp, Chicken  19866894221713_4
ttctcaaacttatctttaatgagattacaggaaacaaatgggttgtaggctccatccatcaaggagaaatgccaccaataaataaataaataaataaataaaaatggcatcccaacagaagttctgtcttcttccattcacacagcttcccaaccaaaagacccctcgccaaaaatgtgtaagtcagtcacacacctctaattaccactgccaggcctcactcagcaatacttctcyacgaagagtcccatgaagtcaccagggagccctgaataggttccatgcagctgctactgagcrtgtaccagagctgccagaggaatatcgcatcttgaagggctccatgaagaagaccatgtttagcacaagatcacaacggattgaaccttcatttgctgagccaagtgtaaagagcacttgaataaagctcaaaaagctatctgcatgctttgtagtgacatttacagttttagcgcacgcggatctccgtttgatgattcgcacaataaacacattatttgccctcggcaattaatgaaaagcgttttaagaaatagtttcagtcctccagggagagaacagaaatgataaaggagggca

SEQ ID NO: 15362 - DNA, 600 bp, Chicken  19866894221720_1
accttattgcaaacagtcatataggcatgtgtgaccttgacctgcatcagaagcttcagaatgccattcacagtaacgcttctcatatttcctggaggcacagaacatactggcagttcagcttttaggaattgatttaagttgggaagagccaatggaccaagctgaattgtgctctgggtgggtaaagctcctttgaaagaagcgctcactcttttcagtgatttttgttcctgaagcagtgaatctgttgcactgtctcttgcttatgagaccaccttcctttttcctactccctcytcctgtatgtattaattcactgttgtcatgatttatctagcaatgcaatgtgcaagacacgaaaatctatatatctatcattcctcyatccaaacgctaggacatgacatttcaaaattatcttttccttatacatttgtcatatttttttccaaaaagagagactgtcttctgtggattgaagaatactgagctttccaggatggtccaacatgcctgctatatcctatttcatgttctccgtgtggcacatgggatagaacaaggggcagaagcactgctcctctgtggttttctgcc

SEQ ID NO: 15363 - DNA, 600 bp, Chicken  19866894221720_2
tttcctggaggcacagaacatactggcagttcagcttttaggaattgatttaagttgggaagagccaatggaccaagctgaattgtgctctgggtgggtaaagctcctttgaaagaagcgctcactcttttcagtgatttttgttcctgaagcagtgaatctgttgcactgtctcttgcttatgagaccaccttcctttttcctactccctcytcctgtatgtattaattcactgttgtcatgatttatctagcaatgcaatgtgcaagacacgaaaatctatatatctatcattcctcyatccaaacgctaggacatgacatttcaaaattatcttttccttatacatttgtcatatttttttccaaaaagagagactgtcttctgtggattgaagaatactgagctttccaggatggtccaacatgcctgctatatcctatttcatgttctccgtgtggcacatgggatagaacaaggggcagaagcactgctcctctgtggttttctgcctgtttctttggccaatagtatggagctaaatattttatgattcttgtagagataaaggtacatgcgtttagcatgttatccgtcaat

SEQ ID NO: 15364 - DNA, 600 bp, Chicken  19866894221722_1
gtgcccaaggccaagttggatggggccctgagcatcctgaattgctaggggcaaccatgcccatggcagggggcttggaactgaatgggctttaagatcccttccaagccaaacccttacatgattctatgaaatctcaagggctttggctcattcacagtaaaggatatttgaggtcactgttcatcagtaccatctgcaaaaaaaatctttagctttctgaatccaggtatcatatgaagttgcagaccaaatccaaatattcttcttggaaccttcctcagtgcaaacagctccctycctcaagatctttttcctacaacactgacatcaaagacagtttcatgatgactttcttgagccacttccagtcagatgcagtccatttgcaacagctcttaggaaatcccccagtgcttcattacacccaaagctctcagcacaaagttgcctgtaacccaagtagctccagcctttccagtgcatcattcaaaagtcagatccttgctgttttgtgagaaacccagatgtgaggtgattttccctcctcaatgcaatggaagattactgtgcttgagcactcattcaacttcctatccc

SEQ ID NO: 15365 - DNA, 600 bp, Chicken  19866894221723_1
caggtgccccatctctgaaggcattcaaggccaggttggatgagatcctgggcagcctgatccagggttggcaaccctgccatagcaggggagttggagctagaattggtccttacagtcccctccaacctaaggccagcctatgattctatgatttggctgtcaaataaactgattgaggaactgctatttcagggaattttctaggttactctgagcctaaagttgatatttcactgtatgtatgatctcaaataattgtaaatggtgataaagaatggacagagaaatatggcagtraatgaaaacacatggaaaagacttggtagcaccctgatcccaccagttccatagttgggagctgtctggaaaataggttagaactcaatatgaattggagccactcagtaaacgatgaaatttgtaatttaaatacataaattgggtaagctaggacaaaacagctttwgttccagagatatcaattttactcaataaaaaaaatctgtggttgtattaaaattattatttttatgaaatcttttatccattaygtgttttcataaaaagacattctaatgttagagaaaactactgacc

SEQ ID NO: 15366 - DNA, 600 bp, Chicken  19866894221723_2
aactgattgaggaactgctatttcagggaattttctaggttactctgagcctaaagttgatatttcactgtatgtatgatctcaaataattgtaaatggtgataaagaatggacagagaaatatggcagtraatgaaaacacatggaaaagacttggtagcaccctgatcccaccagttccatagttgggagctgtctggaaaataggttagaactcaatatgaattggagccactcagtaaacgatgaaatttgtaatttaaatacataaattgggtaagctaggacaaaacagctttwgttccagagatatcaattttactcaataaaaaaaatctgtggttgtattaaaattattatttttatgaaatcttttatccattaygtgttttcataaaaagacattctaatgttagagaaaactactgaccatcctttgggaacccttctaaattttaagataactgtgagagctggataaattaccagtgctttagtttccctttcagacgttgcattcttgtggtcttcaagccaaaagagtacttgtttgttcagacagtgcctaaagttatggggtgttccttgttctaggtagtg

SEQ ID NO: 15367 - DNA, 600 bp, Chicken  19866894221723_3
ataattgtaaatggtgataaagaatggacagagaaatatggcagtraatgaaaacacatggaaaagacttggtagcaccctgatcccaccagttccatagttgggagctgtctggaaaataggttagaactcaatatgaattggagccactcagtaaacgatgaaatttgtaatttaaatacataaattgggtaagctaggacaaaacagctttwgttccagagatatcaattttactcaataaaaaaaatctgtggttgtattaaaattattatttttatgaaatcttttatccattaygtgttttcataaaaagacattctaatgttagagaaaactactgaccatcctttgggaacccttctaaattttaagataactgtgagagctggataaattaccagtgctttagtttccctttcagacgttgcattcttgtggtcttcaagccaaaagagtacttgtttgttcagacagtgcctaaagttatggggtgttccttgttctaggtagtgtaaattgcaaacaacaaaaagatgaaactatggtttagtttcacatgctcaaaaraagtttttaggayagcagaattggaggtgg

SEQ ID NO: 15368 - DNA, 481 bp, Chicken  19866894221723_4
attatttttatgaaatcttttatccattaygtgttttcataaaaagacattctaatgttagagaaaactactgaccatcctttgggaacccttctaaattttaagataactgtgagagctggataaattaccagtgctttagtttccctttcagacgttgcattcttgtggtcttcaagccaaaagagtacttgtttgttcagacagtgcctaaagttatggggtgttccttgttctaggtagtgtaaattgcaaacaacaaaaagatgaaactatggtttagtttcacatgctcaaaaraagtttttaggayagcagaattggaggtggaatgggaatttcctgaatttcagtcccgagattcgttgctttggctgatagccctaatgcaaatgacattagaaaccaaaccttgatactatgagagcgctaggcaagtgttctgtaattgggtgttgagttaagggcaaccagacaccca

SEQ ID NO: 15369 - DNA, 468 bp, Chicken  19866894221723_5
aatcttttatccattaygtgttttcataaaaagacattctaatgttagagaaaactactgaccatcctttgggaacccttctaaattttaagataactgtgagagctggataaattaccagtgctttagtttccctttcagacgttgcattcttgtggtcttcaagccaaaagagtacttgtttgttcagacagtgcctaaagttatggggtgttccttgttctaggtagtgtaaattgcaaacaacaaaaagatgaaactatggtttagtttcacatgctcaaaaraagtttttaggayagcagaattggaggtggaatgggaatttcctgaatttcagtcccgagattcgttgctttggctgatagccctaatgcaaatgacattagaaaccaaaccttgatactatgagagcgctaggcaagtgttctgtaattgggtgttgagttaagggcaaccagacaccca

SEQ ID NO: 15370 - DNA, 599 bp, Chicken  19866894221724_1
  misc_feature (1)..(80): n is any nucleotide
nnnnnnnnnnnnnnnnnnnnnnnnnnnnnnnnnnnnnnnnnnnnnnnnnnnnnnnnnnnnnnnnnnnnnnnnnnnnnnnntggcaggagcacggctggccggaagggcacagcccggagccagatccggccagcaggagctcacccgcttcccccacagcaggcagccccgctccgatgggcagatagagcacagccgcaggtgccaacgtgcagccaggttggcacagcccccccatcgaactggggagcagccacagggccagggagaaggcaacagcacggggtctggaagcagcayggagaaaccccatccccacactggacctggtgtagaagaaggcagccacccacatctcatcccgtaggaactcaagccaccgctgtcactaacatttcctttattcttcacatttttacatacacggtataaaacccttttcttccaccygcctgcaccagcacagccccataacagcagccacctgcatgctggactggagggtcrcaggcattcatcccccagggcacagacccacrgtcctattggtgtccccagcacaattggtgccagggccatacggagtgtgtcactgctgg

SEQ ID NO: 15371 - DNA, 600 bp, Chicken  19866894221724_2
cccccacagcaggcagccccgctccgatgggcagatagagcacagccgcaggtgccaacgtgcagccaggttggcacagcccccccatcgaactggggagcagccacagggccagggagaaggcaacagcacggggtctggaagcagcayggagaaaccccatccccacactggacctggtgtagaagaaggcagccacccacatctcatcccgtaggaactcaagccaccgctgtcactaacatttcctttattcttcacatttttacatacacggtataaaacccttttcttccaccygcctgcaccagcacagccccataacagcagccacctgcatgctggactggagggtcrcaggcattcatcccccagggcacagacccacrgtcctattggtgtccccagcacaattggtgccagggccatacggagtgtgtcactgctgggatggagcatccatctgacgtgtgaggagtgagtccccactgcagcacgaaggcagaggttctcagactgcagaaagtccctaagaaacccagagctgccagctgtcccagggctctgagctcgagtccttcctcatgggaaacgtcccct

SEQ ID NO: 15372 - DNA, 600 bp, Chicken  19866894221724_3
acgtgcagccaggttggcacagcccccccatcgaactggggagcagccacagggccagggagaaggcaacagcacggggtctggaagcagcayggagaaaccccatccccacactggacctggtgtagaagaaggcagccacccacatctcatcccgtaggaactcaagccaccgctgtcactaacatttcctttattcttcacatttttacatacacggtataaaacccttttcttccaccygcctgcaccagcacagccccataacagcagccacctgcatgctggactggagggtcrcaggcattcatcccccagggcacagacccacrgtcctattggtgtccccagcacaattggtgccagggccatacggagtgtgtcactgctgggatggagcatccatctgacgtgtgaggagtgagtccccactgcagcacgaaggcagaggttctcagactgcagaaagtccctaagaaacccagagctgccagctgtcccagggctctgagctcgagtccttcctcatgggaaacgtcccctccgttaaaaaaaaaacagaagcaagagtaaagaaagttaagtacaaatcggagagca

SEQ ID NO: 15373 - DNA, 600 bp, Chicken  19866894221724_4
gaactggggagcagccacagggccagggagaaggcaacagcacggggtctggaagcagcayggagaaaccccatccccacactggacctggtgtagaagaaggcagccacccacatctcatcccgtaggaactcaagccaccgctgtcactaacatttcctttattcttcacatttttacatacacggtataaaacccttttcttccaccygcctgcaccagcacagccccataacagcagccacctgcatgctggactggagggtcrcaggcattcatcccccagggcacagacccacrgtcctattggtgtccccagcacaattggtgccagggccatacggagtgtgtcactgctgggatggagcatccatctgacgtgtgaggagtgagtccccactgcagcacgaaggcagaggttctcagactgcagaaagtccctaagaaacccagagctgccagctgtcccagggctctgagctcgagtccttcctcatgggaaacgtcccctccgttaaaaaaaaaacagaagcaagagtaaagaaagttaagtacaaatcggagagcagtaaaaaccttacggtggaaaaaaatatatat

SEQ ID NO: 15374 - DNA, 599 bp, Chicken  19866894221730_1
  misc_feature (1)..(128): n is any nucleotide
nnnnnnnnnnnnnnnnnnnnnnnnnnnnnnnnnnnnnnnnnnnnnnnnnnnnnnnnnnnnnnnnnnnnnnnnnnnnnnnnnnnnnnnnnnnnnnnnnnnnnnnnnnnnnnnnnnnnnnnnnnnnnnnnaaaatgtattgtgttatttctgtaattcagtgccttctgagtaagtaatcgttgtggttacctcatgagctttaggaactcagcagtgggcggaggagcgctggtgaaacacattgtgtgatacgctgtgaatcataccaggaatcagattgtgaggctcttgcttcagaaygtaaaatcaatatgtgggccacccacaggtcatccttttcctacagagcggagtttaacagatgcagtaatcaaacaacggctctcaggaaaagttaatgggaatcttttgcaaatgacttgagccaagatcctgcgagttatctcagagctggctgaggcagttctctgatttcaccrctttgcaatgagccagtggtgagtttgagacgttgtaaaatatcagaatatctcttacgttgggttgaaatgaaaagcagctgtatactcttaatcagaatgggcttatttcatatcaaa

SEQ ID NO: 15375 - DNA, 600 bp, Chicken  19866894221730_2
ttgtggttacctcatgagctttaggaactcagcagtgggcggaggagcgctggtgaaacacattgtgtgatacgctgtgaatcataccaggaatcagattgtgaggctcttgcttcagaaygtaaaatcaatatgtgggccacccacaggtcatccttttcctacagagcggagtttaacagatgcagtaatcaaacaacggctctcaggaaaagttaatgggaatcttttgcaaatgacttgagccaagatcctgcgagttatctcagagctggctgaggcagttctctgatttcaccrctttgcaatgagccagtggtgagtttgagacgttgtaaaatatcagaatatctcttacgttgggttgaaatgaaaagcagctgtatactcttaatcagaatgggcttatttcatatcaaaatacaggaaatagaactatctgtagttgaagggatgaatgcgtcttcgtgagatttgtcagctctgaagacttttgcaaaaatctcatgttttgaggttttcagaaaggctggtgtgattaagtcacagtctgagctgtgtaggaggaggtttctaggatttatttcattatttattttt

SEQ ID NO: 15376 - DNA, 600 bp, Chicken  19866894221731_1
ttctattgctcaatatctcctattcatgaccatgtcatctcagtaaaaatgaagttattttgcatttagatgccaagtaagatgctcttatataaaacacaaatatttccataaaaataattttctattcatatactggattatatcattcatacaatgcctctaaaccaaacaaaatatacatcctgagatttaaacagctccacaggctccaggaattttccttcgaatgcattattacctgtatgcatattattttctcctgggcagtggtaatggatgaacctgaagaatcttagrggttttgtcatccatctgaagtttaatctaaagtgattcaggaaggcaagagacaggcataacaattttcctgaaactctgaaacaagagcaacacagcttatacatatggtgtggcacctggtgcttattatgtacaaatcaaacaagctcatcattcttataaaacatttctycaatccaagcctgttcaaccctgttttcttctatttccctctaattttccaacaccayggtcaaaaggcaaccatcctcaacagaaacataccagtttaccatcagggaatagactacagctaac

SEQ ID NO: 15377 - DNA, 499 bp, Chicken  19866894221731_2
aatatacatcctgagatttaaacagctccacaggctccaggaattttccttcgaatgcattattacctgtatgcatattattttctcctgggcagtggtaatggatgaacctgaagaatcttagrggttttgtcatccatctgaagtttaatctaaagtgattcaggaaggcaagagacaggcataacaattttcctgaaactctgaaacaagagcaacacagcttatacatatggtgtggcacctggtgcttattatgtacaaatcaaacaagctcatcattcttataaaacatttctycaatccaagcctgttcaaccctgttttcttctatttccctctaattttccaacaccayggtcaaaaggcaaccatcctcaacagaaacataccagtttaccatcagggaatagactacagctaacttccttatttcagaagactttcattttgtgattctttaagattagggcacacagtccaccataacagctgacag

SEQ ID NO: 15378 - DNA, 441 bp, Chicken  19866894221731_3
attattacctgtatgcatattattttctcctgggcagtggtaatggatgaacctgaagaatcttagrggttttgtcatccatctgaagtttaatctaaagtgattcaggaaggcaagagacaggcataacaattttcctgaaactctgaaacaagagcaacacagcttatacatatggtgtggcacctggtgcttattatgtacaaatcaaacaagctcatcattcttataaaacatttctycaatccaagcctgttcaaccctgttttcttctatttccctctaattttccaacaccayggtcaaaaggcaaccatcctcaacagaaacataccagtttaccatcagggaatagactacagctaacttccttatttcagaagactttcattttgtgattctttaagattagggcacacagtccaccataacagctgacag

SEQ ID NO: 15379 - DNA, 599 bp, Chicken  19866894221732_1
  misc_feature (1)..(19): n is any nucleotide
nnnnnnnnnnnnnnnnnnnccttgttgatgagagatctcctggaagctgtagacctgttactgctatttaatgtgggagaaaaggtggcttttcctatacttctgtcgttcttaggagtagatgcactaattatttctataaattgatgcagagggctgttcaggggagaggaccttttatcgaactgctcttccttcaggtttataacagaatagtcctcatcctcactatctgaaacaattctcatgtgcttccttctacctgaaacaaggacagcactgccttcctctgatgcttcrctccctagcaaggagttatttggatcttcttcagctgtgtggcaggggtttccagagttaccattctcacttaygcaagtttttgcaggtgatttacaccaactttctgcttttagttggaagtcctcatcttctgagtggtgctccattgatctttccccatttgaggcatcctgcagtccaccttcagactcttccaggaccagattgaagtcaacttgatcytggagagaaggcacagatgsatcctccaagctggtttccaacacatgggacttctggacctcagcatggacttc

SEQ ID NO: 15380 - DNA, 600 bp, Chicken  19866894221732_2
gggagaaaaggtggcttttcctatacttctgtcgttcttaggagtagatgcactaattatttctataaattgatgcagagggctgttcaggggagaggaccttttatcgaactgctcttccttcaggtttataacagaatagtcctcatcctcactatctgaaacaattctcatgtgcttccttctacctgaaacaaggacagcactgccttcctctgatgcttcrctccctagcaaggagttatttggatcttcttcagctgtgtggcaggggtttccagagttaccattctcacttaygcaagtttttgcaggtgatttacaccaactttctgcttttagttggaagtcctcatcttctgagtggtgctccattgatctttccccatttgaggcatcctgcagtccaccttcagactcttccaggaccagattgaagtcaacttgatcytggagagaaggcacagatgsatcctccaagctggtttccaacacatgggacttctggacctcagcatggacttctggtaaaacatctgataaatttggtagtgggacagacaaagctagctcagaaacatcattcttctctgtctctga

SEQ ID NO: 15381 - DNA, 600 bp, Chicken  19866894221732_3
tcactatctgaaacaattctcatgtgcttccttctacctgaaacaaggacagcactgccttcctctgatgcttcrctccctagcaaggagttatttggatcttcttcagctgtgtggcaggggtttccagagttaccattctcacttaygcaagtttttgcaggtgatttacaccaactttctgcttttagttggaagtcctcatcttctgagtggtgctccattgatctttccccatttgaggcatcctgcagtccaccttcagactcttccaggaccagattgaagtcaacttgatcytggagagaaggcacagatgsatcctccaagctggtttccaacacatgggacttctggacctcagcatggacttctggtaaaacatctgataaatttggtagtgggacagacaaagctagctcagaaacatcattcttctctgtctctgagacagcaaatgagtcaagtacctcatctgctatttctgtatcttctaaccttttgggatcatcggccataacagatgtgttaggggaatgctgagaaggcccagacaggctgttcccagtctcagtcaagctatctgaatttatgtcataa

SEQ ID NO: 15382 - DNA, 590 bp, Chicken  19866894221732_4
catgtgcttccttctacctgaaacaaggacagcactgccttcctctgatgcttcrctccctagcaaggagttatttggatcttcttcagctgtgtggcaggggtttccagagttaccattctcacttaygcaagtttttgcaggtgatttacaccaactttctgcttttagttggaagtcctcatcttctgagtggtgctccattgatctttccccatttgaggcatcctgcagtccaccttcagactcttccaggaccagattgaagtcaacttgatcytggagagaaggcacagatgsatcctccaagctggtttccaacacatgggacttctggacctcagcatggacttctggtaaaacatctgataaatttggtagtgggacagacaaagctagctcagaaacatcattcttctctgtctctgagacagcaaatgagtcaagtacctcatctgctatttctgtatcttctaaccttttgggatcatcggccataacagatgtgttaggggaatgctgagaaggcccagacaggctgttcccagtctcagtcaagctatctgaatttatgtcataaagagaacatt

SEQ ID NO: 15383 - DNA, 600 bp, Chicken  19866894221733_1
tgttgtgggattgccggagacaaacgcccatggggaaatattccaggcgcagaactaccaggtcgggaggaggaagaacaaacagcgcttctccagcggcagcatccacagggcggtataaatagggagcagtggggccagaggccgcagcagctcccgcaccgcccgcgcagctcgcgcggctgcaccatgagctgcgcccagcagtgcggcacccggggcagcgcgggcagctgggcgggcaccactcagggctcctctgcctccccaggccggcaggctgccttcgagcttgcggcygcagccagggggttctctggtggcagtttgggtgagggtctgctcgggcagcagctgggtgccggcagcatgagcgggggcagctttggagcgacccagcgggcctgttccacccttgggttcagcacggggggcatttgtgtgcgtggcactggaagctttggcagggccggtgaggggatcctgtttgccaacaatgagaaggcgacaatgcagaacctcaatgaccgcctggcctcctacttggacaaagtacggctgctggagagcgagaatgccgagctggagtgccgcatccgg

SEQ ID NO: 15384 - DNA, 600 bp, Chicken  19866894221750_1
cactgcttttccaaccacagagtaaccaagctagtcaacgaattctaaaaagtaaatgtttcagccttcaattagctgcattagtactgtttataaccgtgtgattgataaatgctctacagaagctgtaattaatgtattttgctcttggaacacatactgaaccccttggcactcgacgcttaatgaaaagcaatttatcaacttgctttgaatagctgaatctgacttcttaacatagagagctttgcttcaagtgctccaactctgacaaagcgatgtgtatcccaaacctacaartgctgtcagacrcaacttggattttgacaaggataacaatgaccagaatgctcatcttgctgagaaagaggctttttaggacaatcctcaccccagcagtaggtctgcagatgtgctgctccagcayggaggttacaagtgtgttttcaggacactggaccaagtttgaggccaaacagcactgacacacgtggaggagtggaagctcagcgactaccagcctggacatgagttcagctgcatacaaagcaagcaaaaataaagtgcttacagagtgtttgaatgctaatttctcaaacg

SEQ ID NO: 15385 - DNA, 600 bp, Chicken  19866894221750_2
aaccacagagtaaccaagctagtcaacgaattctaaaaagtaaatgtttcagccttcaattagctgcattagtactgtttataaccgtgtgattgataaatgctctacagaagctgtaattaatgtattttgctcttggaacacatactgaaccccttggcactcgacgcttaatgaaaagcaatttatcaacttgctttgaatagctgaatctgacttcttaacatagagagctttgcttcaagtgctccaactctgacaaagcgatgtgtatcccaaacctacaartgctgtcagacrcaacttggattttgacaaggataacaatgaccagaatgctcatcttgctgagaaagaggctttttaggacaatcctcaccccagcagtaggtctgcagatgtgctgctccagcayggaggttacaagtgtgttttcaggacactggaccaagtttgaggccaaacagcactgacacacgtggaggagtggaagctcagcgactaccagcctggacatgagttcagctgcatacaaagcaagcaaaaataaagtgcttacagagtgtttgaatgctaatttctcaaacggagagttgcttt

SEQ ID NO: 15386 - DNA, 562 bp, Chicken  19866894221750_3
gtaattaatgtattttgctcttggaacacatactgaaccccttggcactcgacgcttaatgaaaagcaatttatcaacttgctttgaatagctgaatctgacttcttaacatagagagctttgcttcaagtgctccaactctgacaaagcgatgtgtatcccaaacctacaartgctgtcagacrcaacttggattttgacaaggataacaatgaccagaatgctcatcttgctgagaaagaggctttttaggacaatcctcaccccagcagtaggtctgcagatgtgctgctccagcayggaggttacaagtgtgttttcaggacactggaccaagtttgaggccaaacagcactgacacacgtggaggagtggaagctcagcgactaccagcctggacatgagttcagctgcatacaaagcaagcaaaaataaagtgcttacagagtgtttgaatgctaatttctcaaacggagagttgctttgtgtatttgacatatgcaaaaaaaaaaaaaaaaaaagaagaagaaaaaaaagccaacccagcatttaggaggaaagg

SEQ ID NO: 15387 - DNA, 599 bp, Chicken  19866894221751_1
  misc_feature (1)..(76): n is any nucleotide
nnnnnnnnnnnnnnnnnnnnnnnnnnnnnnnnnnnnnnnnnnnnnnnnnnnnnnnnnnnnnnnnnnnnnnnnnnnnttctgttttgcttgaatatgtaagcagccacaaatattttttaatgtagctgagaaggcattctcattataaaaagaacaatgagaaaactgccctttttctccttgagaactattgtgagattattcctaattcatactgttttttgacaactatttttatactaaacaatgtcatagatttttctatctaggtatcagatatatatttgatattgtagcaaytgacaaactattagtaaatctgggraaaaaaggatagaattaattgagaaaatttaaaattggcagatatatttttataggtatcagcatacaggtgtttcagaaagcagtatcaagatagaaggtgattcctagtaaaggtcctcaaaatatgatctagcaagtcatcttgtctatggttactgatctggcactgcttaagatgtgtagttataaagtttgccggtgccatgaagtggaagttagaagagaagagatttgaaaagagtatcagaatatagagattaatagaaatacag

SEQ ID NO: 15388 - DNA, 599 bp, Chicken  19866894221751_2
  misc_feature (1)..(51): n is any nucleotide
nnnnnnnnnnnnnnnnnnnnnnnnnnnnnnnnnnnnnnnnnnnnnnnnnnnttctgttttgcttgaatatgtaagcagccacaaatattttttaatgtagctgagaaggcattctcattataaaaagaacaatgagaaaactgccctttttctccttgagaactattgtgagattattcctaattcatactgttttttgacaactatttttatactaaacaatgtcatagatttttctatctaggtatcagatatatatttgatattgtagcaaytgacaaactattagtaaatctgggraaaaaaggatagaattaattgagaaaatttaaaattggcagatatatttttataggtatcagcatacaggtgtttcagaaagcagtatcaagatagaaggtgattcctagtaaaggtcctcaaaatatgatctagcaagtcatcttgtctatggttactgatctggcactgcttaagatgtgtagttataaagtttgccggtgccatgaagtggaagttagaagagaagagatttgaaaagagtatcagaatatagagattaatagaaatacagccagatttaagtacaaggttatgca

SEQ ID NO: 15389 - DNA, 600 bp, Chicken  19866894221758_1
gctataaatgtggagaaatccagtagcacagggacagtagctagaagctcagtgtcctgaggcacaatcccctcctctattttctttgatgctaatattttaatagcctctttctacctacttttccagccaagatgtaccatcctctctactcagctttcctcctgaactgctcaaccccttgctgctcattgtagaatggaggaagcatttacctagggagcacgatccagaaatggcttaattaaaacagtaagtcttaatttatacgtagcagttctaattctcaactctactgcyrgaggcaaccagccctcagggcaggaggcatctagccagtgtgtttctctttgcccttaaaatgactgggtcagcatttcatgctcgaatgtgaaattcactgtgattctgtttagagtaccataaaaagaggtcagaacaaatcgatcttgttaaggctgaaatccagactagctgataagggaatatttagtagcaggcaccagcctgtttcaaacaaacatcatatggagcttctatctgggtttgctgttcatcccagaccctgggccaacatgagcatgttgcaactctgcaaca

SEQ ID NO: 15390 - DNA, 600 bp, Chicken  19866894221758_2
ctataaatgtggagaaatccagtagcacagggacagtagctagaagctcagtgtcctgaggcacaatcccctcctctattttctttgatgctaatattttaatagcctctttctacctacttttccagccaagatgtaccatcctctctactcagctttcctcctgaactgctcaaccccttgctgctcattgtagaatggaggaagcatttacctagggagcacgatccagaaatggcttaattaaaacagtaagtcttaatttatacgtagcagttctaattctcaactctactgcyrgaggcaaccagccctcagggcaggaggcatctagccagtgtgtttctctttgcccttaaaatgactgggtcagcatttcatgctcgaatgtgaaattcactgtgattctgtttagagtaccataaaaagaggtcagaacaaatcgatcttgttaaggctgaaatccagactagctgataagggaatatttagtagcaggcaccagcctgtttcaaacaaacatcatatggagcttctatctgggtttgctgttcatcccagaccctgggccaacatgagcatgttgcaactctgcaacac

SEQ ID NO: 15391 - DNA, 600 bp, Chicken  19866894221759_1
ttttgcccatactgaatcaaacaactatcagcctcagaatgtgagataagctgacataaatatccacatgtttaggcctctcttcaatgttcctgctgctctgcagcctcttgaagtgctgaaacaattcctaaatggtataggtgtttttcctcttaatttggaattcagccgatgcagaggtaacgccatccagttgcagcaattctcagaaatctatcattgttgaaagaccagtgccagaactgtcactaaattacaaatcccacggcatatgaaaaatcacatcattgtttcctraagtgataaatgtttccttctgtttgcattttacttttctttatccatttgttcctaatatactggcttggctttcagtactaatctactaatcagtagatttaagcatttgttcctttttgttagcatcagtgctttttcccttcctatccattctacacaggatttcagatttccttgattttaggacagcaacagtttgtctagttttcagttgctgatcttctgttgtgtgtaatttcctttttcagacagaacagcacaaaacgattaaattgagatgtgccttactgtgggaca

SEQ ID NO: 15392 - DNA, 599 bp, Chicken  19866894221760_1
  misc_feature (1)..(16): n is any nucleotide
nnnnnnnnnnnnnnnngtttctctgtgttcttgagacccgcagccaggaggggagcagagctgtggagcgcggtagagctgacaaaagcctccatcagtctacttcgcccaaggaggttgcgaatgccctgtccttggatgcattcaaggccaggctggatgtggctctgggcagcatggtctagtggttggtgaccctgcacatggcaggggggttgaaactagatgatcatggaggtcctcttcaacccaggctattctatgattctatgacacttgggctctgaagaaggctgaagyccttataccttcctgctgagttatatctgacagggaccaggaggaacagtgaggtagtctgactcactggtgtaacttacccattgacagtactactgagcactgaatgtttatgtgcatgtaaattgcgcacatgtgtacacacacagaagcccagacacagagagtcaacattagttgagcatctagtcaaatgtcccttgtttgtcgaggctaagaggagtgtgtgtgtgaaacagaggatgacaggctgtaattattccaatgtagtgcttgtacactgaaggaaggtggctggg

SEQ ID NO: 15393 - DNA, 600 bp, Chicken  19866894221760_2
gaggtgtcaactgcaggtcattaaggctgacaagggctgcagtcagctctagcagctggccctctcccaagtgggctgaccaatggtgccatcaccttgtctccaaggagccttggaggcacgtggcgtaggcctcatagagtgagtaaaggagagaggaataatgctaattgttgttcagagcaatcataagcagaaagcgccacaagccacaatattctgacactaggcagctgatgtcttttataaatatatatgactctgtataggtcagcctagtctggcatatgatttaacttsattttatttttatgctgtgcacagggtaaactctctgtcccttaagctccatgaaaaatgttttttatctgttagacttttccatgtaccagtatggcattgcacttgtgcagtgttatcacagggaaggaaccctagcatttaaaaatggtacctgattctgtttcgtagtgaagacttgagcctgatactgcaataggacccctggtagtggaaagtaagtccaaggagatgctacattgaatgctatttacctgcactcgacggagctatgggaacaaacctatttacgtcgctctt

SEQ ID NO: 15394 - DNA, 600 bp, Chicken  19866894221763_1
acctcactgagcagtacatgaaagctaactcacctactcaagttattcacaaaaatctaaaccaccttgtccattcctgaacagaaaaagtctctctgacaactgccttctgaaggtcacagtaagagaaggaaagttggcttctttttttttttttgcttttattatttggcttaactgctacatttgctccagtccctaccctgccatggagaacatgcatttggctacttataaattgtagattcatcagctcctgtatcaagaaagtatttgaaaaatgctgttgtgagtgccagrcacaaagattcagactgaaacaaatgtgactaaatgcagccttgaatggagcaggactatcatgtccttcaggaggcaactcataattggttcctggacccactgcctgtaaaagtaggcctagtgccctccataaatatttaccaacatcagcaatttaacttcacatcatttcacacttccagaaaacagatgtcatctctggcaactctctggaaatccagcacactccaagacaggtatcagaactccataaactgccttgactttttctgctgccttcaggtgacattaagcaag

SEQ ID NO: 15395 - DNA, 600 bp, Chicken  19866894221764_1
agaaatgcaatgacacagagagtttaattccctcttgtcaaaaagtaacgcctctcagatcacacacaaaactcacgttttttgtttcacctcccttttgctgattaaaatgagcaagttgtgctcctttctgctcatcaagaaaaaagatactactgtatatttgcaagcactgttcctgaagtcaccttgaaataaggtcactattactgcaagctatggcaaaggtggatgttttcacttaactctatagggttttgaccagcacccatggcagcctacaggacatatctgatcttyattaacaggagagcacaaagtccttaaatatgcagaatagctataagcatgcctatgttataggaaatccttagttccgtggcactggtaaagcttatccacgtggtgaatgaagcccttcgctgactcaagtcctaaacaaggcacggtgggaacaagtatgacagtgcttcctacagggaacattcaacaagttaacatctgtctccttcaaagcatgaaataatcataagaatgctgtgaattgattagcatttcattagccgacagcttctatctgtctctccagaaactatttct

SEQ ID NO: 15396 - DNA, 600 bp, Chicken  19866894221770_1
taaagacccaaacaaaagaatgcaaagacaacaagaagcagcaccatttcaggtataacttctaacactggttccttccaatgtctcttcatcatcatctacttcaagctccttaactccactggaacacttacagtaacaccttctcaaaatctgccatatggtttccttccttccattaaaaattccagttgactcttgggatgctcagtattaacatatgtgaagacatccttgcatcattttaatgtacaactcaactatcctatccgttttatctcattgtcctgcctccctttracacagggtcctcatttcattagaattagctagagttgcacagtgcagagataatatcagttgtattcagaatacaaagattttctttgtatcttggagcacaacattcatgaaatgccttcagtgacacaaagcattaccctctgggtaactcattacaagctgcagaagccacctctaacaaactctcaaaataagtcgtacacaaggagaaatataaagcctaattttaggacactgaaactcccatactgcatcatatcgtgattacccaattgagtaatcatcagaaattttcta

SEQ ID NO: 15397 - DNA, 600 bp, Chicken  19866894221774_1
aagagagggaaggcttgtcatttctttgcaggtatgccaatatcctggctgtaacgttgttttaataataataatttcaaacattacgaagctggcacttccccctccacccattggcgtagtcacagcagaatgaatggctcattgttgtgagaatcatttcacagcacaaggcaacctctattcacaattaaagagttagaaatgttcagccaatcataacaattaaataaaatgattgtctgagcctcccttcgggctttagtataaatcagcctttcttcatttcacacagtcaawgcgacctgcttttcattatgtatcccctgcattttttagagtagcaacaaccgtagtagaaatggtcaagtgagatgtgttttctgtttgcatattcaggagcaatgcrcagatggctgcacactgagtgaagagatcggggttttgcacccaggaccaggaacatagaatcatggaatcatagaatcactaaggttggaaaagacctacgggatcacccagtccaaccattcacccatcaccaatggttctcattaaaccatgtccttcaacacaacatccaaacgttccttgaacacc

SEQ ID NO: 15398 - DNA, 600 bp, Chicken  19866894221774_2
cccattggcgtagtcacagcagaatgaatggctcattgttgtgagaatcatttcacagcacaaggcaacctctattcacaattaaagagttagaaatgttcagccaatcataacaattaaataaaatgattgtctgagcctcccttcgggctttagtataaatcagcctttcttcatttcacacagtcaawgcgacctgcttttcattatgtatcccctgcattttttagagtagcaacaaccgtagtagaaatggtcaagtgagatgtgttttctgtttgcatattcaggagcaatgcrcagatggctgcacactgagtgaagagatcggggttttgcacccaggaccaggaacatagaatcatggaatcatagaatcactaaggttggaaaagacctacgggatcacccagtccaaccattcacccatcaccaatggttctcattaaaccatgtccttcaacacaacatccaaacgttccttgaacacctccagggtcggtgaggtaggagctttgaataacgctgcagaacaatagtggaggccttgaagaagctgagctatgggaacactgacagatcttatttagtgacgtggag

SEQ ID NO: 15399 - DNA, 600 bp, Chicken  19866894221774_3
cagtacttttatcgtaagttattccaactttgcagtgaatggaaactaaccagcaatagtaagtgtgttgtcagtcatctaaaatagaagggagaagagaggagaaagatggttgaaagacggaacgtgtttgtaatgaagtcagagttagatattcccgctgtgtcacagtgagtattgcagacatgttccttttgtttgtttgtttgtttgtttgcccattggagataaactaccaagtagcttaaaactggtgaaatttgatacaggcttccgactcctttggcatctgtctacttraactgtgacagaaggacagggtatggtgcagccagaaatgccttgccaagccaaatcccgggcagcattgaggccaagaagcaaggtatgcagctgtttgcacacctcagtgctgtttcagctrgaatgtagcaggtaactgacagcagctatccgatataagtgttgtagaagtagcttggatatggaggctgcagggcagacaaaactttaagagtaatagctcttttaggcaggaggcgtgtctttgttttcttcatgctacaagtgcactgtaggcacttagcaattattaataat

SEQ ID NO: 15400 - DNA, 600 bp, Chicken  19866894221774_4
acgtgtttgtaatgaagtcagagttagatattcccgctgtgtcacagtgagtattgcagacatgttccttttgtttgtttgtttgtttgtttgcccattggagataaactaccaagtagcttaaaactggtgaaatttgatacaggcttccgactcctttggcatctgtctacttraactgtgacagaaggacagggtatggtgcagccagaaatgccttgccaagccaaatcccgggcagcattgaggccaagaagcaaggtatgcagctgtttgcacacctcagtgctgtttcagctrgaatgtagcaggtaactgacagcagctatccgatataagtgttgtagaagtagcttggatatggaggctgcagggcagacaaaactttaagagtaatagctcttttaggcaggaggcgtgtctttgttttcttcatgctacaagtgcactgtaggcacttagcaattattaataatagctaattaataatggctcaaatccttggctgtagttaaggaacttaaaacataactcatacggagttgtaagaaaagatggctcaaaaccatcttaaccaaaccctgggccagctttgtgcct

SEQ ID NO: 15401 - DNA, 599 bp, Chicken  19866894221783_1
  misc_feature (1)..(38): n is any nucleotide
nnnnnnnnnnnnnnnnnnnnnnnnnnnnnnnnnnnnnnctgcttctcttagctatctctaatttttaatgctactcttaaagctgcagcaggttcatctttagaatgaagaaaagcagctgctgtctggcagttcccacacatctcttttacagtgttttgctgtgttttcttcatgactccttaaatgatgaaatttcaaaatatcaagtagtcttgaagaggcctggcagatcagagccctcatatcaagactgaggtgtaagatgtacctctgtcttaatacagttcaggctgttcytcacctgagcaggatgctcaagtgttcatcctgcacccatcttcagacaaggagatttctaggatggggaggagggcatgggatgtgaaaggacgacagtggaaacacagagcaccagacgttttgagggcttttgctttgaagataaaaaacaatatctccctccccccaactcaaccttttgctagaatcttctccttagctactgctgtgttggttgggaggggccagcaatcctgcctctaaaaggacacctcattactgccatccagattcctggtatccatggagaggtcaca

SEQ ID NO: 15402 - DNA, 600 bp, Chicken  19866894221784_1
gaatataaattgtaaccttgtgtctgaggtcagcacttgtggctgccaaaaccaaattcctcaacttttagaggagttcagatctgaggtaatgagaggtaatggccttaagttgtgccaggggaggttcagattgggtgttagaaaaatatttctctcagagagagtggttgagcactggcataggctgaccagggagatggtggtgtcaccatgcgagggggtgttcaagaactgtggagatgtatcactgagggtcgtggttatagggtgtggtggggataggttgatggttggacwagatgatctcagtgatcttttccaaccttaatgattctgtgattccagtgcaggacactgtgacttggattcatttttgacatttcatatatccactcaggcaytgtgatgatagagattatgtactatgagcatataaactaacatggagaaattatgtcagagctgtttaagaggtgttgatctgttatgaggcaaacatgtcattccccatatatttttttcctgagattccttgttataaatttgcctacaaaaatgagctagaacatcatcaaatggttcatcaaggccagaaac

SEQ ID NO: 15403 - DNA, 600 bp, Chicken  19866894221784_2
gccttaagttgtgccaggggaggttcagattgggtgttagaaaaatatttctctcagagagagtggttgagcactggcataggctgaccagggagatggtggtgtcaccatgcgagggggtgttcaagaactgtggagatgtatcactgagggtcgtggttatagggtgtggtggggataggttgatggttggacwagatgatctcagtgatcttttccaaccttaatgattctgtgattccagtgcaggacactgtgacttggattcatttttgacatttcatatatccactcaggcaytgtgatgatagagattatgtactatgagcatataaactaacatggagaaattatgtcagagctgtttaagaggtgttgatctgttatgaggcaaacatgtcattccccatatatttttttcctgagattccttgttataaatttgcctacaaaaatgagctagaacatcatcaaatggttcatcaaggccagaaacatttctggctaagaaatgaactacattgaaaggcaaaagaagtgcaaagccagatggcactgccataaattactggcaaaaaacaaattgtagttattcaattc

SEQ ID NO: 15404 - DNA, 600 bp, Chicken  19866894221790_1
taaaaaatatgctattccttctttacattgatattaaatggaatttaatcaatttgcgctgtagcagttctgctgtatctataatgaaaaccactgtagaatttcaaatccaccaaaataacacactggaattaatcattttaacaattcctttactttaacacaaccttgcaaacgtctacttgttcagcagcccacagcaaacagcttttgaaaagagagtaaaattccctctattcagcgtgagcacacaggtttgaggtaggctggtagacttccatctcagtcctgaaaagctgyaacaggttttggattcctctagcaacatggatctgaacactttatcttctataggctggaatacttaatgttgcatacaagatgctttattttaagggttttccttctacataaactctattgaaattgcataatttgccacacatggtgttttcatctaataaggtgcatttggtatccagtaaagggcagtggcaatacatgcatagtggatatgtgttagctgtgtaaaaggagaaaatacgtattggcaatttgtttggtaacagccagagcctatttgtttagaactgcccatta

SEQ ID NO: 15405 - DNA, 600 bp, Chicken  19866894221795_1
aatataaattacatttgtttaacgacaagaatacttcatcagtagttgcagatttctcattatcgaggcaacaatttctcagtgcataaaaaaaatctgaatttaaaatccaaatatgtcttgaatgtaggaaatacagggacaagtactgagtcagtgtaactttccatagcataagtaaaactgagaatattagactttgtagctttacttacttgtaatgtacaattatgtgcttgaatgcactattgcacttctcttatcaaaggacactatggtggatatgtattaataataatwcacatgttcccatatagagaataatatcattaaaatacgaggaaagataaattatatgcaattctgaggcagttcctttcaaaactaaaactttattgacatccggaagagaatattgtttcgtttagccactaactggtaagggtttcttttgtaggcttttagaaaaatgcagattacattatctaattatacacagagatctagagtattctctattatttcaaacagtagataatggcttaagtaacatatggtacatgtgctaaagtattatcattttttttaaatcaaattgaa

SEQ ID NO: 15406 - DNA, 600 bp, Chicken  19866894221797_1
aacaacaacaaaaaaaaagacaaacccaatcagctgtgctttgaagtgggatggggattcctgagcccccgtctccacagtgggattctcaggagagcaccaaaggttgctttctgcagtgagccagaaccaccgccagctaaaggagagctccaggagaacagctaagctaatgcgtgagcaatagcggtgctgattagtgtactgtcagtgctgaggcctcccacacagacagctctgtctgcactcccttccctcgcatcctcaaggatgctacattcattaatgtgtttctgtgcytggtgccctccatctctcacctggggtcctgcgcctgtttattcaagcttaatgccgaggcaaataacccacctacgtggcacttcttcacgctgctggtgagatgctctctgctccgggttaaaagcagtggctccggcagtgcttcatcctcaggagggctggggatggggttggggctgggtgccacacatcccgcacccagagacatcacacgtctccaggagatgctgctcctgccctctggcatctgtgagatgggtcttttagttgatggggttttaaagtggtgagtttggg

SEQ ID NO: 15407 - DNA, 599 bp, Chicken  19866894221804_1
  misc_feature (1)..(36): n is any nucleotide
nnnnnnnnnnnnnnnnnnnnnnnnnnnnnnnnnnnnctgacatctattaaaacatattagtcaggtacctgagcagtttggctgtatctgtcctttccttgatggatactctgtaatgggctgtctgacaacacactgctttcttccaaaagcaaaccattttgcttctctttctctgatacactcccaattacaacttgaccctgagggaaatataatacaaagcctgttttactgtaaatatattttaatatttaaaaaatgaatatattaaaaaaatgtaaacaggaaaagtattgyattgcagctctcagtaagtcttaatgatataagagaaactccttaagttctgaaattactgcaaaagaaaggackaaggttttttggcagaggcacatctgtaattttcatatctacacacattttccccccaaaggaggctttgtctaatgacatgcagattgtgcttgaattgaaagctgcagttttgaacagacagtaggatgcaatataggatgaaatatacaaaaggcatttgagagacaggtgtttctctaaccaatcctccactgtcattactgtcaggaaatatactcaca

SEQ ID NO: 15408 - DNA, 600 bp, Chicken  19866894221804_2
gtttggctgtatctgtcctttccttgatggatactctgtaatgggctgtctgacaacacactgctttcttccaaaagcaaaccattttgcttctctttctctgatacactcccaattacaacttgaccctgagggaaatataatacaaagcctgttttactgtaaatatattttaatatttaaaaaatgaatatattaaaaaaatgtaaacaggaaaagtattgyattgcagctctcagtaagtcttaatgatataagagaaactccttaagttctgaaattactgcaaaagaaaggackaaggttttttggcagaggcacatctgtaattttcatatctacacacattttccccccaaaggaggctttgtctaatgacatgcagattgtgcttgaattgaaagctgcagttttgaacagacagtaggatgcaatataggatgaaatatacaaaaggcatttgagagacaggtgtttctctaaccaatcctccactgtcattactgtcaggaaatatactcacattatgcatttccaaacactcccttaactctgctgttgtggtgccctcttctgcagcaataggagtatctgaagtga

SEQ ID NO: 15409 - DNA, 600 bp, Chicken  19866894221804_3
tgtaattttcatatctacacacattttccccccaaaggaggctttgtctaatgacatgcagattgtgcttgaattgaaagctgcagttttgaacagacagtaggatgcaatataggatgaaatatacaaaaggcatttgagagacaggtgtttctctaaccaatcctccactgtcattactgtcaggaaatatactcacattatgcatttccaaacactcccttaactctgctgttgtggtgccctcttctgcagcaataggagtatctgaagtgatctgcatctccctttttagcattstatctgtcttattctccatctstattccatccatgagatcatcttttaactcaagggcttcactgaaaatattttctttcttttgcttgacattttcaagtttttcttcaagactcctatgttcactctgaagtgtttcaatctcatcctcaatatacttctgtcctggtgaagaagtgttttgtttaacggtttctgctaaacccaaaatcttctttaacatgtcttcaagttgacaaagaggtgcttgttgttcctttgaacgggaagaaaacatgccattgaaacatattcactcaa

SEQ ID NO: 15410 - DNA, 600 bp, Chicken  19866894221804_4
attttccccccaaaggaggctttgtctaatgacatgcagattgtgcttgaattgaaagctgcagttttgaacagacagtaggatgcaatataggatgaaatatacaaaaggcatttgagagacaggtgtttctctaaccaatcctccactgtcattactgtcaggaaatatactcacattatgcatttccaaacactcccttaactctgctgttgtggtgccctcttctgcagcaataggagtatctgaagtgatctgcatctccctttttagcattstatctgtcttattctccatctstattccatccatgagatcatcttttaactcaagggcttcactgaaaatattttctttcttttgcttgacattttcaagtttttcttcaagactcctatgttcactctgaagtgtttcaatctcatcctcaatatacttctgtcctggtgaagaagtgttttgtttaacggtttctgctaaacccaaaatcttctttaacatgtcttcaagttgacaaagaggtgcttgttgttcctttgaacgggaagaaaacatgccattgaaacatattcactcaatatacttaacgctaagatctaa

SEQ ID NO: 15411 - DNA, 599 bp, Chicken  19866894221808_1
  misc_feature (1)..(103): n is any nucleotide
nnnnnnnnnnnnnnnnnnnnnnnnnnnnnnnnnnnnnnnnnnnnnnnnnnnnnnnnnnnnnnnnnnnnnnnnnnnnnnnnnnnnnnnnnnnnnnnnnnnnnnnaaatatcttccaaagcaatttggagtcaataaagaaaactaaaactggggtctcagattaaaaagaagtcagctttaggaacagcagtttacaaagatttaaggggcagatgaaaaagcagatgaataagaaatgattagatgctataagaaatgtttagacattgtacatgagacatggtttagtggggagcaatyggtggtwagttgatggttggactggatcatctttggaggtcttttccagccttggtgattctatggacatcttgcttatactttcctgcaccagagctttccagaaatttgggcaggtgagtcaggctgcaccacaagcctttcaactctgcttgcaagtgaagctctgctgaagcaactcctgatttcaagtcagaaacaaagtgtttcagagttaggtccctaaaggatagcaagaaggaaaagaaaagctctggaagcctctttgaaaaacagcaattttcctgtgccagccaggc

SEQ ID NO: 15412 - DNA, 599 bp, Chicken  19866894221808_2
  misc_feature (1)..(96): n is any nucleotide
nnnnnnnnnnnnnnnnnnnnnnnnnnnnnnnnnnnnnnnnnnnnnnnnnnnnnnnnnnnnnnnnnnnnnnnnnnnnnnnnnnnnnnnnnnnnnnnnaaatatcttccaaagcaatttggagtcaataaagaaaactaaaactggggtctcagattaaaaagaagtcagctttaggaacagcagtttacaaagatttaaggggcagatgaaaaagcagatgaataagaaatgattagatgctataagaaatgtttagacattgtacatgagacatggtttagtggggagcaatyggtggtwagttgatggttggactggatcatctttggaggtcttttccagccttggtgattctatggacatcttgcttatactttcctgcaccagagctttccagaaatttgggcaggtgagtcaggctgcaccacaagcctttcaactctgcttgcaagtgaagctctgctgaagcaactcctgatttcaagtcagaaacaaagtgtttcagagttaggtccctaaaggatagcaagaaggaaaagaaaagctctggaagcctctttgaaaaacagcaattttcctgtgccagccaggcagatcta

SEQ ID NO: 15413 - DNA, 600 bp, Chicken  19866894221808_3
taggtccctaaaggatagcaagaaggaaaagaaaagctctggaagcctctttgaaaaacagcaattttcctgtgccagccaggcagatctagatttctgtaggaggtcctcttgtgcatcacatctgcattttgatctgctcctcagtgccacacaacagctccaagactcagacagctgaagggacctttgctgtgtgtcagggctgcctgtgcatctacatcaagcgcttcacatgagcccctttgcattttttcagtgtacttggtaaagcagactttctacagaagttaatccccrgaatttttctccagctttccaaaaacagattctaaatctgacaggtgaaatatgcctagggttacatactataattttcagtgatttacaacttgtgctctgaactggctgggctccaagtacatttgaagaagattaaggaatagagaagaattaacagcattagaagacataatagcttacccttccctcgaagctgaggtttgacacacatcactactgggtgtttttcttcttctttgcagttcttgacagccagcagggttcctacataatttacatttccagaaacagcactag

SEQ ID NO: 15414 - DNA, 600 bp, Chicken  19866894221809_1
cagaggtccctgaagcactctcttcactgggttgttctcattttcccctccagttcccatcactgtgaatcctgaatgccaactccttgagatccaagtgccaggggctccagatgttgaggactacgcatgtgaacctgctggcctgagcagcccctccacagtccctgtcctggtggcaaaggaagggtttgcagctgggaaacactactgggaagtggacgtgggccagcagcaggactgggtgctgggggtcatgaggcagaaagggaaacaagaggagcaagaggcacttgctgrggaggactactgggctctgcacagatccaggggagagattttctctatcaagggaaacattaggcttaagaagaaggaaatgaattactcagtgattggtgtgcttctggacttagaggaagaccaaatcaacttttatgaagctcatcagatgagcaccatggtaaaaatcccaataagtcttggacaggaacctacagaaatgcttttcccatttttatccaaaggaggagaggcaggcacacctgttatccactcggtattaacccctgtccctttggagccactgtaaaatgaaat

SEQ ID NO: 15415 - DNA, 600 bp, Chicken  19866894221813_1
tcatggtgtaactgtaaggaaagatatgggttttgtgcgtgaccaaataataggcagagcatgaagagcttatatgtcacctcgttagcactgtgtgaatagtgagttacaactaaattggcatccgatgccagttcctgattgaggtctgtccaagaacagccccttacatccgagaagaaatatctgaaggctgctggaatataatccatctcaagttgtgccgaatgcaaatctacttctctgttgccaaacaagtttgattaattaggtgccccagcactcagtcagaaactgagrcatacagctattctgcagctggactgaataacaaaaagaacacacgcactctcaatcaacatttttttctttttaaaaacacattaattaaggactgtctaaaaatctatcgtgctctatttctattacattagtgttcattccccaaatatatgtatttatatagtgtggcgttttttttcttgccagctcttctggagaagcaacagatttttgctaaattctattttactgtttttttatttcccygtggctgttttaacaggaaaagtgaagactgtgtggcagaattcattgacg

SEQ ID NO: 15416 - DNA, 600 bp, Chicken  19866894221813_2
ccaaacaagtttgattaattaggtgccccagcactcagtcagaaactgagrcatacagctattctgcagctggactgaataacaaaaagaacacacgcactctcaatcaacatttttttctttttaaaaacacattaattaaggactgtctaaaaatctatcgtgctctatttctattacattagtgttcattccccaaatatatgtatttatatagtgtggcgttttttttcttgccagctcttctggagaagcaacagatttttgctaaattctattttactgtttttttatttcccygtggctgttttaacaggaaaagtgaagactgtgtggcagaattcattgacgtttgtgacggagttctctcccaggacagccaggagctgtccacacttgtggctcactctgtaaccgtaccagcattttactttatttttggctttgtgagtttttaatttgctcggtgctattaacatgactaatgatgctgtgggatgcctaatcccttcatcaccagagcagcaaaattctcagggccacagctttgtttcattacccagaaatctgtccatgtttctatatgcatttaaggcaatc

SEQ ID NO: 15417 - DNA, 599 bp, Chicken  19866894221815_1
  misc_feature (1)..(86): n is any nucleotide
nnnnnnnnnnnnnnnnnnnnnnnnnnnnnnnnnnnnnnnnnnnnnnnnnnnnnnnnnnnnnnnnnnnnnnnnnnnnnnnnnnnnnntttaaatacattattttctttcatttcacttaagcaaaatagaaatattgaagtactgtatcagcttgcaaaactaactttggagaaaagtcattgataacattcagaaacttgaaactactggcatagatcccaaatgagcagacaagaatattccttctctccaacccatctttttacttggtgaatagcacagttcatttctgtgcctcaytgagtttgttttgaaagtctgaagtttatataggataaaagaatattgcagccatgagtgataaggatgattaagaaagatcagattgtggcagacaggacttgatcctgaaaaaaaaacaagctccttacttctcactgacttcagcagttattatacatgcagcactagagagaacatggyatctaattctctttttacttcctatacttcgtactggtgtcctgcttttggacaggacaacaatgcaattgcaggccgcccarcaaactctgcccagttttatggttgagcaagac

SEQ ID NO: 15418 - DNA, 600 bp, Chicken  19866894221815_2
taacattcagaaacttgaaactactggcatagatcccaaatgagcagacaagaatattccttctctccaacccatctttttacttggtgaatagcacagttcatttctgtgcctcaytgagtttgttttgaaagtctgaagtttatataggataaaagaatattgcagccatgagtgataaggatgattaagaaagatcagattgtggcagacaggacttgatcctgaaaaaaaaacaagctccttacttctcactgacttcagcagttattatacatgcagcactagagagaacatggyatctaattctctttttacttcctatacttcgtactggtgtcctgcttttggacaggacaacaatgcaattgcaggccgcccarcaaactctgcccagttttatggttgagcaagacatgatatattatggaatatcctttyagccagtttgtgtcactattctggttctcttccctcccagctgcttgtgcaccccagcctccttgctggcagggcagcatgagaagcagaaaagcccttgatttaatgtcagcactgctcagcaacaactaaaacattagtgtgttattaacagtattt

SEQ ID NO: 15419 - DNA, 600 bp, Chicken  19866894221815_3
ttggtgaatagcacagttcatttctgtgcctcaytgagtttgttttgaaagtctgaagtttatataggataaaagaatattgcagccatgagtgataaggatgattaagaaagatcagattgtggcagacaggacttgatcctgaaaaaaaaacaagctccttacttctcactgacttcagcagttattatacatgcagcactagagagaacatggyatctaattctctttttacttcctatacttcgtactggtgtcctgcttttggacaggacaacaatgcaattgcaggccgcccarcaaactctgcccagttttatggttgagcaagacatgatatattatggaatatcctttyagccagtttgtgtcactattctggttctcttccctcccagctgcttgtgcaccccagcctccttgctggcagggcagcatgagaagcagaaaagcccttgatttaatgtcagcactgctcagcaacaactaaaacattagtgtgttattaacagtattttcatcttaaatacaaaccacagttccataccagctactaggaagaaaataaactctgtctcagccaaaatgagaacaacccgt

SEQ ID NO: 15420 - DNA, 546 bp, Chicken  19866894221815_4
tttatataggataaaagaatattgcagccatgagtgataaggatgattaagaaagatcagattgtggcagacaggacttgatcctgaaaaaaaaacaagctccttacttctcactgacttcagcagttattatacatgcagcactagagagaacatggyatctaattctctttttacttcctatacttcgtactggtgtcctgcttttggacaggacaacaatgcaattgcaggccgcccarcaaactctgcccagttttatggttgagcaagacatgatatattatggaatatcctttyagccagtttgtgtcactattctggttctcttccctcccagctgcttgtgcaccccagcctccttgctggcagggcagcatgagaagcagaaaagcccttgatttaatgtcagcactgctcagcaacaactaaaacattagtgtgttattaacagtattttcatcttaaatacaaaccacagttccataccagctactaggaagaaaataaactctgtctcagccaaaatgagaacaacccgttaat

SEQ ID NO: 15421 - DNA, 599 bp, Chicken  19866894221818_1
  misc_feature (1)..(216): n is any nucleotide
nnnnnnnnnnnnnnnnnnnnnnnnnnnnnnnnnnnnnnnnnnnnnnnnnnnnnnnnnnnnnnnnnnnnnnnnnnnnnnnnnnnnnnnnnnnnnnnnnnnnnnnnnnnnnnnnnnnnnnnnnnnnnnnnnnnnnnnnnnnnnnnnnnnnnnnnnnnnnnnnnnnnnnnnnnnnnnnnnnnnnnnnnnnnnnnnnnnnnnnnnnnnnnnnnnnnnnnnatctttcagtgcttaaaggcagattataaaaaagggatggagattcactttttacatggtgacagtgatagaatgaaggggaawggctttaaactaaaagaggggagatttagatgagatgttaggtggaaattgttcactcagagtggggaggtgctgcccagagctgtggatgccccatcccaggccatggatgggccctgggcagccagagctgctgggtgatgtccycctcccttggcagagtggagcggaactaaatgggctttgaggtcctttctgacccagaccatcctatggttctatgattgaaagtgktgttgccaggcaagcaagacgattatggttggtcaccacctgrttggcatggggcaggtgtggat

SEQ ID NO: 15422 - DNA, 599 bp, Chicken  19866894221818_2
  misc_feature (1)..(69): n is any nucleotide
nnnnnnnnnnnnnnnnnnnnnnnnnnnnnnnnnnnnnnnnnnnnnnnnnnnnnnnnnnnnnnnnnnnnnatctttcagtgcttaaaggcagattataaaaaagggatggagattcactttttacatggtgacagtgatagaatgaaggggaawggctttaaactaaaagaggggagatttagatgagatgttaggtggaaattgttcactcagagtggggaggtgctgcccagagctgtggatgccccatcccaggccatggatgggccctgggcagccagagctgctgggtgatgtccycctcccttggcagagtggagcggaactaaatgggctttgaggtcctttctgacccagaccatcctatggttctatgattgaaagtgktgttgccaggcaagcaagacgattatggttggtcaccacctgrttggcatggggcaggtgtggatccattcctcctacatcctgcagtcttttgaagaggcaggaggtcaggctcagacgaattgccagcccctgccagcaccagaaggatgcccaaaggctgggaactaagtcttgggggctgggcaggtgtttgtctccccaaactccgt

SEQ ID NO: 15423 - DNA, 600 bp, Chicken  19866894221818_3
gcagattataaaaaagggatggagattcactttttacatggtgacagtgatagaatgaaggggaawggctttaaactaaaagaggggagatttagatgagatgttaggtggaaattgttcactcagagtggggaggtgctgcccagagctgtggatgccccatcccaggccatggatgggccctgggcagccagagctgctgggtgatgtccycctcccttggcagagtggagcggaactaaatgggctttgaggtcctttctgacccagaccatcctatggttctatgattgaaagtgktgttgccaggcaagcaagacgattatggttggtcaccacctgrttggcatggggcaggtgtggatccattcctcctacatcctgcagtcttttgaagaggcaggaggtcaggctcagacgaattgccagcccctgccagcaccagaaggatgcccaaaggctgggaactaagtcttgggggctgggcaggtgtttgtctccccaaactccgtgtctggtgactcgtgtgcacccccatgtcttgtcaagggggctgtgggtgcatgcagctgggatgggatggggtgacatgccagcacc

SEQ ID NO: 15424 - DNA, 600 bp, Chicken  19866894221818_4
acagtgatagaatgaaggggaawggctttaaactaaaagaggggagatttagatgagatgttaggtggaaattgttcactcagagtggggaggtgctgcccagagctgtggatgccccatcccaggccatggatgggccctgggcagccagagctgctgggtgatgtccycctcccttggcagagtggagcggaactaaatgggctttgaggtcctttctgacccagaccatcctatggttctatgattgaaagtgktgttgccaggcaagcaagacgattatggttggtcaccacctgrttggcatggggcaggtgtggatccattcctcctacatcctgcagtcttttgaagaggcaggaggtcaggctcagacgaattgccagcccctgccagcaccagaaggatgcccaaaggctgggaactaagtcttgggggctgggcaggtgtttgtctccccaaactccgtgtctggtgactcgtgtgcacccccatgtcttgtcaagggggctgtgggtgcatgcagctgggatgggatggggtgacatgccagcaccagcgggggcattgckgaccccagcccttatgtccccgctgcag

SEQ ID NO: 15425 - DNA, 600 bp, Chicken  19866894221818_5
aagacgattatggttggtcaccacctgrttggcatggggcaggtgtggatccattcctcctacatcctgcagtcttttgaagaggcaggaggtcaggctcagacgaattgccagcccctgccagcaccagaaggatgcccaaaggctgggaactaagtcttgggggctgggcaggtgtttgtctccccaaactccgtgtctggtgactcgtgtgcacccccatgtcttgtcaagggggctgtgggtgcatgcagctgggatgggatggggtgacatgccagcaccagcgggggcattgckgaccccagcccttatgtccccgctgcaggcgggagcggcgccggaggcaccacatgtcggtgtgggagcagcgcaccagccagctgcgccggcacatgcagatgtccagccaggagggcatcaataaggatgagccacccctcatcaacccacatgccagcatcttccgccgcaagaagccgggggacggtgttgccttggagaagtgcgatgaagagcaaggcggcaagggtgagcggccgccagctgagggtcccgagcagccggccccagggaccaacccaggcagtggggaggaca

SEQ ID NO: 15426 - DNA, 599 bp, Chicken  19866894221828_1
  misc_feature (1)..(184): n is any nucleotide
nnnnnnnnnnnnnnnnnnnnnnnnnnnnnnnnnnnnnnnnnnnnnnnnnnnnnnnnnnnnnnnnnnnnnnnnnnnnnnnnnnnnnnnnnnnnnnnnnnnnnnnnnnnnnnnnnnnnnnnnnnnnnnnnnnnnnnnnnnnnnnnnnnnnnnnnnnnnnnnnnnnnnnnnnnnnnnnnnnnnnnnnagggctgctttgtgatgaagagactgagaactttgtcagcagcaaaaatgtgtagagaaataatgatggggaacaagaatcttacaggagtgagtgaataggtacaaaatttgatraattgctgtccaaacacaataaaggatttgtttgtgaagctggcttaatttgggaactgctggagctaaaagtggatgaaaaaagtggttttgtacagctgtgttttaattagatggaaaggtgcattcaaacctgaacttacactaagagaaaagggcacatactacaggacatctgtgtttatacatgcagaagcaggcacggtgtgctccagaaagaagaagcccgaagaagccatttacaaggttgaagactagcaagtgtaaaatagagctataggtatgaaggtccacggtaa

SEQ ID NO: 15427 - DNA, 600 bp, Chicken  19866894221849_1
atcccagtaggcatggctttgtggccatagctggggctccatgatagcttatgtggagcttatagcagttcttgtggcacggctgaacacgtgttagctagtggctggctgtccgtgccagggagatgttggctcttcctccatctgctcctcatcagcctccctgctcattcatgagagtgctggcagagtcctgctggagagggcgtaatgcagtgagggagctctgctttctgccggctcctgcctttcctgtgcatccggtgatgcggcacttaaggaagcgtgcagtttgtcttygctgtgtcgccttcctcagtaggaagggttttatatgtaaccctgacagtacagcgggaacctccatcagacccttrtaagtgactgcgccgaatagaagagacctccgtcagtccgaacgctgcagttcgacggcagttccttctggcggcagcagcagcctcggcaaagcgccgtgccgcgctccatcctcaggtgaccccgtcctccctccgcggggctgctggccgggggctgctggccggagcggctgtgataagcagcgtttgcattgctgaatgcttaccgcttccgttcgtt

SEQ ID NO: 15428 - DNA, 600 bp, Chicken  19866894221849_2
cacggctgaacacgtgttagctagtggctggctgtccgtgccagggagatgttggctcttcctccatctgctcctcatcagcctccctgctcattcatgagagtgctggcagagtcctgctggagagggcgtaatgcagtgagggagctctgctttctgccggctcctgcctttcctgtgcatccggtgatgcggcacttaaggaagcgtgcagtttgtcttygctgtgtcgccttcctcagtaggaagggttttatatgtaaccctgacagtacagcgggaacctccatcagacccttrtaagtgactgcgccgaatagaagagacctccgtcagtccgaacgctgcagttcgacggcagttccttctggcggcagcagcagcctcggcaaagcgccgtgccgcgctccatcctcaggtgaccccgtcctccctccgcggggctgctggccgggggctgctggccggagcggctgtgataagcagcgtttgcattgctgaatgcttaccgcttccgttcgttggtcgtgttcctcttgccttgtttgcagagctgttagtattcatcatgaaggaaggattcggatatctcagattttg

SEQ ID NO: 15429 - DNA, 600 bp, Chicken  19866894221849_3
gggaaaggtgatgtaaggaagtgttcagtgccagatgttagcaaaaaaaaaaaaacccaaccaaccaaaagcacttcactgtgttttacactcctgctgtcaacaagtattgtacagacaggtttaggtgcagctaagaccggtggccaggtggtaaattccaaaacagctgaagctgtgaatgcctccggggagaaaacttgactgagcagaagagagacggctgtaattttgtcaggcaaagcattagctgccagcgatgggcttctgagatatttggccatttattttattgaaatrtttattgtctaatcaaatgagaagcgaactcttaaccacttacacgtccatctgcacaacggtgcacggcagtccttcacaattctaaaaccacaccgtcagtcgccgctttatatgagaagcactttccttagtaaaggccacaggaagggcttatgccagaagactggtgatgaggaggaaaaaacggtgctgccggtttcctttcaggcttatctgtagtacagccttacacgatccagcatagcacaaatggttcagacagctttctcagttcctgctgtagatcatttttaaatg

SEQ ID NO: 15430 - DNA, 555 bp, Chicken  19866894221849_4
attctaatgaagtgccttatgttgcaaattccaggacagtttgaataatctgacagactaattaacatttcagtctctcttccaaacgtttgctttcagtgccaggaagctttctctgtatacacttcctagtgaacggggtgacagattgcatataccgcttcaaaatgccgtttacccaaagactcggcttactcattcattgctgcacctggggtggagcctgttctggtttccagaccattcaaagtggccctggaaaggagctgaagcctgttgcctttcaagatgctctactargaacagttaggtaaatatttctttattaaatgattaattccataaataaattcttttaattcatcgaatataaaattaaaatcatttacaacttattccagtattacaggggttggaaggggttaaaaaaaaaaaaaagaaaacaaaagagctacagtttgataaataaaatactcagctttaaaacaactgattttctgtttgccattaaactacagggtggtacataatagctgccactgtgaacaccccaca

SEQ ID NO: 15431 - DNA, 600 bp, Chicken  19866894221858_1
ctgtcattttgttctcaggtgctccctcggcagacctgtggtcttttcactcatactattttttacaaggaatatcctgggggtcctcaggagctggacaaaagtatccgaggaggtgaacttttcctcaccattctcctgaatcctgtaggtaccttcttttgctacctttgctactttcggacacactgagtaacgggaaggagggagggaagaagggaaaggtattcgtttcttttgatctacattgggaaattaaaaagaaaattacttgatcagagggaacacacagtttaaaaygaagaaagcaaaagccaaccagaaattagcaaaaatattctgactgtatgaagcaagttgctggaaaatgtattcctgtcattttcaagctttttctcaccctaaagctgagtccttgcaagaagaaaggacattgccatgtctaaccaatactgacagagaacagcaagggtagagagagcagagtgaccttattctacgttcctttctgtctccctaatcatggttctgcacactcctaagagaacttgttggaaactccagggctcagggctgatataattccctcaccaccacttc

SEQ ID NO: 15432 - DNA, 599 bp, Chicken  19866894221874_1
  misc_feature (1)..(8): n is any nucleotide
nnnnnnnncttccctgactttgaaaactcttcatctacaaaatgactggaaaaatgatttaacggaagagtcaaacacacagtggttctcaatctttgctggttcttggaaacatgtaagtgactgggtattaaccttgccttcctttactgtatggtcagttgtttcatgtaaccttgaacaattttggaaagtctttctgcttgcatgtaggagctacagaaaaggatcacaactaattacattcaagtcttccagcctggaggtttggtagaactttgctactttggacagtaataygcaatgttagaaaaacctgctccatagctaaattgaacaaaaagtatttgatgtttgccaacatttttccaagaccatttcaggtcttctcccccagcccacaccaccatcactgacatcgcaygacggctcactcatgttgaaatacagtagtataaatgctgctactgttctctggatgggttggagttacagattttccttggcaagttctgagacagtatttggagattgttgattcaaaactgttaactgtattaatcatgtaacaaacatgcacgcagactgccaggcttaat

SEQ ID NO: 15433 - DNA, 600 bp, Chicken  19866894221874_2
tgggtattaaccttgccttcctttactgtatggtcagttgtttcatgtaaccttgaacaattttggaaagtctttctgcttgcatgtaggagctacagaaaaggatcacaactaattacattcaagtcttccagcctggaggtttggtagaactttgctactttggacagtaataygcaatgttagaaaaacctgctccatagctaaattgaacaaaaagtatttgatgtttgccaacatttttccaagaccatttcaggtcttctcccccagcccacaccaccatcactgacatcgcaygacggctcactcatgttgaaatacagtagtataaatgctgctactgttctctggatgggttggagttacagattttccttggcaagttctgagacagtatttggagattgttgattcaaaactgttaactgtattaatcatgtaacaaacatgcacgcagactgccaggcttaataaatctttctagygtgcaacctcccatcataaacacattcagaaacgtttaagcaatccctgagcttggaagataatcatttgtttcctatcatatgctttaggtttgctgaaacaatcagcgtc

SEQ ID NO: 15434 - DNA, 456 bp, Chicken  19866894221874_3
aaacctgctccatagctaaattgaacaaaaagtatttgatgtttgccaacatttttccaagaccatttcaggtcttctcccccagcccacaccaccatcactgacatcgcaygacggctcactcatgttgaaatacagtagtataaatgctgctactgttctctggatgggttggagttacagattttccttggcaagttctgagacagtatttggagattgttgattcaaaactgttaactgtattaatcatgtaacaaacatgcacgcagactgccaggcttaataaatctttctagygtgcaacctcccatcataaacacattcagaaacgtttaagcaatccctgagcttggaagataatcatttgtttcctatcatatgctttaggtttgctgaaacaatcagcgtcaagtcaagatgagcataagctgagctctccaacttagttttcat

SEQ ID NO: 15435 - DNA, 600 bp, Chicken  19866894221880_1
gtcaatgacaaaaacactattcatagctcagttttactgcaatgttattgaccatggcttcagaaaattgaagaaatctgacagaccactaacttcattccgtattgccagatccttgggatttcattgccataacgcttactttatttctaaactgttcaatccatgaccatacatttacgatgaataaaacactcttccaatcaattatataatattactatttacaaaaaaaaattgtttttctcttatgactgaagggaataacttagaaaaattgctttaccagctgcaagatcrgactggcaataaaatatatgaagtttactgctctatctctgagattgagataggaggtactttccagaccagaaagaaattttaaccttttacttttggacactgaatcttctgaacatctttcctctcctacatatgtaataccttggaattttgtctttgcaaaagatgtaatactccataatgctaaaggcttggggcagaggctggacagctgtgcagcagaaaaagatgtggggtgcttgacagctggctgaaaatgagccaggagtgtgaccaggtggccaaggcggccaacag

SEQ ID NO: 15436 - DNA, 599 bp, Chicken  19866894221884_1
  misc_feature (1)..(121): n is any nucleotide
nnnnnnnnnnnnnnnnnnnnnnnnnnnnnnnnnnnnnnnnnnnnnnnnnnnnnnnnnnnnnnnnnnnnnnnnnnnnnnnnnnnnnnnnnnnnnnnnnnnnnnnnnnnnnnnnnnnnnnnnnctgagcccctgacaactctgaaaccaatgatttttgaatacttacagatcgatactttaacagcatagcacaggagaggaacagttacattagatcacttaaatcaccccagagagctgaatgttctgttccctaatcatttatccataatatgtagagggaaaaaaatgatgttatcrcaggagacttcatcctgagtgacatatgctgcaagccttaggctgccaatactaaaatgtcctcggaattaaaaaaaaattaaagttgatgacctggtaactcataaagcactgcagggagcacaggggaattttgtcagatctgttttctttattgacttgtgaagattaactgattcttagcaaaaaaaaaaaaaaaaaagctagtggctgaagctatgatgggaaacttgctttatggaaagaggtttaagcctactcctgaaaaaataacaagcctggttctttaaaacagcaaa

SEQ ID NO: 15437 - DNA, 600 bp, Chicken  19866894221884_2
atagcacaggagaggaacagttacattagatcacttaaatcaccccagagagctgaatgttctgttccctaatcatttatccataatatgtagagggaaaaaaatgatgttatcrcaggagacttcatcctgagtgacatatgctgcaagccttaggctgccaatactaaaatgtcctcggaattaaaaaaaaattaaagttgatgacctggtaactcataaagcactgcagggagcacaggggaattttgtcagatctgttttctttattgacttgtgaagattaactgattcttagcraaaaaaaaaaaaaaaaagctagtggctgaagctatgatgggaaacttgctttatggaaagaggtttaagcctactcctgaaaaaataacaagcctggttctttaaaacagcaaacccattagggcgaaataaattgggggaaaaaaaccaaacaaatatatgctaaaaactacaagcaatgattaggaaagttttgaaagatccttactgtataggaaagcttttgaacagaaaggaattaaggctgcatggaaaacaaaaccaaccatttcttggttaactgcaactactcctaatggc

SEQ ID NO: 15438 - DNA, 600 bp, Chicken  19866894221884_3
tagcacaggagaggaacagttacattagatcacttaaatcaccccagagagctgaatgttctgttccctaatcatttatccataatatgtagagggaaaaaaatgatgttatcrcaggagacttcatcctgagtgacatatgctgcaagccttaggctgccaatactaaaatgtcctcggaattaaaaaaaaattaaagttgatgacctggtaactcataaagcactgcagggagcacaggggaattttgtcagatctgttttctttattgacttgtgaagattaactgattcttagcaraaaaaaaaaaaaaaaagctagtggctgaagctatgatgggaaacttgctttatggaaagaggtttaagcctactcctgaaaaaataacaagcctggttctttaaaacagcaaacccattagggcgaaataaattgggggaaaaaaaccaaacaaatatatgctaaaaactacaagcaatgattaggaaagttttgaaagatccttactgtataggaaagcttttgaacagaaaggaattaaggctgcatggaaaacaaaaccaaccatttcttggttaactgcaactactcctaatggcc

SEQ ID NO: 15439 - DNA, 600 bp, Chicken  19866894221884_4
agcacaggagaggaacagttacattagatcacttaaatcaccccagagagctgaatgttctgttccctaatcatttatccataatatgtagagggaaaaaaatgatgttatcrcaggagacttcatcctgagtgacatatgctgcaagccttaggctgccaatactaaaatgtcctcggaattaaaaaaaaattaaagttgatgacctggtaactcataaagcactgcagggagcacaggggaattttgtcagatctgttttctttattgacttgtgaagattaactgattcttagcaaraaaaaaaaaaaaaaagctagtggctgaagctatgatgggaaacttgctttatggaaagaggtttaagcctactcctgaaaaaataacaagcctggttctttaaaacagcaaacccattagggcgaaataaattgggggaaaaaaaccaaacaaatatatgctaaaaactacaagcaatgattaggaaagttttgaaagatccttactgtataggaaagcttttgaacagaaaggaattaaggctgcatggaaaacaaaaccaaccatttcttggttaactgcaactactcctaatggcct

SEQ ID NO: 15440 - DNA, 600 bp, Chicken  19866894221884_5
gcacaggagaggaacagttacattagatcacttaaatcaccccagagagctgaatgttctgttccctaatcatttatccataatatgtagagggaaaaaaatgatgttatcrcaggagacttcatcctgagtgacatatgctgcaagccttaggctgccaatactaaaatgtcctcggaattaaaaaaaaattaaagttgatgacctggtaactcataaagcactgcagggagcacaggggaattttgtcagatctgttttctttattgacttgtgaagattaactgattcttagcaaaraaaaaaaaaaaaaagctagtggctgaagctatgatgggaaacttgctttatggaaagaggtttaagcctactcctgaaaaaataacaagcctggttctttaaaacagcaaacccattagggcgaaataaattgggggaaaaaaaccaaacaaatatatgctaaaaactacaagcaatgattaggaaagttttgaaagatccttactgtataggaaagcttttgaacagaaaggaattaaggctgcatggaaaacaaaaccaaccatttcttggttaactgcaactactcctaatggcctc

SEQ ID NO: 15441 - DNA, 600 bp, Chicken  19866894221889_1
aactaaaagatttaggttagatgttaggggaactttttttactcagaaggtggtgaggcactggaacagattgcccagagagcctgtggatgccccatccctggaggtgttcaaggccagactggacgtagctctgggcagtctgagctggtggatgacagccctgcacatggcaggggagggtgaaactggatgatcattaggtcccttccgacccaagccactttatggttctatggtgattctatgatgtcaggtggtatagaagggcagagattatttcttttctttctgactggygattagtgaaagtccccatgcctataaataactgcagtgccaagtacgggtgggaatgctgcgagctttcttggttgagtctggaaggggaggaggaggcaggagcccacccatgcggggaatttcattggaacatgcacatacctcttttctcccatgtaggtttttgtctgagcttgccctttcttcttcacatatttccatctctgccagcaggtaaatagagtgcttgatttgagaaacacttagaagtaactgcggcacagtaattgcacagctgacgtgagccttgtccttgtc

SEQ ID NO: 15442 - DNA, 600 bp, Chicken  19866894221889_2
ttccatctctgccagcaggtaaatagagtgcttgatttgagaaacacttagaagtaactgcggcacagtaattgcacagctgacgtgagccttgtccttgtcctgtgtactgcaggactctgcgtgtcactgcatgagtagagcttggtggggattttttttgttgtttgattttactaagcagtctgctattttcttagactggctgctgcttagtttcttccctttgtattctgttcaaaaaatcccttgtatgtctaggaaaaacgtgaccttgttcttgaaaggtggtttctcccrctcccactacccccaaaccatacacagataaaacagagacctgaattaagagaataaaccaaaatctgtcataagtttgtgggataactgcttggacagtctttcctgatactgtgcttccatgcaagggagctacaagggtttggaaaagtgtcattctttaccaagaaatactgcgcttaattaattcttgttcctaggaggtcaacctagggcactcattattgtcttaattggtggtataaatcctgaggcactggaggggaagagggggaaaaaaaaaagatgagcacttaacaa

SEQ ID NO: 15443 - DNA, 600 bp, Chicken  19866894221891_1
gtctctcctgcagatcccgggtcctctgttctgaaaaatagtgactcaaaagtacgtgtaccgggaggacatgtgctggatttattgatttcttctggatgggtgatgggtgaagctttaagcctggattttgaaggacagctttatccgctcatctaaacgattctaacgcgaggtgtgtcaatgtcacagccacaagatgctctaaaatccaacctgccagtcatcgtgataaggtcgtgagagataggagggctgagaaatccccgaacggtcttcagagaattactgaacaggtcyttctggatctgagtcttatttcctcttagatttgagaaatatctgacttctgatgctaccccgcatctcagcttgttatgtgagagccacatccattgtgagctccgggatggataggctgtttgggtttaattctagacaggctgggaatggggaaagatattttaacaagagaagtttcttgtgccaagcaaatatccgtcttgctgctgctggttcctctttcacagctaccaccagacatcagctacttcattctgaggatcctctttctttccatgtgataattgttagtgattt

SEQ ID NO: 15444 - DNA, 600 bp, Chicken  19866894221896_1
gtagttaaactctggagctcagaaactttttcaatgaactctactgcccctcatccacatattttccatagcttgagaaatcttggctcaaaagtgttgattaatctatatacattcccaggtgggaactgacattcatccttaagcagtcctgtagcctcctgtggcgattctgtatttattattgatataagattttgtctgtgaggtgataaaggagagcagagcatacttgtcatgtttctgtcactttgattgggtctgtcaggcctctgtggttttagcccagccaacacagcrgagaggaatgataaatgccractgtttcacagtaaagaagtgagttttgactgaatttggggttagagacacttgttttaggtagcgtttgcctatccatacttgtttccctcataattgaagatccatgtggtttttcagcttaattcccctgaaccgctatagtaaatttaggtcaycttactacagtgatttctgagccttggaaattttacttctcggttctgctttgatgccttgtgaagaaccagctttagcaaaacagtgttgcatttttatctcaatcataaatccatatcc

SEQ ID NO: 15445 - DNA, 600 bp, Chicken  19866894221896_2
agaaactttttcaatgaactctactgcccctcatccacatattttccatagcttgagaaatcttggctcaaaagtgttgattaatctatatacattcccaggtgggaactgacattcatccttaagcagtcctgtagcctcctgtggcgattctgtatttattattgatataagattttgtctgtgaggtgataaaggagagcagagcatacttgtcatgtttctgtcactttgattgggtctgtcaggcctctgtggttttagcccagccaacacagcrgagaggaatgataaatgccractgtttcacagtaaagaagtgagttttgactgaatttggggttagagacacttgttttaggtagcgtttgcctatccatacttgtttccctcataattgaagatccatgtggtttttcagcttaattcccctgaaccgctatagtaaatttaggtcaycttactacagtgatttctgagccttggaaattttacttctcggttctgctttgatgccttgtgaagaaccagctttagcaaaacagtgttgcatttttatctcaatcataaatccatatcccattggyttcaagtgctgga

SEQ ID NO: 15446 - DNA, 600 bp, Chicken  19866894221896_3
tattattgatataagattttgtctgtgaggtgataaaggagagcagagcatacttgtcatgtttctgtcactttgattgggtctgtcaggcctctgtggttttagcccagccaacacagcrgagaggaatgataaatgccractgtttcacagtaaagaagtgagttttgactgaatttggggttagagacacttgttttaggtagcgtttgcctatccatacttgtttccctcataattgaagatccatgtggtttttcagcttaattcccctgaaccgctatagtaaatttaggtcaycttactacagtgatttctgagccttggaaattttacttctcggttctgctttgatgccttgtgaagaaccagctttagcaaaacagtgttgcatttttatctcaatcataaatccatatcccattggyttcaagtgctggagctggcacatgctgagcgctggagctagcgccgtgtgggctggcagcggccaggcacagcagctgtcttgctgttggtgttcatcrtaccagcactgagcagtcacaaagatttctttcttctttcagtttatttgtaaatgtttgctgtgggacaagt

SEQ ID NO: 15447 - DNA, 508 bp, Chicken  19866894221896_4
atgataaatgccractgtttcacagtaaagaagtgagttttgactgaatttggggttagagacacttgttttaggtagcgtttgcctatccatacttgtttccctcataattgaagatccatgtggtttttcagcttaattcccctgaaccgctatagtaaatttaggtcaycttactacagtgatttctgagccttggaaattttacttctcggttctgctttgatgccttgtgaagaaccagctttagcaaaacagtgttgcatttttatctcaatcataaatccatatcccattggyttcaagtgctggagctggcacatgctgagcgctggagctagcgccgtgtgggctggcagcggccaggcacagcagctgtcttgctgttggtgttcatcrtaccagcactgagcagtcacaaagatttctttcttctttcagtttatttgtaaatgtttgctgtgggacaagtctactgtaagggcactttggaggctttccatcactg

SEQ ID NO: 15448 - DNA, 409 bp, Chicken  19866894221896_5
ttccctcataattgaagatccatgtggtttttcagcttaattcccctgaaccgctatagtaaatttaggtcaycttactacagtgatttctgagccttggaaattttacttctcggttctgctttgatgccttgtgaagaaccagctttagcaaaacagtgttgcatttttatctcaatcataaatccatatcccattggyttcaagtgctggagctggcacatgctgagcgctggagctagcgccgtgtgggctggcagcggccaggcacagcagctgtcttgctgttggtgttcatcrtaccagcactgagcagtcacaaagatttctttcttctttcagtttatttgtaaatgtttgctgtgggacaagtctactgtaagggcactttggaggctttccatcactg

SEQ ID NO: 15449 - DNA, 600 bp, Chicken  19866894221897_1
gaagttgaaatgcacaaaattcttggtgattgctctagcagtctgtcttgttccagctgatgtcagaagcttaagcacgtcccttctgtttccacgcatccttgcatggcagcaggaaggacttggaagatagctgccatctgtccttagggatgcctcctgcatcctttgatcaccacagagcacagagaaatccctgattggtgaaggaagctcagaaccctgcctcctcttctaaccagcatgggaagttagtagagagaggaagaacaaaggagattttgttgttcatatcagagygttaatttcttgaatttggcggtggaaaatgtatggctttttttcttgtgcctaggttgctgcaaaagtaatgcctccttcttattttcttggaaactacaccagatacaaaaataacaatgaccatttggtagagcaaattctcaatggtgaataagagcctgcacgccacatttgtaaaaatctgcactaatggtggtgactcactgtttcacagtagctatgacagcatcactgctaggaaaatgctgcctgtgcactccatctttcattgttctgaacagattgaattcagaaagc

SEQ ID NO: 15450 - DNA, 600 bp, Chicken  19866894221903_1
cagctgtgagcctcaatgcacagccacgctgtcagcccttgaagggtgcaggcatttagaggagggcgcagctcaacccaagccctcccagccaagcttatggcaggaagtgccttcagtggctcagcagcttatggctccttgtccctaaccccaggattaggcatccttctaggaagctgaagtctcaggcttgaagtctttgaggctaaaacctgggtcctctttttcggtagagcacattcacaatcattctgcccctatgaagccacttctgttgaattcaaaggaagcagtgtrccctggttagccctctgagaggcataaggtggctaaggcttgggctcaggacatcaaataggagacttccaattttaaattgcaagcgtgaagttgagcttcagacagtgacagggttgggttggggtcctttctccatccaggaaagagggaggactactgccctcacaccagcattctccttccctgcacatgcgcgcgctttgggtaccacccaaaagaatagcagttccacagaatcatagaatcatttgaatttaaggaaccacttaaggccatctggtccatctgttgtgcact

SEQ ID NO: 15451 - DNA, 600 bp, Chicken  19866894221912_1
tctgcagtctatccaaacaattgtttgcaaatttctatgactctttaaagttctgtgtacacatgatttgcaaaaggaaagtgaaatctaggaataaagaagtttggatcaggtacatatcctgggaaatctgactgactgaggataatttggatgagttttgggaaacctgctgcttacatgtagccagggtagccttttgtatggaatggctgattctaataatgagttacaccttcactgatcatgattgttccacatttgaaatcaagctactgggaaattatggcctttaaactrttggtggaagctgctgctggttgtatcatgtgtatctatgagtacatgagggaagaacaagagcacatttctgttgctaccctggtttgattaggcaatgccagagagaaaactgatttgattgcaggggtcaagatcttaacacaccagttgaatatatgtcaaatcattgaggggataggagggcaagggaggaggtagtggattgtatcaagatgaactggcaattttgggaacaggaaaaaaaaaaaagaatcataccaggtaatcaacagatcttacggatcttggtcagcaggc

SEQ ID NO: 15452 - DNA, 600 bp, Chicken  19866894221913_1
agttcttcatccatcaaacagcccacacatcaaatccattttttgaatttggatgcatcctttccaaaatggatgttgtggggtactgtgtcaaaggccttactgaagtcaagatagatgacatcagttgctcttactttgtccattgatgcagtgacaccatcataaaagtccacaaggttgatcaaacaggatttacccttggtgaagccatgctggttctcctgttgcaactccttgccttccatgtgccttagcataactacctgaaatatctgttccatgatcttcccaggcacmgaggtgagactgacagctcagtagttctttgggtcatctttcttaccctttttaaaaatgagtatcatgtttccttttttccagtcatcagagacttcacctgattgcaacgacttttgaaatatcataaagtcatttggcaaccacatcagccaattctcttaggactctggggtgcatctcattgggacccatagacttgtggatgttcaggtttctcatattctgtatcatctttagtatcttttgcattttctgccagaaatgcagatcttgtctgctggtaagaaaggagaggga

SEQ ID NO: 15453 - DNA, 600 bp, Chicken  19866894221915_1
cttgctgtccctcaggagcatttctttctctttgtaaatatgagggctgctctgagagtaatgcctccaattttattatgttggcccatgacatcagagataggtgttggtggtatggcagtagaggctaaaccttcctaccagtattccaatacacattgctgtgcaacagatggctccagcaggacaatctggtaaaatggtgtctgatatgggaagtgcatatgaagcagaggtgtgtcattgaattcctccatgtggagacaattgcctatcgatattcatcaatgcttgctgagygtttatggagaccaaacagtgggtgtgagcacagtgaggcagtgggtgctgtgtttaagcagtggtggcagcaatggtaggtcacctccactggtgcagaatttgagcgtggcatgcagactcttgttcattgctggtgaaaatgtgtagctagtagtggtgactatgctgaaaaatattgttttatagctgagaatttgctctacctaatagtgtcattgtgttctttgtatctgttgtaatttccatggaagtaaataggagacattactttcagaggtatgtaggtatgagattttt

SEQ ID NO: 15454 - DNA, 599 bp, Chicken  19866894221916_1
  misc_feature (1)..(58): n is any nucleotide
nnnnnnnnnnnnnnnnnnnnnnnnnnnnnnnnnnnnnnnnnnnnnnnnnnnnnnnnnnacaaatccctctgaatgaaagcattttaagtattttataatgtgaaaacctttctgaggtggagacaaacaagcatagctatgggggaaaaaaaaacagtagtaagagatgcttctattacttttttctcttcagattttctctcagatctgcaacgtgaaatattcaactctttctttattatttacttttccaacattcacaaagtcaaaatgaggctacctcttcaagaagattaggtmttgagaagggcaaagagaaacaagcttatatgcttccctaggaggttataaccatttgagacatgggaactggagtaagttcaaatataaagtagtagagactgaaaaaaaaactttgctatcaactacagaaacatcctatcttttgccacacctctgcatgtactgaaatctgagatgctgagtcaaatgatgttacagatcttattgcagcattttgtgctatgaatcctgaaagtttaagagcttcttctcttatgcacctaacctaaaatatttgagcaattgatcttttagag

SEQ ID NO: 15455 - DNA, 600 bp, Chicken  19866894221918_1
agatgtgttatcttccatacagatatagaatgatcagagcttccaatgtttacaagaatttcctttttcttcctgtattggtctttataaagcatacacaacagctgcaactctactacatggtattactcaattcagaaaaaaacaaatattgagttcatatttaagatgcatttcaactagataaaagaactgttaacatgaattatcacattcatatcaatggaagtcaaatgtcaaacaccagagagttttaagtgacaagtcactcaaaaaaatcttgagagtcagtttccaagwctgttcagcatccttcttctccttttaacttcctatcagaaacgcttagcctgacataatttattttccatattctgttcaaatgtcctcaaagcaatgagatggccctcttgcattttctttactgatagtttgaatcacaatgctgaaggtatggttcatcaccttttgaagaagtgttgaatatttttttgtccatggcatgctggaatagagctggagaacttgtgtgtaggaagataaacatagtacattcctcatttggatcattgagagaatctgtgaacagatggatgagtc

SEQ ID NO: 15456 - DNA, 600 bp, Chicken  19866894221918_2
ataatttattttccatattctgttcaaatgtcctcaaagcaatgagatggccctcttgcattttctttactgatagtttgaatcacaatgctgaaggtatggttcatcaccttttgaagaagtgttgaatatttttttgtccatggcatgctggaatagagctggagaacttgtgtgtaggaagataaacatagtacattcctcatttggatcattgagagaatctgtgaacagatggatgagtcttaaacgtctgtataagttggcttactccagaagtaaccatggtagccaactagraagctttcgatgtggatatcatgaagacatggaacaaggctagggaaaagacacagcatttgtgcatatctactcagatcttatatttgaaggaatttattcaagaaawgaaaacaatggtaaataagtgatcacttatggactctcaagtccctattaatttgaaaacagaagcttaaaacaaattccttgaaagtactggagaggtttccattaagagtagatcagaaggaaaatttgatcattacagaattcacttaattgtttacaacttttttatttggttatattcggtgaaac

SEQ ID NO: 15457 - DNA, 592 bp, Chicken  19866894221918_3
ccttttgaagaagtgttgaatatttttttgtccatggcatgctggaatagagctggagaacttgtgtgtaggaagataaacatagtacattcctcatttggatcattgagagaatctgtgaacagatggatgagtcttaaacgtctgtataagttggcttactccagaagtaaccatggtagccaactagraagctttcgatgtggatatcatgaagacatggaacaaggctagggaaaagacacagcatttgtgcatatctactcagatcttatatttgaaggaatttattcaagaaawgaaaacaatggtaaataagtgatcacttatggactctcaagtccctattaatttgaaaacagaagcttaaaacaaattccttgaaagtactggagaggtttccattaagagtagatcagaaggaaaatttgatcattacagaattcacttaattgtttacaacttttttatttggttatattcggtgaaacaagattcatcaaagtatacaactatatgcaaaatcacatgctttataaatcagtgaatcccacatagtttgttcatcaggtaagcagatgaaatctgtgtt

SEQ ID NO: 15458 - DNA, 600 bp, Chicken  19866894221923_1
cctctactctgctgttgtgatgacctgtctggaggactgcaaccagatctggggccaccagcacaggagatacgtgtagccatcagagcatatcacaagaagggccacaagaaagcacaatgagctgagagcacctcttctgtgaggaaaggttgagggagctgggctccttcagcctggagaagagaaagtgcccagaaggacttcattgcagccttccagtgctggaggagaccttccaagcaggagactgactttttacacaggtagatagggggaatggctttaaactaaaagagrggagacttaggccataagttaggaagaaactcttgacacacagagcagtaaggaacaggctgcctagagaagctgtgggtgctccatccctgaacgtgttcaaggcagatgatccccaggcaatctgatctagtgcacagcaactgtgcccacagcagagggttggaaccaggtgatctttaaagttccttccaacctcagacattttatgatgcatgggttttagagttaaccggtttgtttgttccagaagtgttcaaatttcagccagaacaaagtttctccagtatcagaaatgga

SEQ ID NO: 15459 - DNA, 600 bp, Chicken  19866894221923_2
caaggcagatgatccccaggcaatctgatctagtgcacagcaactgtgcccacagcagagggttggaaccaggtgatctttaaagttccttccaacctcagacattttatgatgcatgggttttagagttaaccggtttgtttgttccagaagtgttcaaatttcagccagaacaaagtttctccagtatcagaaatggaggagtataattcttctgaagctaagaactgtatactgtgaaaatgttgcaatctgtgaaatactattgagggacgcataattctataagcattcaaactrttaggtacatatctgaaacgragtaaagtaaaaattgcaacttctttccaacattkatttctggaggttttgaccaaaagaaaaaaactaaaggaaataactatttcattcaaggaatcttattctgtcacagtgccatctatactgtggcttgctactcctacgtattttttctttcatacgatcaggtgtttgcataactgaaattgcttctccaaatcaagtgagcaaaacctttcaggagaacacttgtaaaacttgtttgggtctgaacaaacttgagacttgaactgtgaaaaa

SEQ ID NO: 15460 - DNA, 600 bp, Chicken  19866894221923_3
aatctgatctagtgcacagcaactgtgcccacagcagagggttggaaccaggtgatctttaaagttccttccaacctcagacattttatgatgcatgggttttagagttaaccggtttgtttgttccagaagtgttcaaatttcagccagaacaaagtttctccagtatcagaaatggaggagtataattcttctgaagctaagaactgtatactgtgaaaatgttgcaatctgtgaaatactattgagggacgcataattctataagcattcaaactrttaggtacatatctgaaacgragtaaagtaaaaattgcaacttctttccaacattkatttctggaggttttgaccaaaagaaaaaaactaaaggaaataactatttcattcaaggaatcttattctgtcacagtgccatctatactgtggcttgctactcctacgtattttttctttcatacgatcaggtgtttgcataactgaaattgcttctccaaatcaagtgagcaaaacctttcaggagaacacttgtaaaacttgtttgggtctgaacaaacttgagacttgaactgtgaaaaaatatccatcaattaaatttct

SEQ ID NO: 15461 - DNA, 600 bp, Chicken  19866894221923_4
agagggttggaaccaggtgatctttaaagttccttccaacctcagacattttatgatgcatgggttttagagttaaccggtttgtttgttccagaagtgttcaaatttcagccagaacaaagtttctccagtatcagaaatggaggagtataattcttctgaagctaagaactgtatactgtgaaaatgttgcaatctgtgaaatactattgagggacgcataattctataagcattcaaactrttaggtacatatctgaaacgragtaaagtaaaaattgcaacttctttccaacattkatttctggaggttttgaccaaaagaaaaaaactaaaggaaataactatttcattcaaggaatcttattctgtcacagtgccatctatactgtggcttgctactcctacgtattttttctttcatacgatcaggtgtttgcataactgaaattgcttctccaaatcaagtgagcaaaacctttcaggagaacacttgtaaaacttgtttgggtctgaacaaacttgagacttgaactgtgaaaaaatatccatcaattaaatttcttaagaactttcttgaaaaagccttaactattcttc

SEQ ID NO: 15462 - DNA, 599 bp, Chicken  19866894221924_1
  misc_feature (1)..(95): n is any nucleotide
nnnnnnnnnnnnnnnnnnnnnnnnnnnnnnnnnnnnnnnnnnnnnnnnnnnnnnnnnnnnnnnnnnnnnnnnnnnnnnnnnnnnnnnnnnnnnnncctgaagacggcatggtgattttcttccctaatatactcgatgcatttgttccagtaactcctgcttctttatcagtacataaaggtgaactacactacaactccttgaaagtgcatcctatcttgagcttgagctcatgactgatgaaaactgactgtaatctttggcaaatgatgtatgagattaattactctggctctccayaatttacattttacttctaatctaaatctgtctagatgcaagtttagtgagttcaaattgcctgaaaatttccttggatgaagtttaaaagattcatttggttcgtatgaaaaaaagaaaaatatttaacttagcaaatctagttttagttgtggaagactggaaacaatttctttaytcttgctagtagtgacataacctagcaaagtttgtaaactgctgccaactatgcaggttgctccaaaagtattgcctcctatttattttcatggaatctacaacagatacaaaagaacaca

SEQ ID NO: 15463 - DNA, 600 bp, Chicken  19866894221924_2
aggtgaactacactacaactccttgaaagtgcatcctatcttgagcttgagctcatgactgatgaaaactgactgtaatctttggcaaatgatgtatgagattaattactctggctctccayaatttacattttacttctaatctaaatctgtctagatgcaagtttagtgagttcaaattgcctgaaaatttccttggatgaagtttaaaagattcatttggttcgtatgaaaaaaagaaaaatatttaacttagcaaatctagttttagttgtggaagactggaaacaatttctttaytcttgctagtagtgacataacctagcaaagtttgtaaactgctgccaactatgcaggttgctccaaaagtattgcctcctatttattttcatggaatctacaacagatacaaaagaacacaataacactatttagtagaataaattctcagctacagagcagtactctgtaacaaggtcaccaccattagtttcgcatttttgcccacaatgaataagagcctgcatgctgcactcataaaaatctgcaacagtgcaggtgagccactgtcactttcgccactgctgaaatgcatcaccc

SEQ ID NO: 15464 - DNA, 599 bp, Chicken  19866894221927_1
  misc_feature (1)..(25): n is any nucleotide
nnnnnnnnnnnnnnnnnnnnnnnnnacagaaagggttttaatgaatcagctcccaaacacacacacacacccacacacacacacacacgcagctttctgttcccaagaaatcttttgcagctaagtggctctgagttcaatgtgagaacgctgctgttgtgctgcgccgcaggcaatctatagaatcctgctagacattagaacaggtatttctgttcccttgatcacttcccccgccccgcagaagagttttggaccatccaggttgagggtttcctagctgtgcctccagcactgagytcacatccagcccggtaacaccaaaagtgctgcaaccagcagtgcagtgcttcccttcctgattttgattggatacaagtaagatctggtgtacaaaatgcgtattttccaaatgaattatttccaggaatcaccacagatgggggaattgtcattttcattgtatttgtgtttattagaacatatgtacttattacaattgtcattgtaataaacagtagttcttcataacgctgttgaactgaggagcggttgtcctttaacccggaggggatttcggatggggggtacacggttgg

SEQ ID NO: 15465 - DNA, 600 bp, Chicken  19866894221933_1
ttctttgttcttctcctgaccagaagcctcaaggggagtccttcagattggagaaacagggtttgcccacagattgaggtcatgcacacatagcagcttgtacatagcaacacctctccagaaaaacagatgattttgagtcatcaccaagaagtgatttatgagacataatggattcactcttccttggaaggccctaagggactcctgagagaagttgctcatcgagggcatcagccatcagggccacgtcacagtctcattacaagctgtgtggtgtgttagaagtggttgtcagcrtgtcattagctgcagacttggtggctcatagggcagcaataggacaggctgtcaaggctggatgctgacatcactaactggctcccaggttatgctcctcatctgctgagctcgtttcctgcttcttctcagctctgggcctctctcccacaccatggctgagtgtgccagggacacagctgcttgcctgatctgcaaggctcctgcagctgctctggcaccagggtcccagagcaggaaagatgctgcaggcccgtgctgctgtttgtgctgtgtttttccacagatgtgttgctacgt

SEQ ID NO: 15466 - DNA, 600 bp, Chicken  19866894221934_1
aatggcagctagcataattgctgaaaggctatatactggataaacttgcttagtgacaggtcagtaaaggttgatatagatgcagttcaatgttctttccatttggttgagtctagatgaattcctggtggatgcacagaattacatataatggtctcagagagttgctattacacacagtcctatactgactgatgcactgtagaaataatatgactgctcctgcaaaaatcagagaaggaaacatgtttaaatgagaaaatccgttgtaagttccaaagacataccattttaaagcaycaagttatgaggaaacattaaaaggctgaatcaactttaacaactgagaatcatttttatgatagccatagctagctatgaaaccttttctacaccctcacttaaatcatgatggtttttgtggtaattttcagttgtactaagaatatttttacaatgataagaaaaggaagcaataaataggcagacaatagttctgctttggacattttccatgagaagttttgaataatttgtaatttatattcacattaagatctgaagaggaaatttcagagattaaggtcagagaaagggaaa

SEQ ID NO: 15467 - DNA, 426 bp, Chicken  19866894221936_1
aaactcctgatattcagacaagagtgaacagacaaatattctctaaaacttgaggacaaaggaagaagcagcacataaaaatagagagagaaaaaagcagtcatcttcatagtaaaatgaggtataggcacaaagctctctggagttggagagacttgaccattaatttgttagggttgtgtataaaacctttactattgcagtgcacgtgctattgttgtgcacactcagtgcacactctgctgtgtggagttgccatctccttgttcctgcgctgaaggggactagaaaagccaacarcgcccaagattttagatacgcaatgagtttaggagagttggtttgctttcccctttgaggtttttaaggggaactgtttgcaacgtaagcagaaatgcactttgtgagctcaaattcctgaagtcg

SEQ ID NO: 15468 - DNA, 599 bp, Chicken  19866894221942_1
  misc_feature (1)..(269): n is any nucleotide
nnnnnnnnnnnnnnnnnnnnnnnnnnnnnnnnnnnnnnnnnnnnnnnnnnnnnnnnnnnnnnnnnnnnnnnnnnnnnnnnnnnnnnnnnnnnnnnnnnnnnnnnnnnnnnnnnnnnnnnnnnnnnnnnnnnnnnnnnnnnnnnnnnnnnnnnnnnnnnnnnnnnnnnnnnnnnnnnnnnnnnnnnnnnnnnnnnnnnnnnnnnnnnnnnnnnnnnnnnnnnnnnnnnnnnnnnnnnnnnnnnnnnnnnnnnnnnnnnnnnnnnnnnnnnctctggcccatggggtatgcgtttgatagtrgtaacatcccgcagagcttcgtcaaagggaaccacatcaggatggaaatgcagagatggcaggctgcgtgcagagctgctcagccggccttgctccttgctaggtgggggacacgagctccggatcagtgcatccacctccaaagtggagttcaggaaaggatttggctcctaagaaagcagaaacagccatgaaagactcttcactgacagttatggagcaaggacccacaagaatagagtagatccaattttggtcatctgcagacatttgttggccttcaccacctgtccagaggt

SEQ ID NO: 15469 - DNA, 562 bp, Chicken  19866894221942_2
aggaaaggatttggctcctaagaaagcagaaacagccatgaaagactcttcactgacagttatggagcaaggacccacaagaatagagtagatccaattttggtcatctgcagacatttgttggccttcaccacctgtccagaggtcagtattgctctagcatgcaatggaaagcccattccgcagtctcctccacactaagcattccagccacaaataacattgccaacagcagcattctgtctgaacacattctggcttggacgtataaccacctgaagatgccttgccaaccagcaygcaagtacaactttcttgttcgagaaagaaagctgccaggactcctcctgacagggaaaggactgctgtctggcagggtgccctacctgcttgctgtcttcatgccacgggggtccataaagcagtggtgatggaatagtcccatcttctggctgatcaagcaatgcacaatgtgggagcgggcattctgccactgcagcaggcgaatgagtgagcagttcaagttggcccccaggtctggggaccagttgtaggtgtaaag

SEQ ID NO: 15470 - DNA, 600 bp, Chicken  19866894221948_1
tatgattttccctcagagcttggtgatatgtctgtgctttttatgatgcgcaaaaatactgtttggagaagatatatagtcatctgcacactgaaaggcaaaaacatgaggaaaaaaggagttggttttctaatcattcaggagattgtctctctttattcatttgctgtacactcaactctgtaataatatttgttgttactgttctatgcagtattcagcaaggtagctcctgttttcagtcttaataaataagagacaaatgtgacatctgactttcacttactgtctgcactctayggatttcttttgaagcagatactttcctccaagctgcttcatttggatggggtgggagctagagtatggggtattttttttttgttcagtaaaggctttytacttttaagactaagcaaaatccctgtcaattgtattctgaggaattcatggttaggtattgtaagccctccttttaagttgtgcaaattattaaattattcttattgtaaattttgtacatytgcagttgctcagtggcttctgtaggagtagtgtgctcctgtgatttcttagggctgatgcaatgcttgtaactgt

SEQ ID NO: 15471 - DNA, 600 bp, Chicken  19866894221948_2
aaaacatgaggaaaaaaggagttggttttctaatcattcaggagattgtctctctttattcatttgctgtacactcaactctgtaataatatttgttgttactgttctatgcagtattcagcaaggtagctcctgttttcagtcttaataaataagagacaaatgtgacatctgactttcacttactgtctgcactctayggatttcttttgaagcagatactttcctccaagctgcttcatttggatggggtgggagctagagtatggggtattttttttttgttcagtaaaggctttytacttttaagactaagcaaaatccctgtcaattgtattctgaggaattcatggttaggtattgtaagccctccttttaagttgtgcaaattattaaattattcttattgtaaattttgtacatytgcagttgctcagtggcttctgtaggagtagtgtgctcctgtgatttcttagggctgatgcaatgcttgtaactgtctgtggactgggaatcaataatgggaaagggccaactattcccattgtaagttgagtttactcaaaagtttctgtgtgtacgtgtatatattagtattca

SEQ ID NO: 15472 - DNA, 600 bp, Chicken  19866894221948_3
ggtagctcctgttttcagtcttaataaataagagacaaatgtgacatctgactttcacttactgtctgcactctayggatttcttttgaagcagatactttcctccaagctgcttcatttggatggggtgggagctagagtatggggtattttttttttgttcagtaaaggctttytacttttaagactaagcaaaatccctgtcaattgtattctgaggaattcatggttaggtattgtaagccctccttttaagttgtgcaaattattaaattattcttattgtaaattttgtacatytgcagttgctcagtggcttctgtaggagtagtgtgctcctgtgatttcttagggctgatgcaatgcttgtaactgtctgtggactgggaatcaataatgggaaagggccaactattcccattgtaagttgagtttactcaaaagtttctgtgtgtacgtgtatatattagtattcatagtattcaaaaacaaactggaaatactctttgggaatgaaattcttgtttggggaaaatgttttcaggatgtaatgattaggttctaacttcagtatttgcaaactcttcatatcattgaatg

SEQ ID NO: 15473 - DNA, 600 bp, Chicken  19866894221951_1
atattctgtcattacctgtgctgtattggccatttcattacccattctcacctgttctcagaactttgcattctgaagtacatcattatcacttgcgtgcatttccgccatccaaaagtgtaagtacctctcttcagcattacactcaatccctcttaagacctcttttgtttaacttgcagccagttctatatatacacatctgaaaaaaatgggagagataagtctcttctagtacccctgtgaaggccaccagtgtgggcaatgaatatgcttctaatgacctctgtatccagtatygctgttaaaccggggaactggcttcagtaatcttgctttgctatttatcaccactgtctcacacttagtactgtggcagcacccaaatacagtgggttaatatgcaggctaaggtgagagaatttaacccagactttctattttgcataggcaattctagaccttatgtgagaaaagaaaaaggtrtatcttgtttatatacagataaagtgttaggttaatgggaattttcttgaatttcctctcaytgcaaagtgtcttaggtaagcagcatggagcttttaaagaagtgtattcatt

SEQ ID NO: 15474 - DNA, 600 bp, Chicken  19866894221951_2
ttctatatatacacatctgaaaaaaatgggagagataagtctcttctagtacccctgtgaaggccaccagtgtgggcaatgaatatgcttctaatgacctctgtatccagtatygctgttaaaccggggaactggcttcagtaatcttgctttgctatttatcaccactgtctcacacttagtactgtggcagcacccaaatacagtgggttaatatgcaggctaaggtgagagaatttaacccagactttctattttgcataggcaattctagaccttatgtgagaaaagaaaaaggtrtatcttgtttatatacagataaagtgttaggttaatgggaattttcttgaatttcctctcaytgcaaagtgtcttaggtaagcagcatggagcttttaaagaagtgtattcattgactgcaccacaagtgagctgctttggtttccagttgctggccactatctgtagccaaggtatggagatatcaacagattaatgatttctccctatggcctgagctgtttttmtactgttgctgttagatttgaccttgaagccaagactgactgtgtttgttgtttcttcctgttctttctgaat

SEQ ID NO: 15475 - DNA, 600 bp, Chicken  19866894221951_3
gccaccagtgtgggcaatgaatatgcttctaatgacctctgtatccagtatygctgttaaaccggggaactggcttcagtaatcttgctttgctatttatcaccactgtctcacacttagtactgtggcagcacccaaatacagtgggttaatatgcaggctaaggtgagagaatttaacccagactttctattttgcataggcaattctagaccttatgtgagaaaagaaaaaggtrtatcttgtttatatacagataaagtgttaggttaatgggaattttcttgaatttcctctcaytgcaaagtgtcttaggtaagcagcatggagcttttaaagaagtgtattcattgactgcaccacaagtgagctgctttggtttccagttgctggccactatctgtagccaaggtatggagatatcaacagattaatgatttctccctatggcctgagctgtttttmtactgttgctgttagatttgaccttgaagccaagactgactgtgtttgttgtttcttcctgttctttctgaatgctacctgcttgggttttgtgagcccacagcctactttcttatagcagttgacagaatttag

SEQ ID NO: 15476 - DNA, 600 bp, Chicken  19866894221951_4
gtgagagaatttaacccagactttctattttgcataggcaattctagaccttatgtgagaaaagaaaaaggtrtatcttgtttatatacagataaagtgttaggttaatgggaattttcttgaatttcctctcaytgcaaagtgtcttaggtaagcagcatggagcttttaaagaagtgtattcattgactgcaccacaagtgagctgctttggtttccagttgctggccactatctgtagccaaggtatggagatatcaacagattaatgatttctccctatggcctgagctgtttttmtactgttgctgttagatttgaccttgaagccaagactgactgtgtttgttgtttcttcctgttctttctgaatgctacctgcttgggttttgtgagcccacagcctactttcttatagcagttgacagaatttagctatgtttgctcccacttatcattccactctcaaaggctactaagaaccagccattttcgttatcttgcatttgttatggccctggctgcagcattccagttgtttggatgggggaaactcatacattgccaaacaactttgtacttttgtcctgatcttgctgt

SEQ ID NO: 15477 - DNA, 599 bp, Chicken  19866894221952_1
  misc_feature (1)..(141): n is any nucleotide
nnnnnnnnnnnnnnnnnnnnnnnnnnnnnnnnnnnnnnnnnnnnnnnnnnnnnnnnnnnnnnnnnnnnnnnnnnnnnnnnnnnnnnnnnnnnnnnnnnnnnnnnnnnnnnnnnnnnnnnnnnnnnnnnnnnnnnnnnnnnntttatttttaagtctacttaaggactttaaaaacttcaaagtattcagagttggagttaacctctttttggtatcttttgggtgtgctcttttttaatcttttgaagtttaggatcaaatgttaaagaacaaagtaacatcaggcctttgtaacagatmagtgttaaataaccagcccttctgaaaattgtaccaaatctgtctgtaactgttacctaacattagatacttgtgttatccacattatctcatgagcacaataaaaagctgraaatgtagcacaagcgttctgtactggtagacataccatctttaaattcttagtgcctttggagaatctgatgcctgttgtcgtacccccacgtattggtggaaaagagtaataacttttctctcatgacacagataaagctgtccgccagaaagctacaagtccaaaggcttcttgcaaaacagat

SEQ ID NO: 15478 - DNA, 592 bp, Chicken  19866894221952_2
  misc_feature (1)..(29): n is any nucleotide
nnnnnnnnnnnnnnnnnnnnnnnnnnnnntttatttttaagtctacttaaggactttaaaaacttcaaagtattcagagttggagttaacctctttttggtatcttttgggtgtgctcttttttaatcttttgaagtttaggatcaaatgttaaagaacaaagtaacatcaggcctttgtaacagatmagtgttaaataaccagcccttctgaaaattgtaccaaatctgtctgtaactgttacctaacattagatacttgtgttatccacattatctcatgagcacaataaaaagctgraaatgtagcacaagcgttctgtactggtagacataccatctttaaattcttagtgcctttggagaatctgatgcctgttgtcgtacccccacgtattggtggaaaagagtaataacttttctctcatgacacagataaagctgtccgccagaaagctacaagtccaaaggcttcttgcaaaacagataaagggacatgtgtaaataaacagaaatcggtgagtctcactgcttccatttgttaagcatctttattttagaatacacgaaatgataatttcctatttctctaa

SEQ ID NO: 15479 - DNA, 599 bp, Chicken  19866894221953_1
  misc_feature (1)..(33): n is any nucleotide
nnnnnnnnnnnnnnnnnnnnnnnnnnnnnnnnnagctgcagctttacgaacacttttaggctgcaaccttgtgtggctttgaggaggctgtgaggctgaacctgtggatgatgagcagggttcaattctgtcacacgaagaaagccatgaaccactgaaactgtgtttaaagtgatctttggagtggtctccaccacagctgttctgctcctggttcatttcaaagtcatcctcatttcctctcctttaaggcaccgctttgtttctttccccttggaaactaaagagtgaaaactttcstatttgggatggcattaaaaaaaaaaaaaaaagaatggcaaataaagacattttaattgcatgggatttctgaataagatttcaaaatagggggaaaaagtagctacgtgcctggtacacagtgagccctttctcttcccctttgtggcagaggaatcagtggaattcatataaaagcaggagggggtgggaagagagataggagatgccttgcttggtaccagcaggtcacaagcctcatgagkctggggcagtgcttggaaggcagttgccggctctatctccatgtgtaccttttt

SEQ ID NO: 15480 - DNA, 534 bp, Chicken  19866894221953_2
tttaaggcaccgctttgtttctttccccttggaaactaaagagtgaaaactttcstatttgggatggcattaaaaaaaaaaaaaaaagaatggcaaataaagacattttaattgcatgggatttctgaataagatttcaaaatagggggaaaaagtagctacgtgcctggtacacagtgagccctttctcttcccctttgtggcagaggaatcagtggaattcatataaaagcaggagggggtgggaagagagataggagatgccttgcttggtaccagcaggtcacaagcctcatgagkctggggcagtgcttggaaggcagttgccggctctatctccatgtgtacctttttgttccttgccttggatttgctggtcagtggcatgctgctttgcctggctctctatagagctcgtagcctacaggaatttggacagagtggtacagacatcgccgacagagactctgatcactgactatccctttaaatgcagtctcatgacttaatctttactccactacctattaaaga

SEQ ID NO: 15481 - DNA, 599 bp, Chicken  19866894221954_1
  misc_feature (1)..(240): n is any nucleotide
nnnnnnnnnnnnnnnnnnnnnnnnnnnnnnnnnnnnnnnnnnnnnnnnnnnnnnnnnnnnnnnnnnnnnnnnnnnnnnnnnnnnnnnnnnnnnnnnnnnnnnnnnnnnnnnnnnnnnnnnnnnnnnnnnnnnnnnnnnnnnnnnnnnnnnnnnnnnnnnnnnnnnnnnnnnnnnnnnnnnnnnnnnnnnnnnnnnnnnnnnnnnnnnnnnnnnnnnnnnnnnnnnnnnnnnnnnnnnnnnctctacccctccgccctggacctgaggcccccgagggtggcagggctctgatgcaaagcygaacagattccccctgcagaggaggtgagttgaccgaggggctgcacctgcacccccagctgccacctgcacccccagggctgctccagccctgctcagccactggcaggagctggcacgtgggtgaaatgttactgctccacgtgcacgtatcagtttgggaatttccttgtaattaatcccatgtatcagctcctctcattatttcttaatgcaattaaattattaatttctgtcttttttttttttaattattttctctctctctctttttttttccctccctttccaaagcaaag

SEQ ID NO: 15482 - DNA, 600 bp, Chicken  19866894221955_1
cacagggacaatgccctcattaatgtgctttaacttttgcttagtcctgaagtggtcaggtagttggacttgatctctgaaggtctcttttgacagaactgtcctattctgttctacacacaatcagcaacatcttacctagtcctgtgctaaagaaaaagaggagagatgacaaacagagttcatttaggaagagatgagaaatcagaagacctggctgccataagggatgtgctgggatcaggctttgccaatcactaccagaccccttgactccctgtgacaacagtggatgatacrggcacccacccaaacaaggagattatccagcagctcccacacatcaagctgagagtgccaacatttgctttcaatatataggaaagccaagcaaataagccttaatgcttagtactaaaaacaatggaagtcactgccctgaaatctcagtggtgctctcctgcaattatttcaagcaaggcccatcttatttgcctgtttttgtattcaacaaggggagatgaatttatctgctgcctgtgatgtcagcttaagaggtctgtttaggacactgtcataattcttgtctttcttttttgc

SEQ ID NO: 15483 - DNA, 600 bp, Chicken  19866894221955_2
cttagtactaaaaacaatggaagtcactgccctgaaatctcagtggtgctctcctgcaattatttcaagcaaggcccatcttatttgcctgtttttgtattcaacaaggggagatgaatttatctgctgcctgtgatgtcagcttaagaggtctgtttaggacactgtcataattcttgtctttcttttttgctaatggctgcatgcctttgattaaaacctgcatggtgcattaaaggctaaaacagatgatgaatgccatgtagtactttgtgttagatcagagttgattagaatttytgacgatccagcagctagaagaggaaactgcttaagtagtgaaaatactcggctgttactgttgtaggaggcagtggcttttgtttgacatgagatacaaaacagtaaccaaatggacaatgtactctcttggtcagtgaatggctttattatcacaaaagagttctgtaaagaaaagctggtgaattaattagtccaaatatttgtaagacttcttgcttgttttcaagtgggcagccctcccccaccaacaccacagtttcagagctggatgccagttagtttatttttcatcaccgc

SEQ ID NO: 15484 - DNA, 599 bp, Chicken  19866894221956_1
  misc_feature (1)..(30): n is any nucleotide
nnnnnnnnnnnnnnnnnnnnnnnnnnnnnntcaaaaaaagaaatcatttaattgctggaaaactgattacgtgaaaaaaaatttgaaagccaatgcagtttcagaggaaaaaaaaaaaaaaacaatctataataaatggtttaaacctacaaactggttgaatcatggtaatatcactgagaaaactgcttattctggataggtgaatctttcctgagctcaacttgctataaatgagtacagctccacgccatgaaaccatagtgatatataactattactttcaaattatattctgamaaaaatatgtttcaagtgtattttgacaggggtatgtatttaagccccagtttcaatgaattcaaatatcataaccaagaacaaacacacacatacgaaaaaaagcccaagaaagggaggttgttttggagacaccaatctactgctaaaatagcaaattccaaagagggaacgttagatcatactcttctcaagatttttcttcagcattgagcaaattttaaggacaaaattattggggtccctttggatctgaattctgctgcgtttttagtaacgccatgttccaaaggcaagca

SEQ ID NO: 15485 - DNA, 600 bp, Chicken  19866894221961_1
agacctaagaaaaattctgttctatttatagcaagggctccagagcaagctctgcttttttatatgaagcagcaaaattacaactgcagaacaagcactttgtgggatctatggcacttggcaggagacagaaactggttcaaggccaaagatataacaccaaaggtgctgctgttgaggacaaaaggcagaaagtaaaaggaactaagaagtgtcaaagaactggtagcctccaaaagctaatttaatcaaaagaatggagacaaaagtgatgatgaaaatgaagttaaaataggcagycacagggacaggatttcagsataaacaacagacaacaaaacaggcatgcagcatactcccagcagcaagcaaacaaaattctcctgggctagctgtatattctgcatacagatgagggatgctgcactataaaattctgtttttcaggtgttgtttttcctgaaatgacatgctaatgaaatggctgggctgtaagtgagtctgaaattgtagaggtcacagcctgtatgcatacagcaaaggtcattctgctttcaccacacctcagatgtcaaaagcgggacagaaagaccatgaaat

SEQ ID NO: 15486 - DNA, 600 bp, Chicken  19866894221961_2
tctatttatagcaagggctccagagcaagctctgcttttttatatgaagcagcaaaattacaactgcagaacaagcactttgtgggatctatggcacttggcaggagacagaaactggttcaaggccaaagatataacaccaaaggtgctgctgttgaggacaaaaggcagaaagtaaaaggaactaagaagtgtcaaagaactggtagcctccaaaagctaatttaatcaaaagaatggagacaaaagtgatgatgaaaatgaagttaaaataggcagycacagggacaggatttcagsataaacaacagacaacaaaacaggcatgcagcatactcccagcagcaagcaaacaaaattctcctgggctagctgtatattctgcatacagatgagggatgctgcactataaaattctgtttttcaggtgttgtttttcctgaaatgacatgctaatgaaatggctgggctgtaagtgagtctgaaattgtagaggtcacagcctgtatgcatacagcaaaggtcattctgctttcaccacacctcagatgtcaaaagcgggacagaaagaccatgaaatagctagatggacaggaaccc

SEQ ID NO: 15487 - DNA, 600 bp, Chicken  19866894221968_1
ttcttttgatcctggtaatgatctgaaataccacatttctcctttatgcctgtgaaatcccagtacaggggtccctgaagagcagtgctatgttagaacatcctcttcagggtcccctttggagcagaggaggggcataggattatcaacactcagcatcaccagacaaccttcacacctgctgtcaaatggtgagaaaagtttggaaaacttctttaaatttttgataactaaattactctgcaagaaaagccttttttcctctgtgccatgtctagatggaatattccctctcctccyctccgtgatatctacatgggatttttttctcctccatgawatctagatgggatctttttgggttccccataatcctctggactattcaacttcagaacagagagaactccttgaaataactctyccacttatacatatgtgtctgcattgggtttggggagagttctcagcctccctggatgagggatttgcttgcctatggggatcaaccctccaagatccaagcctagcagacatctctctggcagcaccatggtctggatgctcactcatcctaccaacacggggaacatctgctgc

SEQ ID NO: 15488 - DNA, 600 bp, Chicken  19866894221968_2
cctttatgcctgtgaaatcccagtacaggggtccctgaagagcagtgctatgttagaacatcctcttcagggtcccctttggagcagaggaggggcataggattatcaacactcagcatcaccagacaaccttcacacctgctgtcaaatggtgagaaaagtttggaaaacttctttaaatttttgataactaaattactctgcaagaaaagccttttttcctctgtgccatgtctagatggaatattccctctcctccyctccgtgatatctacatgggatttttttctcctccatgawatctagatgggatctttttgggttccccataatcctctggactattcaacttcagaacagagagaactccttgaaataactctyccacttatacatatgtgtctgcattgggtttggggagagttctcagcctccctggatgagggatttgcttgcctatggggatcaaccctccaagatccaagcctagcagacatctctctggcagcaccatggtctggatgctcactcatcctaccaacacggggaacatctgctgcaaacgtgtcccatccttacaagtgctttactgtgtgtgaa

SEQ ID NO: 15489 - DNA, 600 bp, Chicken  19866894221968_3
cagaggaggggcataggattatcaacactcagcatcaccagacaaccttcacacctgctgtcaaatggtgagaaaagtttggaaaacttctttaaatttttgataactaaattactctgcaagaaaagccttttttcctctgtgccatgtctagatggaatattccctctcctccyctccgtgatatctacatgggatttttttctcctccatgawatctagatgggatctttttgggttccccataatcctctggactattcaacttcagaacagagagaactccttgaaataactctyccacttatacatatgtgtctgcattgggtttggggagagttctcagcctccctggatgagggatttgcttgcctatggggatcaaccctccaagatccaagcctagcagacatctctctggcagcaccatggtctggatgctcactcatcctaccaacacggggaacatctgctgcaaacgtgtcccatccttacaagtgctttactgtgtgtgaattgtggagaggggaagggcatggtctgtgtgggcagtggctgggtcatggagccaaattttcccagcatgaaacagtaatccag

SEQ ID NO: 15490 - DNA, 600 bp, Chicken  19866894221968_4
tggtctggatgctcactcatcctaccaacacggggaacatctgctgcaaacgtgtcccatccttacaagtgctttactgtgtgtgaattgtggagaggggaagggcatggtctgtgtgggcagtggctgggtcatggagccaaattttcccagcatgaaacagtaatccagcagggcagatggctgtacaggcagctttctttgggggaaattcctgttgaaggcaatccttatttacacctgcgtgagtcagaggagcatctgctctgcgagctgcctctttgccaagcctgaagtcaytgygtgagcatgggaagcctcagactcrccaccacccatcccagagccatgctccaaaaccccataagaggacactcctgggtctccccaccgacacctcagggttggaaaccacatcacagctctcrgagaggagctctgggcaaggtggtttcccactggggcatacccccaagctgccagccaggaggacactgctgcctttgctccctgcacaccgggctgcaacccatcaaatggctacatctaaagggccaaatcctgctatttttttattgacgttgttgtagtgcttttatt

SEQ ID NO: 15491 - DNA, 600 bp, Chicken  19866894221968_5
tctggatgctcactcatcctaccaacacggggaacatctgctgcaaacgtgtcccatccttacaagtgctttactgtgtgtgaattgtggagaggggaagggcatggtctgtgtgggcagtggctgggtcatggagccaaattttcccagcatgaaacagtaatccagcagggcagatggctgtacaggcagctttctttgggggaaattcctgttgaaggcaatccttatttacacctgcgtgagtcagaggagcatctgctctgcgagctgcctctttgccaagcctgaagtcaytgygtgagcatgggaagcctcagactcrccaccacccatcccagagccatgctccaaaaccccataagaggacactcctgggtctccccaccgacacctcagggttggaaaccacatcacagctctcrgagaggagctctgggcaaggtggtttcccactggggcatacccccaagctgccagccaggaggacactgctgcctttgctccctgcacaccgggctgcaacccatcaaatggctacatctaaagggccaaatcctgctatttttttattgacgttgttgtagtgcttttattgga

SEQ ID NO: 15492 - DNA, 600 bp, Chicken  19866894221968_6
cacggggaacatctgctgcaaacgtgtcccatccttacaagtgctttactgtgtgtgaattgtggagaggggaagggcatggtctgtgtgggcagtggctgggtcatggagccaaattttcccagcatgaaacagtaatccagcagggcagatggctgtacaggcagctttctttgggggaaattcctgttgaaggcaatccttatttacacctgcgtgagtcagaggagcatctgctctgcgagctgcctctttgccaagcctgaagtcaytgygtgagcatgggaagcctcagactcrccaccacccatcccagagccatgctccaaaaccccataagaggacactcctgggtctccccaccgacacctcagggttggaaaccacatcacagctctcrgagaggagctctgggcaaggtggtttcccactggggcatacccccaagctgccagccaggaggacactgctgcctttgctccctgcacaccgggctgcaacccatcaaatggctacatctaaagggccaaatcctgctatttttttattgacgttgttgtagtgcttttattggagatattccatctccattgaattcag

SEQ ID NO: 15493 - DNA, 600 bp, Chicken  19866894221968_7
gggtcatggagccaaattttcccagcatgaaacagtaatccagcagggcagatggctgtacaggcagctttctttgggggaaattcctgttgaaggcaatccttatttacacctgcgtgagtcagaggagcatctgctctgcgagctgcctctttgccaagcctgaagtcaytgygtgagcatgggaagcctcagactcrccaccacccatcccagagccatgctccaaaaccccataagaggacactcctgggtctccccaccgacacctcagggttggaaaccacatcacagctctcrgagaggagctctgggcaaggtggtttcccactggggcatacccccaagctgccagccaggaggacactgctgcctttgctccctgcacaccgggctgcaacccatcaaatggctacatctaaagggccaaatcctgctatttttttattgacgttgttgtagtgcttttattggagatattccatctccattgaattcagtattgtgaacacaaagaaaccctacttaatttgatggggaaaatcctttgataaagatggttttgctccagttttacgacaataactgcaaactcagtat

SEQ ID NO: 15494 - DNA, 600 bp, Chicken  19866894221968_8
aagaaaccctacttaatttgatggggaaaatcctttgataaagatggttttgctccagttttacgacaataactgcaaactcagtatgaatgaaaggaaaagtaatttatattcctggccagcttttcttccccagctcctgcccagcacaatttcatatctataatgctcttctgcagctgtgggaaataacagagaaacccactccaaggtaacaatgatattggctgcacagagctagattttaaaatgaagaaattagactggcactcttttgtagcgcaatataaagaaacagcmtgaactttctccaaaaataaattagcctgttaaggtgttgagaaataaacataactcatttggccatggaaagaataatgaaacagggtttgctcccagtcagacttcccgattgcaggttgcattccaaaaagaaaacccaaaataaagcaacaaagaataacattgccatgccaagtccttcgtgttttacagagcgttatcttcctttcttgaagggtgcactgggagaaaggtacacttaaaacagactattttggagagaatttgtgatgctctagaagaccaaagagatcttca

SEQ ID NO: 15495 - DNA, 600 bp, Chicken  19866894221971_1
tgaaacttgtgaaaatgaaaagcagcagcaaaaaatccttaaaaattttaaacacttttggctatttgtgttgtatcagatgaaccaagtagtttttagtacttctttgccagcacttgtagacatttctacattcacgtctcagagatattattaagaacaacaattcactggctgtgaacatttagcagaaacctaacttttcagaagcagtgagtgtatactcagagctttgttcacaccagcaggaactggcagcacaaggatgacattgaaaactgctggctgaagaggaaaaaygtgaaccaagtacctatgctactttgttaaagcaacatcagtgattaatttttcacaccttccattttagctagattttaatctgataatacagaggacarataaaaccagttagcatgtttagtactaaggtccctgtctactgaacacgcacactgggaaagtgcaaatgctggggtgatatttctgatgttcattttgcagctgctgtgaaaagcacgaggaaggaaatgttcttgccatacagacagcttaggaaaaacaggaatatcactatttataggaaatttctcagggaac

SEQ ID NO: 15496 - DNA, 600 bp, Chicken  19866894221971_2
cttctttgccagcacttgtagacatttctacattcacgtctcagagatattattaagaacaacaattcactggctgtgaacatttagcagaaacctaacttttcagaagcagtgagtgtatactcagagctttgttcacaccagcaggaactggcagcacaaggatgacattgaaaactgctggctgaagaggaaaaaygtgaaccaagtacctatgctactttgttaaagcaacatcagtgattaatttttcacaccttccattttagctagattttaatctgataatacagaggacarataaaaccagttagcatgtttagtactaaggtccctgtctactgaacacgcacactgggaaagtgcaaatgctggggtgatatttctgatgttcattttgcagctgctgtgaaaagcacgaggaaggaaatgttcttgccatacagacagcttaggaaaaacaggaatatcactatttataggaaatttctcagggaacagatgtatgcccttctgtagctcccctgctttagctataatgcaatttgttgccaggttgaatactccattgccaatgaggctgaaacagaaactccttcc

SEQ ID NO: 15497 - DNA, 600 bp, Chicken  19866894221971_3
tgcagctgctgtgaaaagcacgaggaaggaaatgttcttgccatacagacagcttaggaaaaacaggaatatcactatttataggaaatttctcagggaacagatgtatgcccttctgtagctcccctgctttagctataatgcaatttgttgccaggttgaatactccattgccaatgaggctgaaacagaaactccttccactaacttatctgcttaaacatcagtgccatcttactgaaaactcatgctcccaaagcctagaaataccctcacggtgcatcacaaacttaggaatayaactttgaaatgagagtactttaattgtataaatctatatcaatacccagctctttaagatacagaaaaactgaactgcttttgacaaacaaccactgctgtgattttccccattgttttattggatttaatcacctggaattagccattgcaaattgctgagaggcaagcagggaagctcctaggtttctgaagaacagttagtagctgacagaactgtagctcttcagctgcttgcagcatagctgaaccctccctaaccagctgttactacttcttttacaaacaggcatgaaatag

SEQ ID NO: 15498 - DNA, 600 bp, Chicken  19866894221975_1
ttttaaagttcataaagaggacaggaaacactaagggctacgtctgtgaaattaccgagctgttgacacaggcaatagtagctaatttcacaagaaaaggttaagtgcacactacagaatttttgtagcaatatgcatttaactatcactgaaggctgaaattataatttgccgcgaggttataaacttagcaggaggataccactgattttaaggtgtgtgcccactccctttcacatgttagcacagaacagcctaaaacttggaaggcaaaacaaaattttgaaaagcttacagaawtttttccacaattaagctattcctataaagaaaaaaactaaaagttggggatgaataaggatatttaggaaaatgtgagatgtgtgtgctattccatattccagaaagaacacaatatgctacatcaaaaaaaggagtcatctcccaaaataccaggaakaagcagaatgaattcacctggatttatgacattaattaattttgagcagaaagagagatcagatcttagtcctgaagttctcatcacccaaagtctgcagtgccttccaagaaaaatttgcttgggtgtcaactacagga

SEQ ID NO: 15499 - DNA, 600 bp, Chicken  19866894221975_2
attataatttgccgcgaggttataaacttagcaggaggataccactgattttaaggtgtgtgcccactccctttcacatgttagcacagaacagcctaaaacttggaaggcaaaacaaaattttgaaaagcttacagaawtttttccacaattaagctattcctataaagaaaaaaactaaaagttggggatgaataaggatatttaggaaaatgtgagatgtgtgtgctattccatattccagaaagaacacaatatgctacatcaaaaaaaggagtcatctcccaaaataccaggaakaagcagaatgaattcacctggatttatgacattaattaattttgagcagaaagagagatcagatcttagtcctgaagttctcatcacccaaagtctgcagtgccttccaagaaaaatttgcttgggtgtcaactacaggaatgttccttgatctgtttggacattagtgtgccattaatcataattgctctgtaagataattaatgatgacatgcattttttatttccttacatggcacatctaataaaagaaccaagctgaaaaattagtcatagcaattaactaggggatgattcctg

SEQ ID NO: 15500 - DNA, 600 bp, Chicken  19866894221977_1
tactcttaagaatacctgagcttatgcatagtttggaagctggagtacaaactgagcaaatttccctcttgaattccctgatgaagacttagcctacaagcaattattttacacacagtctttcctatgtaaacttgcaatctagtacttgaaacctcttacctatagcacactgcttgcctatagcgactacacaaaaaccatcagccactgcatatgtaataatagcaacaatagcaataatagctgcaacccggaaagtagcttggttgttcagtttgtttttgaggggggactgayagtctgtttggagctgttgccaaaggggccttggtttaagagctacgtagcagagactgagtgcaaagtagtctggttttcccrttctctttggattctgcagcatggttagcactgggtgcaagctctggttttcagagaagtctaaacatgtacatgttgcttgtaggatgggtgtgtttccagttagtcataccaactcaataaaataaaagacaaaccgactaagcacccaaagccacacgcaggaagaagctggttatggcaggtgacaccggcacaccaactgagggctgtgag

SEQ ID NO: 15501 - DNA, 600 bp, Chicken  19866894221977_2
agacttagcctacaagcaattattttacacacagtctttcctatgtaaacttgcaatctagtacttgaaacctcttacctatagcacactgcttgcctatagcgactacacaaaaaccatcagccactgcatatgtaataatagcaacaatagcaataatagctgcaacccggaaagtagcttggttgttcagtttgtttttgaggggggactgayagtctgtttggagctgttgccaaaggggccttggtttaagagctacgtagcagagactgagtgcaaagtagtctggttttcccrttctctttggattctgcagcatggttagcactgggtgcaagctctggttttcagagaagtctaaacatgtacatgttgcttgtaggatgggtgtgtttccagttagtcataccaactcaataaaataaaagacaaaccgactaagcacccaaagccacacgcaggaagaagctggttatggcaggtgacaccggcacaccaactgagggctgtgagcagtctctgagcagctcatgctcggagaggtgccagtgattcctctggaatccagagtgctgcctcatggccactgcagaacac

SEQ ID NO: 15502 - DNA, 600 bp, Chicken  19866894221983_1
ggaataattgtgatcagcagtcagacagctactgctcctttctgcatctttcagtcaccttgatgacacttctgagataaaagcagcgagtaattgggcgaaagattcgtaattattttttcatcttaccataatgcctgcagcaagcatctattattgcagttatattcaccagggttcagaaatctctcgtccaagcagggaagagagagctccagggtgactactttccttggattgatagggaggaacttgttctccatcgctacaaaagctaatgatctaactactcttttatcragctttctgattttgtagcctaaagataggtgcctaaaagcagaacccacgttctgctccactgttttgcattgctctgatgggttagcgattacagtttcacctcatattgttaaatgaactgttgtgtgtgtggcagtttgactttttctaacaacagcacttatggaaaacagcatttgtgggaatcagcatttgtgaaaatcagccttcagagaataaaatccagaaggatctttattactaacatttgcttaaaaagatgttcaaaacatgcttttttttaataattagctcttt

SEQ ID NO: 15503 - DNA, 463 bp, Chicken  19866894221995_1
atagtgtgggtcctgggagctggtggcaattattatggtggcaatatggtgagagcagagatgggagggcgtgcaggaaggagacatgggaaaccctcacagccaaagtgctgctgatgtgggcagagcccccatcccacagagcccagcttggagcagccacacctgctacagaacactgataatgaaacagccactccagaacctgtgatggcagagctgcagcttacaaggtagaaaagcaaactgctgtgtgctgtaccagctgccctgtcaaggaaatgggtcctgatgtacacygagctgtatgattttcctgcaakgaaacccctcggctgagtcctgggggggtccgtggggacaaaccacgagagcaacaaaccaagcaggctgtggtcagtccaagcacaggggcacacccggctcaccccacgggcagtgcagtctgataagcacagcccag

SEQ ID NO: 15504 - DNA, 440 bp, Chicken  19866894221995_2
tggcaattattatggtggcaatatggtgagagcagagatgggagggcgtgcaggaaggagacatgggaaaccctcacagccaaagtgctgctgatgtgggcagagcccccatcccacagagcccagcttggagcagccacacctgctacagaacactgataatgaaacagccactccagaacctgtgatggcagagctgcagcttacaaggtagaaaagcaaactgctgtgtgctgtaccagctgccctgtcaaggaaatgggtcctgatgtacacygagctgtatgattttcctgcaakgaaacccctcggctgagtcctgggggggtccgtggggacaaaccacgagagcaacaaaccaagcaggctgtggtcagtccaagcacaggggcacacccggctcaccccacgggcagtgcagtctgataagcacagcccag

SEQ ID NO: 15505 - DNA, 599 bp, Chicken  19866894221997_1
  misc_feature (1)..(14): n is any nucleotide
nnnnnnnnnnnnnntagatttaacaaaaaaagtatttattgcaaatgaaatcaaccacttctgtaggaggaaacaaactccctctaataccctattggcaatccaatcttatcaaaacccaagatgctctatcaggcttttgttagccaacaggaaagatgatcattagttaagacatgatccttctaataatccatcctcatttcttaacactgactgcttctcttatcttggaaattcttctctgtaaaatacttctctccttccatgacagacaattgttgatgaaggcaagttaaytgcttaracacatattatgctaacacttcatattctctttgactctagtaacagctgagagtctcatttatagccttgtcttctccctattatcaaccacagggaatgtcttacctgcattcaagcaaaacagaagtccatggtcggctcaaatccacgaactgtgtagtggacaatcgcatggttgtgaagatcactgattttggctgtaattcaattctgcctcaaaggaaaggtaaaaacaatatccagttagactgtccctcatgctttccaacccagtggaattttcttacatt

SEQ ID NO: 15506 - DNA, 599 bp, Chicken  19866894221997_2
  misc_feature (1)..(7): n is any nucleotide
nnnnnnntagatttaacaaaaaaagtatttattgcaaatgaaatcaaccacttctgtaggaggaaacaaactccctctaataccctattggcaatccaatcttatcaaaacccaagatgctctatcaggcttttgttagccaacaggaaagatgatcattagttaagacatgatccttctaataatccatcctcatttcttaacactgactgcttctcttatcttggaaattcttctctgtaaaatacttctctccttccatgacagacaattgttgatgaaggcaagttaaytgcttaracacatattatgctaacacttcatattctctttgactctagtaacagctgagagtctcatttatagccttgtcttctccctattatcaaccacagggaatgtcttacctgcattcaagcaaaacagaagtccatggtcggctcaaatccacgaactgtgtagtggacaatcgcatggttgtgaagatcactgattttggctgtaattcaattctgcctcaaaggaaaggtaaaaacaatatccagttagactgtccctcatgctttccaacccagtggaattttcttacattcatagta

SEQ ID NO: 15507 - DNA, 600 bp, Chicken  19866894221997_3
aaattactaagaagcagagaaagaaattaggcagtgtcggtgagaaggaaactgaagataaatttttaaattgtatttggagaagcaaggagaattcccttgtgactgaggtgcagtaaatattttcatgatccaagggctttgtgaaaatatctcgcatagggcttcatgcaaaaagttccataagcagtaatggtggacttgtgtgcagaaagaaggagttaagtaccagtgggcacttgtcttgtcattgctcagttatatgtgttatcacagtgctgtgtaatttaatttaatcayccttaaaatcattcttaaaaattagtaatgatatgtaatgataaaaatgtttttcattcttttggtaggaatataacaatatctgttcaatgagctcaggttagttttcacagcttttgtttacattttttatttcatctaataatcataggacaattctgtagaacagagcattcctttctacatatcttctcctttcttcttgatcttgagtgcaaagataagcccttctgaaattatgtcatctgaatctgtttaggggagtttggagtttaacaagcacaagactgtactgtaact

SEQ ID NO: 15508 - DNA, 600 bp, Chicken  19866894221997_4
aaattgacattgagacacaaacaatgtcaagagtagcaatgagaacataagaagagtaagaaatgtgcactgaatgaaaatgttctgttaattcattattttgcacgttacacttaaatttatattatgattggattttaatgaatttatcttcttacgctgctcttaaatactttggcaatcagcttcaaaatttctggcccctaggcttccttgcttgaagaaaacttattgcttcacaagatacctacagattcattgtggctggatattgcagcctgatatcataacactgttttsagggtcactatctgtctgttatggtacatcakcagcatgtcatataaaacggtcataccatggccatattctagttctgagatacagcagggcttggtgacctagaagtacagaataataatttctctagaaagaaagtggttacgcaaggtagtatttatgtcaagctcaaaagcacttggagattacttctatagagttgtgataccaaggctaccaggaaatattacagccttctcatatgacatcttgaataacacatttcatgcatctggttcaagaatttatgcctctgcattt

SEQ ID NO: 15509 - DNA, 600 bp, Chicken  19866894221997_5
gtagcaatgagaacataagaagagtaagaaatgtgcactgaatgaaaatgttctgttaattcattattttgcacgttacacttaaatttatattatgattggattttaatgaatttatcttcttacgctgctcttaaatactttggcaatcagcttcaaaatttctggcccctaggcttccttgcttgaagaaaacttattgcttcacaagatacctacagattcattgtggctggatattgcagcctgatatcataacactgttttsagggtcactatctgtctgttatggtacatcakcagcatgtcatataaaacggtcataccatggccatattctagttctgagatacagcagggcttggtgacctagaagtacagaataataatttctctagaaagaaagtggttacgcaaggtagtatttatgtcaagctcaaaagcacttggagattacttctatagagttgtgataccaaggctaccaggaaatattacagccttctcatatgacatcttgaataacacatttcatgcatctggttcaagaatttatgcctctgcattttttwatttttatttttattttttcatagcact

SEQ ID NO: 15510 - DNA, 600 bp, Chicken  19866894221997_6
tcactatctgtctgttatggtacatcakcagcatgtcatataaaacggtcataccatggccatattctagttctgagatacagcagggcttggtgacctagaagtacagaataataatttctctagaaagaaagtggttacgcaaggtagtatttatgtcaagctcaaaagcacttggagattacttctatagagttgtgataccaaggctaccaggaaatattacagccttctcatatgacatcttgaataacacatttcatgcatctggttcaagaatttatgcctctgcattttttwatttttatttttattttttcatagcactggcattccttcgtcttatacagatgcaggggctatttctaagaggtccatgtgaggtagctcggagaagcaagttcactgccaacaaatgcaacttttatggaggtgtgagggtctgcaccaacagtgaaaaatagtagttatcaaatcccagacaattgccgactaccacatcatagttttatctaaccagcattgatctcaccttctccaaataactactgaaggaggaaataaacagtaccagtgagctccatgtttggtatgaaaaga

SEQ ID NO: 15511 - DNA, 463 bp, Chicken  19866894222005_1
acaattttcaattctcttttgtatctgcaactcatcttaggtttcagcaccctacttagggaaggcagaaatacaaggcagtaggtttactgagtcagtggtttccattagtactgtatgctttgctatttacttgtgacggtggagtatgaatgggaatttgaactattccttgatttctccatcttcttggtaagctgaaggaaagaactatggagaagttgtagtagttagaatgagtgactgaaatgcagaacactgaaaaaggaaatgtaaacacaagttttgtggtataaaagmtacctgttttctggtttgtgtgcactacaatgcatagcacrggcatggttagtttattaggatcaaatgaggtctaaaatatatatggctgaagaaatttgtgcattcaggggaacaaatggaactttagcttttgatttaaattatattcagatttggctga

SEQ ID NO: 15512 - DNA, 422 bp, Chicken  19866894222005_2
tttcagcaccctacttagggaaggcagaaatacaaggcagtaggtttactgagtcagtggtttccattagtactgtatgctttgctatttacttgtgacggtggagtatgaatgggaatttgaactattccttgatttctccatcttcttggtaagctgaaggaaagaactatggagaagttgtagtagttagaatgagtgactgaaatgcagaacactgaaaaaggaaatgtaaacacaagttttgtggtataaaagmtacctgttttctggtttgtgtgcactacaatgcatagcacrggcatggttagtttattaggatcaaatgaggtctaaaatatatatggctgaagaaatttgtgcattcaggggaacaaatggaactttagcttttgatttaaattatattcagatttggctga

SEQ ID NO: 15513 - DNA, 600 bp, Chicken  19866894222011_1
ggtgtgaatgccaacttgtttatttgcatcttcttacgtgcacatgaaagcttgcagtgctaaatatgctgcaagagggtcacggtgatgtattcccactttggattcttccattgcaattgggaatttgccctaaacaaaacgtagggctttggggaatcctgcttttctccattctatcctaagcaatgtgtgtttgccttgtgtatgtgagtggctgggttaattggcacgtcccagccgaggtaatgggggcagctcggggttgggggggttcctcctttagcaccaagtgactcmaaccacagtccagcaataacagagctatttaattaaaaaagatgtgtgcagcattaaagggactgtgttatacagggtgtcgtgtgggggttgagtgatctccagggttggggaggaagatctgttagggcrttttaaaggtatgttgaagtcagtatgatgcgtcaggatgcagttagatgggaatgcatggaggaccctgataaggactgctctgcccttctcctctgctcagttctgccccatcgcagatcccaacgtcaatggggacggttcattccacgaatgggactttccttg

SEQ ID NO: 15514 - DNA, 471 bp, Chicken  19866894222011_2
ctaaacaaaacgtagggctttggggaatcctgcttttctccattctatcctaagcaatgtgtgtttgccttgtgtatgtgagtggctgggttaattggcacgtcccagccgaggtaatgggggcagctcggggttgggggggttcctcctttagcaccaagtgactcmaaccacagtccagcaataacagagctatttaattaaaaaagatgtgtgcagcattaaagggactgtgttatacagggtgtcgtgtgggggttgagtgatctccagggttggggaggaagatctgttagggcrttttaaaggtatgttgaagtcagtatgatgcgtcaggatgcagttagatgggaatgcatggaggaccctgataaggactgctctgcccttctcctctgctcagttctgccccatcgcagatcccaacgtcaatggggacggttcattccacgaatgggactttccttgagt

SEQ ID NO: 15515 - DNA, 600 bp, Chicken  19866894222013_1
catgtcaatgccacaataatgataaaatctagttgaacgtagtgtattctaataatttttttctttctttctttttccctccagaaaatatgcagttaagaggatcagatgcagaaaaaaagagctactgggaagatcaggggaacagtaccaagtaacaatacacaacaaaattatgttgttcatgataacaaaccaacatgcaataaaaatccagttgttccttacaatagaacaataaggccttttcaagccaaaagcaaataacagcatatcacaaaaagaataaattgattcttsctagaactaagcctggatattttaaagtggcttctagccaacaaaagtagtgacaatggacaaagtggtatgtttcaaattgacacagacatattaacaggactatacaaacattattgattgaagaaaggagctggacctaagatggtccatgtcacttccaggcttctgtttgcttttcctacaaaccaggaataaccagggcagctgaaagttgcacagagtgcaacaaagctacagatgtctcaataggttatttattattttgtcttctgccttaatatacagaacatattgcca

SEQ ID NO: 15516 - DNA, 600 bp, Chicken  19866894222014_1
gaatgggacatactctttagcaggggctgctgtgacagcacaaggggaaatggtttcaaactaaaagaggggagagttagactggatataaggaaaaagatttttacactaaaaacattgaggcactgcacagactgcacagagaggtggtggtgccccatccctgcacacacccaaggtcaggggatgggctgtgagcagtgatggagctgtgggtatctctgtgcactgcaaggagtgggaccagagggcctctgtgggtcccttccaacccaaaccattctgtggtcctatgattcraggcattgcccttctgtgaatrcagagcagggcctggggggtgatctcagtgcagaaaccaaaagggtggacctgggctgtgaacacaccctcagttaaggcatttcttgatatccagcttggcagcattcagacagaatttggggacagatacctgtctgtgcagctctgcctgcagcagccactcctgggaagggagcagcccttaccaggaacatcacggctgaatctgggccactgttatttcctagcaagatgcctagcattaatcagctggtatttaattaatagaaaagatca

SEQ ID NO: 15517 - DNA, 600 bp, Chicken  19866894222014_2
ggggctgctgtgacagcacaaggggaaatggtttcaaactaaaagaggggagagttagactggatataaggaaaaagatttttacactaaaaacattgaggcactgcacagactgcacagagaggtggtggtgccccatccctgcacacacccaaggtcaggggatgggctgtgagcagtgatggagctgtgggtatctctgtgcactgcaaggagtgggaccagagggcctctgtgggtcccttccaacccaaaccattctgtggtcctatgattcraggcattgcccttctgtgaatrcagagcagggcctggggggtgatctcagtgcagaaaccaaaagggtggacctgggctgtgaacacaccctcagttaaggcatttcttgatatccagcttggcagcattcagacagaatttggggacagatacctgtctgtgcagctctgcctgcagcagccactcctgggaagggagcagcccttaccaggaacatcacggctgaatctgggccactgttatttcctagcaagatgcctagcattaatcagctggtatttaattaatagaaaagatcagtctgattacatttcaattaag

SEQ ID NO: 15518 - DNA, 599 bp, Chicken  19866894222016_1
  misc_feature (1)..(115): n is any nucleotide
nnnnnnnnnnnnnnnnnnnnnnnnnnnnnnnnnnnnnnnnnnnnnnnnnnnnnnnnnnnnnnnnnnnnnnnnnnnnnnnnnnnnnnnnnnnnnnnnnnnnnnnnnnnnnnnnnnnatattggtgtacgaggaagtacataaaatcacttcaaaccatatggaaagcattgattatgaaaagttgttgagatcaaattgcttctgagcagaagatgcaaaacagctccgttcctgctggctctgctgtcctttcaaaagtaagaagcagaaaaccaaacctgcagcatccagatgcccagsacctggacaaagcccagaacttctccatggatcagaaaagagacatataatacaaaataactggctttccaaatcaaagaactcagaaatgctgcaaaaaggaagggaaatagagcagtcagaatgtccactctgctacttgccctttcctttctccttgccaggagtcccagctgcttcctggcacccaaaacaccagccacaaggaaagcaaggaagctgagatttggtgtagcactccattgccaatatattaaaggatgttcaatgaaaaatctcactcttacaaatgaagatga

SEQ ID NO: 15519 - DNA, 600 bp, Chicken  19866894222017_1
tctcccgtgtgcccggtgtgtagcgtccctgaagcaagcaaagcagaaaaaaaggacaaatcccgttgtccccgctagattcccttcgccactcaaagggaatagctgactctgtatcagggaagtgctggttcaagtgagccagaagcaaactggcttctgtcattctggaaatcaagtcataggcaaggtcccatatttatgtgttaatattctcttaaccttactgtggcttatgggttagcagttggaattttatccttagggatatggtgcagatgggcccagaccatccactakctatgggctaacatgtttcatgataattgcacacaggactggcagtactgtgtacagaagaggtgcctgacctgccccatttgtcattccaccccccctagcttaagttgaggcaggttgtgccctagaagtgcctgtttctttgcactgactataaagggagagagatgaggtgaatcctactcagtatggtgatatgatggcaagcaatcacacttttcacaggtagctacaaagcgtaactccaatttcctcaatgtaaagactgctcttagtgtcctacagcttgactttgccgct

SEQ ID NO: 15520 - DNA, 600 bp, Chicken  19866894222023_1
ttccacatcctaaagggttacagtgaagacagagccaaactatttatagaagttcaaagtgaaaggacttgagagaatgtatgcagtattaagcctgctaggactataattgtccagaaaaaaatgacggggcgtattaaaagatactctgaaaaagagaaaaaaaacgggagccagcattttggcttctggctcaggaacatctggtgtcagaaaggtggcttctagatttggataacacatttaatgcagaatataagatggaaaagtacagtgtcctgggtgaagcaaagctgctcrggctagaagcatagctgcgctattacaataataagaggacttatgaccattccttgcactcattctttacagcagcatagtggcaatatgaacagctcatgatgccaagtcctcccacagagaccttgttctgccctggtaagmctrtagtwcccaattcaccatggtaagcccaagtgtaaactctgctcccatggtggccacatcctccttaccactagtcttagggaaggaagggaataggcagtttgagtgtttgcagagccaaaaagcccataaacactccaataaaagtaaagc

SEQ ID NO: 15521 - DNA, 600 bp, Chicken  19866894222023_2
tactctgaaaaagagaaaaaaaacgggagccagcattttggcttctggctcaggaacatctggtgtcagaaaggtggcttctagatttggataacacatttaatgcagaatataagatggaaaagtacagtgtcctgggtgaagcaaagctgctcrggctagaagcatagctgcgctattacaataataagaggacttatgaccattccttgcactcattctttacagcagcatagtggcaatatgaacagctcatgatgccaagtcctcccacagagaccttgttctgccctggtaagmctrtagtwcccaattcaccatggtaagcccaagtgtaaactctgctcccatggtggccacatcctccttaccactagtcttagggaaggaagggaataggcagtttgagtgtttgcagagccaaaaagcccataaacactccaataaaagtaaagcacaccacttctcagtgaaagcccagtgwgaattgtctgcccactgaagtcttctatcttgcaaaatgaaaaagctgcttttgtactgcacagttggtgaatctatgccaaagtcagggttcagagtccctgaatcaaaaagaaa

SEQ ID NO: 15522 - DNA, 600 bp, Chicken  19866894222023_3
tctgaaaaagagaaaaaaaacgggagccagcattttggcttctggctcaggaacatctggtgtcagaaaggtggcttctagatttggataacacatttaatgcagaatataagatggaaaagtacagtgtcctgggtgaagcaaagctgctcrggctagaagcatagctgcgctattacaataataagaggacttatgaccattccttgcactcattctttacagcagcatagtggcaatatgaacagctcatgatgccaagtcctcccacagagaccttgttctgccctggtaagmctrtagtwcccaattcaccatggtaagcccaagtgtaaactctgctcccatggtggccacatcctccttaccactagtcttagggaaggaagggaataggcagtttgagtgtttgcagagccaaaaagcccataaacactccaataaaagtaaagcacaccacttctcagtgaaagcccagtgwgaattgtctgcccactgaagtcttctatcttgcaaaatgaaaaagctgcttttgtactgcacagttggtgaatctatgccaaagtcagggttcagagtccctgaatcaaaaagaaattg

SEQ ID NO: 15523 - DNA, 600 bp, Chicken  19866894222023_4
aaaagagaaaaaaaacgggagccagcattttggcttctggctcaggaacatctggtgtcagaaaggtggcttctagatttggataacacatttaatgcagaatataagatggaaaagtacagtgtcctgggtgaagcaaagctgctcrggctagaagcatagctgcgctattacaataataagaggacttatgaccattccttgcactcattctttacagcagcatagtggcaatatgaacagctcatgatgccaagtcctcccacagagaccttgttctgccctggtaagmctrtagtwcccaattcaccatggtaagcccaagtgtaaactctgctcccatggtggccacatcctccttaccactagtcttagggaaggaagggaataggcagtttgagtgtttgcagagccaaaaagcccataaacactccaataaaagtaaagcacaccacttctcagtgaaagcccagtgwgaattgtctgcccactgaagtcttctatcttgcaaaatgaaaaagctgcttttgtactgcacagttggtgaatctatgccaaagtcagggttcagagtccctgaatcaaaaagaaattgtagag

SEQ ID NO: 15524 - DNA, 510 bp, Chicken  19866894222023_5
taataagaggacttatgaccattccttgcactcattctttacagcagcatagtggcaatatgaacagctcatgatgccaagtcctcccacagagaccttgttctgccctggtaagmctrtagtwcccaattcaccatggtaagcccaagtgtaaactctgctcccatggtggccacatcctccttaccactagtcttagggaaggaagggaataggcagtttgagtgtttgcagagccaaaaagcccataaacactccaataaaagtaaagcacaccacttctcagtgaaagcccagtgwgaattgtctgcccactgaagtcttctatcttgcaaaatgaaaaagctgcttttgtactgcacagttggtgaatctatgccaaagtcagggttcagagtccctgaatcaaaaagaaattgtagagatttaaatgatgcaattagcttgatccctgggatccacagaggcctgaagctgaatgtttctttagtaaagagaacaccgtgagtg

SEQ ID NO: 15525 - DNA, 600 bp, Chicken  19866894222046_1
ctttctccataatagcaaggtactaaagcactttgatgcaagtctgggacattcactgtgattcactcacactttgatttcttaaacataatatatttcttcccatcagcctctctgtccacatagcaaaagaccaaaaattaaataagttccagaatggaaggtatcacttgtatgtcccactgatgaaaaggtgtgaagtattaaccttattagcatttctgtaagaatactgcaaggaggtgaacatggcatgaaaatattttttgctatctgaaaggcatgaggaatgccaaaatratggaaatctgcattctggtcacacaaacttcattgaaatgtttggtctgtataagtcaatggacttacaaagctcattctgccttggggagggggacagaacagagcccaaacactcagcaagacctttgcagttactgctccatctttccagggaacagcaacagatgttaaactgccagcaaattacaagatctgagaaaccctacccacagtcacagtttctcaggctgagaattcttcttgcggttaagatgctgcttttcctaagcggatgcaacaaagccagctgtacccctg

SEQ ID NO: 15526 - DNA, 599 bp, Chicken  19866894222047_1
  misc_feature (1)..(33): n is any nucleotide
nnnnnnnnnnnnnnnnnnnnnnnnnnnnnnnnncctttatccctgtggatttatatacctaaatctcagagtagggggctatgaattatccaagcttagagagaatctgctagtgcctgatggaaaagatagactaggtcatatttaaattttgtgtttgttcagtgtaaatgtttcagtcattttcattaacatttgttaaaaaatgatgctttaaggggtaggaaaaaaaaaaaaaaaaaaaaggattatattagctatgtccctggggaaagacaaatgccaatctcatgtgcccargttagtctcttgacacagcagaatgagcagaccagacaggagggtaaataagctaatactacaggtgccttcttactggggcaaaaacttgatgagtcctcatttctgccagatctaagaatcaattctcctgaggggtggttggagccagcaacagaaatgactgtgatgggctggctgtgctgcacggttgctgaggagccagctcgggcatttcctgcaacgtctgtgggatacggaggtcactgggacaagagacactctgaaaagccatgtcaaggaaaaaaaggcgtatcata

SEQ ID NO: 15527 - DNA, 600 bp, Chicken  19866894222049_1
agaagttcctgtgagtgaagggaagcagctcgtgctggtatgcaggcacacaggttgatgcttgcacacttgcatgggtggcagagatgactcctgaatcggtcatccagcaaacacggctcttgttgttatctcatgactgttctgtggctctgataggcaaaacgagggaagaaaagtatttcaagtagaccaactgtaatattaccaagtgtaaaattgctctaagcttgaaagggttgtggaagctgtccatgataatgggtgtgttgagacatgactgaattccagacatactgskctttagtgttyccttgggacagctgagctgcccatygcttcttagggaaacagtccaccttgcttcccatcacctaagctcacttcagaagtggtttctgaactctgttggaggagaatgaagttctctcttccctgacagagctgcattcccttgggttaatatcagctgtatcatcttgatgggtgggtactaccaagcagcatcgctgtcctctccccataaagaggctgtgtcccttactgctttccataggaattcagctgcaggtgggtgtctgcacatcagagcaaccctta

SEQ ID NO: 15528 - DNA, 600 bp, Chicken  19866894222049_2
gaagttcctgtgagtgaagggaagcagctcgtgctggtatgcaggcacacaggttgatgcttgcacacttgcatgggtggcagagatgactcctgaatcggtcatccagcaaacacggctcttgttgttatctcatgactgttctgtggctctgataggcaaaacgagggaagaaaagtatttcaagtagaccaactgtaatattaccaagtgtaaaattgctctaagcttgaaagggttgtggaagctgtccatgataatgggtgtgttgagacatgactgaattccagacatactgskctttagtgttyccttgggacagctgagctgcccatygcttcttagggaaacagtccaccttgcttcccatcacctaagctcacttcagaagtggtttctgaactctgttggaggagaatgaagttctctcttccctgacagagctgcattcccttgggttaatatcagctgtatcatcttgatgggtgggtactaccaagcagcatcgctgtcctctccccataaagaggctgtgtcccttactgctttccataggaattcagctgcaggtgggtgtctgcacatcagagcaacccttag

SEQ ID NO: 15529 - DNA, 600 bp, Chicken  19866894222049_3
gagtgaagggaagcagctcgtgctggtatgcaggcacacaggttgatgcttgcacacttgcatgggtggcagagatgactcctgaatcggtcatccagcaaacacggctcttgttgttatctcatgactgttctgtggctctgataggcaaaacgagggaagaaaagtatttcaagtagaccaactgtaatattaccaagtgtaaaattgctctaagcttgaaagggttgtggaagctgtccatgataatgggtgtgttgagacatgactgaattccagacatactgskctttagtgttyccttgggacagctgagctgcccatygcttcttagggaaacagtccaccttgcttcccatcacctaagctcacttcagaagtggtttctgaactctgttggaggagaatgaagttctctcttccctgacagagctgcattcccttgggttaatatcagctgtatcatcttgatgggtgggtactaccaagcagcatcgctgtcctctccccataaagaggctgtgtcccttactgctttccataggaattcagctgcaggtgggtgtctgcacatcagagcaacccttaggaatgatagga

SEQ ID NO: 15530 - DNA, 600 bp, Chicken  19866894222049_4
gtatgcaggcacacaggttgatgcttgcacacttgcatgggtggcagagatgactcctgaatcggtcatccagcaaacacggctcttgttgttatctcatgactgttctgtggctctgataggcaaaacgagggaagaaaagtatttcaagtagaccaactgtaatattaccaagtgtaaaattgctctaagcttgaaagggttgtggaagctgtccatgataatgggtgtgttgagacatgactgaattccagacatactgskctttagtgttyccttgggacagctgagctgcccatygcttcttagggaaacagtccaccttgcttcccatcacctaagctcacttcagaagtggtttctgaactctgttggaggagaatgaagttctctcttccctgacagagctgcattcccttgggttaatatcagctgtatcatcttgatgggtgggtactaccaagcagcatcgctgtcctctccccataaagaggctgtgtcccttactgctttccataggaattcagctgcaggtgggtgtctgcacatcagagcaacccttaggaatgataggatccattctcttggtattacagaggt

SEQ ID NO: 15531 - DNA, 600 bp, Chicken  19866894222049_5
ctttccataggaattcagctgcaggtgggtgtctgcacatcagagcaacccttaggaatgataggatccattctcttggtattacagaggtttgaagacttcaagtcagcatgggagcttctccctgttctgttgctcctggcagacatccacgtagctgtggctgttgttgggcaggtgatgaccagcacgtgtctttagatggcagtgacagtaagggatctctcagctttctttaatccagccatctcagagctgttaccatcagtctgcagccttttctaagctaggattttaacmtgtgatgagaacaggtcccrtctacctgcccagcaccaacagcctatgcagtccaggcagtytgcctctgttgggttgctgggaccagcagcagcatgcaggcagctggctgtggcagcatgacttgctgttgtgtttcctttcacatcttccagatcctcaccactcctgcacccgagttgagcaccctgaataatgatgggctcataagggagctgttwgccctgcacctgtttgtacggctgggatgtgtgtttctggacatgtgggagtcgagtcattgggtaacaggaatggttg

SEQ ID NO: 15532 - DNA, 600 bp, Chicken  19866894222049_6
gcaggtgggtgtctgcacatcagagcaacccttaggaatgataggatccattctcttggtattacagaggtttgaagacttcaagtcagcatgggagcttctccctgttctgttgctcctggcagacatccacgtagctgtggctgttgttgggcaggtgatgaccagcacgtgtctttagatggcagtgacagtaagggatctctcagctttctttaatccagccatctcagagctgttaccatcagtctgcagccttttctaagctaggattttaacmtgtgatgagaacaggtcccrtctacctgcccagcaccaacagcctatgcagtccaggcagtytgcctctgttgggttgctgggaccagcagcagcatgcaggcagctggctgtggcagcatgacttgctgttgtgtttcctttcacatcttccagatcctcaccactcctgcacccgagttgagcaccctgaataatgatgggctcataagggagctgttwgccctgcacctgtttgtacggctgggatgtgtgtttctggacatgtgggagtcgagtcattgggtaacaggaatggttgttgtgtgttccaggccttca

SEQ ID NO: 15533 - DNA, 600 bp, Chicken  19866894222049_7
aggatccattctcttggtattacagaggtttgaagacttcaagtcagcatgggagcttctccctgttctgttgctcctggcagacatccacgtagctgtggctgttgttgggcaggtgatgaccagcacgtgtctttagatggcagtgacagtaagggatctctcagctttctttaatccagccatctcagagctgttaccatcagtctgcagccttttctaagctaggattttaacmtgtgatgagaacaggtcccrtctacctgcccagcaccaacagcctatgcagtccaggcagtytgcctctgttgggttgctgggaccagcagcagcatgcaggcagctggctgtggcagcatgacttgctgttgtgtttcctttcacatcttccagatcctcaccactcctgcacccgagttgagcaccctgaataatgatgggctcataagggagctgttwgccctgcacctgtttgtacggctgggatgtgtgtttctggacatgtgggagtcgagtcattgggtaacaggaatggttgttgtgtgttccaggccttcactagtcttgctgaagctgcctatgaagctgcagatgtagctg

SEQ ID NO: 15534 - DNA, 600 bp, Chicken  19866894222049_8
tctctcagctttctttaatccagccatctcagagctgttaccatcagtctgcagccttttctaagctaggattttaacmtgtgatgagaacaggtcccrtctacctgcccagcaccaacagcctatgcagtccaggcagtytgcctctgttgggttgctgggaccagcagcagcatgcaggcagctggctgtggcagcatgacttgctgttgtgtttcctttcacatcttccagatcctcaccactcctgcacccgagttgagcaccctgaataatgatgggctcataagggagctgttwgccctgcacctgtttgtacggctgggatgtgtgtttctggacatgtgggagtcgagtcattgggtaacaggaatggttgttgtgtgttccaggccttcactagtcttgctgaagctgcctatgaagctgcagatgtagctgatgatcaggaagaaccagcaacctactgcttatcctcttcatttgagctaatagttcagaaacttctggagaccacagataggtaacgttaacccagctggcctgagctacacacatgatgcctctcctttgttttttaccccttctccttaaggcttt

SEQ ID NO: 15535 - DNA, 599 bp, Chicken  19866894222056_1
  misc_feature (1)..(91): n is any nucleotide
nnnnnnnnnnnnnnnnnnnnnnnnnnnnnnnnnnnnnnnnnnnnnnnnnnnnnnnnnnnnnnnnnnnnnnnnnnnnnnnnnnnnnnnnnnntaacattaaacaataaggaagggtagcatttacatattgattaaatgacagcacttcacctttcttacccttgtttttcattccttgccatctatcatttgaaagctttttccattaaactaaagccaaatcttcggcagtatgattaaactgattatacaggacagaagtcaagatataatcactagaacaggaggcacctaagcctkttattgtggaaagcagggacgagacacgggatctctcagccactgcctgctgagggcagacctgtgtccagatgcatctgttgcataaaaggtaacccttcaagcacactctcacatgggggcattgygagtcctctgaagcttcaagagccctgagtatttgagcgtgactttgaacacactcttctagcacaatttttatacttacatattctctgtaagttttttgttcgtttgttgctaactaaagctgttcatctttgactttcattgtatctagatgctattttctcactttt

SEQ ID NO: 15536 - DNA, 600 bp, Chicken  19866894222056_2
tgattaaatgacagcacttcacctttcttacccttgtttttcattccttgccatctatcatttgaaagctttttccattaaactaaagccaaatcttcggcagtatgattaaactgattatacaggacagaagtcaagatataatcactagaacaggaggcacctaagcctkttattgtggaaagcagggacgagacacgggatctctcagccactgcctgctgagggcagacctgtgtccagatgcatctgttgcataaaaggtaacccttcaagcacactctcacatgggggcattgygagtcctctgaagcttcaagagccctgagtatttgagcgtgactttgaacacactcttctagcacaatttttatacttacatattctctgtaagttttttgttcgtttgttgctaactaaagctgttcatctttgactttcattgtatctagatgctattttctcacttttagttaatacatttatacagtacctacatacaattagtatagagctatatgttaatacagatacttagaatctcaagtattcttatggagaagttattattgcttaatgaatgacaacttttatactggt

SEQ ID NO: 15537 - DNA, 600 bp, Chicken  19866894222078_1
ctggctttctgagagttgctccaaaatataaggataagcggcttctatttttgtcagcaatctctcttgactgtacagtgcagtgaaggccgatataaaaaggacagcctggtctggtggttggcgaccctgcacagagcagggtggttgaaacccaaagatcattgtggtccctttcaacccaggccattctgtgattctatgataaaaatccttcacttgctgcagaggactgaactatttcccagcaggcttctgtgataatgcaatgtagataatgctctcttttgcagggcaagragaaygtaatttttggcttatatttccacttcttgattttggaaggaaatacccataatgaaaacagrttttcatggcccattattcagtatgaaaatgataaatgatgggctggagaaggtctattttcagctctatgggatgattgaatattaagttagtagaactccactccacaatttcctgagttagacttcagcaccctaacatgctcctctgccttgttcattgcgctgcttggtgtttcataaatcaaatctgttgacagcagaaagaaagactgaatcaagaatcactctg

SEQ ID NO: 15538 - DNA, 600 bp, Chicken  19866894222078_2
tttctgagagttgctccaaaatataaggataagcggcttctatttttgtcagcaatctctcttgactgtacagtgcagtgaaggccgatataaaaaggacagcctggtctggtggttggcgaccctgcacagagcagggtggttgaaacccaaagatcattgtggtccctttcaacccaggccattctgtgattctatgataaaaatccttcacttgctgcagaggactgaactatttcccagcaggcttctgtgataatgcaatgtagataatgctctcttttgcagggcaagragaaygtaatttttggcttatatttccacttcttgattttggaaggaaatacccataatgaaaacagrttttcatggcccattattcagtatgaaaatgataaatgatgggctggagaaggtctattttcagctctatgggatgattgaatattaagttagtagaactccactccacaatttcctgagttagacttcagcaccctaacatgctcctctgccttgttcattgcgctgcttggtgtttcataaatcaaatctgttgacagcagaaagaaagactgaatcaagaatcactctgaaact

SEQ ID NO: 15539 - DNA, 600 bp, Chicken  19866894222078_3
gactgtacagtgcagtgaaggccgatataaaaaggacagcctggtctggtggttggcgaccctgcacagagcagggtggttgaaacccaaagatcattgtggtccctttcaacccaggccattctgtgattctatgataaaaatccttcacttgctgcagaggactgaactatttcccagcaggcttctgtgataatgcaatgtagataatgctctcttttgcagggcaagragaaygtaatttttggcttatatttccacttcttgattttggaaggaaatacccataatgaaaacagrttttcatggcccattattcagtatgaaaatgataaatgatgggctggagaaggtctattttcagctctatgggatgattgaatattaagttagtagaactccactccacaatttcctgagttagacttcagcaccctaacatgctcctctgccttgttcattgcgctgcttggtgtttcataaatcaaatctgttgacagcagaaagaaagactgaatcaagaatcactctgaaactcaccataatcctgaagaactatcaggttctgggcagaggttgttatgtatctcttcattcact

SEQ ID NO: 15540 - DNA, 600 bp, Chicken  19866894222078_4
gtgtttcataaatcaaatctgttgacagcagaaagaaagactgaatcaagaatcactctgaaactcaccataatcctgaagaactatcaggttctgggcagaggttgttatgtatctcttcattcacttatgaccagtagaggtttgaattcctaaacctttcatttgcttctaggcttgaatattaattttcttgtttaaaaatgtcactcccatccattaacattttacaattaaaagggatgtaatcaagagtgtgcttatactgcagagacagtcctgcatttttttaactatcamtatatacttaaacttgataattgcagaccaaattcatgcccacagcaaagctactaagatcataacagttataaaagcaatgaacttggcctcatcgtgtgtatgttaagtccaggaactataataacattacctgtgctaaatataacctgccatatagagccctggtattagcacacacaagtcactattttctgaaggttatcatggtatatataagaactttgcataacaaaaggaaaatgtattcaacacaaaattttcctaccttcaatatatatattacatgggttatgcttc

SEQ ID NO: 15541 - DNA, 599 bp, Chicken  19866894222082_1
  misc_feature (1)..(7): n is any nucleotide
nnnnnnngaaatgtcctatcctgtcccctcatggttatccactgaaagcagttctgatacagactgatactcgatcgtaaatttccaacacagctcacttttgttttccacttagaatattaacaggttttctgctttaatgtaggtgtctctccaaggatgcaggaatgtgtacaaccatgtagttcactggtattcttccaagaaaacagtaaataacttacactttaaaatctgcacaaatatgctcacaaaatgtatgcttatctctccaatcaatgcagttctgctcagttgaakgtgccctaaaggtcttttacaaattatttcaaagtgaaacaaccacaaagaaaattagttccaagctttgatctggtaacagcctccacaggtgtcagcaggaccaatatgcaattggttttgaactcagctgtagagatctagacaaactagagagctggacgatcactaactgcatgacgtttaataaragcaagggctggattctgcatgtaggaagaggtgacactggctrtacatacagactggggaatgagacsctggagagcagtccagctgaaagggagctggggatcatg

SEQ ID NO: 15542 - DNA, 600 bp, Chicken  19866894222082_2
ggtattcttccaagaaaacagtaaataacttacactttaaaatctgcacaaatatgctcacaaaatgtatgcttatctctccaatcaatgcagttctgctcagttgaakgtgccctaaaggtcttttacaaattatttcaaagtgaaacaaccacaaagaaaattagttccaagctttgatctggtaacagcctccacaggtgtcagcaggaccaatatgcaattggttttgaactcagctgtagagatctagacaaactagagagctggacgatcactaactgcatgacgtttaataaragcaagggctggattctgcatgtaggaagaggtgacactggctrtacatacagactggggaatgagacsctggagagcagtccagctgaaagggagctggggatcatggccaacagcaagttgaacatgagtcaacagtgcgcccagaccaccaggaaggccaaccatatcctggggtgcatcaagcatggggtgccagccagttgagggaaatgattatccttctctacacttctagtactgtgtgcagttttgggcaccacagtacaaaaaggacataaaacgatcagttgtatcaaa

SEQ ID NO: 15543 - DNA, 600 bp, Chicken  19866894222082_3
tgcacaaatatgctcacaaaatgtatgcttatctctccaatcaatgcagttctgctcagttgaakgtgccctaaaggtcttttacaaattatttcaaagtgaaacaaccacaaagaaaattagttccaagctttgatctggtaacagcctccacaggtgtcagcaggaccaatatgcaattggttttgaactcagctgtagagatctagacaaactagagagctggacgatcactaactgcatgacgtttaataaragcaagggctggattctgcatgtaggaagaggtgacactggctrtacatacagactggggaatgagacsctggagagcagtccagctgaaagggagctggggatcatggccaacagcaagttgaacatgagtcaacagtgcgcccagaccaccaggaaggccaaccatatcctggggtgcatcaagcatggggtgccagccagttgagggaaatgattatccttctctacacttctagtactgtgtgcagttttgggcaccacagtacaaaaaggacataaaacgatcagttgtatcaaaggagggctacaaagatggtgaaaagtctagagaggaagacgtat

SEQ ID NO: 15544 - DNA, 600 bp, Chicken  19866894222082_4
tgcttatctctccaatcaatgcagttctgctcagttgaakgtgccctaaaggtcttttacaaattatttcaaagtgaaacaaccacaaagaaaattagttccaagctttgatctggtaacagcctccacaggtgtcagcaggaccaatatgcaattggttttgaactcagctgtagagatctagacaaactagagagctggacgatcactaactgcatgacgtttaataaragcaagggctggattctgcatgtaggaagaggtgacactggctrtacatacagactggggaatgagacsctggagagcagtccagctgaaagggagctggggatcatggccaacagcaagttgaacatgagtcaacagtgcgcccagaccaccaggaaggccaaccatatcctggggtgcatcaagcatggggtgccagccagttgagggaaatgattatccttctctacacttctagtactgtgtgcagttttgggcaccacagtacaaaaaggacataaaacgatcagttgtatcaaaggagggctacaaagatggtgaaaagtctagagaggaagacgtatgaggagcagcctgaggttctttggt

SEQ ID NO: 15545 - DNA, 600 bp, Chicken  19866894222082_5
tgaaaagtctagagaggaagacgtatgaggagcagcctgaggttctttggtttgttcaccctggagaagaggaaactgaagagagacctcactgcagcccatggctttcacatgagggacagcggagaggcagctgctgagggtgactgggcactagaacagggtcctcagcaaagtggtgatggcactgacctggacagagtttaagaagtttggaaaatgctctcagacgtatggtctgatgtttgatatggcgccaggagttggactcagtgatccttatatgtcccttccaacttrggatattctacgattctacgccctgtgcctcagtgaggatataaggaagcctcagatgacaaataaacaagtttttctttacctgtaggcatacataaaacccatgatatgccacagaaatagcacatacagcatacaggctctgagagcatatgagaagatggcaatggaacagctttgctgagcctgagcagaagcacacacaattcaccacaattacttaataccatcaggaagctatgaaacatctggggtctcatacatcactttatcaaagattgaagtacaatttaaataacc

SEQ ID NO: 15546 - DNA, 600 bp, Chicken  19866894222093_1
aacatgcgccattcttcctgtaactatttcagttctgtctttaataggtagggaacctcatttcagtgtcattgttctgcatccttcttcaatactactaattgaatgtggtgctcaggggcatgacttagcagagggttacttagatttagggtagtatggttacattgtggttggactcaatgactttaaggtcttttccaacctgagcaattctatgattctgtgattctaataaataccaactattttggattctgctatgtctgacagacacaaatgaggatggagctggaaaayagctgttttgaaatgcaytggtttctatccgcctgcaaagatttcttcacatgacataacaatactcctgttgaagcagcgctgcatgaagaaagcaaaaaaactcaggactctacaktttattgtcctacgctgacatctgcaatcccaagtattgtccctgagaccttataaaattagcatatttttgtagatgtatgtcccatcattttatattttgaatatgtgactcagtaagacacaaagcttatgacagctacatatatgaatatgatagtttaacctagttttacatttctg

SEQ ID NO: 15547 - DNA, 600 bp, Chicken  19866894222093_2
tgtaactatttcagttctgtctttaataggtagggaacctcatttcagtgtcattgttctgcatccttcttcaatactactaattgaatgtggtgctcaggggcatgacttagcagagggttacttagatttagggtagtatggttacattgtggttggactcaatgactttaaggtcttttccaacctgagcaattctatgattctgtgattctaataaataccaactattttggattctgctatgtctgacagacacaaatgaggatggagctggaaaayagctgttttgaaatgcaytggtttctatccgcctgcaaagatttcttcacatgacataacaatactcctgttgaagcagcgctgcatgaagaaagcaaaaaaactcaggactctacaktttattgtcctacgctgacatctgcaatcccaagtattgtccctgagaccttataaaattagcatatttttgtagatgtatgtcccatcattttatattttgaatatgtgactcagtaagacacaaagcttatgacagctacatatatgaatatgatagtttaacctagttttacatttctgaacaaaatagaacaggta

SEQ ID NO: 15548 - DNA, 600 bp, Chicken  19866894222093_3
gggcatgacttagcagagggttacttagatttagggtagtatggttacattgtggttggactcaatgactttaaggtcttttccaacctgagcaattctatgattctgtgattctaataaataccaactattttggattctgctatgtctgacagacacaaatgaggatggagctggaaaayagctgttttgaaatgcaytggtttctatccgcctgcaaagatttcttcacatgacataacaatactcctgttgaagcagcgctgcatgaagaaagcaaaaaaactcaggactctacaktttattgtcctacgctgacatctgcaatcccaagtattgtccctgagaccttataaaattagcatatttttgtagatgtatgtcccatcattttatattttgaatatgtgactcagtaagacacaaagcttatgacagctacatatatgaatatgatagtttaacctagttttacatttctgaacaaaatagaacaggtaactactatacgtaagtactgtacmccacagkcatactcaaactgatctttrgtgttattatctcctccctgaagactgcttgtctacaagactacaaggt

SEQ ID NO: 15549 - DNA, 600 bp, Chicken  19866894222093_4
ttcttcacatgacataacaatactcctgttgaagcagcgctgcatgaagaaagcaaaaaaactcaggactctacaktttattgtcctacgctgacatctgcaatcccaagtattgtccctgagaccttataaaattagcatatttttgtagatgtatgtcccatcattttatattttgaatatgtgactcagtaagacacaaagcttatgacagctacatatatgaatatgatagtttaacctagttttacatttctgaacaaaatagaacaggtaactactatacgtaagtactgtacmccacagkcatactcaaactgatctttrgtgttattatctcctccctgaagactgcttgtctacaagactacaaggtcttttaaggtaaagccctgcagaatttgttgaatggcaaaagtgaaagaaaaggaaaaaagaaaaaaaagaaaaaaataaattcagctaacatctattttcagggggaaaaagcactttcggttcagaaccttctctgtgaaatataatatcaaagaactcttagagaagatacagtcagtatggagaatctgtatgatgaagtagtattgcactatttctgcc

SEQ ID NO: 15550 - DNA, 600 bp, Chicken  19866894222093_5
catgacataacaatactcctgttgaagcagcgctgcatgaagaaagcaaaaaaactcaggactctacaktttattgtcctacgctgacatctgcaatcccaagtattgtccctgagaccttataaaattagcatatttttgtagatgtatgtcccatcattttatattttgaatatgtgactcagtaagacacaaagcttatgacagctacatatatgaatatgatagtttaacctagttttacatttctgaacaaaatagaacaggtaactactatacgtaagtactgtacmccacagkcatactcaaactgatctttrgtgttattatctcctccctgaagactgcttgtctacaagactacaaggtcttttaaggtaaagccctgcagaatttgttgaatggcaaaagtgaaagaaaaggaaaaaagaaaaaaaagaaaaaaataaattcagctaacatctattttcagggggaaaaagcactttcggttcagaaccttctctgtgaaatataatatcaaagaactcttagagaagatacagtcagtatggagaatctgtatgatgaagtagtattgcactatttctgccacaaaat

SEQ ID NO: 15551 - DNA, 600 bp, Chicken  19866894222093_6
gttgaagcagcgctgcatgaagaaagcaaaaaaactcaggactctacaktttattgtcctacgctgacatctgcaatcccaagtattgtccctgagaccttataaaattagcatatttttgtagatgtatgtcccatcattttatattttgaatatgtgactcagtaagacacaaagcttatgacagctacatatatgaatatgatagtttaacctagttttacatttctgaacaaaatagaacaggtaactactatacgtaagtactgtacmccacagkcatactcaaactgatctttrgtgttattatctcctccctgaagactgcttgtctacaagactacaaggtcttttaaggtaaagccctgcagaatttgttgaatggcaaaagtgaaagaaaaggaaaaaagaaaaaaaagaaaaaaataaattcagctaacatctattttcagggggaaaaagcactttcggttcagaaccttctctgtgaaatataatatcaaagaactcttagagaagatacagtcagtatggagaatctgtatgatgaagtagtattgcactatttctgccacaaaatccacaaaatattctgcctag

SEQ ID NO: 15552 - DNA, 599 bp, Chicken  19866894222094_1
  misc_feature (1)..(14): n is any nucleotide
nnnnnnnnnnnnnnaaactgattgggcttgtctgactcctgctaaaaattgaccttttttgatacattttctaatgcttttcaacttttccaactgtgtggatcagcagttgtgctctgttactgtgggcatgctccaactatacgtgtagctcggggaatatttcattttgcttgccctccagaggtaggcagccttcattccatgcttatctgctgccttttctttcttcccatccaccttttggatggcttgttagcccttgaatatcctagggaaccccaaagttgtggtttctgrgaaagcctcttatgggtgtccatctacttcggtgcacgtaacagcttctttaagcagaagcttttgtagttgtatttgactttctcatttgctggaaatgaagtggtaatgaactgtacaatgtatttgtcattgtctagaaaagagctctctaatcagacttgcactgtacttgtgtcttcagttataataatattgaaggtttycactgattcagtgtttaggttcttcagctgattattgtgaaagatgacaaagatgggcaacaagagctcatcaccaaagatctcatgtttgtg

SEQ ID NO: 15553 - DNA, 600 bp, Chicken  19866894222094_2
gcttatctgctgccttttctttcttcccatccaccttttggatggcttgttagcccttgaatatcctagggaaccccaaagttgtggtttctgrgaaagcctcttatgggtgtccatctacttcggtgcacgtaacagcttctttaagcagaagcttttgtagttgtatttgactttctcatttgctggaaatgaagtggtaatgaactgtacaatgtatttgtcattgtctagaaaagagctctctaatcagacttgcactgtacttgtgtcttcagttataataatattgaaggtttycactgattcagtgtttaggttcttcagctgattattgtgaaagatgacaaagatgggcaacaagagctcatcaccaaagatctcatgtttgtgtgtarcytayggtggctgtgctctgagattgcatagaagagatctccaygtattttkggggagtgtgtgtagactttttattcatggagtagcacctagaaaactggaattccagtagtgccagttgattttcatgggtgaagtttcctcctgtagttttgttgctctaataggctaaccaattttgggtgcccagattgtttcctt

SEQ ID NO: 15554 - DNA, 514 bp, Chicken  19866894222094_3
gcctcttatgggtgtccatctacttcggtgcacgtaacagcttctttaagcagaagcttttgtagttgtatttgactttctcatttgctggaaatgaagtggtaatgaactgtacaatgtatttgtcattgtctagaaaagagctctctaatcagacttgcactgtacttgtgtcttcagttataataatattgaaggtttycactgattcagtgtttaggttcttcagctgattattgtgaaagatgacaaagatgggcaacaagagctcatcaccaaagatctcatgtttgtgtgtarcytayggtggctgtgctctgagattgcatagaagagatctccaygtattttkggggagtgtgtgtagactttttattcatggagtagcacctagaaaactggaattccagtagtgccagttgattttcatgggtgaagtttcctcctgtagttttgttgctctaataggctaaccaattttgggtgcccagattgtttccttaagtgccttttg

SEQ ID NO: 15555 - DNA, 512 bp, Chicken  19866894222094_4
ctcttatgggtgtccatctacttcggtgcacgtaacagcttctttaagcagaagcttttgtagttgtatttgactttctcatttgctggaaatgaagtggtaatgaactgtacaatgtatttgtcattgtctagaaaagagctctctaatcagacttgcactgtacttgtgtcttcagttataataatattgaaggtttycactgattcagtgtttaggttcttcagctgattattgtgaaagatgacaaagatgggcaacaagagctcatcaccaaagatctcatgtttgtgtgtarcytayggtggctgtgctctgagattgcatagaagagatctccaygtattttkggggagtgtgtgtagactttttattcatggagtagcacctagaaaactggaattccagtagtgccagttgattttcatgggtgaagtttcctcctgtagttttgttgctctaataggctaaccaattttgggtgcccagattgtttccttaagtgccttttg

SEQ ID NO: 15556 - DNA, 509 bp, Chicken  19866894222094_5
ttatgggtgtccatctacttcggtgcacgtaacagcttctttaagcagaagcttttgtagttgtatttgactttctcatttgctggaaatgaagtggtaatgaactgtacaatgtatttgtcattgtctagaaaagagctctctaatcagacttgcactgtacttgtgtcttcagttataataatattgaaggtttycactgattcagtgtttaggttcttcagctgattattgtgaaagatgacaaagatgggcaacaagagctcatcaccaaagatctcatgtttgtgtgtarcytayggtggctgtgctctgagattgcatagaagagatctccaygtattttkggggagtgtgtgtagactttttattcatggagtagcacctagaaaactggaattccagtagtgccagttgattttcatgggtgaagtttcctcctgtagttttgttgctctaataggctaaccaattttgggtgcccagattgtttccttaagtgccttttg

SEQ ID NO: 15557 - DNA, 470 bp, Chicken  19866894222094_6
tttaagcagaagcttttgtagttgtatttgactttctcatttgctggaaatgaagtggtaatgaactgtacaatgtatttgtcattgtctagaaaagagctctctaatcagacttgcactgtacttgtgtcttcagttataataatattgaaggtttycactgattcagtgtttaggttcttcagctgattattgtgaaagatgacaaagatgggcaacaagagctcatcaccaaagatctcatgtttgtgtgtarcytayggtggctgtgctctgagattgcatagaagagatctccaygtattttkggggagtgtgtgtagactttttattcatggagtagcacctagaaaactggaattccagtagtgccagttgattttcatgggtgaagtttcctcctgtagttttgttgctctaataggctaaccaattttgggtgcccagattgtttccttaagtgccttttg

SEQ ID NO: 15558 - DNA, 462 bp, Chicken  19866894222094_7
gaagcttttgtagttgtatttgactttctcatttgctggaaatgaagtggtaatgaactgtacaatgtatttgtcattgtctagaaaagagctctctaatcagacttgcactgtacttgtgtcttcagttataataatattgaaggtttycactgattcagtgtttaggttcttcagctgattattgtgaaagatgacaaagatgggcaacaagagctcatcaccaaagatctcatgtttgtgtgtarcytayggtggctgtgctctgagattgcatagaagagatctccaygtattttkggggagtgtgtgtagactttttattcatggagtagcacctagaaaactggaattccagtagtgccagttgattttcatgggtgaagtttcctcctgtagttttgttgctctaataggctaaccaattttgggtgcccagattgtttccttaagtgccttttg

SEQ ID NO: 15559 - DNA, 600 bp, Chicken  19866894222098_1
tcatcaggtatttcccaagcaggaggttctccagagaatgttatccaacttctgtctgaaaactacactgcagtggcacagacggtgaacctgctggcagagtggctcattcagacgggtatggtgggtgatgctgcgtaacttgggtctgtaggcttgcaccaaaactatgtgaattggtggtaaacccgagactggatcatattccagctgttatcctgtacatgtacgtcactaaattctgtatgacgtgaaaaatgtcttcagaatgcatatcactactccttcccattcttgtgyaacttctcagtgctgcaccaggcctggcaattccttttgtgtttaggatattttggtgtaacgctcagtaacgactgcaattactggccttgctgttagcctggctgatgaaggaagtgagagaagatgggcagtgtcacctgcacgtgttctttagcgcagaccgcacttaggaaaaatgaatgagaatttctcagtctgcacatgtgtgtaactgtgtggcttattaatagagctgatggctcttttcccatcttctgcctaacgataaattgctattaaattgttgagtacctcctg

SEQ ID NO: 15560 - DNA, 599 bp, Chicken  19866894222104_1
  misc_feature (1)..(39): n is any nucleotide
nnnnnnnnnnnnnnnnnnnnnnnnnnnnnnnnnnnnnnntagcagcatccgccccaagtcctaggggactgtgggaaacccttattaagaggtgtggatttttctgcgtggaagtgatctggtgggctagaaaagtgttcttagtgtcctccgttggatgcaacttgtgatcaataaatgatctttgcaccgttactttgtaacaggtcacgttttcatgatgtcaagcaggctgctgtcttttctgtaataaagctcacctaatcaaaacaagtcagagcttatctgagcccctagccwgagatatctctgtggtggctacagagtcggtttcctagcaacctaaaaggcattagatggggctttgtcgacatttatcggttacacacaaaaccccccacttgaataatattatgggtgtgacataaactgacaaaagccaggaaattcagagctggggctgattttctatccttactgctcatcacmggctaaaaacaaagggcgcagtcatgtgagtgatgaatagaccaaaccaatatttatacttcctggcttttgtcccagcaaaatgccatttaaatgagatgcttggtatt

SEQ ID NO: 15561 - DNA, 600 bp, Chicken  19866894222104_2
ccgttactttgtaacaggtcacgttttcatgatgtcaagcaggctgctgtcttttctgtaataaagctcacctaatcaaaacaagtcagagcttatctgagcccctagccwgagatatctctgtggtggctacagagtcggtttcctagcaacctaaaaggcattagatggggctttgtcgacatttatcggttacacacaaaaccccccacttgaataatattatgggtgtgacataaactgacaaaagccaggaaattcagagctggggctgattttctatccttactgctcatcacmggctaaaaacaaagggcgcagtcatgtgagtgatgaatagaccaaaccaatatttatacttcctggcttttgtcccagcaaaatgccatttaaatgagatgcttggtattaatttcctatgtttaagacaggcttcatgcttgcagttagtagaatgttgacagcgctgtcagctttcccatgatctctcttcttcctcagagggggcaatgtttcaggtccatgccttcaaaggcaaaggttgtgagcaaggccacaactgtgtccttggatggtaaagatggatgctccatcaccata

SEQ ID NO: 15562 - DNA, 599 bp, Chicken  19866894222106_1
  misc_feature (1)..(137): n is any nucleotide
nnnnnnnnnnnnnnnnnnnnnnnnnnnnnnnnnnnnnnnnnnnnnnnnnnnnnnnnnnnnnnnnnnnnnnnnnnnnnnnnnnnnnnnnnnnnnnnnnnnnnnnnnnnnnnnnnnnnnnnnnnnnnnnnnnnnnnnnntctcctcagcagaattccaccttgtactgggtaggaaatcacccctgacggctgatggctccaaactctgtgtgtgtgtgatgctgatgggagctcacagctgacaggcatgcagccaggcacacgtctgcacaccagccaggtgaacatggcattgacagargctgtctcctctgagacttgcctgcgtggttcccatctcaccaagcaacactaatcaggtgcattagcaaaagctcagttctcaggaaaatccataaaagcagccacttcaataacaaatgaaacagaaaacgtgcctgggatttctatctccgcagtctctgggcagcaggagggcaaagcaggagctgaggagagcaaagaagtgagaagcagaggagmcagccgtgaagctcgtgctccaaaacaccaaaatctcccccagcttccagatgcaccactgttggtgtgagccacccc

SEQ ID NO: 15563 - DNA, 600 bp, Chicken  19866894222106_2
tgatgggagctcacagctgacaggcatgcagccaggcacacgtctgcacaccagccaggtgaacatggcattgacagargctgtctcctctgagacttgcctgcgtggttcccatctcaccaagcaacactaatcaggtgcattagcaaaagctcagttctcaggaaaatccataaaagcagccacttcaataacaaatgaaacagaaaacgtgcctgggatttctatctccgcagtctctgggcagcaggagggcaaagcaggagctgaggagagcaaagaagtgagaagcagaggagmcagccgtgaagctcgtgctccaaaacaccaaaatctcccccagcttccagatgcaccactgttggtgtgagccaccccttcccamccaaagcccagctcccctgccactccgggtctgaaagcttcagctgcratctcatcagctttgggcatttcagggattaggtgcagagatggccaagaacaagcaggaagcatcttkccagccctccaactcagcaccaatgtaagctcccccaaacattcttttgcagctgaaaaagatctgaaatcaggatcttgatctcagatgggtgccct

SEQ ID NO: 15564 - DNA, 600 bp, Chicken  19866894222106_3
tcctctgagacttgcctgcgtggttcccatctcaccaagcaacactaatcaggtgcattagcaaaagctcagttctcaggaaaatccataaaagcagccacttcaataacaaatgaaacagaaaacgtgcctgggatttctatctccgcagtctctgggcagcaggagggcaaagcaggagctgaggagagcaaagaagtgagaagcagaggagmcagccgtgaagctcgtgctccaaaacaccaaaatctcccccagcttccagatgcaccactgttggtgtgagccaccccttcccamccaaagcccagctcccctgccactccgggtctgaaagcttcagctgcratctcatcagctttgggcatttcagggattaggtgcagagatggccaagaacaagcaggaagcatcttkccagccctccaactcagcaccaatgtaagctcccccaaacattcttttgcagctgaaaaagatctgaaatcaggatcttgatctcagatgggtgccctcctacctatgctgggttcagtcctcctctgccttaccccagggcaggagcacactgcacccctgtacaactccagcctgatggtc

SEQ ID NO: 15565 - DNA, 600 bp, Chicken  19866894222106_4
tcaggtgcattagcaaaagctcagttctcaggaaaatccataaaagcagccacttcaataacaaatgaaacagaaaacgtgcctgggatttctatctccgcagtctctgggcagcaggagggcaaagcaggagctgaggagagcaaagaagtgagaagcagaggagmcagccgtgaagctcgtgctccaaaacaccaaaatctcccccagcttccagatgcaccactgttggtgtgagccaccccttcccamccaaagcccagctcccctgccactccgggtctgaaagcttcagctgcratctcatcagctttgggcatttcagggattaggtgcagagatggccaagaacaagcaggaagcatcttkccagccctccaactcagcaccaatgtaagctcccccaaacattcttttgcagctgaaaaagatctgaaatcaggatcttgatctcagatgggtgccctcctacctatgctgggttcagtcctcctctgccttaccccagggcaggagcacactgcacccctgtacaactccagcctgatggtcagatgcagccagaaggacactgcagcttctccagcatgcagcccatta

SEQ ID NO: 15566 - DNA, 600 bp, Chicken  19866894222106_5
acagaaaacgtgcctgggatttctatctccgcagtctctgggcagcaggagggcaaagcaggagctgaggagagcaaagaagtgagaagcagaggagmcagccgtgaagctcgtgctccaaaacaccaaaatctcccccagcttccagatgcaccactgttggtgtgagccaccccttcccamccaaagcccagctcccctgccactccgggtctgaaagcttcagctgcratctcatcagctttgggcatttcagggattaggtgcagagatggccaagaacaagcaggaagcatcttkccagccctccaactcagcaccaatgtaagctcccccaaacattcttttgcagctgaaaaagatctgaaatcaggatcttgatctcagatgggtgccctcctacctatgctgggttcagtcctcctctgccttaccccagggcaggagcacactgcacccctgtacaactccagcctgatggtcagatgcagccagaaggacactgcagcttctccagcatgcagcccattaacagcactcacctgaaaaatctgagccacagttaataagcaagggaataaaatcaaaggaagaagggca

SEQ ID NO: 15567 - DNA, 600 bp, Chicken  19866894222130_1
tcaactgtggggaaatgaattgcgttaataaggccccggttgcaaggtgattatgcatccacatcagttgttgaataattaatgctaaatggtgccctcttatttaggctttcctttaaaggctcacgcgtcacccttatggattgttacccaggtgctgctttggagagcagcagctcccagtagctgttctcttaaattaactaatctagctgcaggttggagcatttatattctggctgagtaaacatgtacagggaaggcttctgtctgcaaaccacctgccctgctctcaccctygtgctcaggggttgggatacaggcagggagattgctcaccagtgactgccacgggcaaaacaggctcagcagagggagactaatgtaatttattgcctattgctaacagatgagaacagggagagctaaaagtggaagcactcatggctcagctctgccagcggtgggttggagccrtggggcaatgctgagttctgccccctggggccacccctgcagccccccgttacaaagccttgccacataaacctgatacagcacttctggtggagatttatgtgtatcttatattgatttatt

SEQ ID NO: 15568 - DNA, 600 bp, Chicken  19866894222130_2
tcccagtagctgttctcttaaattaactaatctagctgcaggttggagcatttatattctggctgagtaaacatgtacagggaaggcttctgtctgcaaaccacctgccctgctctcaccctygtgctcaggggttgggatacaggcagggagattgctcaccagtgactgccacgggcaaaacaggctcagcagagggagactaatgtaatttattgcctattgctaacagatgagaacagggagagctaaaagtggaagcactcatggctcagctctgccagcggtgggttggagccrtggggcaatgctgagttctgccccctggggccacccctgcagccccccgttacaaagccttgccacataaacctgatacagcacttctggtggagatttatgtgtatcttatattgatttattatgaaccatggcaacttacataattrggctaaagcaataataatatttcatgggataataaaactctttcttgatgatgcttctgtgttgtcagatagttttcctttggtgttgtgatggcaataacagacaaaggactgatgataaaaatgtagtgtgatttgagtgctgcttctg

SEQ ID NO: 15569 - DNA, 550 bp, Chicken  19866894222130_3
ggagattgctcaccagtgactgccacgggcaaaacaggctcagcagagggagactaatgtaatttattgcctattgctaacagatgagaacagggagagctaaaagtggaagcactcatggctcagctctgccagcggtgggttggagccrtggggcaatgctgagttctgccccctggggccacccctgcagccccccgttacaaagccttgccacataaacctgatacagcacttctggtggagatttatgtgtatcttatattgatttattatgaaccatggcaacttacataattrggctaaagcaataataatatttcatgggataataaaactctttcttgatgatgcttctgtgttgtcagatagttttcctttggtgttgtgatggcaataacagacaaaggactgatgataaaaatgtagtgtgatttgagtgctgcttctgagaggtgtttcctgcagaggaggctgcataggagtcacagacgtgtttgtatgagaaagtaacaggaacagtgactgggagcagggacaaaagggaagc

SEQ ID NO: 15570 - DNA, 600 bp, Chicken  19866894222135_1
tcacttgtgttggttccagtctctgctggatttattgcctcacttacagggtcctgcactgaccttgtctgttctggaggcctgacccattcagaggaagagacacacctctacctcagtcacaccaagctttcaaatcagctccaagaagcaactttctgttgccctcagccaagcaggatgttcagacagacattcctggtctctggtcctcatccaaaccctccctccgaggtacccattccactcaaaaagatcttgctgtcagcacatgcatctttctgtaattgtattcaagcyccaaacttattttcttcccactgtttatgcatgatccataacttgatcacagcattagctatgatacctctggtgggacaaggactatgcctcctaaccctcagaatattgctgccttctagacacagccccgcagcctcatgcccctgctaggacctccctcgttaactttgtggaagaagcaatgtaactgaacaggggaaatgctggagacagaaggggaatttgtgattsgatactctagacacctctgtatgtcagtaaatcagggttggggggggtgataggaacaacacagtg

SEQ ID NO: 15571 - DNA, 600 bp, Chicken  19866894222135_2
gtacccattccactcaaaaagatcttgctgtcagcacatgcatctttctgtaattgtattcaagcyccaaacttattttcttcccactgtttatgcatgatccataacttgatcacagcattagctatgatacctctggtgggacaaggactatgcctcctaaccctcagaatattgctgccttctagacacagccccgcagcctcatgcccctgctaggacctccctcgttaactttgtggaagaagcaatgtaactgaacaggggaaatgctggagacagaaggggaatttgtgattsgatactctagacacctctgtatgtcagtaaatcagggttggggggggtgataggaacaacacagtgctactgctcctctctctgcatcaggctgctggagaggttgggctgtgaagggccctttggcatctgtccgtatgaaataactgctaaatctgtagccagagcaaatccccctcctytgccctgcaagatcagactaacggggaaggctcactcttattacctctcctacctccttcctaccttattatataccacacaccagaaaacacggatagcaaacaaaaactgcaaaga

SEQ ID NO: 15572 - DNA, 600 bp, Chicken  19866894222135_3
ttctagacacagccccgcagcctcatgcccctgctaggacctccctcgttaactttgtggaagaagcaatgtaactgaacaggggaaatgctggagacagaaggggaatttgtgattsgatactctagacacctctgtatgtcagtaaatcagggttggggggggtgataggaacaacacagtgctactgctcctctctctgcatcaggctgctggagaggttgggctgtgaagggccctttggcatctgtccgtatgaaataactgctaaatctgtagccagagcaaatccccctcctytgccctgcaagatcagactaacggggaaggctcactcttattacctctcctacctccttcctaccttattatataccacacaccagaaaacacggatagcaaacaaaaactgcaaagagcgcacaggaaagcctcgatgcagtggagataggacagatttcccggttcactgttccacctcttcactcttcttgttccatcagacgctaggcagtacatacggctccttataaccacacaggctgacagcttttacctggagtaagcttcagtatgtgacatgcagcacgggaaattaag

SEQ ID NO: 15573 - DNA, 600 bp, Chicken  19866894222138_1
tgcttgcattcttccttggcatttgtctcatccagttccactttctgtgcacttccttgttgtgtctgaggcctttcagtgagactcagccttaatgtcacagatctcctgatgtagcagttactctcttacttcacttccagttttccatttccagcccttccttttccccttaccaacaatatgaaatcttacctgccagttcattgaggtccgttttgtttttattttgctgttcttccttggaacacatcgttgttttaccaagtcacttttcatcctcacgttttctattagtcyttctctgytgtttgtaataaaawaytgaaaatggattcaatttcagttctccatcagaacgggaagcatcactggtgtctttagagctgttcagagtatctgtgttcctctgtcctgacatgtgaactccctcggttcaaccaagtccaatcctttggaaatttcttctgrggtcttttagaaaaaaaaaagcctttaatggattctctttggtgatctgaagaagtcccactataattctctctgaagtgctttgaaatctttaaggtaggaggtataaccttgctttgaggttacacg

SEQ ID NO: 15574 - DNA, 600 bp, Chicken  19866894222138_2
ttcttccttggcatttgtctcatccagttccactttctgtgcacttccttgttgtgtctgaggcctttcagtgagactcagccttaatgtcacagatctcctgatgtagcagttactctcttacttcacttccagttttccatttccagcccttccttttccccttaccaacaatatgaaatcttacctgccagttcattgaggtccgttttgtttttattttgctgttcttccttggaacacatcgttgttttaccaagtcacttttcatcctcacgttttctattagtcyttctctgytgtttgtaataaaawaytgaaaatggattcaatttcagttctccatcagaacgggaagcatcactggtgtctttagagctgttcagagtatctgtgttcctctgtcctgacatgtgaactccctcggttcaaccaagtccaatcctttggaaatttcttctgrggtcttttagaaaaaaaaaagcctttaatggattctctttggtgatctgaagaagtcccactataattctctctgaagtgctttgaaatctttaaggtaggaggtataaccttgctttgaggttacacggtcccgct

SEQ ID NO: 15575 - DNA, 600 bp, Chicken  19866894222138_3
tgtctcatccagttccactttctgtgcacttccttgttgtgtctgaggcctttcagtgagactcagccttaatgtcacagatctcctgatgtagcagttactctcttacttcacttccagttttccatttccagcccttccttttccccttaccaacaatatgaaatcttacctgccagttcattgaggtccgttttgtttttattttgctgttcttccttggaacacatcgttgttttaccaagtcacttttcatcctcacgttttctattagtcyttctctgytgtttgtaataaaawaytgaaaatggattcaatttcagttctccatcagaacgggaagcatcactggtgtctttagagctgttcagagtatctgtgttcctctgtcctgacatgtgaactccctcggttcaaccaagtccaatcctttggaaatttcttctgrggtcttttagaaaaaaaaaagcctttaatggattctctttggtgatctgaagaagtcccactataattctctctgaagtgctttgaaatctttaaggtaggaggtataaccttgctttgaggttacacggtcccgctgtggaagaaacattg

SEQ ID NO: 15576 - DNA, 600 bp, Chicken  19866894222138_4
tctcatccagttccactttctgtgcacttccttgttgtgtctgaggcctttcagtgagactcagccttaatgtcacagatctcctgatgtagcagttactctcttacttcacttccagttttccatttccagcccttccttttccccttaccaacaatatgaaatcttacctgccagttcattgaggtccgttttgtttttattttgctgttcttccttggaacacatcgttgttttaccaagtcacttttcatcctcacgttttctattagtcyttctctgytgtttgtaataaaawaytgaaaatggattcaatttcagttctccatcagaacgggaagcatcactggtgtctttagagctgttcagagtatctgtgttcctctgtcctgacatgtgaactccctcggttcaaccaagtccaatcctttggaaatttcttctgrggtcttttagaaaaaaaaaagcctttaatggattctctttggtgatctgaagaagtcccactataattctctctgaagtgctttgaaatctttaaggtaggaggtataaccttgctttgaggttacacggtcccgctgtggaagaaacattggt

SEQ ID NO: 15577 - DNA, 600 bp, Chicken  19866894222138_5
cttaccaacaatatgaaatcttacctgccagttcattgaggtccgttttgtttttattttgctgttcttccttggaacacatcgttgttttaccaagtcacttttcatcctcacgttttctattagtcyttctctgytgtttgtaataaaawaytgaaaatggattcaatttcagttctccatcagaacgggaagcatcactggtgtctttagagctgttcagagtatctgtgttcctctgtcctgacatgtgaactccctcggttcaaccaagtccaatcctttggaaatttcttctgrggtcttttagaaaaaaaaaagcctttaatggattctctttggtgatctgaagaagtcccactataattctctctgaagtgctttgaaatctttaaggtaggaggtataaccttgctttgaggttacacggtcccgctgtggaagaaacattggtattcgagatggcaatgttcaggttataaagcagtgcttcaccaggctctgaaagctgcactgttccctatccttctgcttgcagggaatggtggtcagagatctctcttcactctctgttttcagtcctctgcgcacaccacgtgt

SEQ ID NO: 15578 - DNA, 600 bp, Chicken  19866894222138_6
tctctgaagtgctttgaaatctttaaggtaggaggtataaccttgctttgaggttacacggtcccgctgtggaagaaacattggtattcgagatggcaatgttcaggttataaagcagtgcttcaccaggctctgaaagctgcactgttccctatccttctgcttgcagggaatggtggtcagagatctctcttcactctctgttttcagtcctctgcgcacaccacgtgtcagacacggagcatcctgtgctcagaggccctctggatagtagcactgcttcctcctgctgtctgctcrttacagggagtctgcagagcattttccctttcctgttgtctgataccatttccgattgctgacccttctccttctggctcccaggatggttttagccagtgaaacccaatgaagggtttggttacatctctccatgcatacacatcccagcgtccygcgagaactgacagatatgtatgctaatcctatttaatctgttttatctcctgcgtttatctctcattgcattggatttcaaaacaacatgctatgtgaagatctgattttttgcagttgtaatgaagcgtatctaatgaagat

SEQ ID NO: 15579 - DNA, 600 bp, Chicken  19866894222138_7
cttctgcttgcagggaatggtggtcagagatctctcttcactctctgttttcagtcctctgcgcacaccacgtgtcagacacggagcatcctgtgctcagaggccctctggatagtagcactgcttcctcctgctgtctgctcrttacagggagtctgcagagcattttccctttcctgttgtctgataccatttccgattgctgacccttctccttctggctcccaggatggttttagccagtgaaacccaatgaagggtttggttacatctctccatgcatacacatcccagcgtccygcgagaactgacagatatgtatgctaatcctatttaatctgttttatctcctgcgtttatctctcattgcattggatttcaaaacaacatgctatgtgaagatctgattttttgcagttgtaatgaagcgtatctaatgaagatgacagtaataacaacaaaaacaactgttgcttgctagctcagcaaaatggtagtcgcttccctcttttgtatggatatggagtctctttcctgggtatatattttatgagatgaactttggccacaagtgtaaatcctgagcaacgtgttcaaaac

SEQ ID NO: 15580 - DNA, 600 bp, Chicken  19866894222141_1
cgtcagtagtgtacgtatagcaaccactctgttgcagagcagggctggttccttttcccacagcacaaggtctgaaaccagtaaaagcccaagctctggtgaaacggaaagaaaaggggcttgggtgcacacatgctcagaaattagccttatgtaaaaaagcattcgttttttgcaagacaagactgcacacccacaaccataggtctacctcctctgacacctgtaattctgtctaaggaacagattgctctatcctttgcaaaataacaggtgctcctcttgctcaagtcggcagcrtgttagctctgggggatggggtaagcagatccagccccaacacagccagccagcccttgaagcagatggagcggcaatgcagctcagcatcatactagttctggcaggggaagraggacttgactaactgcagagcaagcatgaattaccctggcctgctctcacttccaactatggacttgtaaatcaggcataaatccttccttgaggagactgcaggaaccagatacccaggcaataacgcaagcccctcagacatccagccaaaggactagcaagcacaggctcttgacagcacag

SEQ ID NO: 15581 - DNA, 600 bp, Chicken  19866894222141_2
aggggcttgggtgcacacatgctcagaaattagccttatgtaaaaaagcattcgttttttgcaagacaagactgcacacccacaaccataggtctacctcctctgacacctgtaattctgtctaaggaacagattgctctatcctttgcaaaataacaggtgctcctcttgctcaagtcggcagcrtgttagctctgggggatggggtaagcagatccagccccaacacagccagccagcccttgaagcagatggagcggcaatgcagctcagcatcatactagttctggcaggggaagraggacttgactaactgcagagcaagcatgaattaccctggcctgctctcacttccaactatggacttgtaaatcaggcataaatccttccttgaggagactgcaggaaccagatacccaggcaataacgcaagcccctcagacatccagccaaaggactagcaagcacaggctcttgacagcacagaaaccagtatctgttgcactgagagcagcccccaaatgaaatcctccaagagaaaagcttgctttgcccttctgccctgaaagagaatggggctgacctgcaggtggaatcact

SEQ ID NO: 15582 - DNA, 599 bp, Chicken  19866894222144_1
  misc_feature (1)..(178): n is any nucleotide
nnnnnnnnnnnnnnnnnnnnnnnnnnnnnnnnnnnnnnnnnnnnnnnnnnnnnnnnnnnnnnnnnnnnnnnnnnnnnnnnnnnnnnnnnnnnnnnnnnnnnnnnnnnnnnnnnnnnnnnnnnnnnnnnnnnnnnnnnnnnnnnnnnnnnnnnnnnnnnnnnnnnnnnnnnnnnnnnnnatgaaccttctttactgataaacgctattgtaccaatgaactgacaacgaccaaagtcagtgttttggagtgacatgataattcaggacacattcttagccacccttttcttagctgtgaarttgccctgtattccccttttgaggcccaagatctcacaaccacccctgttaggaacaggaactttgtgtgtgaatgggaaatcagacttgcatcctgctgtggctatgcagaggcttcagatgaaaccaagcagcaacaagatgcctaataagagacagcttgctcttgcatagtaaggtaaaaggaagtagaaggaagagagtctgaagatctcttccactaattggcttaattaattatggctccaatagccagaggtgctaccaatcctagaagttagagactcctgaagaccagt

SEQ ID NO: 15583 - DNA, 600 bp, Chicken  19866894222149_1
ggagagaactggttgagcttattccaaggtaggtaaacacggagctgaaaaactccttctctctggttacaggcttgtaattaccactcttctgctcctgtaagggtcagaaatcgagcacaaccacagtacctgagagctgagctgcagggaggtgagcaaagggtgaagttgtgtctgtaagctttcaggctccaaacaaaccaaggactttctcagccctcaatcagtgatttgctgctgtctctctccatgtctcatccttaagcagctacctaagggcaggggtgctaacccagmctccatctccttccttgcaccctatctgaattataggtgtgatttttctggaacagcttaggtaggtatcaagctgtaaattcggctttgggtacgaggctctttgctttcccttcttgcctacatatttttgagccaaaacccacaagagaaagaaagaaagaaaaaacctccttccacctggaacaaggttcacaaaagaggctcattaaactttgatgattacccagtcaaatggagctctgttggacaaagagatagctactgctgaggacaagccagtttttcaagactcagctc

SEQ ID NO: 15584 - DNA, 600 bp, Chicken  19866894222176_1
cttacaacaaaggtttagaaaaacccctccactgttctacatagctccctatgatgttctaatatatctgcagctgtaatacagggatgtatacaagatactgccttgtttgggttatttatatacaccattgcacaaactcagaagtctttcagagggctaggttcatgtcagtttgtcagaaattatactatttgagagcccacagtatttcagtgggaaaacgtatttggtggccaggacaggtaaatcaagagaaggctgctcatcttatccagggatttggtataggatatggtrcttgtgacagcccacatacaaactgtcctggtctcactgacagctatatgctccaatctgcttagtccccatgaacaaggcactttgcaaactgaagatctgatgcagaagcatctggcacatggtaaagtcctccctgctccctctgtgagccaatctttgccttcagcatcataaaatgcagagtcaaactttctctttcacctacaggcacattccagaggagttttacacagtaacatgtgttttccttgggctcctcaattatggcaattcctttgacaatcacagcattcaacc

SEQ ID NO: 15585 - DNA, 600 bp, Chicken  19866894222182_1
atgccttaggttcatttcccaagaggtctatggaagtgttacacactttagtgtcagcagaatggaaaaaaaatgccttctcaattcatctcagacagtctaccaaatcaggcatttatcatatgtcagataaagtagatctaacagattaagtaaacaatgaaccgataaagtcaatctagttctaatacttttaacagatgtatattaaatatatgtttatatatatttagcaaaggggaagaaaaagatggggaatgtagaagaaaaggatcaaatacagcattttgacaagcaagyttattctcagcatgacaaaggaatacaattctgtagatttattccatatgaaatacaaactcagctgttcaaataagtctctgtagcccagaatatgtgttctcacatcttatcaccgataggccccctayggtggaggggctgtcttgtaaacacttctaccaattgtaattctattggctcctcctcttcaagagtgatcttctctgccatttagctacttttctaacgctacaacccacacccctagtaaaagaactggacacttcctaagtcattttttaaatctatatttaatca

SEQ ID NO: 15586 - DNA, 600 bp, Chicken  19866894222182_2
aaagtagatctaacagattaagtaaacaatgaaccgataaagtcaatctagttctaatacttttaacagatgtatattaaatatatgtttatatatatttagcaaaggggaagaaaaagatggggaatgtagaagaaaaggatcaaatacagcattttgacaagcaagyttattctcagcatgacaaaggaatacaattctgtagatttattccatatgaaatacaaactcagctgttcaaataagtctctgtagcccagaatatgtgttctcacatcttatcaccgataggccccctayggtggaggggctgtcttgtaaacacttctaccaattgtaattctattggctcctcctcttcaagagtgatcttctctgccatttagctacttttctaacgctacaacccacacccctagtaaaagaactggacacttcctaagtcattttttaaatctatatttaatcaagaacacctaaagaactgcatatgaggaaaatgtaaatgagaaagtgaaaaatgtagcagctggaaatcagaacaagagttaactcttcataaccacattcatcattcaccaggtaacatttctcagttat

SEQ ID NO: 15587 - DNA, 364 bp, Chicken  19866894222191_1
aaatatcctggctgcacatgtagccaaatctcttctcagcaaagatgtgaatttatctttttatcctgctctggtaaatagactaaattacagcttagggttcttgtggccatgtctgaaaaaagcctctaggaaaagaagggatggtgccagaagcaattagaaaaatgattgaagagcttgaaaattgccttgcagtgaaatatttaaggagatcagtctgtttattaaaaaagatatttgggaagtgacttaattacaacacaccttcacagaaataaaaatatctggtactctaargaacattttaagctagtgcagaaaaaagcatgaaacaattgttttaggtaaaaaggaatttatt

SEQ ID NO: 15588 - DNA, 381 bp, Chicken  19866894222199_1
tgggaacccaggcttcatccctggtcctagagctgagggcatggggaagaaaccccaaaagcatttttgcacacgtgcctggctctgtagccttggtaggcatgaagacaaagggacttggtgtgtcctttggctctgcttcagccatcccccagcagtatccctaaaatccaccagcatctgctccatcctgagctccctggctgctgagcagtgctgcgcgctgacctttgggttgctgcggacatctggccgcggtgcctgtgcctaactgagcgcagcgagcagagagccaagctyggggcatttacagccttgcaacattttggtgtctctttgggtttgaaataaggcacatttggtaaatgttccttattaaat

SEQ ID NO: 15589 - DNA, 599 bp, Chicken  19866894222200_1
  misc_feature (1)..(51): n is any nucleotide
nnnnnnnnnnnnnnnnnnnnnnnnnnnnnnnnnnnnnnnnnnnnnnnnnnntgctttccttccctacggagatatggcactcagactactgcctatgtatctacctactcctgccattaagtcttgtattagtgtcaaggcctgggataccatgactgtacttgtatggatccaaatcctttgatcaaatatcagctttgcaagggatggagggacatcttcactttcaaaaacagttgagctatgtgagacccaggggacttaacccttcacttcagtcctcgtcctcatccctgtgcrtctgagaagctgtctttccgattgtacctggagcaccactgggctatgaaccatgggcagtttgcgccacagcaagtatgcatatgagtgtgtgtaagagaccagcatcttaacaaagcatgagagggaattcatcatgcaatctcggacttcacggacaagtaaaactgaaacaaagacaaaaactcactctgaatagcagtgtgcaatatgtgtagagtagcacccaagcactactcagatgctgcgggtcaaacaccgggcatttggtagtgaggagagttaatctgatctgacag

SEQ ID NO: 15590 - DNA, 600 bp, Chicken  19866894222203_1
caaatgaaaattatgctaacgatctttcctttctcactttcttctcattgctctcctccttcccagtccctccatatgcctatgcctgacatctgcagaattctaagccaaagtattgaaaatcacttatatagtcttcattttttttaggaaggtgttcgtcctaactcttctaggttttaatacaggtataagtgtgttgagtacttagtgttttgtgttttaaagaattaagacacagagtgaggttaaatgattaatagatagaactatgggttcagcaaaatgcttagcatatgyttggatagttgccataatttctttatgaaacaaacttatcctttagagagagattttctagtgctctgttttctccagatgtttctgagaacataattctgtacaaatgagtttggattctgttgtgtgccattaaggatgaatggaaagaaggtttgagatttctacatatttgtgagcgctggaaaattgttagagaatattaatatttctcaatcagttctgaatttcatataaaaatataaaatgagcagttttgttggtgtttttttcttttttttcccttttgaaaacctctgt

SEQ ID NO: 15591 - DNA, 600 bp, Chicken  19866894222208_1
acgaacagcaaattgtatagagggcttgtgaagaaccgcaagatcatcatcatcagtttttctcttttgtctattatgtaacctcagatcagtccacttaatgcactgacttgaaaattaaacagttttaggagtccttcatcagatgttctcacgtctctgaaaagaggatgaaaaaatacgtccatcaagattaggcagagagctagaaagtctcagtacacttgaaatccaattttcatcccccagatgactaccaaagcctctacagaccattttggacatgtacacataaaaaaktgcagctttctaggctgctccatcagtgagaacaacctcagactgcaatctgcagtttagataaactctgaaactgaccagttgtttgcttgtgtttttcctaccagataaacaggttggacttagctgtcagagcatcccagctgtgccttgacttggcaggtgaactcggttaactgtgagaactagaatgtagtcagtcatgtgcctgtagccaactatttttacaacttttagttttgaatgctctgtggcacaggccaaaagaaaggatttattatatgaatcctactattatgc

SEQ ID NO: 15592 - DNA, 600 bp, Chicken  19866894222219_1
tgtcagcttctctaggagaatactgagagagatagcatcaaaagatttgctgaggtctaagtagactacatcaacagcttttccctcatctaccaggtgggtcacttgatgatagaaagagatgaggttggccaagcagaacctgcctttcatgaacccatgctggttgggtctgatcctgtggctgtcctatatatgctgtgtggtctcactcaagacaatctgctccataacattccctggcactgaggtcaggctgaccagcctgtagttctttagatcctctttatgactcttttygtagatgagagtcttcatcacattcatgggattcatcacatttaatgatcaagattatctttcagaacagatatgtgcagctctgttgattttcactggcaaatgcaaccctgacttgaagggcagaagagatgagttaaccaaccatctgaatgcaccacatgaccagagaagcatgagctgtataaggcagtgctaatgagacagatacagagggaaggaataaatctgtaactcatttcaatttgtcagctaaaaaatgatggagaaccttcccctttacagtcaacaaagcagcaa

SEQ ID NO: 15593 - DNA, 600 bp, Chicken  19866894222227_1
cccctttgaagtgacaggagtggctcccaaagaaacaacaaatgcctgaaattctggatgaccagatctgctaagttgataggcctgaactgactgcctgaactgactgttctttcttctaatataaattgactccgatgttgccaagcaaaggaagctttccaattgcatcacacatgcaaaaccaaataaaaaatgcttcaaggatttattacattctgtcttagggccaaaccattcaactgattctctaatctggagatgcctgctgtccccaccactgttaggaagtgtaagcamtggggtaagccttgtgtcagatacacacttgtgtatctgcttcagaaagacaaacaacaggtgtcwtaagtagagagaacctgagaagaagaggtgttggtaggacacctggagataactactgctttctaaaacacaaataataaggtcagatcagccattgggttcagaatctcaactccttctcctgctcagctttgcaattttatttatagcagaactatttcctgtgaatgaatatctgaaataccattcatttatgagacagaaaaaagtcagctagagatttatagttgccca

SEQ ID NO: 15594 - DNA, 600 bp, Chicken  19866894222227_2
tctgctaagttgataggcctgaactgactgcctgaactgactgttctttcttctaatataaattgactccgatgttgccaagcaaaggaagctttccaattgcatcacacatgcaaaaccaaataaaaaatgcttcaaggatttattacattctgtcttagggccaaaccattcaactgattctctaatctggagatgcctgctgtccccaccactgttaggaagtgtaagcamtggggtaagccttgtgtcagatacacacttgtgtatctgcttcagaaagacaaacaacaggtgtcwtaagtagagagaacctgagaagaagaggtgttggtaggacacctggagataactactgctttctaaaacacaaataataaggtcagatcagccattgggttcagaatctcaactccttctcctgctcagctttgcaattttatttatagcagaactatttcctgtgaatgaatatctgaaataccattcatttatgagacagaaaaaagtcagctagagatttatagttgcccaacaatttaattcagcagtttaaattatgtttgcagatatgagcaatatatcttcaatataacaaac

SEQ ID NO: 15595 - DNA, 600 bp, Chicken  19866894222227_3
aactgcctgtcattcagatacttcggcttccaagaccacaagatgctttgctttttcatacactccacgtgattgcagtgatgtcagcctaagactggaatttgtatcttatacaatttgctaagtacaggtttcattctatatggtggcaagtactctgtttttagtctattaacacatctacagatttccagaggttactaattccattactctttggcatgaactgctttcctggtctagggtcacactgttcaggacattacagaactgagttcctagtgtctgtgtcatacacasgtctgcaggttctttgataaatgtcagtcacaagacttgacctacctggaaaataatttggtagagtctcctgaatgaaggagagtcttcctggaaatcagctaagctgtaaagactaagtcagctttgaatttcagaagtgacatgtggtactgtcaaaaaagagggaatgtccagatgttctttgtttttctagatagattgccagctaggtaccctacctgcaaagacacacctttaaaggttgttactctttagcaaaccaacataagagatctctggaggagaactatcaggaca

SEQ ID NO: 15596 - DNA, 600 bp, Chicken  19866894222231_1
ttttggttttctcccactaacgaatcctcatttgcattatagcactttcaagtcacagccctgaaggtgtcatatttaatttacttaatgagtatatgataatttatgtctgtcattgcctgatggtgcataaatgtttggctagattcatcagtttcaatttactttcaaagatactgtaggcttgcaaacattgaggaaaatgatagcactttgaaaagaaaaacacatccaaaatatggagatacatttctaatttctgctttgtggcagttctctagtttaatttaataagcagcwtcacagcaacaaaagagtctctcctttctaaaccattggtacgtttcagtatgtttgaaggggattttgtttgcagtacttcacataacagaacgtaaattaagtgacgagtccatttttcttaactttttctgtawacagtaattttcattttctaaaaaactctgcatttggtaagcagtttaaatttctgtgatctaatgcaatctgcagtatggagattttactttatttctctgtttgttacattcattttgattgaccataagtatgttacccagatatggacaaaaaggtgga

SEQ ID NO: 15597 - DNA, 600 bp, Chicken  19866894222231_2
ttggctagattcatcagtttcaatttactttcaaagatactgtaggcttgcaaacattgaggaaaatgatagcactttgaaaagaaaaacacatccaaaatatggagatacatttctaatttctgctttgtggcagttctctagtttaatttaataagcagcwtcacagcaacaaaagagtctctcctttctaaaccattggtacgtttcagtatgtttgaaggggattttgtttgcagtacttcacataacagaacgtaaattaagtgacgagtccatttttcttaactttttctgtawacagtaattttcattttctaaaaaactctgcatttggtaagcagtttaaatttctgtgatctaatgcaatctgcagtatggagattttactttatttctctgtttgttacattcattttgattgaccataagtatgttacccagatatggacaaaaaggtggaaaagtctatctggagcgcttgaatcaagaaacatgaacctgaagttgcactaaaaatcctgtccacagaaatgtttaaatacttcttacgaacaacccaaaatctccatctaaacaatccagctgaattgatggttt

SEQ ID NO: 15598 - DNA, 600 bp, Chicken  19866894222235_1
cgcataggagaaggtacagccacaatgtccaccttttcctccttttctatgtctttgcctcccactcccttgctaaaatatcaatcttctacctccatcttcctaggcacattccaattcccagcatagaaccctacctccgtagctcctactgtcccactactcaccttttctgacttccagttccctcatccccatcaaaactggatcaacaccatcctcaccattcatttgctgtcaagtgccacccaagcccatgctatctcctttcacaatcttcctaggcctgatcaggtcccyctgggctgctgtagcttgcactgggaartaagatctacttcctgtaaaaaagcragttgctcttgttcagcagcatatggcgattttcccattgcaaattcaagaaaagagagaagttatttgattttccagtgttgcccactttgaggctacgcagttccaggaaagaagaaggaagtcttctgcacctttcctcaagtccctttaaatctccatgcccactccagctgcaacacactcacattatattgattaaaaagtaattgtagcagaggatcttaggatgctttaggtcctaat

SEQ ID NO: 15599 - DNA, 600 bp, Chicken  19866894222235_2
ccaccttttcctccttttctatgtctttgcctcccactcccttgctaaaatatcaatcttctacctccatcttcctaggcacattccaattcccagcatagaaccctacctccgtagctcctactgtcccactactcaccttttctgacttccagttccctcatccccatcaaaactggatcaacaccatcctcaccattcatttgctgtcaagtgccacccaagcccatgctatctcctttcacaatcttcctaggcctgatcaggtcccyctgggctgctgtagcttgcactgggaartaagatctacttcctgtaaaaaagcragttgctcttgttcagcagcatatggcgattttcccattgcaaattcaagaaaagagagaagttatttgattttccagtgttgcccactttgaggctacgcagttccaggaaagaagaaggaagtcttctgcacctttcctcaagtccctttaaatctccatgcccactccagctgcaacacactcacattatattgattaaaaagtaattgtagcagaggatcttaggatgctttaggtcctaatgactgatctgtgaatcagtaaagagcag

SEQ ID NO: 15600 - DNA, 600 bp, Chicken  19866894222235_3
ttgcctcccactcccttgctaaaatatcaatcttctacctccatcttcctaggcacattccaattcccagcatagaaccctacctccgtagctcctactgtcccactactcaccttttctgacttccagttccctcatccccatcaaaactggatcaacaccatcctcaccattcatttgctgtcaagtgccacccaagcccatgctatctcctttcacaatcttcctaggcctgatcaggtcccyctgggctgctgtagcttgcactgggaartaagatctacttcctgtaaaaaagcragttgctcttgttcagcagcatatggcgattttcccattgcaaattcaagaaaagagagaagttatttgattttccagtgttgcccactttgaggctacgcagttccaggaaagaagaaggaagtcttctgcacctttcctcaagtccctttaaatctccatgcccactccagctgcaacacactcacattatattgattaaaaagtaattgtagcagaggatcttaggatgctttaggtcctaatgactgatctgtgaatcagtaaagagcagaaactgacttaaacagtgatgcttac

SEQ ID NO: 15601 - DNA, 585 bp, Chicken  19866894222235_4
cacgtaccccagctggttggatctagctacattatccctagaggcaagtggtatcagaagcccaaggaagattagatatattttctaatgcaattaggtaattgtaagggaaatggagcctcaaaggaagaagttcagacatcctaaagaaaataagcgtattacgcatattatgctaaaacctgagtctgacagagacagtaaagccctgtttcacaaaatttggcaaatgccaacaaaatcccatgagaccttatttcagaagatctcagtgtgataggattgtgacttctcccaacwgcatctcattgcaygagggactaaggcagctgcaatgcaagactctataacaccaatcttgaatgaaatcctctttggctccttgstggagcacatgggcatctcccaagcctctttgccttgtactacccttttcttcacctgttttctatggctcttccctccagacagagtaacagtgaatgttaggggttgctggttgtttgaaacagctttctcccttcctcaaggctcatgacccctccctattttgggcctggctgtacatgatagtctttcttcctg

SEQ ID NO: 15602 - DNA, 571 bp, Chicken  19866894222235_5
ggttggatctagctacattatccctagaggcaagtggtatcagaagcccaaggaagattagatatattttctaatgcaattaggtaattgtaagggaaatggagcctcaaaggaagaagttcagacatcctaaagaaaataagcgtattacgcatattatgctaaaacctgagtctgacagagacagtaaagccctgtttcacaaaatttggcaaatgccaacaaaatcccatgagaccttatttcagaagatctcagtgtgataggattgtgacttctcccaacwgcatctcattgcaygagggactaaggcagctgcaatgcaagactctataacaccaatcttgaatgaaatcctctttggctccttgstggagcacatgggcatctcccaagcctctttgccttgtactacccttttcttcacctgttttctatggctcttccctccagacagagtaacagtgaatgttaggggttgctggttgtttgaaacagctttctcccttcctcaaggctcatgacccctccctattttgggcctggctgtacatgatagtctttcttcctg

SEQ ID NO: 15603 - DNA, 499 bp, Chicken  19866894222235_6
aatgcaattaggtaattgtaagggaaatggagcctcaaaggaagaagttcagacatcctaaagaaaataagcgtattacgcatattatgctaaaacctgagtctgacagagacagtaaagccctgtttcacaaaatttggcaaatgccaacaaaatcccatgagaccttatttcagaagatctcagtgtgataggattgtgacttctcccaacwgcatctcattgcaygagggactaaggcagctgcaatgcaagactctataacaccaatcttgaatgaaatcctctttggctccttgstggagcacatgggcatctcccaagcctctttgccttgtactacccttttcttcacctgttttctatggctcttccctccagacagagtaacagtgaatgttaggggttgctggttgtttgaaacagctttctcccttcctcaaggctcatgacccctccctattttgggcctggctgtacatgatagtctttcttcctg

SEQ ID NO: 15604 - DNA, 600 bp, Chicken  19866894222245_1
tgttaaagagttgaggtagctacgtgaactcaaaaggctttttcctttcagattttaacaaagcaattcaacttcaagtggcaaagcttgatggtctcatcttgattctaatttaatttattgcccatcacccagctttatcctatttgaaaagttatgctaccacaacccgactgaaaggctttagaatataactattagttatcttacataataagggataatgcagagccagtggtaataaggcgacaatcctgcaatttgacccactactgagactactacttctgtgcagagccmtgctgacaccaattatgctctccatagatgcaaaggtccatccagctggagtacagtgaagcatcagggcctgcaattgggatacacttcagttttcattatgttatgcrctgagcactacgtgtgagcactaagaaagcgtaccttgaaggtttcaaagcactggctgaaagacaggcactacagaaaatcacagcaaagaggaagggaaacactcgttcccaatcaaagcaaaataaaggcaaaacaaagctgaagtctgagaacagacattagtgcttatgggtaaaaaaaggaaac

SEQ ID NO: 15605 - DNA, 498 bp, Chicken  19866894222245_2
atttaatttattgcccatcacccagctttatcctatttgaaaagttatgctaccacaacccgactgaaaggctttagaatataactattagttatcttacataataagggataatgcagagccagtggtaataaggcgacaatcctgcaatttgacccactactgagactactacttctgtgcagagccmtgctgacaccaattatgctctccatagatgcaaaggtccatccagctggagtacagtgaagcatcagggcctgcaattgggatacacttcagttttcattatgttatgcrctgagcactacgtgtgagcactaagaaagcgtaccttgaaggtttcaaagcactggctgaaagacaggcactacagaaaatcacagcaaagaggaagggaaacactcgttcccaatcaaagcaaaataaaggcaaaacaaagctgaagtctgagaacagacattagtgcttatgggtaaaaaaaggaaacagaaaccc

SEQ ID NO: 15606 - DNA, 600 bp, Chicken  19866894222262_1
cgggtgccagatcctcaccgtggcctcggggctgtgctgggggcactcacctgctgccggcacgcttccagcaggacgccagtacggagcaggcaccacagctcacccagcagcgagaggaagatgtggagtatgtctgtccagcggcccacagtgaggaggaggatgaagaggcctcccatgcgcaccagcactgtctggtaggctgactgcctgcccgtgcctgactgctgctcctctgtggggacacagcgtcagggtacccccgcatggacggcacgctctgcaaccaggcagagmgtggaattcatccaacttgggaacgtcctggctgagccatgctcaaaacttgggggacccgaatgacakcacagctgagtcgtccccagaacctgagggacccaaaccagctcctggttgggtcatcctcacagtgttcaaggtccccattgcaaagccactgcatggggacatgtcctgttggtttcgatcccccaagctttggcccagtgacctttctgagtcacccctaaaatctttggggacccttttgcaaagccaacacttggagaaatgtcatctcggttgtgttatcctaaa

SEQ ID NO: 15607 - DNA, 600 bp, Chicken  19866894222262_2
agcaggacgccagtacggagcaggcaccacagctcacccagcagcgagaggaagatgtggagtatgtctgtccagcggcccacagtgaggaggaggatgaagaggcctcccatgcgcaccagcactgtctggtaggctgactgcctgcccgtgcctgactgctgctcctctgtggggacacagcgtcagggtacccccgcatggacggcacgctctgcaaccaggcagagmgtggaattcatccaacttgggaacgtcctggctgagccatgctcaaaacttgggggacccgaatgacakcacagctgagtcgtccccagaacctgagggacccaaaccagctcctggttgggtcatcctcacagtgttcaaggtccccattgcaaagccactgcatggggacatgtcctgttggtttcgatcccccaagctttggcccagtgacctttctgagtcacccctaaaatctttggggacccttttgcaaagccaacacttggagaaatgtcatctcggttgtgttatcctaaaaatccgggggacacacacacgtgacctccagaacgtgtcacctccagaacctgggggatccaaatgctg

SEQ ID NO: 15608 - DNA, 567 bp, Chicken  19866894222262_3
cctccagaacctgggggatccaaatgctgccccatttgcagacgcaaaccatggggctatgacctctgggtcaggtcatcctcaaaacttgttttccccaaacattccgtgtccttacagcccttcatcgccctctcaccttgcatatagatgacaagcagtgtgtagcagatagtgagtggtgtccagaagcggacggcctccgccgttgagaggaaatcacgattgatgagcgcaatggcagccaggtcagccacgacgaaggtgacggccagcgccctgcgcagcagccggggcacrccgtgcccagaggtgagcagcagcatgcagacaccgcagtactgcgcctggctgtgcagctcatacagggtgcaggtgtgtagagccaagcggcgggcgtgcacggccagcagccccgccagccccgccgccagcgccaggttgcaggtctcatggggagctccctccagcaggaagctgaggccgcaggacatcccacagcccagcgagaactggcacagcacgagcagctggatgctgtgggcaccctgcaggagcgggacggag

SEQ ID NO: 15609 - DNA, 600 bp, Chicken  19866894222274_1
cagatgtattagttttcctactgcaggagactcctgatgaatgttccagaaagaaaattttcaattccacccccaacaagtttgctgtcatcctgtgtggaggaaggaaggtttgaattggggtcttacaatcaagtgaacactgcactggcattcagtattagaggactgtgctttcattgttgcagtttattcattatatttcatttttccttgtaattggaaaaaaaaaaagctggtaaactgcagatccattttggaaaacaaacagaaagttaacagtttcaatgattacactgytttaacaacactgtgaaaaaggaagcctcataaagtactacaagtcaaaaactgaaatcaacagctcactgctcycattttaaagatggccttgcacatcccaggcactagctttactttaactttccagtcctatttcagcttttgactttycaaacattttatttcttcaaaagagtaacactgttctattggatgatgatgcagttttaatattatctaagctttattatataagttatctgcataatygttacaatttttagctgaagcaatacgaacgtaacaggcaggtgaagc

SEQ ID NO: 15610 - DNA, 600 bp, Chicken  19866894222274_2
acaagtttgctgtcatcctgtgtggaggaaggaaggtttgaattggggtcttacaatcaagtgaacactgcactggcattcagtattagaggactgtgctttcattgttgcagtttattcattatatttcatttttccttgtaattggaaaaaaaaaaagctggtaaactgcagatccattttggaaaacaaacagaaagttaacagtttcaatgattacactgytttaacaacactgtgaaaaaggaagcctcataaagtactacaagtcaaaaactgaaatcaacagctcactgctcycattttaaagatggccttgcacatcccaggcactagctttactttaactttccagtcctatttcagcttttgactttycaaacattttatttcttcaaaagagtaacactgttctattggatgatgatgcagttttaatattatctaagctttattatataagttatctgcataatygttacaatttttagctgaagcaatacgaacgtaacaggcaggtgaagcccctataaaaaaagcacacccagttttcctatctacagtttgctcactaatcagagtgctctggcacaaagttaa

SEQ ID NO: 15611 - DNA, 600 bp, Chicken  19866894222274_3
ttcagtattagaggactgtgctttcattgttgcagtttattcattatatttcatttttccttgtaattggaaaaaaaaaaagctggtaaactgcagatccattttggaaaacaaacagaaagttaacagtttcaatgattacactgytttaacaacactgtgaaaaaggaagcctcataaagtactacaagtcaaaaactgaaatcaacagctcactgctcycattttaaagatggccttgcacatcccaggcactagctttactttaactttccagtcctatttcagcttttgactttycaaacattttatttcttcaaaagagtaacactgttctattggatgatgatgcagttttaatattatctaagctttattatataagttatctgcataatygttacaatttttagctgaagcaatacgaacgtaacaggcaggtgaagcccctataaaaaaagcacacccagttttcctatctacagtttgctcactaatcagagtgctctggcacaaagttaaaatgtaaatcaattttaacagacaaaatacggaaaagtatatgaaatgagtgcttaccttgactctccactgctgttt

SEQ ID NO: 15612 - DNA, 596 bp, Chicken  19866894222274_4
cattttggaaaacaaacagaaagttaacagtttcaatgattacactgytttaacaacactgtgaaaaaggaagcctcataaagtactacaagtcaaaaactgaaatcaacagctcactgctcycattttaaagatggccttgcacatcccaggcactagctttactttaactttccagtcctatttcagcttttgactttycaaacattttatttcttcaaaagagtaacactgttctattggatgatgatgcagttttaatattatctaagctttattatataagttatctgcataatygttacaatttttagctgaagcaatacgaacgtaacaggcaggtgaagcccctataaaaaaagcacacccagttttcctatctacagtttgctcactaatcagagtgctctggcacaaagttaaaatgtaaatcaattttaacagacaaaatacggaaaagtatatgaaatgagtgcttaccttgactctccactgctgtttcttacactttcttcatcactgtgcccattcattgtaagtattaagaagttaaaaagaaagtccactcaggttacaaggtgtaggtcaagaatccc

SEQ ID NO: 15613 - DNA, 600 bp, Chicken  19866894222275_1
gagtgatggaagggggtggagccagaattcaccccttcccagacctcatttaagggttagcagggagaggcaaagtattttgctggagacccctgcatacctgagaccttccaaaagtaagtagttcttcctttgtttttgtgtccttggctgctgcatttgggcttgttcttgcttgacatagcgtaggattgccctactctgctgcttttgctgtactttctatcacattatagtagtatacgtgcaaatattgattgcttcatgaatgttattccagactttgcacctgatgaacayacacttttataattattttctactttgtctgcacgtagcccagagtttgattctgacctacctctgctttgcagattgaatttaggtgtagcaaatgaagtgcagattcaaaagagaaattgtcattctgaatcttttaaatttaatgttattgctgtagttctcatgtcagttttacgcttgtatgtagcccttatcataaacttttatttttgatttacactgctttaagtagaatgataattcagtccacaaagatgtggatttaagtgtctgtattgtgcaagttttcctttcttt

SEQ ID NO: 15614 - DNA, 600 bp, Chicken  19866894222275_2
ctttgtctgcacgtagcccagagtttgattctgacctacctctgctttgcagattgaatttaggtgtagcaaatgaagtgcagattcaaaagagaaattgtcattctgaatcttttaaatttaatgttattgctgtagttctcatgtcagttttacgcttgtatgtagcccttatcataaacttttatttttgatttacactgctttaagtagaatgataattcagtccacaaagatgtggatttaagtgtctgtattgtgcaagttttcctttctttgcttcaacaattaaggagcttycacagtgataaaaagttgtatcttctgatctctacgtttagtcttcctcaaggactatggcttttttatgtaagtgcttttctttttactgaactctgaacatacctaccagacttcagctttcagaggcattccaagtgcaatgtcctgcattagaataggggcaatctcaagcacagatacaggttgggcagagaatggcctgagagtagccatgaggagaaggatttgggagtgtcagttgatgaaagattcagtgtgagccagcagtgtgtgtttgcagcccagaaggccaactgt

SEQ ID NO: 15615 - DNA, 600 bp, Chicken  19866894222279_1
tcgggcgggaggtcttccagcactaccataatgagggaatcctgattttcatccaggacccggtgttcagcaaaatacagttcatactgacaccagcagctatttacaaaactgggagagagaacaaaaaggactttgtggctgttctctatgcagtaaaaaatgttgccaagtacaggatgccctggtttgaaatctctctcatgataacatatcttgaatccatcagtttccagttttttcagtagatgctccttcgtccagtctgcatcgtgctcgctgtatgaaatgaaggcatcraagggcttattttctggcctcttcttgtactgcctcctctttgccatacaccagtaccagcccattctcacataccacagcccatcaaagcgccagcataagcccgttagcaccagaacgacaaggatggccatacaagctgtaatggccatctgaatgcccagggagcagtgcagaagtgtgagattactgctcttcaccagcgagccccgtctgtctggtggaaagctgcacctgagatcatctttgccatttatctgcaaatgcgggttacggatgtagatgttcacaaaccagtac

SEQ ID NO: 15616 - DNA, 600 bp, Chicken  19866894222279_2
cttattccctgataaattaaaatgcttcagcatcaggagagattgccccaaatggtcagggagttctgaaatcaggttgtgactactgtccaggttagtgagtgaaggaagttggcaggcaggttctagtctggttattaggtttccagagacattaagtgattcgaggttctctagggctttggttaatgatagcaccttcaacttatttttactaatatcgcatgtcgttaaagtggatgggaagtattcgggatgcatctctgtaagtttattattttgaatattaaatacagttargttggagagagatttaaacctagggggtattattttaatatcgctgttacttatgtcaagttgctgcagagagataggtaggtcaggaagcatggaaatccgattgctgctgagatccagaaatagtagttcttgcattctgttsgcaaaccattctggaagttctacgatggagcagttggacactttcaggtgttttacgctctctggaaggctttcgatgggtgtaccagcctggtttctgaccaaggaaatagcgctgatttgtacagttccagggggaggccttggggttgcact

SEQ ID NO: 15617 - DNA, 600 bp, Chicken  19866894222279_3
ccagagacattaagtgattcgaggttctctagggctttggttaatgatagcaccttcaacttatttttactaatatcgcatgtcgttaaagtggatgggaagtattcgggatgcatctctgtaagtttattattttgaatattaaatacagttargttggagagagatttaaacctagggggtattattttaatatcgctgttacttatgtcaagttgctgcagagagataggtaggtcaggaagcatggaaatccgattgctgctgagatccagaaatagtagttcttgcattctgttsgcaaaccattctggaagttctacgatggagcagttggacactttcaggtgttttacgctctctggaaggctttcgatgggtgtaccagcctggtttctgaccaaggaaatagcgctgatttgtacagttccagggggaggccttggggttgcactggggttttctggacgtacggtatatatgagctgatttccttgaacrtacatacgttctaatttagataacttcttagcaaaatttgcaggtattgtactaatgtttgtgaaggacagatcaatgactgtgatgcttgctgggaga

SEQ ID NO: 15618 - DNA, 600 bp, Chicken  19866894222279_4
ttacttatgtcaagttgctgcagagagataggtaggtcaggaagcatggaaatccgattgctgctgagatccagaaatagtagttcttgcattctgttsgcaaaccattctggaagttctacgatggagcagttggacactttcaggtgttttacgctctctggaaggctttcgatgggtgtaccagcctggtttctgaccaaggaaatagcgctgatttgtacagttccagggggaggccttggggttgcactggggttttctggacgtacggtatatatgagctgatttccttgaacrtacatacgttctaatttagataacttcttagcaaaatttgcaggtattgtactaatgtttgtgaaggacagatcaatgactgtgatgcttgctgggagacacacagtttccaggctgttgatgggattgttgctgatatttaaaaatgaaaagttgctgaatgggaagtgacagattgcttcaacgtctatgttgttaattgttattctgttgtagctggcatcaacggactgtatatctttcatcggcaaaaacaggatgaacagagatagaagatccatctccaggtcgctgtgacta

SEQ ID NO: 15619 - DNA, 600 bp, Chicken  19866894222281_1
catcgagagtacttggccctaaacaacattacaaataacacacgttggaactttaccatcttcctcaagaaatgcactggacaatacgaagaaattatttattacacaaaactgcacatctccccatccggcgaaaattaaattattggataatattctccccataaaacagctgataacaattcatttcttattttgggagaaacaaagtgagaacagaaataaaggctttgttgcagcctctaaaatgctactttaactccacattgccaagccacagctgtctatacaacagattcktacaattaacagggagtgagcagttctctccattaggaagaagttgcatttggttggttttgtttgtttcttagtggtttgggtgtttttcccccccacacttcctagaacttatttaccaccatgagtgcattttagcatccacgctactttaataactcatttatctgggacactggcagatctgcagactaatagtagatagaacaaaaagtacctaaacctcaacagtcagagaaggtctctgttctgtggatggccaaaaccataaaaatgcaaagaccaagacaaaaccgtgac

SEQ ID NO: 15620 - DNA, 599 bp, Chicken  19866894222283_1
  misc_feature (1)..(97): n is any nucleotide
nnnnnnnnnnnnnnnnnnnnnnnnnnnnnnnnnnnnnnnnnnnnnnnnnnnnnnnnnnnnnnnnnnnnnnnnnnnnnnnnnnnnnnnnnnnnnnnnnggggagcgttgagccctttcatcacagggaggattgttagaatccatcattttctcggcttcctagttaaatttttaaaagcccacctgaaaaccctccattagtacctgtcaaggctttctttgagtgtactcctgctctgatttcatgctgagctaatatctaagaaaaatattatctctctgcttggcttgctgccatcyctcagtgtttgcactgcagtgggggatggagcygccccagttcattggtgctgctggtggggctccctccagctgcagtgggacttgccttgctttggggtcggggcccaggtgaagtggggctgggagaaatccctctgatggagtgatgctggcagtgctttaggaagcaatgagaactgcagagccctacttggtgccatgcatggggtggcattgggaacagagggaaggtctgtgggtgcagaagttcttgctgtgtgtgtttcatccaccttaagcagtgggtacctgctggt

SEQ ID NO: 15621 - DNA, 599 bp, Chicken  19866894222283_2
  misc_feature (1)..(64): n is any nucleotide
nnnnnnnnnnnnnnnnnnnnnnnnnnnnnnnnnnnnnnnnnnnnnnnnnnnnnnnnnnnnnnnnggggagcgttgagccctttcatcacagggaggattgttagaatccatcattttctcggcttcctagttaaatttttaaaagcccacctgaaaaccctccattagtacctgtcaaggctttctttgagtgtactcctgctctgatttcatgctgagctaatatctaagaaaaatattatctctctgcttggcttgctgccatcyctcagtgtttgcactgcagtgggggatggagcygccccagttcattggtgctgctggtggggctccctccagctgcagtgggacttgccttgctttggggtcggggcccaggtgaagtggggctgggagaaatccctctgatggagtgatgctggcagtgctttaggaagcaatgagaactgcagagccctacttggtgccatgcatggggtggcattgggaacagagggaaggtctgtgggtgcagaagttcttgctgtgtgtgtttcatccaccttaagcagtgggtacctgctggtaatttccctctgcttgtacagctgccggggccg

SEQ ID NO: 15622 - DNA, 600 bp, Chicken  19866894222283_3
ggctccctccagctgcagtgggacttgccttgctttggggtcggggcccaggtgaagtggggctgggagaaatccctctgatggagtgatgctggcagtgctttaggaagcaatgagaactgcagagccctacttggtgccatgcatggggtggcattgggaacagagggaaggtctgtgggtgcagaagttcttgctgtgtgtgtttcatccaccttaagcagtgggtacctgctggtaatttccctctgcttgtacagctgccggggccggggctgaaggatgttttaatgcactcaygtcgtgcagagcacttgatgcatctccttcttgcaagaggggaagaatagagaagcgtgcaggagggcgaggagcgcggckcagggctcgctgagtgccggaggagcagcagcgaggctctcagagcagccttcctccagctgggctcctcttttgcaattccagtgtcttgtttctcagtaatttatatcgacagagtctttcaaaacactttagggctgtttacagcgctgagcaagaacattttgtctctccatccttaaagacgatcctctcctgtgttgttcctcatcccgctgc

SEQ ID NO: 15623 - DNA, 600 bp, Chicken  19866894222283_4
tggagtgatgctggcagtgctttaggaagcaatgagaactgcagagccctacttggtgccatgcatggggtggcattgggaacagagggaaggtctgtgggtgcagaagttcttgctgtgtgtgtttcatccaccttaagcagtgggtacctgctggtaatttccctctgcttgtacagctgccggggccggggctgaaggatgttttaatgcactcaygtcgtgcagagcacttgatgcatctccttcttgcaagaggggaagaatagagaagcgtgcaggagggcgaggagcgcggckcagggctcgctgagtgccggaggagcagcagcgaggctctcagagcagccttcctccagctgggctcctcttttgcaattccagtgtcttgtttctcagtaatttatatcgacagagtctttcaaaacactttagggctgtttacagcgctgagcaagaacattttgtctctccatccttaaagacgatcctctcctgtgttgttcctcatcccgctgccccactcctgccctgctctgccccatccgtggctgggatgtgtgcttgtccctgctcccttggcacacgggtcactattgc

SEQ ID NO: 15624 - DNA, 600 bp, Chicken  19866894222287_1
tatctgtccccaatgcttccttgctgctcctggacaggatttgtggtccctctggcactgtgggtgacctcagtggccagtaggaaggtttgtcagtcagttgtgagtcaaagagaggagaaccagtgagcttctctgtagggtggcctcttgtttctacaaaatcatttcatctatttatttacttacttttacagtgagataagctattgaccctcctgttacacaggttgaagcagcccccacaggatccaaagtccgaggtcggacggatggaaggactgagcataaatcaagttkgttctgaaaatcaagttaaagctggatccragtagagagcacagtagaaaaatgttttgtttttgttttgtcagctttatttatttttctgttatttttaattgattcactggtagtaattagttaggataaaagacaggtcttctaaaacayaggggcaaatttcatgcaagcataattgtgccttgctatccagatatgtgtttatggatgtaggtatgtgaatgactttattcataggagtagctcctgggagacaactactgtgaatataactactcacattttgaaatatttccc

SEQ ID NO: 15625 - DNA, 600 bp, Chicken  19866894222287_2
tggacaggatttgtggtccctctggcactgtgggtgacctcagtggccagtaggaaggtttgtcagtcagttgtgagtcaaagagaggagaaccagtgagcttctctgtagggtggcctcttgtttctacaaaatcatttcatctatttatttacttacttttacagtgagataagctattgaccctcctgttacacaggttgaagcagcccccacaggatccaaagtccgaggtcggacggatggaaggactgagcataaatcaagttkgttctgaaaatcaagttaaagctggatccragtagagagcacagtagaaaaatgttttgtttttgttttgtcagctttatttatttttctgttatttttaattgattcactggtagtaattagttaggataaaagacaggtcttctaaaacayaggggcaaatttcatgcaagcataattgtgccttgctatccagatatgtgtttatggatgtaggtatgtgaatgactttattcataggagtagctcctgggagacaactactgtgaatataactactcacattttgaaatatttcccagattggttttgcatcaaaaggtgctgggg

SEQ ID NO: 15626 - DNA, 596 bp, Chicken  19866894222287_3
tttctacaaaatcatttcatctatttatttacttacttttacagtgagataagctattgaccctcctgttacacaggttgaagcagcccccacaggatccaaagtccgaggtcggacggatggaaggactgagcataaatcaagttkgttctgaaaatcaagttaaagctggatccragtagagagcacagtagaaaaatgttttgtttttgttttgtcagctttatttatttttctgttatttttaattgattcactggtagtaattagttaggataaaagacaggtcttctaaaacayaggggcaaatttcatgcaagcataattgtgccttgctatccagatatgtgtttatggatgtaggtatgtgaatgactttattcataggagtagctcctgggagacaactactgtgaatataactactcacattttgaaatatttcccagattggttttgcatcaaaaggtgctggggagttcatgtgcgtgttatgaatgtaacaccacagagcagggaaatattgctgcaaataaagcaaaatgctttttcttacccatctgttgcagatctgatgttgctgaacagaataattt

SEQ ID NO: 15627 - DNA, 600 bp, Chicken  19866894222289_1
aaacaaatggcaaacgtttcagtactggctcggtagctaattattttgcatcactgttcttaactcatgctaggagttttctttttttcttcatcagagctgaattgcattgcaatttcagcctgacctgtttcaaaatcctgctccagaaaactctcgacagaaatgctgtggttactggcagacagcaagctgtattcagggtttagaaagagccattaaaaggctgttttatggctgcagtgtcttcctggctccaagcttttgagagtttggggtgctgccatagtggtagcaggscacctctcctgctgttgcttggtgacctgtgaaggtttgtggtctcaagcagctgaactcggtaacagctcctgtgcagagctcgcttggatgtttgtcacagcaggcttggctgtgggcaggcctggcactgctgattctcataaggaaccaagtaacgcccagggatgcctggacatcactgagttcccgtggctgcgctgtagcgtggcctctgcggggagatggttcctgcgtgcccaggggctgcaaagcacagtggttcttgcttctgctggggctccgcagagcctgctgtga

SEQ ID NO: 15628 - DNA, 600 bp, Chicken  19866894222291_1
agaccaacacgtgctgtagtgaggtagagcaaactctagctctggcactccccagcgctctctcccttctgacatgaaactctgtggctcctgttttctgggtgttaatggcttttgatatgactatgattaacacaggtcacagcatcactcataacgtttctcctggcttgttggccaggacttctgctttcacatgcgtacgtttggcccaagtcaacaatggtgagccccaagtggtttgaaatcctgtggtaagtggtatggtgtaaattactgtgaacacagcacagtaatacycatacgtgtatgaactctgctgcaagcctgtggttgaatggtttgtccagtgaaggagaaaaagggagagaagtctgaaaaggcctgaagagtctgaaataacatgtggtgatgcagtacctgccttggtacatggaacacccaacttcagtcctttttagcactggttggaagcaggtggctcacacagaggccctttgaagcttgctctgctacaggaaatgaaagaagtgcctcgtgctcctgcatgtgcctgtgtggtgcttccatccaccagcagtatgggttattcttggtatg

SEQ ID NO: 15629 - DNA, 599 bp, Chicken  19866894222296_1
  misc_feature (1)..(64): n is any nucleotide
nnnnnnnnnnnnnnnnnnnnnnnnnnnnnnnnnnnnnnnnnnnnnnnnnnnnnnnnnnnnnnnnatttgttctccttctaggataaggccacccacttgctagatgaaaggaaggcggtggattcagtctttctagatttcaatgggatctagagcattgggcaatcatcagtgtaatgagattcaacaagggtaaacactgggtcctgcacatgggatggagcaatgccagacacaggaatagactgggaggtaagtggctgcagagcagctcagcagagagggataagggggtgcaartgatagcattctcagtgtgagcagcagtgtgtctggcagccaaggggcaaagcacattttggggtgcattaagcatagtacagccagccggccaaaagaagcgattatcccagtattgggccagcattgatggagcatcacattggatattgcgttcagttctgagctcyacaatacaaaaaggatgttgaagtacttgaaagcaccagaaggaggcaccaaagctggtaacagggctggaaggcatgctctgtggggaggggtgggaggacacctgacctcctcttctccatatggga

SEQ ID NO: 15630 - DNA, 600 bp, Chicken  19866894222296_2
agtgtaatgagattcaacaagggtaaacactgggtcctgcacatgggatggagcaatgccagacacaggaatagactgggaggtaagtggctgcagagcagctcagcagagagggataagggggtgcaartgatagcattctcagtgtgagcagcagtgtgtctggcagccaaggggcaaagcacattttggggtgcattaagcatagtacagccagccggccaaaagaagcgattatcccagtattgggccagcattgatggagcatcacattggatattgcgttcagttctgagctcyacaatacaaaaaggatgttgaagtacttgaaagcaccagaaggaggcaccaaagctggtaacagggctggaaggcatgctctgtggggaggggtgggaggacacctgacctcctcttctccatatgggagcccgagaggccttcattgctctttgcatctccctgaagagaggaagcaaagggaggtgccaggctcggcatgctcctggtaaccaacagcaggcatgcaggaacaacatcagctggttcagactgggaagcattaggaaacttttctgtactgttgagaatggtcaaaca

SEQ ID NO: 15631 - DNA, 600 bp, Chicken  19866894222303_1
agttgttttagacttctctgtacaacaaaggcatcaacatagtggaacaagttcaacaaagtaccatcaagataagatggataaagggctggagcaaatgatttatgaagagaagctgaacagggtttgtttagctttgtgaaggtcatatagatgcctacaaccacattacaatgaggttatagaaagtatagagtcaggcttggaggtgctccttgaaaggaggaaaaaatacaggggaaattccaactaaacagtggaggaaaactgtcatactgggagcagtctttgctgaaagarggattcagggtggcagtggtttctctgactttgagatgtctagaatttggctggccaagtacctgaccagagccaagtttgttcttctttgagccagagttcagagcagaaagctctagagacctttcccaacctcagctgtactgtgactttatacaaatatgcaaaagctttgcctgttagctttctgtctagtttaccctgaagtgaatggaggctacagtgcagctgttggtaagttgctcttgtacctgaacccctggcactttgtcaaataggttttccttatccatgtgaatt

SEQ ID NO: 15632 - DNA, 600 bp, Chicken  19866894222314_1
aagagtgaaaaaagagaagcatctggctgggaacagcagctggttgctgggtgtgaggatttggtgggatgtccttctgctgagtgcctgacaggttccaggtgcactgcaggcatgaccatgccttgctatggttctgactgtgagtctaaaccatctagacattattccagtatgtaccagacactcaaatacactaattcaatcaagacctgggtctctccttggactatcattccgtaaattcctttgatgatcatcactgtattctataccacagatcacaccaaagtctttccwagagcctatgctgtagcccatccattamtctactgtataccctcaatctttgctgcaattcaaatgaaaactagcacatttctagtcaggacatgagattgctctgcagctaaacccaatattttgagttctctttttctctggaaatggtatagcctggttatcctaaaaggaggaacagaaaagacctccgttgtacagttaggtctctctaacacagtagattcataacagtatggcatctcaggctaaaaatcttgctggtaatgttcatatttgacaggatcttaattttatcct

SEQ ID NO: 15633 - DNA, 600 bp, Chicken  19866894222314_2
gggaacagcagctggttgctgggtgtgaggatttggtgggatgtccttctgctgagtgcctgacaggttccaggtgcactgcaggcatgaccatgccttgctatggttctgactgtgagtctaaaccatctagacattattccagtatgtaccagacactcaaatacactaattcaatcaagacctgggtctctccttggactatcattccgtaaattcctttgatgatcatcactgtattctataccacagatcacaccaaagtctttccwagagcctatgctgtagcccatccattamtctactgtataccctcaatctttgctgcaattcaaatgaaaactagcacatttctagtcaggacatgagattgctctgcagctaaacccaatattttgagttctctttttctctggaaatggtatagcctggttatcctaaaaggaggaacagaaaagacctccgttgtacagttaggtctctctaacacagtagattcataacagtatggcatctcaggctaaaaatcttgctggtaatgttcatatttgacaggatcttaattttatcctttctcttgagattcacagaagcagtcct

SEQ ID NO: 15634 - DNA, 600 bp, Chicken  19866894222317_1
ctttttagcttccaagctaaggaatctgtaatgtacaaggcaacgtgtgcagctgcctgacctcccaggcatacatttgtagctccagtcagcactgtgattcaaaacaactctttcagagcatgggaaggtgtgaggcagccgggacagctgccagcactgagagcgaatgggatccagagcagcgcatgaactggcatagctgagcacagtaagtgccaagcagatttacagtgatttaaacagggcttgaactacaggaaatgagggggaagttggagactttgtttttgaacgtartatagtattatttaattactatgccgttactttcttctcgtgaaatataagtaaagaactctgtatcttcaactcaattgtgtaagctcttcagttattcttttgtttggatccttggaattttataagggttcttaagtgtctgctttggttttattaytaagcagatactgcgtacctatgattatggatgctttaacttatttatattagccattttttccattccagtttccagtactaatttcagttacctaaaagccagtcagagcacgctaagatggatccacccacccagag

SEQ ID NO: 15635 - DNA, 600 bp, Chicken  19866894222317_2
tgagagcgaatgggatccagagcagcgcatgaactggcatagctgagcacagtaagtgccaagcagatttacagtgatttaaacagggcttgaactacaggaaatgagggggaagttggagactttgtttttgaacgtartatagtattatttaattactatgccgttactttcttctcgtgaaatataagtaaagaactctgtatcttcaactcaattgtgtaagctcttcagttattcttttgtttggatccttggaattttataagggttcttaagtgtctgctttggttttattaytaagcagatactgcgtacctatgattatggatgctttaacttatttatattagccattttttccattccagtttccagtactaatttcagttacctaaaagccagtcagagcacgctaagatggatccacccacccagagggatcagtggcatagcttggatttgttcttatgatcattcatgctgatttattttccacacagagaaaagactggaatacggcagcactgtatcagtttgtcactgtagctaacttgcactgcaaggtttgaaaactgtggccaagggtttttttatttc

SEQ ID NO: 15636 - DNA, 600 bp, Chicken  19866894222317_3
gatggatccacccacccagagggatcagtggcatagcttggatttgttcttatgatcattcatgctgatttattttccacacagagaaaagactggaatacggcagcactgtatcagtttgtcactgtagctaacttgcactgcaaggtttgaaaactgtggccaagggtttttttatttcaagtgtggatagaagtcagcaaggctcttctaaactatggggtaagcacttatgtctgtcaggttcacagcatacagagcaaaagcagcaatggaaaaatgcaaaagctaatgacagcrtagcgattttttctcatcggctaacacttctgtatttacacatcactacagtaaacattatcacctttctgtttttcctagggtagacaatgtaaagttttaatgcaattcacttctccatagacaaaactggaaagctgttatgtcatacacaagtctaagtatctaaaatgcaaatcaaggttagtattatttaaaaaaaacaaaacaaaacaaagttttctgagtgtgaggtcgcactggtagcacttgccttgctccaagcacgaggtgaggcccagcctcctgctagctctgccc

SEQ ID NO: 15637 - DNA, 600 bp, Chicken  19866894222319_1
gatgtttgtaagctcctgagataaggggcctgctcatctttctgttgaatgctatcgttttgatggcccgtgatagcctggacatgagttctccatggagaatggattcagagagaaagctgttggacagctggtgtgttattcatgtttatgcaggttgttactgtttctggtagcttaataaagccaggaggcagagttgtgattccccaatgttttccttacaaagtaagttggcaacaaagtacttccctgaacttgaagttgaagagggtgagggagaactgcgcagtcagagcrgcgtactgccaacagcaggtgatgtgctgctgctgctgctttgattaaataaagccatcaggcagggcgcagcgtgagcagctgaagtgcaaaccagaggacagaaaactggcsgtggttttgctggggaaggcatcattatttcctttgtcttcctgtctgttctggcctgcatgatggtgtacctgggcactgcctgctgccatctgcccctctcctggcaatgcaccgatggctgaaggcgcagcattgcctgagagctattggcagcgtgatggcagaggaggaggagtggggact

SEQ ID NO: 15638 - DNA, 600 bp, Chicken  19866894222319_2
gaaagctgttggacagctggtgtgttattcatgtttatgcaggttgttactgtttctggtagcttaataaagccaggaggcagagttgtgattccccaatgttttccttacaaagtaagttggcaacaaagtacttccctgaacttgaagttgaagagggtgagggagaactgcgcagtcagagcrgcgtactgccaacagcaggtgatgtgctgctgctgctgctttgattaaataaagccatcaggcagggcgcagcgtgagcagctgaagtgcaaaccagaggacagaaaactggcsgtggttttgctggggaaggcatcattatttcctttgtcttcctgtctgttctggcctgcatgatggtgtacctgggcactgcctgctgccatctgcccctctcctggcaatgcaccgatggctgaaggcgcagcattgcctgagagctattggcagcgtgatggcagaggaggaggagtggggacttcagaggttctttgtggtcgagtggtccctggttagaggggttgtgcttccagatgcgttctgacatgaaacactgctgggcaccatgtggggacatatctgtgcgcgctcaag

SEQ ID NO: 15639 - DNA, 600 bp, Chicken  19866894222319_3
atcattatttcctttgtcttcctgtctgttctggcctgcatgatggtgtacctgggcactgcctgctgccatctgcccctctcctggcaatgcaccgatggctgaaggcgcagcattgcctgagagctattggcagcgtgatggcagaggaggaggagtggggacttcagaggttctttgtggtcgagtggtccctggttagaggggttgtgcttccagatgcgttctgacatgaaacactgctgggcaccatgtggggacatatctgtgcgcgctcaagccctcgtgcaaagctatttygtgcatgctgatgaacttctaatggaggacatttgttgcttctccaaagcagggtcaccacttggaactgttgtgacatctttggcatccctctctcttttcatctgggggccgcattgtctgagcttgtgagtatgaagccagcaagccgacagccaagcacactgtgttagatttgcagcccgcttctttgttaatttaaaaagcagcaagtaaatgaaaacaaagcactgcggataggctgtgattcataccagagcatcagcttgccagcctcattttcctactgtcttccaagct

SEQ ID NO: 15640 - DNA, 600 bp, Chicken  19866894222325_1
gctcccagtgcctgtggagctgatggccagctaaagcttctctcatctttacttttcattccttctgttcatctcttacatagggcaagtttggccctgagacctaggatgtagtggctgtccataaattgcctttcatggaacaacaaaaatagcaagcaaacctgtgagtgcaagactcctgttctgcaggtgtccctgggaacagcactacttgtagggatatgctataaatctttgtttcccccttcacctccttctctcttctgctgtttcatggatttaggcttgagaagtacwtctgtgaattgaaagtcagtgtgtgaaagcttctgatcatcactacttttttcatagttcttaagtaggcgaaatgcttgggtttacctgggaccagttaaataggtcatcaatacaatgtkactgatgcttgtttttctttctggcaattcttaggatcataatattatggagcacatgggcactgactcaggacccactagtatctttgatgatgtagacaagggtgactttaaggcagattttggttcggaatttccagtaggtttaacttttggctttctgcatgccttcagtgcc

SEQ ID NO: 15641 - DNA, 600 bp, Chicken  19866894222325_2
cataaattgcctttcatggaacaacaaaaatagcaagcaaacctgtgagtgcaagactcctgttctgcaggtgtccctgggaacagcactacttgtagggatatgctataaatctttgtttcccccttcacctccttctctcttctgctgtttcatggatttaggcttgagaagtacwtctgtgaattgaaagtcagtgtgtgaaagcttctgatcatcactacttttttcatagttcttaagtaggcgaaatgcttgggtttacctgggaccagttaaataggtcatcaatacaatgtkactgatgcttgtttttctttctggcaattcttaggatcataatattatggagcacatgggcactgactcaggacccactagtatctttgatgatgtagacaagggtgactttaaggcagattttggttcggaatttccagtaggtttaacttttggctttctgcatgccttcagtgcctgtgtttgctgcctgctgttgtcatcaggcatgtctctgtgccccttgtgcagcctggctgcttccaccaagagccagtgtctgttggcccagtgcttgctgtgttctgctggtgcatcgcc

SEQ ID NO: 15642 - DNA, 600 bp, Chicken  19866894222329_1
ttgaaaaaattcaaaattctctttattatttctttcaaacagaaatgtgttccaatactccaaacaatttaaatatcttttttctttttttttaactatatttcagttagctgatgtgtagactcaaatggaaagaattgtagtagataagtaataaaacaagatacccaaactaatatattcagataatttaatgcatgattcatctttagaatgtatgatatgtgacttacctaaatatactgaggtcttagcttttccttagctctgtccatgtttctgccatgtgagaagagacaygacatccactggagcagactgacccaaaagagcttttaattccatcatttccatcattcaaagagctcatttctcagactggaacttaaaaagcagtgaaattatggaattatgtgtatatacttgacagcagaaattttgttgtctttggtagctatagaaatttcacctatgtctttcattttcaagagaatgtataaaactgtcttactcacacacatactcctgaataaggtgaagtgggatctacatatctgtattttgtttagtttgttccaatgaggaacaaacaagttgtaa

SEQ ID NO: 15643 - DNA, 600 bp, Chicken  19866894222329_2
tgcacaccaggaattttttttttttttttttttttttgcatatacaaagtaaaaatttttccagagtatgtatgatgtttcagagattagtccatagtgcttaacgcacaaatgaaagacattcagatataataccaaaaactaagggcaaagaaaaaatacatcaaataactataggatgaacctaagttaaccaacaagcaagaaacaagttccttaatttgttagtgatttgaatatatttatctacagattctcttctgaatgcaaatgtaaagatttcctaaactaatgtcaatyttttataaaatacgaatatgagaaagccacaactttaaaaagtacaaaaacctgtgtgttggactacaactgagaactaaatctactgaaatcagtagtgatgcaccaggaagataggattaagacatattttttagattagaaaggcctactgagtttctgctggtcttaaatagatttgcccactccaaaattttccactgagattttagtgaactacagatatgtagtagagtcaaaaccatatacagtgtcactgtatctgggcacttaattatgcatattgttactgggccagac

SEQ ID NO: 15644 - DNA, 599 bp, Chicken  19866894222331_1
  misc_feature (1)..(33): n is any nucleotide
nnnnnnnnnnnnnnnnnnnnnnnnnnnnnnnnncacgtacatgtcaggcggtgatgtgccagtccctgagatggtagccaatgcagatcaccacagacagacatgatttgtctctgatgttcactggggaaaaacagtgtccgtgtattcctgttgctggaaaacagcagagtgtggcctgtgccacagcactgagtttgctttggttagggggttgatttgtggcttgctgagattatgcagctgcatttcttctgtcgtggagaaattgtgctgaaatcagtcaagcccagttctgtwacgaagcccaagtgtgaagctttattggatttcctttctggagagcaatggcttaagacggactsagcccttcccttccaggaatctgaggaatttccattacttcctgtacacgaggcctcttttgaccaagctataagtagaaaggaaatgaaaatgtacagaatttctccatctggtacgtgcttgttcagagcagttcactcgggctgcttcctccccctctccaataaacaaacaaaacccatgaacccaagctgtttcactgaggccagtgtatatttgaaatgaggaaaaca

SEQ ID NO: 15645 - DNA, 600 bp, Chicken  19866894222331_2
ctgagatggtagccaatgcagatcaccacagacagacatgatttgtctctgatgttcactggggaaaaacagtgtccgtgtattcctgttgctggaaaacagcagagtgtggcctgtgccacagcactgagtttgctttggttagggggttgatttgtggcttgctgagattatgcagctgcatttcttctgtcgtggagaaattgtgctgaaatcagtcaagcccagttctgtwacgaagcccaagtgtgaagctttattggatttcctttctggagagcaatggcttaagacggactsagcccttcccttccaggaatctgaggaatttccattacttcctgtacacgaggcctcttttgaccaagctataagtagaaaggaaatgaaaatgtacagaatttctccatctggtacgtgcttgttcagagcagttcactcgggctgcttcctccccctctccaataaacaaacaaaacccatgaacccaagctgtttcactgaggccagtgtatatttgaaatgaggaaaacagcatctttggttctctctgttcttcttgagactggtgatcaaaagcatgcctttgccctgtgtctg

SEQ ID NO: 15646 - DNA, 600 bp, Chicken  19866894222337_1
tgcatgcacttctgctgctggtgtgactgtgagtcagattcgtttacactaatttgttgcagtttgtaaatctgtctccctggagccaggcccatctgcagcatccgagtctgggaaatggctcaaataagcctgcatcccagagtcaatttcttttctttacctccagggaaagtagtgcagagctgatagttcagaagcatagagagaaaatgactcagtgacggaaagaattcttgatcacaggggataacattcagagtctgcaaggggttgtgtgcccacctgtggccccactgytacccagagtcgaggcaggtttgcaagggaggctcggggcctctgagcttctgccttgcattgctccccaggcaatgccagagcttcacattaattttaccccttgcaaaatcttattatttcttctgtgaatgttagatcctgtgaaaaggcatgcttggctgtgtctgtcaagagctattgaatggcacggtgctgcttcacgtgcgtgggtacccagctgctcctacccacagccagcctttatcccccagcacctcaggtgaggaactgagcctcctgcctgcactgtgtaatgcc

SEQ ID NO: 15647 - DNA, 600 bp, Chicken  19866894222338_1
gaatccaaaaaacaaagtggaactcatgggttgagataatattacttactaagacagagaaaaggaaaaggataatagttattacaaatatatgtatataagtgtatacaacaagtgatgcacaatcaattgctcaccacccctctatggatgcctggcttttgctctgagcagcaaaagagagcaagatgaactcccacctccctcaaaactcctgcatgatgtcaaatggtatagaacatccctttggccagtttaagttctgttcccttccagctccttgggccttttgctgagaayggccttggctctgtacaacactgcttagcagcaactataaatatctatttgttatcaacgttgtttttctcctataaccaaaacatagcatcataatagagactctgaagaaaacaattctgcccttgctgaattgtttccatctgaacctgactcttgagtttctgtgtgagttagtgtctcaaaaaagggtcagaaaaatagtgaaragcctaaaagaattagaatgaaagcacaattctgggaagaaaatttaggctaggtgagttaggctaggttcctaaagctcacaagtattta

SEQ ID NO: 15648 - DNA, 447 bp, Chicken  19866894222338_2
aactcctgcatgatgtcaaatggtatagaacatccctttggccagtttaagttctgttcccttccagctccttgggccttttgctgagaayggccttggctctgtacaacactgcttagcagcaactataaatatctatttgttatcaacgttgtttttctcctataaccaaaacatagcatcataatagagactctgaagaaaacaattctgcccttgctgaattgtttccatctgaacctgactcttgagtttctgtgtgagttagtgtctcaaaaaagggtcagaaaaatagtgaaragcctaaaagaattagaatgaaagcacaattctgggaagaaaatttaggctaggtgagttaggctaggttcctaaagctcacaagtatttaagaaaggatcgcactttggaagtgcatgactttcttccttcactgaaagggagttt

SEQ ID NO: 15649 - DNA, 599 bp, Chicken  19866894222342_1
  misc_feature (1)..(162): n is any nucleotide
nnnnnnnnnnnnnnnnnnnnnnnnnnnnnnnnnnnnnnnnnnnnnnnnnnnnnnnnnnnnnnnnnnnnnnnnnnnnnnnnnnnnnnnnnnnnnnnnnnnnnnnnnnnnnnnnnnnnnnnnnnnnnnnnnnnnnnnnnnnnnnnnnnnnnnnnnnnnnnnnnngtacaggtaatgctgtcaccgtcaccttttttgctgttcagcaagtggttgcagtgtcagctctgcatttgtgcaatcactgaggaatcactgatggcagcaggccttcatggaggaggtgtttctgctctgctcttstagcttttcacattgctggtggtcagcaggatgccatcaggtgtattgtcagtgatttgggggtttcttggtgatcccagctgaccacactgcccagagggatgcgggaccagggtgttgtgaagggctgggttattttttttaaggttttaatggctgtttaatgcctttttgcccttgcagagcattgggttgaactgttaaaaatgagcactgttttcaggtgaaagtgctgctcttggaaaaatgctgmtgagggaaatggtgtcatctcatttacagagggacaaagggccaat

SEQ ID NO: 15650 - DNA, 600 bp, Chicken  19866894222342_2
tgatggcagcaggccttcatggaggaggtgtttctgctctgctcttstagcttttcacattgctggtggtcagcaggatgccatcaggtgtattgtcagtgatttgggggtttcttggtgatcccagctgaccacactgcccagagggatgcgggaccagggtgttgtgaagggctgggttattttttttaaggttttaatggctgtttaatgcctttttgcccttgcagagcattgggttgaactgttaaaaatgagcactgttttcaggtgaaagtgctgctcttggaaaaatgctgmtgagggaaatggtgtcatctcatttacagagggacaaagggccaatttctgataaaggctgctgattgcttggcttctactgctgggagtggggggtggaaggcaccaaaatccctcacgttttcctatcatcagattactgcagtgttgtatgatgtctgttcctcatttcctatattatacactgccgttcaccgttaaaacatggaagcagtgtagcattttgaaaagagatgagattctcygtcaagaaacagaatttggaaacttgaaattaaattttagcatcctggatcgata

SEQ ID NO: 15651 - DNA, 600 bp, Chicken  19866894222342_3
tgttaaaaatgagcactgttttcaggtgaaagtgctgctcttggaaaaatgctgmtgagggaaatggtgtcatctcatttacagagggacaaagggccaatttctgataaaggctgctgattgcttggcttctactgctgggagtggggggtggaaggcaccaaaatccctcacgttttcctatcatcagattactgcagtgttgtatgatgtctgttcctcatttcctatattatacactgccgttcaccgttaaaacatggaagcagtgtagcattttgaaaagagatgagattctcygtcaagaaacagaatttggaaacttgaaattaaattttagcatcctggatcgataccctcttaattgaaaatgagtgtcctcgtgccagaatgttcattcctttgatgaattctaggagcacgtaaaagtctggtggaattcccatcaaatggcagtctgggacttccaccctcactgacacactgagtgaaactcttccagaactgtgagtgcatttgtgcaccttcaaaaaagaattaaaaaggagtccccatccaacagcctgcgttagttagaatcttcagaaaataaatgagctt

SEQ ID NO: 15652 - DNA, 443 bp, Chicken  19866894222342_4
tggaattcccatcaaatggcagtctgggacttccaccctcactgacacactgagtgaaactcttccagaactgtgagtgcatttgtgcaccttcaaaaaagaattaaaaaggagtccccatccaacagcctgcgttagttagaatcttcagaaaataaatgagctttaaagcatcccatttttcttcctttatatgtctgggtgatatcacacgctacatctgcggcagtttttatcgatttacactttttgcactaagaggtaattaagaacttcaggcactaattgttatttatgccrtgcttggcagctgtgaaaggtcccgaatggtgctaagataactgaatctcattgcagcaggtgaacagtgtgtggctgagccttgtagtggctgagccttgtagtggctgagccttgtagtggctgctcctggccacagagga

SEQ ID NO: 15653 - DNA, 600 bp, Chicken  19866894222345_1
tgtgtcccatgtatttagtgaggagtaatcttggtatcaaactgggaagaaggacaagcagtaagaacaataaaaatcaaactctattgctatgtctagtatgagaacacgaaaactgatagaagccccatagagtcttgataaagattatgtctactgatgtgattttatttacttctttattcattggcattgtctagttaattggctagaacatctgagcaaatgaaatgctgaacaggagagctcaaggccagtattttctatctttgttgcctaaaaattgggctctaaactttrtaaattcaatgtgattttcaaagggagaggtgccttcagaagaagcattactatagttgatattcatctcagtaaacgcctggttctagaaataggaaactgtactgaggcagtcttaatcaggaaagtttggctgtagagtgtccgttttcccttttgaactgtctttcattaaatacgccatgttctactacatatacaaataaatgaccttcctagattgaaaattttgttgaaatcctttggtcttcatattagtgacagtgctgtaggactactgcaatcagagtactggtaacg

SEQ ID NO: 15654 - DNA, 600 bp, Chicken  19866894222355_1
ccattaatgtggcctcagcctgtctggggagacacagtagacaggaagaggcttttaagactctgtgcccttattcacatttttgaaggttgctagttgtgctaaaggcacctgtcttcaaaaaacaaaaatagcttcaagtgcatatacttgtgtgaacaccaacacatttaatttatctaatacatatcctactgtcatctattcaactaaaaatttgaagcaatctgaaataattctactaggtaacagcaccgctgtgctaccaacaacttagcaatatgtgtgtaaacacatatrcgtatgtrtgtgtgtgtgtgtgtgtttgygtgcatacgcatgcatgtgtatcatggagaagaaaatctgtgaatgtagggctctgccatacaaggtgagctataaggagatggctttgctgactcacatatcaacaggaacctttgcagacaaagatgcaactttgatttgcaggcaaagagataagaaacaacagtaagaatggtatccactcttacatctgctttgggcaattccagctaaacctgtaacatctgttcatttcgaagatattttggtggcagcttgtaccgaaaagat

SEQ ID NO: 15655 - DNA, 600 bp, Chicken  19866894222355_2
cattaatgtggcctcagcctgtctggggagacacagtagacaggaagaggcttttaagactctgtgcccttattcacatttttgaaggttgctagttgtgctaaaggcacctgtcttcaaaaaacaaaaatagcttcaagtgcatatacttgtgtgaacaccaacacatttaatttatctaatacatatcctactgtcatctattcaactaaaaatttgaagcaatctgaaataattctactaggtaacagcaccgctgtgctaccaacaacttagcaatatgtgtgtaaacacatatgrgtatgtrtgtgtgtgtgtgtgtgtttgygtgcatacgcatgcatgtgtatcatggagaagaaaatctgtgaatgtagggctctgccatacaaggtgagctataaggagatggctttgctgactcacatatcaacaggaacctttgcagacaaagatgcaactttgatttgcaggcaaagagataagaaacaacagtaagaatggtatccactcttacatctgctttgggcaattccagctaaacctgtaacatctgttcatttcgaagatattttggtggcagcttgtaccgaaaagata

SEQ ID NO: 15656 - DNA, 600 bp, Chicken  19866894222355_3
ttaatgtggcctcagcctgtctggggagacacagtagacaggaagaggcttttaagactctgtgcccttattcacatttttgaaggttgctagttgtgctaaaggcacctgtcttcaaaaaacaaaaatagcttcaagtgcatatacttgtgtgaacaccaacacatttaatttatctaatacatatcctactgtcatctattcaactaaaaatttgaagcaatctgaaataattctactaggtaacagcaccgctgtgctaccaacaacttagcaatatgtgtgtaaacacatatgcgratgtrtgtgtgtgtgtgtgtgtttgygtgcatacgcatgcatgtgtatcatggagaagaaaatctgtgaatgtagggctctgccatacaaggtgagctataaggagatggctttgctgactcacatatcaacaggaacctttgcagacaaagatgcaactttgatttgcaggcaaagagataagaaacaacagtaagaatggtatccactcttacatctgctttgggcaattccagctaaacctgtaacatctgttcatttcgaagatattttggtggcagcttgtaccgaaaagataat

SEQ ID NO: 15657 - DNA, 600 bp, Chicken  19866894222355_4
taatgtggcctcagcctgtctggggagacacagtagacaggaagaggcttttaagactctgtgcccttattcacatttttgaaggttgctagttgtgctaaaggcacctgtcttcaaaaaacaaaaatagcttcaagtgcatatacttgtgtgaacaccaacacatttaatttatctaatacatatcctactgtcatctattcaactaaaaatttgaagcaatctgaaataattctactaggtaacagcaccgctgtgctaccaacaacttagcaatatgtgtgtaaacacatatgcgtrtgtrtgtgtgtgtgtgtgtgtttgygtgcatacgcatgcatgtgtatcatggagaagaaaatctgtgaatgtagggctctgccatacaaggtgagctataaggagatggctttgctgactcacatatcaacaggaacctttgcagacaaagatgcaactttgatttgcaggcaaagagataagaaacaacagtaagaatggtatccactcttacatctgctttgggcaattccagctaaacctgtaacatctgttcatttcgaagatattttggtggcagcttgtaccgaaaagataatg

SEQ ID NO: 15658 - DNA, 600 bp, Chicken  19866894222355_5
gtggcctcagcctgtctggggagacacagtagacaggaagaggcttttaagactctgtgcccttattcacatttttgaaggttgctagttgtgctaaaggcacctgtcttcaaaaaacaaaaatagcttcaagtgcatatacttgtgtgaacaccaacacatttaatttatctaatacatatcctactgtcatctattcaactaaaaatttgaagcaatctgaaataattctactaggtaacagcaccgctgtgctaccaacaacttagcaatatgtgtgtaaacacatatgcgtatgtrtgtgtgtgtgtgtgtgtttgygtgcatacgcatgcatgtgtatcatggagaagaaaatctgtgaatgtagggctctgccatacaaggtgagctataaggagatggctttgctgactcacatatcaacaggaacctttgcagacaaagatgcaactttgatttgcaggcaaagagataagaaacaacagtaagaatggtatccactcttacatctgctttgggcaattccagctaaacctgtaacatctgttcatttcgaagatattttggtggcagcttgtaccgaaaagataatgagat

SEQ ID NO: 15659 - DNA, 600 bp, Chicken  19866894222355_6
agacacagtagacaggaagaggcttttaagactctgtgcccttattcacatttttgaaggttgctagttgtgctaaaggcacctgtcttcaaaaaacaaaaatagcttcaagtgcatatacttgtgtgaacaccaacacatttaatttatctaatacatatcctactgtcatctattcaactaaaaatttgaagcaatctgaaataattctactaggtaacagcaccgctgtgctaccaacaacttagcaatatgtgtgtaaacacatatgcgtatgtrtgtgtgtgtgtgtgtgtttgygtgcatacgcatgcatgtgtatcatggagaagaaaatctgtgaatgtagggctctgccatacaaggtgagctataaggagatggctttgctgactcacatatcaacaggaacctttgcagacaaagatgcaactttgatttgcaggcaaagagataagaaacaacagtaagaatggtatccactcttacatctgctttgggcaattccagctaaacctgtaacatctgttcatttcgaagatattttggtggcagcttgtaccgaaaagataatgagatagatgagattccagtagataa

SEQ ID NO: 15660 - DNA, 600 bp, Chicken  19866894222355_7
acgcatgcatgtgtatcatggagaagaaaatctgtgaatgtagggctctgccatacaaggtgagctataaggagatggctttgctgactcacatatcaacaggaacctttgcagacaaagatgcaactttgatttgcaggcaaagagataagaaacaacagtaagaatggtatccactcttacatctgctttgggcaattccagctaaacctgtaacatctgttcatttcgaagatattttggtggcagcttgtaccgaaaagataatgagatagatgagattccagtagataaaggggmagaggtgcatttacatgatttgttttcctcctggaaatatttatttctaaacaagaagcaaaaagcctcactgggattatcatgtggccatttcagcagcattacacaccacatctacagtctttaaaaacaaataataagatgcaatatggcaacttcaatgtcatctttgataatttactctttagtcaaaactataaacacatatttttttccccgttgcttgatatcacagcacctttgcaaagctaaaataatctcttagtaccacttcataggcctgagatcctcaggaaattc

SEQ ID NO: 15661 - DNA, 600 bp, Chicken  19866894222359_1
gaaatcacctgtgagtgaggaccatatattactcttagacttatatatatgcaaagtcatgctgcagagactactctgaagaaaacaggctgttgtctgttcgttctgtaagagaagtaaaagaaagaatggtgatattactacacagctcacttgcttaagcaggtaactttttcccttttaaaattatcctgtgcaggaagaatcatctgcatattttgagagtgacccaactgtattcagatattgtatcacagaatgtaagatgtcatgacagtgcatgcacccttaatgagcccrtgttagctctaggttacaccttacctgggtgaggggtctgaagatggtgtctggttttaacagaagctcaagatccctctgaatcgtgtccttttctartgaaggaaaacactgaaaataataatgtcaaaaggaaaatattaatctcttgtgttataataaattgtctaatacaagattttctgacagtcatatataactccaaactattttggggggggaattaatacacaaatgctacagttaaactattgtgaggaaagaaatgaagtttatatttccctgttcatttagtagtga

SEQ ID NO: 15662 - DNA, 600 bp, Chicken  19866894222359_2
ttcgttctgtaagagaagtaaaagaaagaatggtgatattactacacagctcacttgcttaagcaggtaactttttcccttttaaaattatcctgtgcaggaagaatcatctgcatattttgagagtgacccaactgtattcagatattgtatcacagaatgtaagatgtcatgacagtgcatgcacccttaatgagcccrtgttagctctaggttacaccttacctgggtgaggggtctgaagatggtgtctggttttaacagaagctcaagatccctctgaatcgtgtccttttctartgaaggaaaacactgaaaataataatgtcaaaaggaaaatattaatctcttgtgttataataaattgtctaatacaagattttctgacagtcatatataactccaaactattttggggggggaattaatacacaaatgctacagttaaactattgtgaggaaagaaatgaagtttatatttccctgttcatttagtagtgaaagacccatttgctctaagactatatttagaccaattttaattttaattattttgctagatagagttgatcttcacgtagtatttttctcatccataaa

SEQ ID NO: 15663 - DNA, 599 bp, Chicken  19866894222361_1
  misc_feature (1)..(216): n is any nucleotide
nnnnnnnnnnnnnnnnnnnnnnnnnnnnnnnnnnnnnnnnnnnnnnnnnnnnnnnnnnnnnnnnnnnnnnnnnnnnnnnnnnnnnnnnnnnnnnnnnnnnnnnnnnnnnnnnnnnnnnnnnnnnnnnnnnnnnnnnnnnnnnnnnnnnnnnnnnnnnnnnnnnnnnnnnnnnnnnnnnnnnnnnnnnnnnnnnnnnnnnnnnnnnnnnnnnnnnnncgcgacgaggtctttcagcagatgatgaaaacattccactcttattcgttcccattttaatctggagcaattcgtctgagttcsagagaagttctgcagtgtggcagagcaaagagtactttctccgtacagagattttcttgacacgttacctgccggggtttgtcacggctcgacctgagatcccactcatttccactaggcagactgaggaatgagactgttacctttgcaggcttgctgatgctttgctctcctcccrcgagtgggggaatcacggcgtagctgtaamcrygtgaagcatttcatgctaacggctacgtggcacacttctgtgcattttcaggagctgagcrgcagtgcagagctgctaacgttcactg

SEQ ID NO: 15664 - DNA, 599 bp, Chicken  19866894222361_2
  misc_feature (1)..(38): n is any nucleotide
nnnnnnnnnnnnnnnnnnnnnnnnnnnnnnnnnnnnnncgcgacgaggtctttcagcagatgatgaaaacattccactcttattcgttcccattttaatctggagcaattcgtctgagttcsagagaagttctgcagtgtggcagagcaaagagtactttctccgtacagagattttcttgacacgttacctgccggggtttgtcacggctcgacctgagatcccactcatttccactaggcagactgaggaatgagactgttacctttgcaggcttgctgatgctttgctctcctcccrcgagtgggggaatcacggcgtagctgtaamcrygtgaagcatttcatgctaacggctacgtggcacacttctgtgcattttcaggagctgagcrgcagtgcagagctgctaacgttcactgagggattgtaaaaagtgtttgacagtgcttttttagccacagcagggactgaacgagctgcatggcttccctgtcgtttgcaaggtggagccctggagaagcgctgctgcaggactagatgtgattgctgtactgcttgtggcgtctgggagggtgtgcttctgagaccctgtcagtt

SEQ ID NO: 15665 - DNA, 599 bp, Chicken  19866894222361_3
  misc_feature (1)..(8): n is any nucleotide
nnnnnnnncgcgacgaggtctttcagcagatgatgaaaacattccactcttattcgttcccattttaatctggagcaattcgtctgagttcsagagaagttctgcagtgtggcagagcaaagagtactttctccgtacagagattttcttgacacgttacctgccggggtttgtcacggctcgacctgagatcccactcatttccactaggcagactgaggaatgagactgttacctttgcaggcttgctgatgctttgctctcctcccrcgagtgggggaatcacggcgtagctgtaamcrygtgaagcatttcatgctaacggctacgtggcacacttctgtgcattttcaggagctgagcrgcagtgcagagctgctaacgttcactgagggattgtaaaaagtgtttgacagtgcttttttagccacagcagggactgaacgagctgcatggcttccctgtcgtttgcaaggtggagccctggagaagcgctgctgcaggactagatgtgattgctgtactgcttgtggcgtctgggagggtgtgcttctgagaccctgtcagttaagggtgagatagcayccccactgttcagc

SEQ ID NO: 15666 - DNA, 599 bp, Chicken  19866894222361_4
  misc_feature (1)..(6): n is any nucleotide
nnnnnncgcgacgaggtctttcagcagatgatgaaaacattccactcttattcgttcccattttaatctggagcaattcgtctgagttcsagagaagttctgcagtgtggcagagcaaagagtactttctccgtacagagattttcttgacacgttacctgccggggtttgtcacggctcgacctgagatcccactcatttccactaggcagactgaggaatgagactgttacctttgcaggcttgctgatgctttgctctcctcccrcgagtgggggaatcacggcgtagctgtaamcrygtgaagcatttcatgctaacggctacgtggcacacttctgtgcattttcaggagctgagcrgcagtgcagagctgctaacgttcactgagggattgtaaaaagtgtttgacagtgcttttttagccacagcagggactgaacgagctgcatggcttccctgtcgtttgcaaggtggagccctggagaagcgctgctgcaggactagatgtgattgctgtactgcttgtggcgtctgggagggtgtgcttctgagaccctgtcagttaagggtgagatagcayccccactgttcagcct

SEQ ID NO: 15667 - DNA, 599 bp, Chicken  19866894222361_5
  misc_feature (1)..(5): n is any nucleotide
nnnnncgcgacgaggtctttcagcagatgatgaaaacattccactcttattcgttcccattttaatctggagcaattcgtctgagttcsagagaagttctgcagtgtggcagagcaaagagtactttctccgtacagagattttcttgacacgttacctgccggggtttgtcacggctcgacctgagatcccactcatttccactaggcagactgaggaatgagactgttacctttgcaggcttgctgatgctttgctctcctcccrcgagtgggggaatcacggcgtagctgtaamcrygtgaagcatttcatgctaacggctacgtggcacacttctgtgcattttcaggagctgagcrgcagtgcagagctgctaacgttcactgagggattgtaaaaagtgtttgacagtgcttttttagccacagcagggactgaacgagctgcatggcttccctgtcgtttgcaaggtggagccctggagaagcgctgctgcaggactagatgtgattgctgtactgcttgtggcgtctgggagggtgtgcttctgagaccctgtcagttaagggtgagatagcayccccactgttcagcctc

SEQ ID NO: 15668 - DNA, 600 bp, Chicken  19866894222361_6
ttaatctggagcaattcgtctgagttcsagagaagttctgcagtgtggcagagcaaagagtactttctccgtacagagattttcttgacacgttacctgccggggtttgtcacggctcgacctgagatcccactcatttccactaggcagactgaggaatgagactgttacctttgcaggcttgctgatgctttgctctcctcccrcgagtgggggaatcacggcgtagctgtaamcrygtgaagcatttcatgctaacggctacgtggcacacttctgtgcattttcaggagctgagcrgcagtgcagagctgctaacgttcactgagggattgtaaaaagtgtttgacagtgcttttttagccacagcagggactgaacgagctgcatggcttccctgtcgtttgcaaggtggagccctggagaagcgctgctgcaggactagatgtgattgctgtactgcttgtggcgtctgggagggtgtgcttctgagaccctgtcagttaagggtgagatagcayccccactgttcagcctcactgaacgcatcttcctgactcagctctgttgcccctgcttgcaggactgcaggctctgccc

SEQ ID NO: 15669 - DNA, 600 bp, Chicken  19866894222361_7
cggcgtagctgtaamcrygtgaagcatttcatgctaacggctacgtggcacacttctgtgcattttcaggagctgagcrgcagtgcagagctgctaacgttcactgagggattgtaaaaagtgtttgacagtgcttttttagccacagcagggactgaacgagctgcatggcttccctgtcgtttgcaaggtggagccctggagaagcgctgctgcaggactagatgtgattgctgtactgcttgtggcgtctgggagggtgtgcttctgagaccctgtcagttaagggtgagatagcayccccactgttcagcctcactgaacgcatcttcctgactcagctctgttgcccctgcttgcaggactgcaggctctgcccagcctgggagcctctgcacagtgcatctgggtgcaaagtgggcaaaccatgcgtatctggggcaaaatgcagcatcttgccattcactccctggggrtaggaagctcctgggcggaacacgtagagcagcactgcttggcttcgcgataacttgttagcaagtattggccctttgatgccacttcttccttttctcatgtcacccttttgcagacctccaa

SEQ ID NO: 15670 - DNA, 519 bp, Chicken  19866894222361_8
ctgtcgtttgcaaggtggagccctggagaagcgctgctgcaggactagatgtgattgctgtactgcttgtggcgtctgggagggtgtgcttctgagaccctgtcagttaagggtgagatagcayccccactgttcagcctcactgaacgcatcttcctgactcagctctgttgcccctgcttgcaggactgcaggctctgcccagcctgggagcctctgcacagtgcatctgggtgcaaagtgggcaaaccatgcgtatctggggcaaaatgcagcatcttgccattcactccctggggrtaggaagctcctgggcggaacacgtagagcagcactgcttggcttcgcgataacttgttagcaagtattggccctttgatgccacttcttccttttctcatgtcacccttttgcagacctccaagcctctccacggcaatccgcactccctaataggagctgctgcacatcttggcatggatgacaacaaagttctccctcgcctgaagtaagttgctt

SEQ ID NO: 15671 - DNA, 600 bp, Chicken  19866894222369_1
agtataaaactattcatctcatctaatctcatcaggtagctcatcagtatttcatggagaccttaacatctgcaaccataaggtttatggtgggaggttaagagaaggctcacttgtgccagggctctttgcccttgaaaccataaacttctgcctggacttcccacagatgttgtatacatatatacacactcagacactaaaactcagcagagtctgtctaaatactttttgagacatagctcaggatccaaatgaaattcacttagctcatctagggaaactgctcaacaacaacayacttaccacagttacaacaaaaccgagcatctggaagcagaatcggatcattaacactattagtaaactttcactatccatagggtaaacatgcagttcttatcaaagctaggatcctacaaaatctttaagatgatgctcttttctctggaataaccacatttacagagggtcagagttaggcttacgcagaatgacctagaatctccccatgatgtatttcttactgtgcaaaacttgacagatgcccttcagcacacaagatatatcagtcgtttaacttcatgaaacaaaatggca

SEQ ID NO: 15672 - DNA, 514 bp, Chicken  19866894222372_1
atgtccccttctctttccttgtcatgcctcatacagcagacagcctcttcaatgtctcaattaatcttggcaggaagtttcataactgtatgagacaacaaagagggatgcaactgctccactccctgcagttgtgctgtccctcctgacttttcgtctttgtggttccaaagcaaactccctgctctgccactaagccaagcacattagcctactggtggccaggctccacagaggtccaggtggcattgctttacatatgtaagacaaactgtgtggtcttactaccagagggcacamtccaggattctcacaggtaaggaaatgatacagcttgctatgcaaatacttccttcagatcttccagtatctccttggagatcttcagcagctgcttggacatggcccaggacaccctgctctgggtgtccctgctggagcagggggatgggccaggtagacccagaggtactttccagcctcagccattgtgtgattccacgttttttccacg

SEQ ID NO: 15673 - DNA, 600 bp, Chicken  19866894222374_1
ctaaattcgttttatagtgctgggagaccttttactagactattccaccatctttaatgttctgtagctgtatcagccttctttttaaccccagctgcttgaacaatagttttcagatgtctgttactgaaagctttacttctgtgcatgaaacgatgtactttctaaaattgggaacctggcaatctgggcaccgataaacaaacaaaactctcaagccaactgaaaaacacccctcccgacctggtagtatagtgagccagcaagggtaggtgtagctgtgtgataacacgaatactkgtatccttcatctgtgggatgtgttgagtttaagaattaagggctggaataaaacatttagatttcaggttaaaatgattcacaaatgcatggttagcttgccacctgagaagcatttgaagagcaatatagtgatttattactgcctaggttttagggaggctgagttcactttgttactaggtttcctttgtgagaatgtacttcaatagagatgttggcttcccttgccttttgtaagaagccaggctgaaagagtaagtttcttgatcttggtatgttcaactttaaaaagaatga

SEQ ID NO: 15674 - DNA, 600 bp, Chicken  19866894222387_1
aaggttgtgaatgccccctccctggaagcattcaaggccaggttggatagggctttgagcaacatggtctagaggggtaagtccctgcctacagcaggggggtcagaactagatgatcttaaaggtcccttccaacccaaaccattctatgattctatgattccatgttgtacaaccattagaacagaatgctctgagaaactggtgtaatagtcttgctggggtcctgggactgccgggacacatagggtatgtatgcatatgcagatacatgtgtactcatgtatattcaaggtttaracacttgatacttatataccacacaaagagattttctgcttttataccctgagtattttggctttagctggatggaatatagattatctgcaaagtgaaattttctctttaaccaggggtcactgaacaggactacagcactctgatgctactgttgcatccactgccaataaactgcagccctcagtgcattatgagtgatggagttgccgtgttcaagtgaaggcaagtcaccctccaggatgatcttccatactaggtgtcatgaagagtttttctgagacgttgctagtatttctc

SEQ ID NO: 15675 - DNA, 599 bp, Chicken  19866894222391_1
  misc_feature (1)..(130): n is any nucleotide
nnnnnnnnnnnnnnnnnnnnnnnnnnnnnnnnnnnnnnnnnnnnnnnnnnnnnnnnnnnnnnnnnnnnnnnnnnnnnnnnnnnnnnnnnnnnnnnnnnnnnnnnnnnnnnnnnnnnnnnnnnnnnnnnnnataatctaaaaagaaaattctgctagagatagattaggatttatgatacattttgtgtttcttttacttatgcattcatttttaaaaaatatactcatgtaaaaacaactgctttaaataaatccctgcatgtcactacagtcagtcataacaatcatagctgaattacrtacatagctcttcctgagctctgaagccagtattaccctgrgatcactcagtaatgcattcttagtctgtctggccatggcaccagttastgatgcgttccttggctttcctctactgatacattacactgtgtcaaagctatacctcctagcaacaccctgattccctgaggaacagaaaattcaggaactttctctaraggcaagtatccaagtataaataaatataagtgaagccagaaaaagtccaaccaattgatctggtagaggagaaattaagttattcattagctaggcat

SEQ ID NO: 15676 - DNA, 599 bp, Chicken  19866894222391_2
  misc_feature (1)..(89): n is any nucleotide
nnnnnnnnnnnnnnnnnnnnnnnnnnnnnnnnnnnnnnnnnnnnnnnnnnnnnnnnnnnnnnnnnnnnnnnnnnnnnnnnnnnnnnnnnataatctaaaaagaaaattctgctagagatagattaggatttatgatacattttgtgtttcttttacttatgcattcatttttaaaaaatatactcatgtaaaaacaactgctttaaataaatccctgcatgtcactacagtcagtcataacaatcatagctgaattacrtacatagctcttcctgagctctgaagccagtattaccctgrgatcactcagtaatgcattcttagtctgtctggccatggcaccagttastgatgcgttccttggctttcctctactgatacattacactgtgtcaaagctatacctcctagcaacaccctgattccctgaggaacagaaaattcaggaactttctctaraggcaagtatccaagtataaataaatataagtgaagccagaaaaagtccaaccaattgatctggtagaggagaaattaagttattcattagctaggcatgaaaagaaaaagagatttgtatatagtacccttagactaaa

SEQ ID NO: 15677 - DNA, 599 bp, Chicken  19866894222391_3
  misc_feature (1)..(40): n is any nucleotide
nnnnnnnnnnnnnnnnnnnnnnnnnnnnnnnnnnnnnnnnataatctaaaaagaaaattctgctagagatagattaggatttatgatacattttgtgtttcttttacttatgcattcatttttaaaaaatatactcatgtaaaaacaactgctttaaataaatccctgcatgtcactacagtcagtcataacaatcatagctgaattacrtacatagctcttcctgagctctgaagccagtattaccctgrgatcactcagtaatgcattcttagtctgtctggccatggcaccagttastgatgcgttccttggctttcctctactgatacattacactgtgtcaaagctatacctcctagcaacaccctgattccctgaggaacagaaaattcaggaactttctctaraggcaagtatccaagtataaataaatataagtgaagccagaaaaagtccaaccaattgatctggtagaggagaaattaagttattcattagctaggcatgaaaagaaaaagagatttgtatatagtacccttagactaaagtaatccccagttggatrctctgaaatcaaactggcctaacttggagca

SEQ ID NO: 15678 - DNA, 600 bp, Chicken  19866894222391_4
tgcattcatttttaaaaaatatactcatgtaaaaacaactgctttaaataaatccctgcatgtcactacagtcagtcataacaatcatagctgaattacrtacatagctcttcctgagctctgaagccagtattaccctgrgatcactcagtaatgcattcttagtctgtctggccatggcaccagttastgatgcgttccttggctttcctctactgatacattacactgtgtcaaagctatacctcctagcaacaccctgattccctgaggaacagaaaattcaggaactttctctaraggcaagtatccaagtataaataaatataagtgaagccagaaaaagtccaaccaattgatctggtagaggagaaattaagttattcattagctaggcatgaaaagaaaaagagatttgtatatagtacccttagactaaagtaatccccagttggatrctctgaaatcaaactggcctaacttggagcaatagtgatgattttgccagtatttcttcgacagatgcacattcagcaaacagctgtgtctgtggcatgtaggactgcttaggatctttcctccagctgtccataacccttc

SEQ ID NO: 15679 - DNA, 600 bp, Chicken  19866894222391_5
ttcttagtctgtctggccatggcaccagttastgatgcgttccttggctttcctctactgatacattacactgtgtcaaagctatacctcctagcaacaccctgattccctgaggaacagaaaattcaggaactttctctaraggcaagtatccaagtataaataaatataagtgaagccagaaaaagtccaaccaattgatctggtagaggagaaattaagttattcattagctaggcatgaaaagaaaaagagatttgtatatagtacccttagactaaagtaatccccagttggatrctctgaaatcaaactggcctaacttggagcaatagtgatgattttgccagtatttcttcgacagatgcacattcagcaaacagctgtgtctgtggcatgtaggactgcttaggatctttcctccagctgtccataacccttctcctgctgtttcacatctgccagcaaagctgctccatagctgaggtcaccagatcagacaaaggcacatataagacagtgaggggacagcaaagagataagaagttgaaggggcaggtacagattttggtacacacaactctaaaggagacatctgcc

SEQ ID NO: 15680 - DNA, 600 bp, Chicken  19866894222401_1
agaatggccaccattctactactgcacttgcaacttccagctttcttaccctttccgtcattggtttgggcatggattatcactttggctcacttcagcattatttgtggatgctcttagctattacaaggctcgtctgagcagttgagaccacgttcacccaatttgtacctttacaagtattttctaagcaaactactttagtatgattggacggctggagcacctctcctatgacgaaaggctgagagaattgggcttgtttagcttggaaaaggctcccaggatacctcactgcascccttcagtacttgaargagcttacaggyagtcaggggactgacttcttacatgatctgatagtgacaggacaagggggaatggctttaaactaaaagagggaggatttaatttatatattagtaagaaattctttactcagagggccatgaagcacaggctgcccagagaagctgtgggtgccccatccctggaggggagattgactcaaagccagcttggatggggctctgggtagtatgagctgctgggtggcactgcccatggcaggggattggagcttgatgatctttaaggtcc

SEQ ID NO: 15681 - DNA, 600 bp, Chicken  19866894222401_2
actactgcacttgcaacttccagctttcttaccctttccgtcattggtttgggcatggattatcactttggctcacttcagcattatttgtggatgctcttagctattacaaggctcgtctgagcagttgagaccacgttcacccaatttgtacctttacaagtattttctaagcaaactactttagtatgattggacggctggagcacctctcctatgacgaaaggctgagagaattgggcttgtttagcttggaaaaggctcccaggatacctcactgcascccttcagtacttgaargagcttacaggyagtcaggggactgacttcttacatgatctgatagtgacaggacaagggggaatggctttaaactaaaagagggaggatttaatttatatattagtaagaaattctttactcagagggccatgaagcacaggctgcccagagaagctgtgggtgccccatccctggaggggagattgactcaaagccagcttggatggggctctgggtagtatgagctgctgggtggcactgcccatggcaggggattggagcttgatgatctttaaggtccttttcaacctaagccta

SEQ ID NO: 15682 - DNA, 600 bp, Chicken  19866894222401_3
gcaacttccagctttcttaccctttccgtcattggtttgggcatggattatcactttggctcacttcagcattatttgtggatgctcttagctattacaaggctcgtctgagcagttgagaccacgttcacccaatttgtacctttacaagtattttctaagcaaactactttagtatgattggacggctggagcacctctcctatgacgaaaggctgagagaattgggcttgtttagcttggaaaaggctcccaggatacctcactgcascccttcagtacttgaargagcttacaggyagtcaggggactgacttcttacatgatctgatagtgacaggacaagggggaatggctttaaactaaaagagggaggatttaatttatatattagtaagaaattctttactcagagggccatgaagcacaggctgcccagagaagctgtgggtgccccatccctggaggggagattgactcaaagccagcttggatggggctctgggtagtatgagctgctgggtggcactgcccatggcaggggattggagcttgatgatctttaaggtccttttcaacctaagcctattctatggaatt

SEQ ID NO: 15683 - DNA, 600 bp, Chicken  19866894222403_1
tgctaactaaatcatttatctaatctcatgagttaaactcaaattatacatcattggtgtgaccgattccttggactgtcgactgcttgaactcctcaaatgcacaacacccactggagtcaatggagagaatcctatttatctttgcaattaactgttacatataacatttcccactaaattgtggttcactgttctacaagtgtaacctacttctgtctagaaaaaatactattattctgcatgattctggaatggggaatataataaagactataaaaagccactgaattcactccrttggagtatctcaaaattccctttgtttgtaagaaacatttgaggaaatcagatttctttctgtactgtaccagagtggcaaaaacagacatgtcaactgaactgcaattctacatactaggaaatgaacaacacaatcagtagtttgcatttgtaataaatgaaatcaatttgcactatcagaaaataatggaacaaaagtaacagcatacattagaaacatttaaagatgtattactacgtctgaagctttccaaaattaacttccaatattaatgaacacacatggatttcagccat

SEQ ID NO: 15684 - DNA, 600 bp, Chicken  19866894222406_1
gaaacttctccctatctgtccccacagttcagattcctttagaggtcttctctctttcctgaggaattttgacatacttgaaataccctttatttctgggaacatctagctatgtcagtattaatcccaatggcctggttgaaatactgcgagttttaaaaagcaagtgaatgtaattatgtatttaataagattctcctgcattcagtcagaagtgagtgattaagattactgttgtgtcactcagaatattgttaagctaaatttatcattagcacagcaaacttattttgttttctwtataaataagtcagtacatgactcctagaatttttgttgctttccttatgctgtggggtgcatgttagcgtatggattcctcctsttttttcattttatcccattatttgcttggtaaatagtaccaaaaagtgtaggcaaaacctacactttctactagtgcttcttttcatagaattgtatgtgatcacaatttaaaaaaaaaacaaacaaacaaaatccccaaccctctctaaactctatttttatagtgccccattgaatggttccattatggatgtgttggactgacagaagcac

SEQ ID NO: 15685 - DNA, 600 bp, Chicken  19866894222406_2
ccctttatttctgggaacatctagctatgtcagtattaatcccaatggcctggttgaaatactgcgagttttaaaaagcaagtgaatgtaattatgtatttaataagattctcctgcattcagtcagaagtgagtgattaagattactgttgtgtcactcagaatattgttaagctaaatttatcattagcacagcaaacttattttgttttctwtataaataagtcagtacatgactcctagaatttttgttgctttccttatgctgtggggtgcatgttagcgtatggattcctcctsttttttcattttatcccattatttgcttggtaaatagtaccaaaaagtgtaggcaaaacctacactttctactagtgcttcttttcatagaattgtatgtgatcacaatttaaaaaaaaaacaaacaaacaaaatccccaaccctctctaaactctatttttatagtgccccattgaatggttccattatggatgtgttggactgacagaagcaccaaaagggaaatggtactgcccacagtgtacagctgcaatgaagaggagaggcagcagacataaataaacttcgtctggaaaaca

SEQ ID NO: 15686 - DNA, 600 bp, Chicken  19866894222414_1
caagatctgtcaaacctatttaataatgtgggcagaggagaatgattctagatcatattcaggggatgacctatatatttttttgcagtaattctgttacatatctaacaaacatagtccttagagataacatatattatccttaaaatgttgggccaaatgcctacatttttaaagctgattttcattagtatagtccttcactgcaatctgtaaaacctctgcaatgaaactgcttggaattgaagaacagccatagagctgatgttgttaaaatcattatacaccactgtagaaagkgttttaagtctgaaaatgccctgatctagatcagtatgataaatacagtgcccagatatcttcatagarttttcacagaatcaccacagaatggtttgggttagaaagtccgtaaagatcacccagccccaacccctgccatggccagtgctgccccccaccagctcaggctgcccagggccccatccaacctggctttgagtgcctccagggatggggsaccacagcttctctgggaagctgtgccagctcctcaccgcccttcctaaagaatttcttcctaaagacactcatcaggag

SEQ ID NO: 15687 - DNA, 600 bp, Chicken  19866894222414_2
cctatatatttttttgcagtaattctgttacatatctaacaaacatagtccttagagataacatatattatccttaaaatgttgggccaaatgcctacatttttaaagctgattttcattagtatagtccttcactgcaatctgtaaaacctctgcaatgaaactgcttggaattgaagaacagccatagagctgatgttgttaaaatcattatacaccactgtagaaagkgttttaagtctgaaaatgccctgatctagatcagtatgataaatacagtgcccagatatcttcatagarttttcacagaatcaccacagaatggtttgggttagaaagtccgtaaagatcacccagccccaacccctgccatggccagtgctgccccccaccagctcaggctgcccagggccccatccaacctggctttgagtgcctccagggatggggsaccacagcttctctgggaagctgtgccagctcctcaccgcccttcctaaagaatttcttcctaaagacactcatcaggagagtgttatttgccttttccccctttcctcttgcctgacaagttactgagtactcaaggagaagcaggct

SEQ ID NO: 15688 - DNA, 600 bp, Chicken  19866894222414_3
tctgcaatgaaactgcttggaattgaagaacagccatagagctgatgttgttaaaatcattatacaccactgtagaaagkgttttaagtctgaaaatgccctgatctagatcagtatgataaatacagtgcccagatatcttcatagarttttcacagaatcaccacagaatggtttgggttagaaagtccgtaaagatcacccagccccaacccctgccatggccagtgctgccccccaccagctcaggctgcccagggccccatccaacctggctttgagtgcctccagggatggggsaccacagcttctctgggaagctgtgccagctcctcaccgcccttcctaaagaatttcttcctaaagacactcatcaggagagtgttatttgccttttccccctttcctcttgcctgacaagttactgagtactcaaggagaagcaggctgtgggaatctggacatgcaccataatattaagaggtggttcctctaaatcttcctttcttccctgtgaccacagcattatccctccatctcttgccccttcagcttgatgggcttcaagtacatctcagaagaacgcatactctgtcattg

SEQ ID NO: 15689 - DNA, 600 bp, Chicken  19866894222421_1
aggaatggcacaaaaatattcatgtaagtttgaggttctgaaaaagaccagcttccttccgtttggacctgaagtggactcactgggcaagatgagcatatagctctgcctggcaggcatacagtatttggaggctgaaagcatcctattgtcttcatggctttgccatggccaagggtacgactgaagcggctcttgttcactttggattccccatactatcccaggcttcctcctagggtgcaccacgaggccctgtgagtggtgaaggcatcccccagagatagcagctcaaggaaragagctctgtgggtgcatctcacctttctgtctgactctcctttcgctgacagataaaagaacagaactgtgttgaaaaaagccaacttgaccctgctactacattcagtcaggtaataacccagtcatgaaggaagagagtattttaatatagactcagcgtcaactttgtcaatgctatttcttcagccagcatatgttgaactgtacggttttcaaactgtattttagcgtgattaatactccaggtctttgacccagaggtagatttcagagctcaaagagttcttcttactgggg

SEQ ID NO: 15690 - DNA, 600 bp, Chicken  19866894222423_1
attaaggctgcagcttaagtctcttggtctgtatttttcatttatcgtcagcgttccacaaaagtcatatggacaaaaaggtcaatattatttttttaaaccataaaatactgagagattataatagtacatttaaagcgtcttggtggaactggataaacatcacgtagaagcacataatgtaagagctgtgtcttccacagtttggttacaagcaattctcttaactttaagtagtactcaaatatttaaagaaaggtcctctttctcacagtcagtatccatgcacctactgcctgmtcacgacaactgcctgagaatgctctctatttacgtaatgcttgagtttagaagagtcagttaaacaagggagaaactctcaaacatttttggatgctttgcaaagcggtcaaaaaggattccggtgccaagagacaatgtacagttttattgtctcattaacagtccctcatgttaaggcgtttgttttcttggaaaagaaaaacaattctttttttaattaaagacaaacaaacaaaacaatgattctaataatcaatccataatttagtttctttaagcttcacaggttttgtttat

SEQ ID NO: 15691 - DNA, 438 bp, Chicken  19866894222428_1
gtccctatgggtcccaatgggtgttgctgtgggtctcagtgggtccctatgtgtccctatgggtctcagtgtgtccctatgggtctctatgggtctcagtgtgtcccactgtgtgtcgctgtgggtctcattgtgtccctttatgtccctatgggtctctatgggtctctatgggtccctatgggtgtccctatgggtctcagtgtgtcgctatgggtccctatgtgtccctatgggtctcagtgtgtcgctatgggtccctatgtgtccctatgggtctcagtgtgtcgctatgggtcyctatgggtccctatgggtctctatgggtctctatgggtcccaatgtgtccctatgtgtccctatgggtccctatggggctctatgggtcgctatgggtctcaatgtgtccctatgtgtctctatgggtcccaatgtgt

SEQ ID NO: 15692 - DNA, 599 bp, Chicken  19866894222432_1
  misc_feature (1)..(254): n is any nucleotide
nnnnnnnnnnnnnnnnnnnnnnnnnnnnnnnnnnnnnnnnnnnnnnnnnnnnnnnnnnnnnnnnnnnnnnnnnnnnnnnnnnnnnnnnnnnnnnnnnnnnnnnnnnnnnnnnnnnnnnnnnnnnnnnnnnnnnnnnnnnnnnnnnnnnnnnnnnnnnnnnnnnnnnnnnnnnnnnnnnnnnnnnnnnnnnnnnnnnnnnnnnnnnnnnnnnnnnnnnnnnnnnnnnnnnnnnnnnnnnnnnnnnnnnnnnnnnntcttacccctctccccacaccaagaggggagcagccatgtggagcygtcactgtttgaatccctctctccaccatttatgatgtgggtgatgacctcccaaattcatcactcaagaactggtgcctggggacaccccagagtggggacgccttgcgatggagctgggctgggggggtggcaaaaaggggctgcttcatcccttggagggctgagagctgggagctggctgtgaaaatgacccccgcctcgctcccctgctgtcctctcttgattcctgccctttaataaggcaataaattattgtttctggcagagatgaggttggtcagcatttaggaagattt

SEQ ID NO: 15693 - DNA, 600 bp, Chicken  19866894222435_1
ctggacgtttgtgcagtaatgctgctacacactttactaagtgcataagagcattacatcaaatctaatggccagtgaaaatatgcatgttaaaaaagagtgagataatcatccaaactgctttccttacagttcagacagtctgctttctgtgtcttaatcaagttcatagaacaacgtttgatccaatctgttcatcccaaaagccagttctgcaactgagggcaggcaaacaattctctgaatcatgttgtcactcaaaaagctgcactgaagcagctcatgtgcttctgccacgcygaagaagcgaagacaccagtctctccctagattaatgctgctgtgtctttctctccagtctcctaagacacgtctttcattttattaggtgctggatctatttgctgcttcttgaaggtgacatgtgctgagggtgggcatacaaattccacacacctcctctgtgatccgagcagttccttgcagataattcagttttcaagtcaatctaattataatccaaagttaccgcaacaaagactttcaagtacaaagtgaggaaaatggagcaggagggaaagccattcaccaagggcgctg

SEQ ID NO: 15694 - DNA, 600 bp, Chicken  19866894222435_2
cacttatggctggtcagaacccaaattaggctcatgggattgcagcagaggttctcagcacagccatagcagcagcaagtggtactgcgtgaggcccgcactgctccagcgccagctctgagctgcagggctgcagcctttgccatctgctcttactgccactggcggtgctctggcagacagctgaggttaccaagcgaggcagcgctcccgtctgccagctgtctgccagggaccgagcctcagcaccacgcacggccttccaacagcctgcgggagcagctctgcagctgaagatgkaagtgtcctgaccaaagcacttattgcagaggtgttgtagttgagcacagaactgagtggagacggagcaatgtgacacagcacttgttactaggtgaacacagggctgcgctgctgtcgctcacagcagttggtttaaggtctctatatttacttatcgccctgtgcttacagggggagcccttcctttgtgctctatgcatgccaggcagagctcgcttttgggagctgctctttaaaaatacgcatattattctcacctgattgcaatgatcgaaaccagaagaaaataacaagaat

SEQ ID NO: 15695 - DNA, 600 bp, Chicken  19866894222445_1
aaatttgaataaatataccattaacataatttactttttttggagcttaagataattaaatacatgaagaaactgaaatggctcacctaaaatgatacagaatatcaaatgttggcattttaaaatatctcaataccttctgtcagtctatgatgggacttttttcataatttcctgtaaaaatctgaacatgtttcatccttttcttatatgagtgttctactcataccacttctaggattacagttaaataaattattctagtctgcacactgaaaacctctcgtttaacatacgtcrcattagcagaccatcataactaaactatacctgattacaatctaagccaaatcttaattagggttttctgttttcttttaagtgaatttagggacattatttaggcaaaaccaggcataacatggccaacagtaaagttagaaacagactcaatcccttctattgttgaaatctatttcttcaagatgtttaattcacaactgcatctgcattctggaagcacatgccatcagcacttagggaggttgttgcataagcaggtcataagagtctctcagatgctacatacatatggaaata

SEQ ID NO: 15696 - DNA, 599 bp, Chicken  19866894222449_1
  misc_feature (1)..(85): n is any nucleotide
nnnnnnnnnnnnnnnnnnnnnnnnnnnnnnnnnnnnnnnnnnnnnnnnnnnnnnnnnnnnnnnnnnnnnnnnnnnnnnnnnnnnnctccagacccttcatagctttgttgcccttctctagacacactccagggcctcgatgcctttcttgtagggaggagcccatattaacgaaacataggtacatgctgcattctgcactatcacagctgtgatgctaccagtgtaatctatatattagatcatgacaaagcccagggtgtaaacatgaatgggtcagtagaatcttaggaagctggrtaagtgtgaggtcaaaaaaggctatttaatttttagaaaacagtgctaaaaaaaagcaaacaaacagcaaccggtgttacaagcatgtaactcttcagtgagttagtcagcattctaaacaaattaggccttgcctacattaatatatatttacatatttatctcctgattctgtacccacaaaggtacagctatacccagatagttgattgtgtctagatataaaatatggacacagtttggttatgatgctcaaagaggacttgagttctctgaaaacaatgagaaaaacagatctc

SEQ ID NO: 15697 - DNA, 600 bp, Chicken  19866894222449_2
cttaggaagctggrtaagtgtgaggtcaaaaaaggctatttaatttttagaaaacagtgctaaaaaaaagcaaacaaacagcaaccggtgttacaagcatgtaactcttcagtgagttagtcagcattctaaacaaattaggccttgcctacattaatatatatttacatatttatctcctgattctgtacccacaaaggtacagctatacccagatagttgattgtgtctagatataaaatatggacacagtttggttatgatgctcaaagaggacttgagttctctgaaaacaatgaraaaaacagatctctaatgccttcagcaacagraaataaaatggaaatgtaataaactttaataaatgtgaattctacaatcttgttgagatacctctaactattctackaaacagaatttgtaagtaatttttcccactgagagaaaatgtttaataataataaaactcatgcaaataagctgatctttcttctcataatgttcatgtgtcatttttgataggacaaaatctaatcttaaataatattgcacagtgcttatgcactgttatactaacactggtcttttaagtatagaaag

SEQ ID NO: 15698 - DNA, 600 bp, Chicken  19866894222449_3
aggctatttaatttttagaaaacagtgctaaaaaaaagcaaacaaacagcaaccggtgttacaagcatgtaactcttcagtgagttagtcagcattctaaacaaattaggccttgcctacattaatatatatttacatatttatctcctgattctgtacccacaaaggtacagctatacccagatagttgattgtgtctagatataaaatatggacacagtttggttatgatgctcaaagaggacttgagttctctgaaaacaatgagaaaaacagatctctaatgccttcagcaacagraaataaaatggaaatgtaataaactttaataaatgtgaattctacaatcttgttgagatacctctaactattctackaaacagaatttgtaagtaatttttcccactgagagaaaatgtttaataataataaaactcatgcaaataagctgatctttcttctcataatgttcatgtgtcatttttgataggacaaaatctaatcttaaataatattgcacagtgcttatgcactgttatactaacactggtcttttaagtatagaaagttattggggtatctcaggtgttcaggtttttc

SEQ ID NO: 15699 - DNA, 600 bp, Chicken  19866894222449_4
cagtgagttagtcagcattctaaacaaattaggccttgcctacattaatatatatttacatatttatctcctgattctgtacccacaaaggtacagctatacccagatagttgattgtgtctagatataaaatatggacacagtttggttatgatgctcaaagaggacttgagttctctgaaaacaatgagaaaaacagatctctaatgccttcagcaacagraaataaaatggaaatgtaataaactttaataaatgtgaattctacaatcttgttgagatacctctaactattctackaaacagaatttgtaagtaatttttcccactgagagaaaatgtttaataataataaaactcatgcaaataagctgatctttcttctcataatgttcatgtgtcatttttgataggacaaaatctaatcttaaataatattgcacagtgcttatgcactgttatactaacactggtcttttaagtatagaaagttattggggtatctcaggtgttcaggtttttcagtgagagatgatttttgactgattcactgagcacagtaatttcaattcacaaatagtaactcaaaaggcatcaagg

SEQ ID NO: 15700 - DNA, 600 bp, Chicken  19866894222453_1
tctgtaaattctcatggtttacggaagactttggagcagtgcattgctggtgatcgtcagtgaatcacgaggagccagaaggctttctgggcagaaaaaatggattttttttttatttgcttgctcctgaaatcgagctaacaatcaatcggtggggctgtaacttcattccgctcttacttcggcagcctgagtttttacactccagtttatttatagcttcttaaagccagctgaataacgcaggtatccaagagcagaattagagcatgagtgtttgagatactagacttcacttcyactgtgaagaacacctyaggcagtaggggttgtagaacaggagaacatcacttccatgtgcttagtggaaaaagtgtctggcatcattgcattyacactgatatcacagtcacctggaaaggcagctggaaaaagctggagggtacagccttgcaggttgtgcttgtggctttttgtaaaactgtatactcatatgcataggatgttaccatgatcgatatgatcagatacagctgaaatgctttttaagcctactaaggcttaggaaacaggaaaagaaaagcagttttggctgcctct

SEQ ID NO: 15701 - DNA, 600 bp, Chicken  19866894222453_2
tttacggaagactttggagcagtgcattgctggtgatcgtcagtgaatcacgaggagccagaaggctttctgggcagaaaaaatggattttttttttatttgcttgctcctgaaatcgagctaacaatcaatcggtggggctgtaacttcattccgctcttacttcggcagcctgagtttttacactccagtttatttatagcttcttaaagccagctgaataacgcaggtatccaagagcagaattagagcatgagtgtttgagatactagacttcacttcyactgtgaagaacacctyaggcagtaggggttgtagaacaggagaacatcacttccatgtgcttagtggaaaaagtgtctggcatcattgcattyacactgatatcacagtcacctggaaaggcagctggaaaaagctggagggtacagccttgcaggttgtgcttgtggctttttgtaaaactgtatactcatatgcataggatgttaccatgatcgatatgatcagatacagctgaaatgctttttaagcctactaaggcttaggaaacaggaaaagaaaagcagttttggctgcctcttgtttagttttaggact

SEQ ID NO: 15702 - DNA, 600 bp, Chicken  19866894222453_3
aaaaaatggattttttttttatttgcttgctcctgaaatcgagctaacaatcaatcggtggggctgtaacttcattccgctcttacttcggcagcctgagtttttacactccagtttatttatagcttcttaaagccagctgaataacgcaggtatccaagagcagaattagagcatgagtgtttgagatactagacttcacttcyactgtgaagaacacctyaggcagtaggggttgtagaacaggagaacatcacttccatgtgcttagtggaaaaagtgtctggcatcattgcattyacactgatatcacagtcacctggaaaggcagctggaaaaagctggagggtacagccttgcaggttgtgcttgtggctttttgtaaaactgtatactcatatgcataggatgttaccatgatcgatatgatcagatacagctgaaatgctttttaagcctactaaggcttaggaaacaggaaaagaaaagcagttttggctgcctcttgtttagttttaggactctctgatgcgcttttttttcaggaggaagagctgcgtaaagggggagatcctaaatatgctcatctaaatatggatt

SEQ ID NO: 15703 - DNA, 600 bp, Chicken  19866894222462_1
ttggtcctccaccaacaacaccttgtttactgaagctggaggtgtgaaatgtacatggaggcctgatgctagagcttggagatgtaagtggtgtagggatgaaagtgttactggtaatggctggaactgcaatgtggtaggacatccttttggacctctcaacaccacatactttcaaactaaggaacatgtaaataaactaaccaacaaatggaatgcaccttttgaaaatggcttagtagcactaaagagacattattggttttgggtcattatgcatataaacgactacctgcaaastggcttgggatatattattttggagtaatccgcctgatgttctttttgctcccaggaaaggatggcaatgaattgggtgtcagagtatatgatgatctcaactgacacaggaggtctattgacacctccctaacacatgatagggtgaagatgagaacttggggcgaagatgactggcttcctcgatatgtaatcaagcactatgggccagctacctggaacaccgatgagtgagttagtggtgcttgagagtccatctataacctaaaccatattatcagattacaatctgtccttgaa

SEQ ID NO: 15704 - DNA, 600 bp, Chicken  19866894222463_1
gacagatcgctaccaaagagcttgaatagaaaactgtatgaaagtctgagttaggagatgctccatgatatatttttacggtctgtatagaacttgggaaaacattcagccttcagccatcaccttggtttcacctccactgggtctagaagaaattgtatttttattgtactgcacctaaccctaaaggaagggacaaactggattacaggctcaagtgtgtcagatgctgtccaaattcccactgcattaataactcactatttcttaacattcagtattctttttaacctcttacartacaggatttcatagtgatactgcaaatactgcagcatttgtgtaaaatgcagtattttgaaacctagaaaaaggtcagagctgtacaaacaagttgtgtgaagcccagtcaacaacagctgttgttggcagtttgctatatacatcccagtgacattacaggaagatctagaatcacttgactcttctccaaatacctcccatgctgcttcagtgttccccttcccacagtctccagctcagtgaaacagctcttattacaaatatgtgatttcctagaaaaggtcatatactcaacaa

SEQ ID NO: 15705 - DNA, 600 bp, Chicken  19866894222463_2
atttcctagaaaaggtcatatactcaacaactgtaactcacataaggcaattaaaacaaattttaaaaaaattcagagaaataaaatacattcctgcccacaaatagtatcttcttccagtgatactttgtactttgcttcagtgaaaagcattgatattgctgctaactgcctcaaatatttctctttcaagatcaacagcatttatcctgttggcttttgtagcagagattctgaatgaaactactaaaatattgcagactggtctttttgcattaaataatgtcaaaactactatartaaaaatatagtttttgcctgcacgttgtcagatctttctaaggaggaatgctaccaaatgaaaactaacatgaaaaatcctccttaatctcaactgcatattaaagtatgagaaatagacttggacccaaggacaagcatgggatctaccataagcctaaagattagctgctacagttttttaatatgctaaatctgtatttaattggtgaagtatttcgatgtttgtaggtgtccaaaacattgggaagtacagatggtctgatccagagttgctcaaggctgtgctgcatggggcag

SEQ ID NO: 15706 - DNA, 600 bp, Chicken  19866894222465_1
gcttcccgctgctaaattggtgtcacgttgcttaccttagtgcctagggttacagcccacctccaccgcaacatttaaacatacacagcatgagactcagagataaataatccttgcagttcggcacagtacacttgtaatgctaggtgctgcgagacagtgggcaaccaacaagtccaaacaaatcagggctgctgtaattgtgtgcttagctttaattaccctcgaggacactgtttgcaacttgactccagaggcaaggcagcctactattgacatcaccagatcaaatataacctwaaagaccgacaagcggcwtttcagcagctcatttcctattattgttcttaaaagtaagcttggggattacagctttagaaggctagctggctgctacagagctgtattttttaaataaattctcctcttattatttttaaaaaagatggtgtctgctccagtttttgaaaaagttcataaaaggggaccttggagagcagggttacagagacactggagggtcatgagattcagaagatcagagccctcaaatcctgactgctgtattaaggtgcgctactctacttattcatcagtcct

SEQ ID NO: 15707 - DNA, 600 bp, Chicken  19866894222465_2
ggtgtcacgttgcttaccttagtgcctagggttacagcccacctccaccgcaacatttaaacatacacagcatgagactcagagataaataatccttgcagttcggcacagtacacttgtaatgctaggtgctgcgagacagtgggcaaccaacaagtccaaacaaatcagggctgctgtaattgtgtgcttagctttaattaccctcgaggacactgtttgcaacttgactccagaggcaaggcagcctactattgacatcaccagatcaaatataacctwaaagaccgacaagcggcwtttcagcagctcatttcctattattgttcttaaaagtaagcttggggattacagctttagaaggctagctggctgctacagagctgtattttttaaataaattctcctcttattatttttaaaaaagatggtgtctgctccagtttttgaaaaagttcataaaaggggaccttggagagcagggttacagagacactggagggtcatgagattcagaagatcagagccctcaaatcctgactgctgtattaaggtgcgctactctacttattcatcagtcctgactttgacaataagtaa

SEQ ID NO: 15708 - DNA, 600 bp, Chicken  19866894222465_3
agaagatcagagccctcaaatcctgactgctgtattaaggtgcgctactctacttattcatcagtcctgactttgacaataagtaaaaaataggaaaattcataaaactacagtatatggtatctagcctgaggagaaataaaggtgacaggtttataactaacagatttggtagcacaaatcagtgtccttactgaacattaattactgtaattagtaactggcatttgagtaggaacattattttgttttgaaagcagcagtgcaccaggcctgcctgggctgggtcataaagagttwcaatgccattatgttttccaagactgcatgacatgaacttaggcaactctcccctcagttacattcaaatacccaaaaaataaaatagaaagctgtatttaagaaaatgtttctgtaaaattaatcagattggaccaaagaagaaaacttctttggtgagaaggtgggagtcaaggcaaaaacagcatgaatgcagatttatgaagactgccacgcagctttcatctctacccacaaccacacttgagcagactgggcagccccaccacctctctgctccactcccagcttctcccttga

SEQ ID NO: 15709 - DNA, 599 bp, Chicken  19866894222467_1
  misc_feature (1)..(36): n is any nucleotide
nnnnnnnnnnnnnnnnnnnnnnnnnnnnnnnnnnnntcctctgcttacagtgtgcaacccagggactatttgtaacacatcattcacattcgtattacatttcatagcaagtctgtgtgccatcacaaccagctcagagtggctgagctctgcctcagcatttgaagactgctcacatctctttgcttagctttacggtttgtccttccattagactttaacctctccatctgtaccttgtttcctatgttctgatagctgtcgctgtctccataatggtcagcctcaagcatgccaacrgctggccaacagctggccaacaccttccttgaaggctgatgcctacacccagtcagtgatacgcaggagagatcttagagctgctgagaggatgagggccacacattttacacataaatgagatttcctgttagagacaattcaggtgaaggctttttttttttttttttttccccacaatacctgtatgttattgattcagttgtactttgatgctgatccttagcttctgtctgcctatgagagcttggccagtaattcctgctttgtatttgtagagttgattgtttgcctgatag

SEQ ID NO: 15710 - DNA, 599 bp, Chicken  19866894222468_1
  misc_feature (1)..(28): n is any nucleotide
nnnnnnnnnnnnnnnnnnnnnnnnnnnnacggaacaattcagtgtctcccctgcaatcaagcactaaaaccctctcctttttggggtgtattagctcaagcacaagaccaccttggttgctgttatcaccaaggataccttggagatcaaacttcagctgacagaatcatagaaccattatggttggaaggacctctaccatcagcccatcccaccacactcactgagtccctcagtgccacatctacacagttctggaacacctccagggatggtgactgcatcaccttccttggcagyctgtgccaatgactcgctgctcttcctgagaagaaacatttcctaataccccatctgatgctgccattcaatcacttacacgaagacgggcgtgttgtttccccacaccacacctctgctcacctccccaggtgtcacctttcacttgatctaactcccatgaagttatttttccagagccctgttctactgctttattttctcctggattaaagctaggcgttcggtctcggggcctcctcagacccagcacggagctctgagcctgccctgctagcatcccctgccttctcagcggt

SEQ ID NO: 15711 - DNA, 600 bp, Chicken  19866894222476_1
attgtgctccattcagttattaacctagtactcaaatttgagtccaataatatttttgacaaaagtatatattggatttggataacgcatctcttccacaaagtcactgagacttagtttgaagaaaacaaaatttagagtatttccttttgaatatttcactgtctattcacttaatttccagtgtgaccttgcttaacatcagcctgtggccagtggctttttccacactttgtgagtaagcttaaaacccctctcagattcagcatcccacactcatttcacaaattttagtttgasagcaagaaagtagtggtttttctttaaggattcgttgagacacttttcttactcttcaaatgcttctgtagctccattctgtatcctttcagattttcaactatgttttaaacattattagaataggcgtatttggaggttccatacctgattaattctgagcagtaaataaaagcagagtacagtcaggctcctattcactacttcgtttacatcaaattctccatcctgctttaacatcatctgggcactcctgctgagctgctggtttgttgctacccagatttgttgctttcaatt

SEQ ID NO: 15712 - DNA, 600 bp, Chicken  19866894222477_1
aatttcgttatttgatttctttgctttcatctgaaatgtttacatgttcagtctgcttttgtagatgcatagagataatcttggctgtgtttatttcataaatgcactctctaatgttagttggaagagagccggaatgttcaaaagcagatgaagatactgcagaaaaagcaagcacaagttgtgaaggagaaagtccacttgcagagcgagcatagcaaggccattttggcacgcagcaaactggaatctctctgtcgggagcttcagcgtcataacaagactttaaaggttagtttmttgatatgaattctgatgcgtggtggtgaaaatctcccttactgatcactgcttaaaattaagcctgttgctttttgcttactactttatcccatgcttatattatttatatctgtatatgtcaaatagcatgtgacataagtgtacctgatttttaaggtaaagaacgtgagggtagttcagctggctttgaactattctctaggctggttgataggtcgtattacttgcactcagtggtcttgtcgtgtttatttctgggagcagtagtgatggctgctggaaaaaaatagcacaact

SEQ ID NO: 15713 - DNA, 600 bp, Chicken  19866894222482_1
cgagtactgaagttactgacgtttgtaacagatcggagcctcgtatgcctcctgccatgttaccaacatgagactcagtgtgctttaaaacattggttctatttaaagagtggtgtgactgtgtcctccccctccagaagggatacacagcttcacaagatccttttttctcataatgtgttttccaataaaatttccccaattttgtaatcagctgggaagaaagaacatttcacaatgttcataaggcctgtagatgttttgaccagacataagatttcctattgatagtattaaacrctttggaatgaaatgttttgggttttccatctgtaggctgtctgagatgtcaacagccaatatgacctgctctttcccttttaggcctataaataaaaggcagcttgtttarcagatcttgcagcagagagcagaggtgtatattaatgagctttctctaatggcacactggatctatttagcactacaactgtgaaggcttctctttttcagtcataactcatttcctaagaaaatgtcagctattgcttcaccttatggtctgagctgtttagtttgtagtttatttcttctgatctg

SEQ ID NO: 15714 - DNA, 600 bp, Chicken  19866894222482_2
gtgtgactgtgtcctccccctccagaagggatacacagcttcacaagatccttttttctcataatgtgttttccaataaaatttccccaattttgtaatcagctgggaagaaagaacatttcacaatgttcataaggcctgtagatgttttgaccagacataagatttcctattgatagtattaaacrctttggaatgaaatgttttgggttttccatctgtaggctgtctgagatgtcaacagccaatatgacctgctctttcccttttaggcctataaataaaaggcagcttgtttarcagatcttgcagcagagagcagaggtgtatattaatgagctttctctaatggcacactggatctatttagcactacaactgtgaaggcttctctttttcagtcataactcatttcctaagaaaatgtcagctattgcttcaccttatggtctgagctgtttagtttgtagtttatttcttctgatctgcaccactgacagatattctagacgtgactgtgattaaatatgcttatgaaaacggtaaacatttgataatataagccctcatggggatatgctgttatttctgcatggcagc

SEQ ID NO: 15715 - DNA, 600 bp, Chicken  19866894222483_1
agtagcacattcctttgaagtccttcagagcatgacagcaattaactgaagactcatcttccctcatgttgttttatccactctcactcgagatcaacacttcctctgatggtagtgcaaattcacaccccccagctacaaggagcttgcaaaacgacccggttacaattacagacacaatgagcagtaccttcggtgtttctgggctcattctgattgtttctcatggcctccattttgcagatgtaagacagtagggcaatccaccactgagtgcatccagctaaaaaaactagctgmaataggattttctccaccttgagagaaataaggagacagcgagcagcagataggcaacagggaagcattaatccaaaagtgctcttggaagaaagtttttcaaggttttctgtttacttgttcctgttgtggttttttttttgtcgtttgttttgggttttttggttgttttttgtttgtttgttttgggtattgttttgaaagtgagcaaggatgaggataaaagagaactaattcctcactaaagggcctcctacagcccaagcatggcggcctgctggctgcggcacagcgccgtaa

SEQ ID NO: 15716 - DNA, 600 bp, Chicken  19866894222483_2
ctcttggaagaaagtttttcaaggttttctgtttacttgttcctgttgtggttttttttttgtcgtttgttttgggttttttggttgttttttgtttgtttgttttgggtattgttttgaaagtgagcaaggatgaggataaaagagaactaattcctcactaaagggcctcctacagcccaagcatggcggcctgctggctgcggcacagcgccgtaacctctgcacgcagccacttgaacagggttcaaggcaatgacttcacatggaggcagagtgcgaatggctttaaaccaccgmagcagtgatataaaattgcggcgtggcagcagggggggccctgcagcctcacagcggggagaaggggtctgggaacagccctccacaggggcaggcagatgtcagagggaaaacaaaagaggatccgaagccttctcctctgagcatcacctgcatccacacatcgctctgtcggccacctccagagccctgagggcgcagcagttcacccctcagaagtgaaaaggaagggataaagagcagcaacccggaatttctgttctgtgagaaattcctgtattccgacagtctctttgtgca

SEQ ID NO: 15717 - DNA, 599 bp, Chicken  19866894222484_1
  misc_feature (1)..(151): n is any nucleotide
nnnnnnnnnnnnnnnnnnnnnnnnnnnnnnnnnnnnnnnnnnnnnnnnnnnnnnnnnnnnnnnnnnnnnnnnnnnnnnnnnnnnnnnnnnnnnnnnnnnnnnnnnnnnnnnnnnnnnnnnnnnnnnnnnnnnnnnnnnnnnnnnnnnnnnnaatccaactccagtgtcacaccagttattctgcatttctcaagtgagttatttagcagagttgaaaggactcctgaaagcagctgtcctcccaggtatttgattcattttcataaggatttccattaatgatattgaatcttattccartgctagattctggattgtgccctatccaacaaaggtatttcaagtagatgcaaaaattcatatttctcaatgtataagatttgaaagagcactgaaagacccttttgcttggatgcccggaatagcttcctgttgagagacactttaratgtgtttttggacatcttgggttttatgtaatctgctgtaatcgaagtacagaaaaatagggggaaaagagtgagtcttatactgggagtaatttgtttcccaraagagtccacctattgggttgttcaggaacaaggccatgagaataa

SEQ ID NO: 15718 - DNA, 599 bp, Chicken  19866894222484_2
  misc_feature (1)..(3): n is any nucleotide
nnnaatccaactccagtgtcacaccagttattctgcatttctcaagtgagttatttagcagagttgaaaggactcctgaaagcagctgtcctcccaggtatttgattcattttcataaggatttccattaatgatattgaatcttattccartgctagattctggattgtgccctatccaacaaaggtatttcaagtagatgcaaaaattcatatttctcaatgtataagatttgaaagagcactgaaagacccttttgcttggatgcccggaatagcttcctgttgagagacactttaratgtgtttttggacatcttgggttttatgtaatctgctgtaatcgaagtacagaaaaatagggggaaaagagtgagtcttatactgggagtaatttgtttcccaraagagtccacctattgggttgttcaggaacaaggccatgagaataacagcacaggaataactgcataataacaaagtcagaaaaaagggaaagcactgccatggcagcctgggtgaaagactgcacagcttcaaggaaaaggcagtctccagaactggagataaaaacaccttaacattacaaaggtgaaggga

SEQ ID NO: 15719 - DNA, 600 bp, Chicken  19866894222484_3
ttcattttcataaggatttccattaatgatattgaatcttattccartgctagattctggattgtgccctatccaacaaaggtatttcaagtagatgcaaaaattcatatttctcaatgtataagatttgaaagagcactgaaagacccttttgcttggatgcccggaatagcttcctgttgagagacactttaratgtgtttttggacatcttgggttttatgtaatctgctgtaatcgaagtacagaaaaatagggggaaaagagtgagtcttatactgggagtaatttgtttcccaraagagtccacctattgggttgttcaggaacaaggccatgagaataacagcacaggaataactgcataataacaaagtcagaaaaaagggaaagcactgccatggcagcctgggtgaaagactgcacagcttcaaggaaaaggcagtctccagaactggagataaaaacaccttaacattacaaaggtgaagggacctaaggcactgagcatcacttctgagtttgaaaagtggtatactgtacattccctctgctgattcactttctcctccttttctgataagtgaatgcagtccctct

SEQ ID NO: 15720 - DNA, 600 bp, Chicken  19866894222499_1
acgtcttgtaataccctgggtgcaactttgtaagctgcagacatcactgtgatgtcgatatgacagtccctgggcactgggggacatctgaatgatgttccttgctctggtttgtcaggcctgacggctcagccagctgtagctgagccacggctgcgccttcttgcccaggctgtgaatgctgatatgtgagtgcacccttcatggccgagctgtggttgatgaggagactgggccataaacagggccttggcaaaagcccctctgtctgagcacacataggctgcggtcccgctggtrgctatgtggcaactttggggcagagactgatctgttctgatcttctgtcacaggaatggtatgaggaacattccaggaaagaagaatctcagataccattgcaagagtctgcatctgcttcccagagttctctgaagcccctgagtctccgacaacgttcccagactgtcatctaggcctggctagtgcaagctgccttctatgcaataacctagagtattacttcacagcatatatgttgggataatgtatatagatctgttccatgtactggttggcgttagggataaaagctcttcc

SEQ ID NO: 15721 - DNA, 599 bp, Chicken  19866894222500_1
  misc_feature (1)..(1): n is any nucleotide
nctgcttttaaatgctttaggttgtgttattgcttttcctggaaaaggctgtgggagggaaatgttagtagaagattgattcttcagaaataatgtagcaataatcagtagaaattttcactgggagcaagtatttattagcctagatcaaaaccaaacaccaggttttataatctatgactagaactgctccatgaagaagcacttggcttcttctgtatcttcagtagctcttatcttaagcagaggtgcaaattagactgaaaattgtcagtgaagttcaagctctatctctgttgyggaaattaagatgaaaaatgagctgctgatgcaaagaaccaagtgctggcattgcacrtgtataaagtcacatgaaaagayaagtgatgaggagtcacagtgaacacaaggacaggtgggattccattggctaaactatccagtgttgttattgttctgcaaacccactctgatgcagcacgatgtgatacatgactgacagtgcaatgactttgtayccagttccctttccccaaatctttgctttcagtcattcagagaagactaccctctctagtactgatgagcaagaattttgc

SEQ ID NO: 15722 - DNA, 600 bp, Chicken  19866894222500_2
gaaatgttagtagaagattgattcttcagaaataatgtagcaataatcagtagaaattttcactgggagcaagtatttattagcctagatcaaaaccaaacaccaggttttataatctatgactagaactgctccatgaagaagcacttggcttcttctgtatcttcagtagctcttatcttaagcagaggtgcaaattagactgaaaattgtcagtgaagttcaagctctatctctgttgyggaaattaagatgaaaaatgagctgctgatgcaaagaaccaagtgctggcattgcacrtgtataaagtcacatgaaaagayaagtgatgaggagtcacagtgaacacaaggacaggtgggattccattggctaaactatccagtgttgttattgttctgcaaacccactctgatgcagcacgatgtgatacatgactgacagtgcaatgactttgtayccagttccctttccccaaatctttgctttcagtcattcagagaagactaccctctctagtactgatgagcaagaattttgcttgcttctcaatagaaaggacaaaatagcctgatgcctacactctgaatcatcatttaa

SEQ ID NO: 15723 - DNA, 600 bp, Chicken  19866894222500_3
cttcagaaataatgtagcaataatcagtagaaattttcactgggagcaagtatttattagcctagatcaaaaccaaacaccaggttttataatctatgactagaactgctccatgaagaagcacttggcttcttctgtatcttcagtagctcttatcttaagcagaggtgcaaattagactgaaaattgtcagtgaagttcaagctctatctctgttgyggaaattaagatgaaaaatgagctgctgatgcaaagaaccaagtgctggcattgcacrtgtataaagtcacatgaaaagayaagtgatgaggagtcacagtgaacacaaggacaggtgggattccattggctaaactatccagtgttgttattgttctgcaaacccactctgatgcagcacgatgtgatacatgactgacagtgcaatgactttgtayccagttccctttccccaaatctttgctttcagtcattcagagaagactaccctctctagtactgatgagcaagaattttgcttgcttctcaatagaaaggacaaaatagcctgatgcctacactctgaatcatcatttaatttttttgtacttgctaatgttg

SEQ ID NO: 15724 - DNA, 600 bp, Chicken  19866894222500_4
tatcttcagtagctcttatcttaagcagaggtgcaaattagactgaaaattgtcagtgaagttcaagctctatctctgttgyggaaattaagatgaaaaatgagctgctgatgcaaagaaccaagtgctggcattgcacrtgtataaagtcacatgaaaagayaagtgatgaggagtcacagtgaacacaaggacaggtgggattccattggctaaactatccagtgttgttattgttctgcaaacccactctgatgcagcacgatgtgatacatgactgacagtgcaatgactttgtayccagttccctttccccaaatctttgctttcagtcattcagagaagactaccctctctagtactgatgagcaagaattttgcttgcttctcaatagaaaggacaaaatagcctgatgcctacactctgaatcatcatttaatttttttgtacttgctaatgttgtttcttcacaactagacatacagctggtacgcagttgtgaggatgctgtgctcagccatgagttcagcccacagttgaaccctggacattaaggggtttcagtgcttccatgcttcacagacagaaccacttttaaa

SEQ ID NO: 15725 - DNA, 600 bp, Chicken  19866894222506_1
cacatcccagcaaagcagagctagggtgagccacagcatcttccaccacctaaatagcctttataaaatagctgacttagaatcatagaatcattaaggttggaagagaccactaagatcatctagtccaaccatcatctaggcaggaaaaacatccaatgttcgcccataaagacagatgagtactgctcagtgaagctgacagatctgtaaggaggaagcaatacacagagatggcagtgagtccagccagaaaaaccatagccggaaaaatctgcatggtaacagccttctgctctyggcttgtccttgcccagactcttgattttcatctrtattaagtgaatggtgaaaaactaaacttttcatccagtcattctcaatttattgcatcaggagggaataaacatcatacatttttctacattagatctaccctgagcagagtaggatttattttatttagaccacacattgtgcagtgtatttataaagcagagacctctgaaatacagttctgctctgggaggtctcagctgagccrtatattcaacaatcacacacttcagcaagctggtgaatatcaatgcaatgggcaag

SEQ ID NO: 15726 - DNA, 600 bp, Chicken  19866894222506_2
gcatcttccaccacctaaatagcctttataaaatagctgacttagaatcatagaatcattaaggttggaagagaccactaagatcatctagtccaaccatcatctaggcaggaaaaacatccaatgttcgcccataaagacagatgagtactgctcagtgaagctgacagatctgtaaggaggaagcaatacacagagatggcagtgagtccagccagaaaaaccatagccggaaaaatctgcatggtaacagccttctgctctyggcttgtccttgcccagactcttgattttcatctrtattaagtgaatggtgaaaaactaaacttttcatccagtcattctcaatttattgcatcaggagggaataaacatcatacatttttctacattagatctaccctgagcagagtaggatttattttatttagaccacacattgtgcagtgtatttataaagcagagacctctgaaatacagttctgctctgggaggtctcagctgagccrtatattcaacaatcacacacttcagcaagctggtgaatatcaatgcaatgggcaagtcacagaagaagccagtcaatayaawggaaaattg

SEQ ID NO: 15727 - DNA, 600 bp, Chicken  19866894222506_3
tccagccagaaaaaccatagccggaaaaatctgcatggtaacagccttctgctctyggcttgtccttgcccagactcttgattttcatctrtattaagtgaatggtgaaaaactaaacttttcatccagtcattctcaatttattgcatcaggagggaataaacatcatacatttttctacattagatctaccctgagcagagtaggatttattttatttagaccacacattgtgcagtgtatttataaagcagagacctctgaaatacagttctgctctgggaggtctcagctgagccrtatattcaacaatcacacacttcagcaagctggtgaatatcaatgcaatgggcaagtcacagaagaagccagtcaatayaawggaaaattggtacaagagccgggtgtggggcagagcaggagcccggaaccgacaggaaactcagagccctcctgcaaatcgctgaggattttcccaacatcccccctgctcgccatgagtcaccactgaggctccacattgagttatcgccatttagagtggcatttcctttcagactgcacaaagcaaaggagccatattagtaaatttattgagta

SEQ ID NO: 15728 - DNA, 600 bp, Chicken  19866894222506_4
gattttcatctrtattaagtgaatggtgaaaaactaaacttttcatccagtcattctcaatttattgcatcaggagggaataaacatcatacatttttctacattagatctaccctgagcagagtaggatttattttatttagaccacacattgtgcagtgtatttataaagcagagacctctgaaatacagttctgctctgggaggtctcagctgagccrtatattcaacaatcacacacttcagcaagctggtgaatatcaatgcaatgggcaagtcacagaagaagccagtcaatayaawggaaaattggtacaagagccgggtgtggggcagagcaggagcccggaaccgacaggaaactcagagccctcctgcaaatcgctgaggattttcccaacatcccccctgctcgccatgagtcaccactgaggctccacattgagttatcgccatttagagtggcatttcctttcagactgcacaaagcaaaggagccatattagtaaatttattgagtatttcattagatcaatatggactatgatttaggagcctctgcccaggctctttaaatctatttaatcaaaccaattaata

SEQ ID NO: 15729 - DNA, 600 bp, Chicken  19866894222506_5
tttcatctrtattaagtgaatggtgaaaaactaaacttttcatccagtcattctcaatttattgcatcaggagggaataaacatcatacatttttctacattagatctaccctgagcagagtaggatttattttatttagaccacacattgtgcagtgtatttataaagcagagacctctgaaatacagttctgctctgggaggtctcagctgagccrtatattcaacaatcacacacttcagcaagctggtgaatatcaatgcaatgggcaagtcacagaagaagccagtcaatayaawggaaaattggtacaagagccgggtgtggggcagagcaggagcccggaaccgacaggaaactcagagccctcctgcaaatcgctgaggattttcccaacatcccccctgctcgccatgagtcaccactgaggctccacattgagttatcgccatttagagtggcatttcctttcagactgcacaaagcaaaggagccatattagtaaatttattgagtatttcattagatcaatatggactatgatttaggagcctctgcccaggctctttaaatctatttaatcaaaccaattaataaaa

SEQ ID NO: 15730 - DNA, 599 bp, Chicken  19866894222512_1
  misc_feature (1)..(53): n is any nucleotide
nnnnnnnnnnnnnnnnnnnnnnnnnnnnnnnnnnnnnnnnnnnnnnnnnnnnnaaaaaaaaaaaaaaaaaaaacaattgaagaagaagaataagtttcattcttttaactttgaatcattatgacttctatctatggcttcttctatggcttctatcaagattatgtcctcatgcctctgtacaacaatgtagatttactcctttattgaaaagctgatattataataggtcgatttcaaaggcacaacttgatttcccactttatttactctgttcctggagagagagagagggaaggwaaaaaaaaaaaaaagctgaaataacctgtaattacagacgtttaaaaagtgtagtaacttgtattataatagtgaacacaagatgcagacaggaagagtggtttgaattatacatgattgaaaaaatgtatacacaaaattctactgcctatcctaccctttctctgaactaatattcagccttccactgcccttctggatactaaagtcaacaacttcaatatgtggagggagatttacagcaagtcttcagcatcccaagtccttcacagagatgaggaagatattaatgttgacag

SEQ ID NO: 15731 - DNA, 600 bp, Chicken  19866894222512_2
aaaatagtgttttgtagctgggaatttgctctatcaaatagtgttattgtgctctttgtattgctgtagtctctgtggaaataaataggaggcattacttttggagtaacctacataaatgtatattacttaagttggatgatagctctttgttctctgttaattttaacactgattttgccagtctcccaaagctgtggtcatttgatgatgagtaactgccacagctgagaagtcaatatccctcaggccactgttgtcatcctgtgtatgtactctcaaggcgtattttatcattcygtgtatgtattttatcctagggccatagatcattctagcccataatgctattatgttacctacttaacaatagaagttatatcacaggattgtaccaaactaagtaaaagataaaccagagtaagcaacaattttggtcattagatagcttatagcaagttataccaatctccatgcaggttcagataggcttgtagtccatgttattaacttggtacaaagtctgcggctgttacaagtaatggtaactccatactgactaggccaggaggctgcaatgagaaaacaaacaagtaagta

SEQ ID NO: 15732 - DNA, 600 bp, Chicken  19866894222514_1
ttgaaagagacaagacctacatttattggaattgtggttaaatactcccagtacccattttccccctatgaagttgccaaggagaaaaccacacatgttaagttttaatctgcttttcccaaatgtggatacatttaaaagatggctgataaagtatcattaggattttccaatgatggtttaaaataatataccttttaaagagggataataaattatgaatgttcatgataaagtcactcatgaagtctctcagggttctgtccatggacctatgttattctgcataaatctatacayttctgaattactcacaaaaggaataaataatatccatcatgctttttggtgaaacaagtatccttttgtaacaaatgaatttttggaagcaaaaaaaaagcaaacaaagaccccaccacccttcattgaaaccattttcatatccatctcattattttaagctaaattactcaaggaaaattaagatgtaaacatatttgaaatcaatggaaaacttaaggtgttctgtgtttcttttttgttgcattaatctgctatgtatttccatccatcatttctagtgatgcttaatgttgcaat

SEQ ID NO: 15733 - DNA, 404 bp, Chicken  19866894222517_1
catttggatcacgctgaccagataggggaggaaaaagcacctgtgtctcttgactatctcaggaattagtattacattccatgagcagctctttgtgtcaagtgcttgacttttgaatattgtgcagtctagtgctgcgtgtactattaagaaggcaaagactatgctgtgacattgagccttctcaggaaatgccagcagtgagggttagcattctaagtgctccagatgtataacaagtccactgcagagaaatgtgattataagagtaatgttgattcacttgtattttctataaawtttttttgcttgttttttgaataagcctgaccatcattaacctctttcagagagtgggaactaaaaccagagaccagagacttcatttcttagaaacatgaagt

SEQ ID NO: 15734 - DNA, 599 bp, Chicken  19866894222521_1
  misc_feature (1)..(263): n is any nucleotide
nnnnnnnnnnnnnnnnnnnnnnnnnnnnnnnnnnnnnnnnnnnnnnnnnnnnnnnnnnnnnnnnnnnnnnnnnnnnnnnnnnnnnnnnnnnnnnnnnnnnnnnnnnnnnnnnnnnnnnnnnnnnnnnnnnnnnnnnnnnnnnnnnnnnnnnnnnnnnnnnnnnnnnnnnnnnnnnnnnnnnnnnnnnnnnnnnnnnnnnnnnnnnnnnnnnnnnnnnnnnnnnnnnnnnnnnnnnnnnnnnnnnnnnnnnnnnnnnnnnnnnnttgtgtttcgcacatgttgcagaacgcatggaaacamtgcccttcttcagcggtactctaggaaagagatagtgtgtaagctcccattttggcatggcagtataagccaaaagcaataaggctttgctctgcactgctcagatcacaactagctgcagaaacctgagcactggatggcagagagagccatgttccagccacatacataccacttgartctggtctgcrattctacatgcatccgaaaataaaatcacttcttttctttcataaactttcttgtaaaaaaatcatgcagagtaatctgtacttcctaaatggagcactgtttagttc

SEQ ID NO: 15735 - DNA, 599 bp, Chicken  19866894222521_2
  misc_feature (1)..(83): n is any nucleotide
nnnnnnnnnnnnnnnnnnnnnnnnnnnnnnnnnnnnnnnnnnnnnnnnnnnnnnnnnnnnnnnnnnnnnnnnnnnnnnnnnnnttgtgtttcgcacatgttgcagaacgcatggaaacamtgcccttcttcagcggtactctaggaaagagatagtgtgtaagctcccattttggcatggcagtataagccaaaagcaataaggctttgctctgcactgctcagatcacaactagctgcagaaacctgagcactggatggcagagagagccatgttccagccacatacataccacttgartctggtctgcrattctacatgcatccgaaaataaaatcacttcttttctttcataaactttcttgtaaaaaaatcatgcagagtaatctgtacttcctaaatggagcactgtttagttcatttttagagggaaaaaaaaagagaactaaataggagaatggtgaaaaactacgcaaattgtagcagatgtacttcagtccttttgctggtgttacagactgacttctgaaagtcctcctgtggtcytgacacgagggggtattacatggttcctgtcccaggcttttcctctctgcaca

SEQ ID NO: 15736 - DNA, 599 bp, Chicken  19866894222521_3
  misc_feature (1)..(72): n is any nucleotide
nnnnnnnnnnnnnnnnnnnnnnnnnnnnnnnnnnnnnnnnnnnnnnnnnnnnnnnnnnnnnnnnnnnnnnnnttgtgtttcgcacatgttgcagaacgcatggaaacamtgcccttcttcagcggtactctaggaaagagatagtgtgtaagctcccattttggcatggcagtataagccaaaagcaataaggctttgctctgcactgctcagatcacaactagctgcagaaacctgagcactggatggcagagagagccatgttccagccacatacataccacttgartctggtctgcrattctacatgcatccgaaaataaaatcacttcttttctttcataaactttcttgtaaaaaaatcatgcagagtaatctgtacttcctaaatggagcactgtttagttcatttttagagggaaaaaaaaagagaactaaataggagaatggtgaaaaactacgcaaattgtagcagatgtacttcagtccttttgctggtgttacagactgacttctgaaagtcctcctgtggtcytgacacgagggggtattacatggttcctgtcccaggcttttcctctctgcacaatcagggcctc

SEQ ID NO: 15737 - DNA, 600 bp, Chicken  19866894222521_4
tgagcactggatggcagagagagccatgttccagccacatacataccacttgartctggtctgcrattctacatgcatccgaaaataaaatcacttcttttctttcataaactttcttgtaaaaaaatcatgcagagtaatctgtacttcctaaatggagcactgtttagttcatttttagagggaaaaaaaaagagaactaaataggagaatggtgaaaaactacgcaaattgtagcagatgtacttcagtccttttgctggtgttacagactgacttctgaaagtcctcctgtggtcytgacacgagggggtattacatggttcctgtcccaggcttttcctctctgcacaatcagggcctcatttgttgtgtgttcttagacccagttattccttcagagtgctagcaatgtagacagggaagatgaggccaacacttaaagmttttgcaatgtgttgtaagtatgagggagatatcacagcactactagagtactagacgaagagctgactgacatctgatagaaaaatatagccactgaagaatttacacaactagccaattggccctagcagtgatcaactgttaaatgctttg

SEQ ID NO: 15738 - DNA, 600 bp, Chicken  19866894222521_5
cttcctaaatggagcactgtttagttcatttttagagggaaaaaaaaagagaactaaataggagaatggtgaaaaactacgcaaattgtagcagatgtacttcagtccttttgctggtgttacagactgacttctgaaagtcctcctgtggtcytgacacgagggggtattacatggttcctgtcccaggcttttcctctctgcacaatcagggcctcatttgttgtgtgttcttagacccagttattccttcagagtgctagcaatgtagacagggaagatgaggccaacacttaaagmttttgcaatgtgttgtaagtatgagggagatatcacagcactactagagtactagacgaagagctgactgacatctgatagaaaaatatagccactgaagaatttacacaactagccaattggccctagcagtgatcaactgttaaatgctttgcaacaaaagaaaaatataagaatttctccatgacaaagtaaaaatcttgatcagaacctcattgtctgaagacaatgagcagcctcaaaaaagctcaaagaacactgggtgctggtttggtgctgctggacatcagatctagacat

SEQ ID NO: 15739 - DNA, 599 bp, Chicken  19866894222527_1
  misc_feature (1)..(85): n is any nucleotide
nnnnnnnnnnnnnnnnnnnnnnnnnnnnnnnnnnnnnnnnnnnnnnnnnnnnnnnnnnnnnnnnnnnnnnnnnnnnnnnnnnnnncttgtggctcctgagatgccagctgcaaacaaggaaggagagtaacagctgttagaggctgtgtagtgccccagcagtcccagcagaggtggtcattaggcaatgagagagaggcactcacagggcataatgagtgtgatttattgcgtgcctctgcaattcatagtactccttttatagctttgggcaggtttacagataatgtcatgagaacrcwgtggcaatagggggtttcaggatttataaggcactataacccacgaaatacacagtgtctggtgataacagcttttctaacaaagagctctgagttaatgaaagagtggtagattttctggaataccattgtgttcatttaccaaacagatgtggcatttattatacccrtctccctacccagccatttgttatcactcctctgccaaaggttacttggaaaaggattgtgaaagcactccttagtgataaacagcagctggtgaggctgtaacatcctgaagcccctgcagctgtt

SEQ ID NO: 15740 - DNA, 599 bp, Chicken  19866894222527_2
  misc_feature (1)..(83): n is any nucleotide
nnnnnnnnnnnnnnnnnnnnnnnnnnnnnnnnnnnnnnnnnnnnnnnnnnnnnnnnnnnnnnnnnnnnnnnnnnnnnnnnnnncttgtggctcctgagatgccagctgcaaacaaggaaggagagtaacagctgttagaggctgtgtagtgccccagcagtcccagcagaggtggtcattaggcaatgagagagaggcactcacagggcataatgagtgtgatttattgcgtgcctctgcaattcatagtactccttttatagctttgggcaggtttacagataatgtcatgagaacrcwgtggcaatagggggtttcaggatttataaggcactataacccacgaaatacacagtgtctggtgataacagcttttctaacaaagagctctgagttaatgaaagagtggtagattttctggaataccattgtgttcatttaccaaacagatgtggcatttattatacccrtctccctacccagccatttgttatcactcctctgccaaaggttacttggaaaaggattgtgaaagcactccttagtgataaacagcagctggtgaggctgtaacatcctgaagcccctgcagctgttta

SEQ ID NO: 15741 - DNA, 600 bp, Chicken  19866894222527_3
ggtggtcattaggcaatgagagagaggcactcacagggcataatgagtgtgatttattgcgtgcctctgcaattcatagtactccttttatagctttgggcaggtttacagataatgtcatgagaacrcwgtggcaatagggggtttcaggatttataaggcactataacccacgaaatacacagtgtctggtgataacagcttttctaacaaagagctctgagttaatgaaagagtggtagattttctggaataccattgtgttcatttaccaaacagatgtggcatttattatacccrtctccctacccagccatttgttatcactcctctgccaaaggttacttggaaaaggattgtgaaagcactccttagtgataaacagcagctggtgaggctgtaacatcctgaagcccctgcagctgtttactgagtggatgctctctgagctcctaggcatcctcctcttcaggtactttggggcatcttacccagaatccatatataacctttattattcrttcctattcttatatctctacagcrtatagcgatttggggtattacataattaataagctacaccatgtggatgaatca

SEQ ID NO: 15742 - DNA, 600 bp, Chicken  19866894222527_4
gagttaatgaaagagtggtagattttctggaataccattgtgttcatttaccaaacagatgtggcatttattatacccrtctccctacccagccatttgttatcactcctctgccaaaggttacttggaaaaggattgtgaaagcactccttagtgataaacagcagctggtgaggctgtaacatcctgaagcccctgcagctgtttactgagtggatgctctctgagctcctaggcatcctcctcttcaggtactttggggcatcttacccagaatccatatataacctttattattcrttcctattcttatatctctacagcrtatagcgatttggggtattacataattaataagctacaccatgtggatgaatcagtgggaagtaaaactcggagggccttcctttatcttgctgccttcccttttatggatgccatggtgagtgcatgattcacagctgaattttaatatgaatgstgtttttttctttggtgcccttagtttgcaaagtctgttgtttgatgggaaaatgaaggtctgcaggaggaaggcatgtcctttgcaagcagtagcttgggatatacatgaacatgtca

SEQ ID NO: 15743 - DNA, 600 bp, Chicken  19866894222527_5
tctggaataccattgtgttcatttaccaaacagatgtggcatttattatacccrtctccctacccagccatttgttatcactcctctgccaaaggttacttggaaaaggattgtgaaagcactccttagtgataaacagcagctggtgaggctgtaacatcctgaagcccctgcagctgtttactgagtggatgctctctgagctcctaggcatcctcctcttcaggtactttggggcatcttacccagaatccatatataacctttattattcrttcctattcttatatctctacagcrtatagcgatttggggtattacataattaataagctacaccatgtggatgaatcagtgggaagtaaaactcggagggccttcctttatcttgctgccttcccttttatggatgccatggtgagtgcatgattcacagctgaattttaatatgaatgstgtttttttctttggtgcccttagtttgcaaagtctgttgtttgatgggaaaatgaaggtctgcaggaggaaggcatgtcctttgcaagcagtagcttgggatatacatgaacatgtcatcttctgctacctggaataagcatc

SEQ ID NO: 15744 - DNA, 600 bp, Chicken  19866894222527_6
acatcctgaagcccctgcagctgtttactgagtggatgctctctgagctcctaggcatcctcctcttcaggtactttggggcatcttacccagaatccatatataacctttattattcrttcctattcttatatctctacagcrtatagcgatttggggtattacataattaataagctacaccatgtggatgaatcagtgggaagtaaaactcggagggccttcctttatcttgctgccttcccttttatggatgccatggtgagtgcatgattcacagctgaattttaatatgaatgstgtttttttctttggtgcccttagtttgcaaagtctgttgtttgatgggaaaatgaaggtctgcaggaggaaggcatgtcctttgcaagcagtagcttgggatatacatgaacatgtcatcttctgctacctggaataagcatctgggtggaatttgagcatccagagatcatgacaaatatagaagtcgttagcttccttgtcagagttagtgtgcatgtatgctggaaagtgctgatcaatcatcttgtgatgggccacacagactgttcatacatattctttcaatgcaattagcag

SEQ ID NO: 15745 - DNA, 539 bp, Chicken  19866894222530_1
atatttgctaactgttacttttacagaaaattcccctcccaaaccgtgcatgtctgagcatgttgacagtacagcaaacgtgcatacgcattgccttgctgcctgcctataggaagatgaacagctgggttcctgagggctgtcagcctgtgtgttcttcttgggtgatgctgacggtcagatgtgagtcataaagccctacgctgctcctagggagtgagcccagctgtgtcccaccacctgcctacccctgggatcaggctgggacagagctgccctgatggtgctcagtgtatgcgygggccaagctcactgctacctcctcagcatactgatgaggagggtggtgtggtaccctgagagcgggcagtatttattatagagcagatagggtaacacatcacagggctaaaccgcagcaagggaggcagaaggtagctgtggggaagtcctgccccagctttgcagacagcactgcagctggagcagactgtgggaagaaaatgtggaatcaccatcagctttcaagaacagttcag

SEQ ID NO: 15746 - DNA, 600 bp, Chicken  19866894222533_1
ctcttatgcttcttcagccaagcaggtgctgaatctagtcggtgtgttccttgacaagataaaacaaaatagactgaaattacatatattcagaagaaagcactctcttgtcattgcctgatgggaatcttaccttcaatactcagtcttaggcctcatcaaatgaagtatattttctttgctatccctgttctggcatgttgggacattcaaactaagccaaggtctgcctagcaagaactgttatctggcattgcgcagtaccgaaggcaccatctgttttgcagagtatacctattycatgtcagtgctaaatggcacaatgtactacatcctcrtatctgatatccatgggccaaaattctggtaaaagtaaaaatgaaagacaccaaagaacaaattctcttttacagtgttgtggtttactactgatarctcagcaccacagctgctttctcatgctctttcttctgcaggataggagaacatacaacacaaaattccccctgccctcccacctggctaaaccttgccatataaactcagcrcagttattcactgaatccacaagtgactgtctacttatgaaggcagaaatct

SEQ ID NO: 15747 - DNA, 600 bp, Chicken  19866894222533_2
tcggtgtgttccttgacaagataaaacaaaatagactgaaattacatatattcagaagaaagcactctcttgtcattgcctgatgggaatcttaccttcaatactcagtcttaggcctcatcaaatgaagtatattttctttgctatccctgttctggcatgttgggacattcaaactaagccaaggtctgcctagcaagaactgttatctggcattgcgcagtaccgaaggcaccatctgttttgcagagtatacctattycatgtcagtgctaaatggcacaatgtactacatcctcrtatctgatatccatgggccaaaattctggtaaaagtaaaaatgaaagacaccaaagaacaaattctcttttacagtgttgtggtttactactgatarctcagcaccacagctgctttctcatgctctttcttctgcaggataggagaacatacaacacaaaattccccctgccctcccacctggctaaaccttgccatataaactcagcrcagttattcactgaatccacaagtgactgtctacttatgaaggcagaaatctggaacaagtagatgttgcaytgacaaatactgcaatam

SEQ ID NO: 15748 - DNA, 587 bp, Chicken  19866894222533_3
tcaatactcagtcttaggcctcatcaaatgaagtatattttctttgctatccctgttctggcatgttgggacattcaaactaagccaaggtctgcctagcaagaactgttatctggcattgcgcagtaccgaaggcaccatctgttttgcagagtatacctattycatgtcagtgctaaatggcacaatgtactacatcctcrtatctgatatccatgggccaaaattctggtaaaagtaaaaatgaaagacaccaaagaacaaattctcttttacagtgttgtggtttactactgatarctcagcaccacagctgctttctcatgctctttcttctgcaggataggagaacatacaacacaaaattccccctgccctcccacctggctaaaccttgccatataaactcagcrcagttattcactgaatccacaagtgactgtctacttatgaaggcagaaatctggaacaagtagatgttgcaytgacaaatactgcaatamctttttatgtcttgattcaaaactgaatactaatgtgaagatttccatttgttttttacttgtgtcacataggtagaaacatca

SEQ ID NO: 15749 - DNA, 474 bp, Chicken  19866894222533_4
tggcattgcgcagtaccgaaggcaccatctgttttgcagagtatacctattycatgtcagtgctaaatggcacaatgtactacatcctcrtatctgatatccatgggccaaaattctggtaaaagtaaaaatgaaagacaccaaagaacaaattctcttttacagtgttgtggtttactactgatarctcagcaccacagctgctttctcatgctctttcttctgcaggataggagaacatacaacacaaaattccccctgccctcccacctggctaaaccttgccatataaactcagcrcagttattcactgaatccacaagtgactgtctacttatgaaggcagaaatctggaacaagtagatgttgcaytgacaaatactgcaatamctttttatgtcttgattcaaaactgaatactaatgtgaagatttccatttgttttttacttgtgtcacataggtagaaacatca

SEQ ID NO: 15750 - DNA, 402 bp, Chicken  19866894222533_5
caatgtactacatcctcrtatctgatatccatgggccaaaattctggtaaaagtaaaaatgaaagacaccaaagaacaaattctcttttacagtgttgtggtttactactgatarctcagcaccacagctgctttctcatgctctttcttctgcaggataggagaacatacaacacaaaattccccctgccctcccacctggctaaaccttgccatataaactcagcrcagttattcactgaatccacaagtgactgtctacttatgaaggcagaaatctggaacaagtagatgttgcaytgacaaatactgcaatamctttttatgtcttgattcaaaactgaatactaatgtgaagatttccatttgttttttacttgtgtcacataggtagaaacatca

SEQ ID NO: 15751 - DNA, 384 bp, Chicken  19866894222533_6
tatctgatatccatgggccaaaattctggtaaaagtaaaaatgaaagacaccaaagaacaaattctcttttacagtgttgtggtttactactgatarctcagcaccacagctgctttctcatgctctttcttctgcaggataggagaacatacaacacaaaattccccctgccctcccacctggctaaaccttgccatataaactcagcrcagttattcactgaatccacaagtgactgtctacttatgaaggcagaaatctggaacaagtagatgttgcaytgacaaatactgcaatamctttttatgtcttgattcaaaactgaatactaatgtgaagatttccatttgttttttacttgtgtcacataggtagaaacatca

SEQ ID NO: 15752 - DNA, 600 bp, Chicken  19866894222534_1
ccaccccatcaccgttgttgtcaacaacaccaaccccagcaccctcctcacccacatctgcgacgtgctggccagccacaagatccacggcatcgtcttcgaggacaacgtcggcacggaggcggtggcccagatccttgacttcgtctcctcccagacccaggtccccatcgtcagcatcagcgggggctctgcggtggtcctcagccccaaggtgaggctttggctgccggttatttgaggtctgggattggcacctggcggtcattggccagggcagtaggactttccttgggtgtycagggaggatttggtcacctcctgcygtattggctcctggcgatcccagtgctggccgtatggatggcagcaccaccacctcctgcwcaaagagagcggaggcaaacatcgagatggcttccccaaatgcttggggaggtgggctcttaaccctaatgccaagctgctgcgtggcagcaggtgtggtagccttgactggagccaccagctgtcctgcagctgcccccaaggggtatccatggggtggcacaggggcagcccccgctgcccagacccctctaggagcgtcaggaaaaaaac

SEQ ID NO: 15753 - DNA, 600 bp, Chicken  19866894222534_2
acaccaaccccagcaccctcctcacccacatctgcgacgtgctggccagccacaagatccacggcatcgtcttcgaggacaacgtcggcacggaggcggtggcccagatccttgacttcgtctcctcccagacccaggtccccatcgtcagcatcagcgggggctctgcggtggtcctcagccccaaggtgaggctttggctgccggttatttgaggtctgggattggcacctggcggtcattggccagggcagtaggactttccttgggtgtycagggaggatttggtcacctcctgcygtattggctcctggcgatcccagtgctggccgtatggatggcagcaccaccacctcctgcwcaaagagagcggaggcaaacatcgagatggcttccccaaatgcttggggaggtgggctcttaaccctaatgccaagctgctgcgtggcagcaggtgtggtagccttgactggagccaccagctgtcctgcagctgcccccaaggggtatccatggggtggcacaggggcagcccccgctgcccagacccctctaggagcgtcaggaaaaaaacccaaaggcagaggcggtctgcgtggc

SEQ ID NO: 15754 - DNA, 563 bp, Chicken  19866894222534_3
cggcatcgtcttcgaggacaacgtcggcacggaggcggtggcccagatccttgacttcgtctcctcccagacccaggtccccatcgtcagcatcagcgggggctctgcggtggtcctcagccccaaggtgaggctttggctgccggttatttgaggtctgggattggcacctggcggtcattggccagggcagtaggactttccttgggtgtycagggaggatttggtcacctcctgcygtattggctcctggcgatcccagtgctggccgtatggatggcagcaccaccacctcctgcwcaaagagagcggaggcaaacatcgagatggcttccccaaatgcttggggaggtgggctcttaaccctaatgccaagctgctgcgtggcagcaggtgtggtagccttgactggagccaccagctgtcctgcagctgcccccaaggggtatccatggggtggcacaggggcagcccccgctgcccagacccctctaggagcgtcaggaaaaaaacccaaaggcagaggcggtctgcgtggcgagggactgctgcctgcttgcgac

SEQ ID NO: 15755 - DNA, 599 bp, Chicken  19866894222535_1
  misc_feature (1)..(115): n is any nucleotide
nnnnnnnnnnnnnnnnnnnnnnnnnnnnnnnnnnnnnnnnnnnnnnnnnnnnnnnnnnnnnnnnnnnnnnnnnnnnnnnnnnnnnnnnnnnnnnnnnnnnnnnnnnnnnnnnnnntcagaacaccagatcataattaaaaatcaggtaattagaatatacttgctcagattatgcttattcatcactatcatacaaatcctctggatctttgcaagtattcaaccctctagcttaaaagaaaagccattttttgacagcttcagttaaggaaatcataaaattgtttataacttgttccmtttacaatatttattcagttgggagtctaatgcctattcacatagttcataatggtttactactgcagttcaataaacatagaaattatacaagagaggtcagaataaatctctagatataccttatgaacagtatttcagtacartagacatgaaggacttgaatcactaaggatgccatcatagtttcacaagaaggagcttgagataagtaggagcacaagcagtactcaaggaaacatgttgctcccgatactaggcaaactttatcagtgtatgtgagtacatgcaaggccaga

SEQ ID NO: 15756 - DNA, 600 bp, Chicken  19866894222535_2
taattagaatatacttgctcagattatgcttattcatcactatcatacaaatcctctggatctttgcaagtattcaaccctctagcttaaaagaaaagccattttttgacagcttcagttaaggaaatcataaaattgtttataacttgttccmtttacaatatttattcagttgggagtctaatgcctattcacatagttcataatggtttactactgcagttcaataaacatagaaattatacaagagaggtcagaataaatctctagatataccttatgaacagtatttcagtacartagacatgaaggacttgaatcactaaggatgccatcatagtttcacaagaaggagcttgagataagtaggagcacaagcagtactcaaggaaacatgttgctcccgatactaggcaaactttatcagtgtatgtgagtacatgcaaggccagaatcatgctaatcctcttccagatataactttgagtaaagaaaaggcactcagaactacaaccagatcaggagtttggaacgtagaggggatagctataaagcgatgcatctgcacttaagcgcatttaaatacaggtttacagaggt

SEQ ID NO: 15757 - DNA, 600 bp, Chicken  19866894222539_1
ttgccagagatctgaactatgaaaagaatggtgaacaaatagtcagctcctgcagtatgttggaaaaaatatattgtctctcttgtctgtacgttagactcctggccacctggctttattcttactgccatgcccattctgcctgtacactgtgcttacttctctagcactaatcctggcaggtcctccttgaaatgtgggaaatgtgactataaataatattgaaagcagtattcaataggggtctcttttcaccatatgctgcactgtaggtacgacaattcctgcctacaagctgtrttttttccatggaaaaactgctgatgttatggtaactacatgaaaggatcccctgcattagtgcactcaggttctttctacatattactttaaaatatgacttctttcattttgatacagcactgtggctatttatttatttatatttctcaacaaaaggaaacagaaaggaagcagccatactgtacagcaacccagcttggagcaaataatagaagacattacttacaagtagagaacttcagcagtcctgaaaatgagttgaggcttatgagaaatagttagctgaatagcttgatg

SEQ ID NO: 15758 - DNA, 600 bp, Chicken  19866894222553_1
gctcctttgatgtaagcagttggaaggaagatgaatagcagctgaggggttgtttaactcctttacacgaaacagtcactgccccgcatcagtatttcccagggaagccctgtgattgttctagagatcagaactttaaaaagaacagagagagttgactgactgtcagaccttgcagtgcactgatctcattccaggagctacacacctgaatgcgcttaggaagatgagatatattgatcctgcattgcctcaacgtcccactctggtaactgctcagtatttagcagagggcttacrtttttcacacctccaccagctgaatgggaatgagagggtttcttttttatttcaagcagcttaaaatgtcatgttctgaatttccattagagaatggtacgccaccatctcacgcttatttctaacgtgtggaatattcaccagcggaaatcagaatggatttrtctcccagctccaagtagtaatctttgcaactaaacattaaattttgaagagtttttgttcctttaactcaaaattgcattgggcttcactctgttaccagactgctgcagcaacaggaagccctggtattcaagg

SEQ ID NO: 15759 - DNA, 600 bp, Chicken  19866894222553_2
gtcagaccttgcagtgcactgatctcattccaggagctacacacctgaatgcgcttaggaagatgagatatattgatcctgcattgcctcaacgtcccactctggtaactgctcagtatttagcagagggcttacrtttttcacacctccaccagctgaatgggaatgagagggtttcttttttatttcaagcagcttaaaatgtcatgttctgaatttccattagagaatggtacgccaccatctcacgcttatttctaacgtgtggaatattcaccagcggaaatcagaatggatttrtctcccagctccaagtagtaatctttgcaactaaacattaaattttgaagagtttttgttcctttaactcaaaattgcattgggcttcactctgttaccagactgctgcagcaacaggaagccctggtattcaagggactctgaggcaaggtttgctggcagaggtgacagccttgatttcaacaattcagcatgaggtaaatcgaaacacaaacagcaaagcctcttgctaagatcaaggaagccttgctatcttgctatctgataagcactcaacctcctgtgcaatgcttgggtttg

SEQ ID NO: 15760 - DNA, 600 bp, Chicken  19866894222554_1
tatctcctctcacctgggcagttaacatagatagcttgttacatggagagttgtataccatatgcatatatatgcttctgttttcccaaggtgttgaaagtgaggaaaataaagtgagaaaaacaaggaactctacctcagctttctggaggaagacgttatcttctttcttacagatttctgtatgggaacagaggaagcttggatgccatgagaggactgacatattggcaaacttggcttcacagattctctcagcccacttctttcctgcggttgcaggaaagcctcagtgggatstgggcatgcagggctgctttcagcagcagctgctgcaagaggtgctggggcagagcctggctagggtttgcaaacccagcacacagctgtgataccacagacctaacaatgagctaaactgctctaacagaaacactcagagtttctagtcgtgtgagcttttgttaatgactagtgtgctttaggttttaatctgtcagaaaaagcttggaacagtttaaatcttacctacctacacttttcttaatctcctgctttataatcacaaaagaaggtcatctttagttgggagtttttgca

SEQ ID NO: 15761 - DNA, 491 bp, Chicken  19866894222556_1
tcctaggatgtgagcaagagcctagccagtaggctaaaggaagtggttattctgttagtaatgatgataacacatctaaaatactatgtccagtctggggctccccagtacaagggtgatatagacatactgaattgagttttacatagacatacatgattgccaggaagacagagcaaagaaaggccaagtaaacagaaatgttcaattttagaatgatttttttcctgaagtcttcaaagatcaaactgagtggtataagaggagacgaagccacctttctcattaaagtgcctaacrataggacaggaagcagtgaacacagtaaagaaaattttgtttaaatactagggaaaagctgacagtgaaaagcagtcaaactgcagaactaattgtgcaaagaagttgcagaagttgtagatatttaaaatttaactggaaacctgactgaaactggttctgatttgagtagaaaatgggacgagaaagtt

SEQ ID NO: 15762 - DNA, 600 bp, Chicken  19866894222557_1
ttgctgttaaggttctgtgttggttctgctgtggagtttttcttttttttcttttttctttttcttttttttcatttttttttctgttttttacattcttagaacctgtgttaacaaagacagccttatttttaaaaaaatactctgcatttcagcacaaagtgccttttttctttttttttttaaattagaacttggagggtaatactggaaaaaatttaaaaatcaaaaccggtgcttccataaaagtattgcatgccaggaccattttgtagttcaaactgcttcctacatagaaayggcagatggtgaaataggaagcggtgaaattgtccagatttacaggcttcggctgtaggttggatttacggccacacccagacttctccaagcttatctgtaatctcacactaccatactgcaggatagactttaaaaaggagcaagtgatgaaagtgtgactgggggggagggagagagagagggrgraaaatagccatgaccaacaaatgcctgaaaayggtgtttcaaaaaaatttgcattcagaatcgtatcacgacctggattgaagttcttttcttttgcttagctttgggttt

SEQ ID NO: 15763 - DNA, 600 bp, Chicken  19866894222557_10
gaccagatggaactgctgaatggagtggtggaccacaggccgctcgggttgccaaggatcgactgtggtaaagacagagccrcatgagtagctgccaggtaacctctgctgtcagctttttctttattactgctaytattacagtccctttgaaagtgaagtatctagaaaaaagcaagccwgctgtagaagcccttccacctccactgcgacacacagttttgaactacctttactagaccttgcccagaggaatcaggctaacgatcaccaaatgtgtctgggaactgaatgggctgmagagtgcaattacattacaggcttttaagctgttttcatttgggcttatacatccccatgctattagtgatttaaacagtactggtattcaagggtcaaaaagcatcagccacattaaactagtctgagcaagatagataaataaagacagaattcaagttgtaatggaaagtagcagtgatatttgatccttttttgacaggctgcaaacctatctccttgtattcacacttatctgctaaaaaaaaaaaaaatcacacagtttggatgaaccttcatgtgttcaagcccagagtatct

SEQ ID NO: 15764 - DNA, 600 bp, Chicken  19866894222557_2
ttagaacttggagggtaatactggaaaaaatttaaaaatcaaaaccggtgcttccataaaagtattgcatgccaggaccattttgtagttcaaactgcttcctacatagaaayggcagatggtgaaataggaagcggtgaaattgtccagatttacaggcttcggctgtaggttggatttacggccacacccagacttctccaagcttatctgtaatctcacactaccatactgcaggatagactttaaaaaggagcaagtgatgaaagtgtgactgggggggagggagagagagagggrgraaaatagccatgaccaacaaatgcctgaaaayggtgtttcaaaaaaatttgcattcagaatcgtatcacgacctggattgaagttcttttcttttgcttagctttgggtttcagttttcgtgaggatagtgtgaattagaccacggatctgaacttcttcttccaattgttgggctccaaattctccaaggattgtaggtctgtcccatgtcttcagcrggattggcaacagcggcagcggcggatggaggaggcggyggcgaggagttttcattacccatgagatcaatacccgaca

SEQ ID NO: 15765 - DNA, 600 bp, Chicken  19866894222557_3
agaacttggagggtaatactggaaaaaatttaaaaatcaaaaccggtgcttccataaaagtattgcatgccaggaccattttgtagttcaaactgcttcctacatagaaayggcagatggtgaaataggaagcggtgaaattgtccagatttacaggcttcggctgtaggttggatttacggccacacccagacttctccaagcttatctgtaatctcacactaccatactgcaggatagactttaaaaaggagcaagtgatgaaagtgtgactgggggggagggagagagagagggrgraaaatagccatgaccaacaaatgcctgaaaayggtgtttcaaaaaaatttgcattcagaatcgtatcacgacctggattgaagttcttttcttttgcttagctttgggtttcagttttcgtgaggatagtgtgaattagaccacggatctgaacttcttcttccaattgttgggctccaaattctccaaggattgtaggtctgtcccatgtcttcagcrggattggcaacagcggcagcggcggatggaggaggcggyggcgaggagttttcattacccatgagatcaatacccgacaag

SEQ ID NO: 15766 - DNA, 600 bp, Chicken  19866894222557_4
aaaatcaaaaccggtgcttccataaaagtattgcatgccaggaccattttgtagttcaaactgcttcctacatagaaayggcagatggtgaaataggaagcggtgaaattgtccagatttacaggcttcggctgtaggttggatttacggccacacccagacttctccaagcttatctgtaatctcacactaccatactgcaggatagactttaaaaaggagcaagtgatgaaagtgtgactgggggggagggagagagagagggrgraaaatagccatgaccaacaaatgcctgaaaayggtgtttcaaaaaaatttgcattcagaatcgtatcacgacctggattgaagttcttttcttttgcttagctttgggtttcagttttcgtgaggatagtgtgaattagaccacggatctgaacttcttcttccaattgttgggctccaaattctccaaggattgtaggtctgtcccatgtcttcagcrggattggcaacagcggcagcggcggatggaggaggcggyggcgaggagttttcattacccatgagatcaatacccgacaaggcatttgttggagtggtgaagggaaggccact

SEQ ID NO: 15767 - DNA, 600 bp, Chicken  19866894222557_5
cactaccatactgcaggatagactttaaaaaggagcaagtgatgaaagtgtgactgggggggagggagagagagagggrgraaaatagccatgaccaacaaatgcctgaaaayggtgtttcaaaaaaatttgcattcagaatcgtatcacgacctggattgaagttcttttcttttgcttagctttgggtttcagttttcgtgaggatagtgtgaattagaccacggatctgaacttcttcttccaattgttgggctccaaattctccaaggattgtaggtctgtcccatgtcttcagcrggattggcaacagcggcagcggcggatggaggaggcggyggcgaggagttttcattacccatgagatcaatacccgacaaggcatttgttggagtggtgaagggaaggccactgttgagattacttgaccagatggaactgctgaatggagtggtggaccacaggccgctcgggttgccaaggatcgactgtggtaaagacagagccrcatgagtagctgccaggtaacctctgctgtcagctttttctttattactgctaytattacagtccctttgaaagtgaagtatctagaaaaaa

SEQ ID NO: 15768 - DNA, 600 bp, Chicken  19866894222557_6
tgatgaaagtgtgactgggggggagggagagagagagggrgraaaatagccatgaccaacaaatgcctgaaaayggtgtttcaaaaaaatttgcattcagaatcgtatcacgacctggattgaagttcttttcttttgcttagctttgggtttcagttttcgtgaggatagtgtgaattagaccacggatctgaacttcttcttccaattgttgggctccaaattctccaaggattgtaggtctgtcccatgtcttcagcrggattggcaacagcggcagcggcggatggaggaggcggyggcgaggagttttcattacccatgagatcaatacccgacaaggcatttgttggagtggtgaagggaaggccactgttgagattacttgaccagatggaactgctgaatggagtggtggaccacaggccgctcgggttgccaaggatcgactgtggtaaagacagagccrcatgagtagctgccaggtaacctctgctgtcagctttttctttattactgctaytattacagtccctttgaaagtgaagtatctagaaaaaagcaagccwgctgtagaagcccttccacctccactgcgac

SEQ ID NO: 15769 - DNA, 600 bp, Chicken  19866894222557_7
agtgtgaattagaccacggatctgaacttcttcttccaattgttgggctccaaattctccaaggattgtaggtctgtcccatgtcttcagcrggattggcaacagcggcagcggcggatggaggaggcggyggcgaggagttttcattacccatgagatcaatacccgacaaggcatttgttggagtggtgaagggaaggccactgttgagattacttgaccagatggaactgctgaatggagtggtggaccacaggccgctcgggttgccaaggatcgactgtggtaaagacagagccrcatgagtagctgccaggtaacctctgctgtcagctttttctttattactgctaytattacagtccctttgaaagtgaagtatctagaaaaaagcaagccwgctgtagaagcccttccacctccactgcgacacacagttttgaactacctttactagaccttgcccagaggaatcaggctaacgatcaccaaatgtgtctgggaactgaatgggctgmagagtgcaattacattacaggcttttaagctgttttcatttgggcttatacatccccatgctattagtgatttaaacagtac

SEQ ID NO: 15770 - DNA, 600 bp, Chicken  19866894222557_8
ttctccaaggattgtaggtctgtcccatgtcttcagcrggattggcaacagcggcagcggcggatggaggaggcggyggcgaggagttttcattacccatgagatcaatacccgacaaggcatttgttggagtggtgaagggaaggccactgttgagattacttgaccagatggaactgctgaatggagtggtggaccacaggccgctcgggttgccaaggatcgactgtggtaaagacagagccrcatgagtagctgccaggtaacctctgctgtcagctttttctttattactgctaytattacagtccctttgaaagtgaagtatctagaaaaaagcaagccwgctgtagaagcccttccacctccactgcgacacacagttttgaactacctttactagaccttgcccagaggaatcaggctaacgatcaccaaatgtgtctgggaactgaatgggctgmagagtgcaattacattacaggcttttaagctgttttcatttgggcttatacatccccatgctattagtgatttaaacagtactggtattcaagggtcaaaaagcatcagccacattaaactagtctgagcaagata

SEQ ID NO: 15771 - DNA, 600 bp, Chicken  19866894222557_9
aacagcggcagcggcggatggaggaggcggyggcgaggagttttcattacccatgagatcaatacccgacaaggcatttgttggagtggtgaagggaaggccactgttgagattacttgaccagatggaactgctgaatggagtggtggaccacaggccgctcgggttgccaaggatcgactgtggtaaagacagagccrcatgagtagctgccaggtaacctctgctgtcagctttttctttattactgctaytattacagtccctttgaaagtgaagtatctagaaaaaagcaagccwgctgtagaagcccttccacctccactgcgacacacagttttgaactacctttactagaccttgcccagaggaatcaggctaacgatcaccaaatgtgtctgggaactgaatgggctgmagagtgcaattacattacaggcttttaagctgttttcatttgggcttatacatccccatgctattagtgatttaaacagtactggtattcaagggtcaaaaagcatcagccacattaaactagtctgagcaagatagataaataaagacagaattcaagttgtaatggaaagtagcagtgat

SEQ ID NO: 15772 - DNA, 434 bp, Chicken  19866894222561_1
aatcccacactgttcaaggtgatgtaccaacaaccttagcaggtagaaacataggctcacatcctagccaagagctttgataataaggaaatagtagtggtgtcctctgggttgtctcattcttatgatttaaagaaagctgtaaaaatggagctctaattgcttactagcatcactttgcttactgctgtgctttctaagcaggaatagatatcaaggactgctttgattcagccacaacctcatcttacccaggctgggggagcagcgcctgtaagtgctgcagcaggatacagctgyggcaaacctttctccagccactgggagctgtgatgtggctacaattgcatcacaccctgagtacagggtgtatgtgcaaccagaccccaagagaatgaatagaagctaaaattagataatctgagctggggaca

SEQ ID NO: 15773 - DNA, 600 bp, Chicken  19866894222565_1
tgcacgccctgtactgctgctacgtgaaggacaactctagtaacatcatcacttgtttaccaagagaataattccactattgaccagcacctgcccatgacactgtgaccacaggaggagcagggggacgttcacatgacactggccattcaaaccaggcagcggaacgcctggcactggccggagccactgagcagctgctgtggagtggcctatcagctcaaacagaaaagctttcactgatattaatgagggctgctgaaaataacgccatcacacagctatgagatggcacacagmcttgctgcatgaggaccagcaggccaaatagagcaggcactgaggaggaggaaccccaagctccatctggttggtttggtttttatttaaactcccatgaagtcaaataacatgagctgatgtggaggagtgggccaggcaacacttacctgagtagcaagaacacactcctgctcctccaaaacattctgctcacaggagtaatgcttcagaggatcccaaacagatcagtgtgacagtactgaggtgtacgtacagaacgtacctccagcttcctcacctctgtaggtctggtctgag

SEQ ID NO: 15774 - DNA, 565 bp, Chicken  19866894222565_2
tttctgacagtgtggagcagaggcagagcattcagctcctccatggacctggagtccttcccaagcatgtgccaggattaactgcccagaagaagcaccgagtcctgctaaataactgtctgctctaattcctgcttccctcataaatacacactttgccaagggttcctttcaagggaaggagagttcttgaaagtaagcagacaaacagcaaagtattaaactcaggagcaaggcatgagcagcttccttctgtgtgctccagctaagggagctggagcactgctccaggcacagcayaggagccatcaacgcagggatgcacatgcagcctctgggagagaagagatgctctcagacacatcccccccccctcactgctgtgcacacacacttgcttatctcagtactgtgccatcacagcagcaggacttcgctacaagccattccccaggaaccagggcaaataccagcaacctgaggctccaatgctccttccattgctgcctgaccagctcttctgagcagctcagactctatagcatcctaagggccataaacatct

SEQ ID NO: 15775 - DNA, 600 bp, Chicken  19866894222578_1
caaagcatcattgctttcttacattttgttctttgttcctttctcctatttttttttctttccctccagactgttcacaagctgttacgcattgctccctctgcttccaggtgggtatgtaaatatccccctgcctggagttgcactgctccaaccgtggtttcacagcagacctcagagaaggagggccttcctcctctgggcgcaggagaatcaactcatgctgcagacccacttgttttcccagtgctgtgcgtgtgctgggggattttctctgggcgctttggaggaggagggctrtgcrctgtgctggtggcagcgcctgctcacgttggcttctttctctggaggtctgagcctcaacagggccacgtgcagacacagcaggtgtaccgctgtgccccgtgcatgctgtgtgccagcggtgtggrcctggccacagagagcatcccagtgcctcacacgctgctgcccatccacagcacggttcctcggccagcagcagtgactgtctgaagagctttctccttggctgccatgttctgatcagcctcttccctgcttcctcttcctggaggtttgcacgggatcccggcattt

SEQ ID NO: 15776 - DNA, 600 bp, Chicken  19866894222578_2
gcatcattgctttcttacattttgttctttgttcctttctcctatttttttttctttccctccagactgttcacaagctgttacgcattgctccctctgcttccaggtgggtatgtaaatatccccctgcctggagttgcactgctccaaccgtggtttcacagcagacctcagagaaggagggccttcctcctctgggcgcaggagaatcaactcatgctgcagacccacttgttttcccagtgctgtgcgtgtgctgggggattttctctgggcgctttggaggaggagggctrtgcrctgtgctggtggcagcgcctgctcacgttggcttctttctctggaggtctgagcctcaacagggccacgtgcagacacagcaggtgtaccgctgtgccccgtgcatgctgtgtgccagcggtgtggrcctggccacagagagcatcccagtgcctcacacgctgctgcccatccacagcacggttcctcggccagcagcagtgactgtctgaagagctttctccttggctgccatgttctgatcagcctcttccctgcttcctcttcctggaggtttgcacgggatcccggcatttcacc

SEQ ID NO: 15777 - DNA, 600 bp, Chicken  19866894222578_3
tgcctggagttgcactgctccaaccgtggtttcacagcagacctcagagaaggagggccttcctcctctgggcgcaggagaatcaactcatgctgcagacccacttgttttcccagtgctgtgcgtgtgctgggggattttctctgggcgctttggaggaggagggctrtgcrctgtgctggtggcagcgcctgctcacgttggcttctttctctggaggtctgagcctcaacagggccacgtgcagacacagcaggtgtaccgctgtgccccgtgcatgctgtgtgccagcggtgtggrcctggccacagagagcatcccagtgcctcacacgctgctgcccatccacagcacggttcctcggccagcagcagtgactgtctgaagagctttctccttggctgccatgttctgatcagcctcttccctgcttcctcttcctggaggtttgcacgggatcccggcatttcaccgggtgggtttgctgccagcacagccctgcatgaaaagcgcccttcatggcaggcctgctgtgcttccacctgaaactgcagatgtttaagcaacagagacaaattctgaaggtgcccagggaagtgt

SEQ ID NO: 15778 - DNA, 599 bp, Chicken  19866894222580_1
  misc_feature (1)..(6): n is any nucleotide
nnnnnngtgcactattaaaggtcaggggttatcagcaccagtgtcccagtacacaagagaggataaacctaaaactgtatttctattcctcgtgacacttctaccatacagaggttttacttttactttgggttataaaaatttaaacaaaattgtgtacaaatacttgcactttcacacttgctacaagacagtggacataagaattcaaaaagcaagaacaaaaggagaagagaaactaagaacaactgaaggcagaagttcattatttgttttctacatgtttgagaaaagcttccraaaaaaaaagggaaagaacacaagatagaagacaataatatatctaagagaaagtaatggaaattcagcaaatagaagtgtttagaaagaggcaattccaagttgtcaatttacttcccatacatccgttctaccagctagcaactgtgaaacaggaagggaacagacttcaggaaccaacttcagctttagaaggggaatgccacagctgtcacataacccaagaaattctaaggctgtgctacaagaactgaaatagaaggtttgtgtgtaattgcttaggaataggggtttttttt

SEQ ID NO: 15779 - DNA, 599 bp, Chicken  19866894222580_2
  misc_feature (1)..(5): n is any nucleotide
nnnnngtgcactattaaaggtcaggggttatcagcaccagtgtcccagtacacaagagaggataaacctaaaactgtatttctattcctcgtgacacttctaccatacagaggttttacttttactttgggttataaaaatttaaacaaaattgtgtacaaatacttgcactttcacacttgctacaagacagtggacataagaattcaaaaagcaagaacaaaaggagaagagaaactaagaacaactgaaggcagaagttcattatttgttttctacatgtttgagaaaagcttccaraaaaaaaagggaaagaacacaagatagaagacaataatatatctaagagaaagtaatggaaattcagcaaatagaagtgtttagaaagaggcaattccaagttgtcaatttacttcccatacatccgttctaccagctagcaactgtgaaacaggaagggaacagacttcaggaaccaacttcagctttagaaggggaatgccacagctgtcacataacccaagaaattctaaggctgtgctacaagaactgaaatagaaggtttgtgtgtaattgcttaggaataggggtttttttta

SEQ ID NO: 15780 - DNA, 600 bp, Chicken  19866894222582_1
ctctcactacaagaaagaagccctgaagtgcatccagaggagggcaacgaagctgatgaggagtctgtagcacaagccttacgaggagcagcctggggaactgagattgtccggtctggagaaggagagactcaagagagaccttattgccctctacaactcctcgaaaggagatgtgtgtgatgtgtgggggtgtgatgaggagggggtcagccttttctcccagataacagtgataggatgagagggaatggcctcaagttgcaccaggggaggttcaagtcggatatcagagaaacwtcttctcagagagagtggtgaggcacaggaatgggctgcccagggaggtggcggagtcgctgttcctggagatgttcaagaaatgtatggatgtggcactgagggacgtggttagtgggcacggtgctggtgatgggttgatggttgggctagatgatcttagaggtcctttccaaccttaatgattctatgactctatgatgagtcccactaggttcagcacgctcctgttggctgcagattgtcaccactacaggaaacctactgggacacgcataccggaccctgggcaaagctgcc

SEQ ID NO: 15781 - DNA, 600 bp, Chicken  19866894222584_1
atagttttctgccatcaagggaagggcttagaagtttattttcttgctgagtgattggagttaggcaaaacccatccccaaaggtttcattgctggtgatgcagctgtagggattgccaaatgcatactcaacaggagacttgttttctaaaaatagtgattagatcgttaactctgtctctctcttgatccaaattaagtctgtggacagatttggagctggtgtgaagggagaggtgctgctgaacttaatgctttccaccagctctgtgctcccatctgctgagccaggctgggggragagctgcagtgaccggtgtgttggcatctctagttctctgtctttaaatacggtgtggcttcagcaaaagcactgcttcatgcagaaaaggggttttatcttctgtcgctgtttgcagatgagatttgctccagtttaattggagctggttgaaaatgagattgtagctgattgtgttgactctgcaatgaagggagatagaggggggaggtcaagccagcagctcatcccggctctttcagacacatccctctggctagggtgagctaagctcactgggtttcgcttcactgtgggtg

SEQ ID NO: 15782 - DNA, 600 bp, Chicken  19866894222585_1
cactcaagtatgtgaagcatacctcaagctgtgaggtatatttatggatctatgtttttaaaagaatacatgcctatggcatgtagcgatatataagatttcagccactctgtagttccttgtataagtgcccagtttgtattgctgtgcgtacattatggttaatattaaatgatttcaccttcagtaggtactcagtttagatgtggtgggagacctgctcactgggaggagcttttgtgctacaaaaatacatcatgtatttctgtcctgttcctgttggaaatccagaaccagaawttscctgtaagtactcactgcgatggctgaaacgtacacaacacagctcaygtatgcttaaacagtgctgtcatcttcatttcttcaaagatttcagatttcttgatttctaaacttccccttagtcatgtcttagtcaaaattgacacatgacttcgggacacgtctagccaggaaggagcactgataatgatccatatccaaacaacagaaggttgagtttgtacttgttcctagtgtgtacgtccaatagsaacctggatgtatggtgatatttcacaaygacatgttaatatgcat

SEQ ID NO: 15783 - DNA, 600 bp, Chicken  19866894222585_2
tcaagtatgtgaagcatacctcaagctgtgaggtatatttatggatctatgtttttaaaagaatacatgcctatggcatgtagcgatatataagatttcagccactctgtagttccttgtataagtgcccagtttgtattgctgtgcgtacattatggttaatattaaatgatttcaccttcagtaggtactcagtttagatgtggtgggagacctgctcactgggaggagcttttgtgctacaaaaatacatcatgtatttctgtcctgttcctgttggaaatccagaaccagaawttscctgtaagtactcactgcgatggctgaaacgtacacaacacagctcaygtatgcttaaacagtgctgtcatcttcatttcttcaaagatttcagatttcttgatttctaaacttccccttagtcatgtcttagtcaaaattgacacatgacttcgggacacgtctagccaggaaggagcactgataatgatccatatccaaacaacagaaggttgagtttgtacttgttcctagtgtgtacgtccaatagsaacctggatgtatggtgatatttcacaaygacatgttaatatgcattgt

SEQ ID NO: 15784 - DNA, 600 bp, Chicken  19866894222585_3
atgtttttaaaagaatacatgcctatggcatgtagcgatatataagatttcagccactctgtagttccttgtataagtgcccagtttgtattgctgtgcgtacattatggttaatattaaatgatttcaccttcagtaggtactcagtttagatgtggtgggagacctgctcactgggaggagcttttgtgctacaaaaatacatcatgtatttctgtcctgttcctgttggaaatccagaaccagaawttscctgtaagtactcactgcgatggctgaaacgtacacaacacagctcaygtatgcttaaacagtgctgtcatcttcatttcttcaaagatttcagatttcttgatttctaaacttccccttagtcatgtcttagtcaaaattgacacatgacttcgggacacgtctagccaggaaggagcactgataatgatccatatccaaacaacagaaggttgagtttgtacttgttcctagtgtgtacgtccaatagsaacctggatgtatggtgatatttcacaaygacatgttaatatgcattgtgtaccacattcagaaaactatctggcatactaatcagtacacagacta

SEQ ID NO: 15785 - DNA, 532 bp, Chicken  19866894222585_4
atcatgtatttctgtcctgttcctgttggaaatccagaaccagaawttscctgtaagtactcactgcgatggctgaaacgtacacaacacagctcaygtatgcttaaacagtgctgtcatcttcatttcttcaaagatttcagatttcttgatttctaaacttccccttagtcatgtcttagtcaaaattgacacatgacttcgggacacgtctagccaggaaggagcactgataatgatccatatccaaacaacagaaggttgagtttgtacttgttcctagtgtgtacgtccaatagsaacctggatgtatggtgatatttcacaaygacatgttaatatgcattgtgtaccacattcagaaaactatctggcatactaatcagtacacagactagtttaaaattaacatcctaggagaagccttccagtgtgttcagacagtgagtcagcttccaaaaccagaacagaagcagctaatacaaatgaaatgctaattcttacccagatggtgaagcaacaccctctgtgt

SEQ ID NO: 15786 - DNA, 503 bp, Chicken  19866894222585_5
aaatccagaaccagaawttscctgtaagtactcactgcgatggctgaaacgtacacaacacagctcaygtatgcttaaacagtgctgtcatcttcatttcttcaaagatttcagatttcttgatttctaaacttccccttagtcatgtcttagtcaaaattgacacatgacttcgggacacgtctagccaggaaggagcactgataatgatccatatccaaacaacagaaggttgagtttgtacttgttcctagtgtgtacgtccaatagsaacctggatgtatggtgatatttcacaaygacatgttaatatgcattgtgtaccacattcagaaaactatctggcatactaatcagtacacagactagtttaaaattaacatcctaggagaagccttccagtgtgttcagacagtgagtcagcttccaaaaccagaacagaagcagctaatacaaatgaaatgctaattcttacccagatggtgaagcaacaccctctgtgt

SEQ ID NO: 15787 - DNA, 600 bp, Chicken  19866894222586_1
cagttactaacatgcactttgtgttgttatccagccataggaaaccaggaatcatcctgaagctattcttatttcttgtagttttatctgtgtaacaggctgaagttttaaatagtgacattatgcatctgagcacatttcattttgaaattgtaggttaccttaattgcagtcttttggaatattatgaatttttataattaactttcacaatacaaaatctctgttcactccaataagcgtatatagttagtataagatttgttcatctttattttacatgtggaattaataatccastatgatttagtaaacaaaagcaaactttcattaaaatgtgaatctcagctgttaatacagttatagtttggatgtgcatttcctcaggctgcatactttgggtgcattttgggtgaggctgacacacttttcacctcccactctcaacagactgataaaagatgagttagagtaaaattgatctgtcatcataactgcattgaatgatagaatcacagaatgwgatcattgagtttcaacccccctgctgtgtgcagggtcaccaaccactagacagggctgcccagagccacatccagc

SEQ ID NO: 15788 - DNA, 398 bp, Chicken  19866894222586_2
ctgttcactccaataagcgtatatagttagtataagatttgttcatctttattttacatgtggaattaataatccastatgatttagtaaacaaaagcaaactttcattaaaatgtgaatctcagctgttaatacagttatagtttggatgtgcatttcctcaggctgcatactttgggtgcattttgggtgaggctgacacacttttcacctcccactctcaacagactgataaaagatgagttagagtaaaattgatctgtcatcataactgcattgaatgatagaatcacagaatgwgatcattgagtttcaacccccctgctgtgtgcagggtcaccaaccactagacagggctgcccagagccacatccagcctggccttgaatgcctccagg

SEQ ID NO: 15789 - DNA, 485 bp, Chicken  19866894222589_1
ccatcgcctctgcagcactgtgcctaagcactgctgcaacactgactctcagggaagaccatcacatatgctgctgaaatgtagtgctaatccacatggcaccctatgacacacaactgaaagtgaaattaatgtgataagtaggacgtttgagaattttggaaaccgaagacctacaagtgaatttttcctgagctgatctctaaacagccttatgacaagccctgtgtcgccctatgaaacacactgaggagagcttcagaaaaggcaattaattgctctgtctgaaaaagaacacaraggaagaataaggaaaagcacaggtatcagcttattcttgcatgaagtagagaccctttcttggaaatagtttatgtatatcaatccactatcacagtttatttcctgcacataagcagtgtttatcttgtaagactacctggggaggaacaatcaactctgtccacagccgtatattttaacag

SEQ ID NO: 15790 - DNA, 600 bp, Chicken  19866894222590_1
tctgaagtgcatttctaacacggagaaaactttttcccatctccagttttgttctttgcagggcaagttgctaagttaatgacaggcctttaaattaactaattttatagggcagcagagcgagtaatgtggaaaaaaaaatgcaagcaattacggtttaaataaaccttatccactgcattattagaaactacctgagctgagatttcagcagtgttagatttgtcctcagctctcccaagtgggaatctgggcctcacagggttgaacagtgtgggaaatgctgagtaattccagcaytgagctctcagctgctgtctcaaattcctgattttcacctcctggttccattgttactttgcctctaacgctctatgggccttttgactataaaagaaccaacaagacaagtcaagcaggtgagggagggcaagagaagaagaagaattgtgttgaaaggcacttacctgataatgttggcaatggcccgaaaaacccactctaaccttctcagtacctcccagttctaygctcaacttgagattacatctaccataggctgatagtctttctagatgatcttaatggcctttccaaccg

SEQ ID NO: 15791 - DNA, 600 bp, Chicken  19866894222590_2
agctctcccaagtgggaatctgggcctcacagggttgaacagtgtgggaaatgctgagtaattccagcaytgagctctcagctgctgtctcaaattcctgattttcacctcctggttccattgttactttgcctctaacgctctatgggccttttgactataaaagaaccaacaagacaagtcaagcaggtgagggagggcaagagaagaagaagaattgtgttgaaaggcacttacctgataatgttggcaatggcccgaaaaacccactctaaccttctcagtacctcccagttctaygctcaacttgagattacatctaccataggctgatagtctttctagatgatcttaatggcctttccaaccgtattgattctgtgatagcccatcagcctcagccactctgaacaaggcagggtgctttgctggctttgcttgcagaagcaaaattattgcggtctttcaaccactgctgtgggagaagtgctccagctctgctatgtagaacggttccagctgttctccactcccccagagatatcatcagagagcagtcgcttacactgagattacgttaatgatatcaaagggtgtgga

SEQ ID NO: 15792 - DNA, 514 bp, Chicken  19866894222592_1
ttttcacaattatctctgatcaacacccactccctcaatagaggagggaaaccagatgcccacagaaaaggcattaaaaaggcactggtttgaatacagagctcacaagtcacaggatattactggggaccagcaggattcaatttcaggcaaaggaaaaaacccacaaaggaaaaaccaaactgtctctttttccagaaacctactgaaaaagtttcaggctaagaacgcagcatccaagagcttcactgggataaccacagaaaacagcagggagcatgagcttctggtagggatcgrtagaaaaaagcaagatttaagacagctcactggaaacaagcatagcagtcattttctatctcagcacaacctggctttcagcacaagagacaggactagacccagtgtgaagatcaagacaaatgattttcataccaaaggcagcaggaaccgctaccatcaggcagcagtctggcacattggccactgacagcagcgcatggcaggagcacgt

SEQ ID NO: 15793 - DNA, 599 bp, Chicken  19866894222594_1
  misc_feature (1)..(17): n is any nucleotide
nnnnnnnnnnnnnnnnncttctgttgatctaaaatcaagctgccattgagagggcagtcatagaatcatagaatcatttgagttagaagggatccttaaaggtcatctggtccaactcctctgtaatgaatggggacaaattacctgcctttttctgcacaaactgcacaaaatcattcacgttagctttcccaggagcgttgtggccttgttcttaatgaatgggggcacatgttcctaagtcaagcccttgggctagatcttggtctagagccagttttggaggttggtggccctgcmtttggagctggatgatccttggggtcccttccaagccaagccatgctatgattctattttcttagtgctgaccaagtaacaaggagggtttccaccatgccttagatrcttgagtaggggaatctacakcctcaacttaggggtttattggtgtctccccatgccattattcttatgacacttctcaagtggaactaagatttaacctgaaatcagtttgtgattggttattaaagtgtaaaaataatcatcttactaggtttataatagaggtggcagtcctgggatgctccatccta

SEQ ID NO: 15794 - DNA, 600 bp, Chicken  19866894222594_2
ggtccaactcctctgtaatgaatggggacaaattacctgcctttttctgcacaaactgcacaaaatcattcacgttagctttcccaggagcgttgtggccttgttcttaatgaatgggggcacatgttcctaagtcaagcccttgggctagatcttggtctagagccagttttggaggttggtggccctgcmtttggagctggatgatccttggggtcccttccaagccaagccatgctatgattctattttcttagtgctgaccaagtaacaaggagggtttccaccatgccttagatrcttgagtaggggaatctacakcctcaacttaggggtttattggtgtctccccatgccattattcttatgacacttctcaagtggaactaagatttaacctgaaatcagtttgtgattggttattaaagtgtaaaaataatcatcttactaggtttataatagaggtggcagtcctgggatgctccatcctatggaattatttctccatgagcaaaagtttggggaaaacagtttttccttaccccaagagtactcagctggaaactttcagataatggtggccataactaacatgctttg

SEQ ID NO: 15795 - DNA, 600 bp, Chicken  19866894222594_3
atggggacaaattacctgcctttttctgcacaaactgcacaaaatcattcacgttagctttcccaggagcgttgtggccttgttcttaatgaatgggggcacatgttcctaagtcaagcccttgggctagatcttggtctagagccagttttggaggttggtggccctgcmtttggagctggatgatccttggggtcccttccaagccaagccatgctatgattctattttcttagtgctgaccaagtaacaaggagggtttccaccatgccttagatrcttgagtaggggaatctacakcctcaacttaggggtttattggtgtctccccatgccattattcttatgacacttctcaagtggaactaagatttaacctgaaatcagtttgtgattggttattaaagtgtaaaaataatcatcttactaggtttataatagaggtggcagtcctgggatgctccatcctatggaattatttctccatgagcaaaagtttggggaaaacagtttttccttaccccaagagtactcagctggaaactttcagataatggtggccataactaacatgctttgagttgtgatgagccagcagtk

SEQ ID NO: 15796 - DNA, 600 bp, Chicken  19866894222594_4
cctcaacttaggggtttattggtgtctccccatgccattattcttatgacacttctcaagtggaactaagatttaacctgaaatcagtttgtgattggttattaaagtgtaaaaataatcatcttactaggtttataatagaggtggcagtcctgggatgctccatcctatggaattatttctccatgagcaaaagtttggggaaaacagtttttccttaccccaagagtactcagctggaaactttcagataatggtggccataactaacatgctttgagttgtgatgagccagcagtkctcatggggagcaagtttgattctgttccttttgccatcagttttctgaatatttaccaaaggccmaagaatgccccttgaatgccccaggtgtgtcctgcaaagttccttttcagttgcatcatcccatctgatggcatctgcagtcacagccaagccaaagcttgtgctgcctaacagtatgggtgccagaagctgagctttaagctctgggcttctgctccttccagatctggccaacaaagctgtttgtccatgctgtctctcagacccgtgtttcagtgctgacacgagggacgt

SEQ ID NO: 15797 - DNA, 600 bp, Chicken  19866894222594_5
taagatttaacctgaaatcagtttgtgattggttattaaagtgtaaaaataatcatcttactaggtttataatagaggtggcagtcctgggatgctccatcctatggaattatttctccatgagcaaaagtttggggaaaacagtttttccttaccccaagagtactcagctggaaactttcagataatggtggccataactaacatgctttgagttgtgatgagccagcagtkctcatggggagcaagtttgattctgttccttttgccatcagttttctgaatatttaccaaaggccmaagaatgccccttgaatgccccaggtgtgtcctgcaaagttccttttcagttgcatcatcccatctgatggcatctgcagtcacagccaagccaaagcttgtgctgcctaacagtatgggtgccagaagctgagctttaagctctgggcttctgctccttccagatctggccaacaaagctgtttgtccatgctgtctctcagacccgtgtttcagtgctgacacgagggacgtgcaggcgaaatctgcttgtgggaaacgtgcacaatgagtacttgaccatttaccacaaccatgcac

SEQ ID NO: 15798 - DNA, 600 bp, Chicken  19866894222595_1
ggcgggatatgttccattgttccgctgttgtacgagaagaacaaaagctcctaatctacttgctccgtatgactgcttgctttgtgtacctttagcaggcctcctcttgtgtcctctcacagattaagcctgcaagaagcttggcatgagtgttggggtgcagtcctgcagccaaggaccccatgtgctggaggaaccaaatctgctgtgggtgagaatctgggtcacccacagattcaccaggctggtgaaaagcccccatacaggtgcttctaccagcctctctgctttagccacagkgcaccctctttaacatactctatgacsggcaaagccatctcaccagaaggccagagagatcttcccagtccatcatcatctgagatttctaccagtctcttcaacatttgtgtcactctcctcttgaaatcagcagtaccactgcagattggtaatctttgagcatagtcatcatcatggccattggttgactagacattgattgattagtatcttgaggtacctggttgttcttgttggtacaggggtggctctttgggaaggaggaacacagtacccaaatgtggtgcatggctaggc

SEQ ID NO: 15799 - DNA, 600 bp, Chicken  19866894222595_2
ttgtacgagaagaacaaaagctcctaatctacttgctccgtatgactgcttgctttgtgtacctttagcaggcctcctcttgtgtcctctcacagattaagcctgcaagaagcttggcatgagtgttggggtgcagtcctgcagccaaggaccccatgtgctggaggaaccaaatctgctgtgggtgagaatctgggtcacccacagattcaccaggctggtgaaaagcccccatacaggtgcttctaccagcctctctgctttagccacagkgcaccctctttaacatactctatgacsggcaaagccatctcaccagaaggccagagagatcttcccagtccatcatcatctgagatttctaccagtctcttcaacatttgtgtcactctcctcttgaaatcagcagtaccactgcagattggtaatctttgagcatagtcatcatcatggccattggttgactagacattgattgattagtatcttgaggtacctggttgttcttgttggtacaggggtggctctttgggaaggaggaacacagtacccaaatgtggtgcatggctaggcatggcagttcccagggcccccctcgct

SEQ ID NO: 15800 - DNA, 599 bp, Chicken  19866894222598_1
  misc_feature (1)..(82): n is any nucleotide
nnnnnnnnnnnnnnnnnnnnnnnnnnnnnnnnnnnnnnnnnnnnnnnnnnnnnnnnnnnnnnnnnnnnnnnnnnnnnnnnnngaacaaaaccacatggttacaaattggtgatgtgagaaacctcaaagttgcatcctcccttggttctgtgccaacctatagttcatttcaagaattgtttcaaagttgtattatagagcacattcttgtccttttatttttagctgacagccagcacagatagccccaatcctacagacatgcagctagtaagagtaagcaagcaaatcatgagagaracatcgacggaacagcttaagagccgcttagttgttaggagtaaaaagattaaaaaaccacaaagacaagcctgtacaaaaagattctggaaagcactggraatatagctgcatttggaaataacttctcattgtgaaaagtaaaaatcatggaagtcttgggcataaatctacaccaacatataacttggacactatgtttacctcaaggaaaaaaaccaaagcatcagcaaaagtagtgagaattcattctttggtcagcccttaaaacgttttctcttattatgatatgaggcatt

SEQ ID NO: 15801 - DNA, 600 bp, Chicken  19866894222598_2
caaattggtgatgtgagaaacctcaaagttgcatcctcccttggttctgtgccaacctatagttcatttcaagaattgtttcaaagttgtattatagagcacattcttgtccttttatttttagctgacagccagcacagatagccccaatcctacagacatgcagctagtaagagtaagcaagcaaatcatgagagaracatcgacggaacagcttaagagccgcttagttgttaggagtaaaaagattaaaaaaccacaaagacaagcctgtacaaaaagattctggaaagcactggraatatagctgcatttggaaataacttctcattgtgaaaagtaaaaatcatggaagtcttgggcataaatctacaccaacatataacttggacactatgtttacctcaaggaaaaaaaccaaagcatcagcaaaagtagtgagaattcattctttggtcagcccttaaaacgttttctcttattatgatatgaggcattagtactgtagtgagcagtagtgctttctctgcttagtcagctctgaagatgttgttcagacatcttytgtggtggcaaagtagaacttaaatttttgatgtg

SEQ ID NO: 15802 - DNA, 418 bp, Chicken  19866894222598_3
caagcctgtacaaaaagattctggaaagcactggraatatagctgcatttggaaataacttctcattgtgaaaagtaaaaatcatggaagtcttgggcataaatctacaccaacatataacttggacactatgtttacctcaaggaaaaaaaccaaagcatcagcaaaagtagtgagaattcattctttggtcagcccttaaaacgttttctcttattatgatatgaggcattagtactgtagtgagcagtagtgctttctctgcttagtcagctctgaagatgttgttcagacatcttytgtggtggcaaagtagaacttaaatttttgatgtgttcattttcaaatagaccaaaatccatttccttatttatacatgtgaatagaagaccctgtgttgctggcttttttgttgttt

SEQ ID NO: 15803 - DNA, 600 bp, Chicken  19866894222600_1
gcccccacacagacccacagccctatagcaaagcacagccagcaccgagcacgcacggccctgcggccacccgcccactgcagaggcgctggggaggtgccagggccttccctgcaggggcccccgggattccctggggaagccgagctgggagggaatcccggcgcctgcctggagccagcgctggagcagagccccgaagacggccccgggctgtgagcagggccctgctgtcgggcaccgtgctgctgctgctgcacaccgtgtgcaaaaggcacgtgcagccctgcacagcaaagrcacggttcaaacacacacaaagccctgagctgcagatgctcggtgcaagcatgcaaaaagccctgcactgcaaatgtacggtggaaacacgcacaacggcctgtgctgcaaacatacaggtcacgcacacacaggctctgtggtggaaacacgcacacggtcctgctctgcaaatacatgcacggtgctgcactgagagcatgcacagctcctggatgcagcgctgtgctgtgaaggcacacaaagccctgcactgccagcacggcatgcacgtggccctgcactatgaatgcacgctgc

SEQ ID NO: 15804 - DNA, 600 bp, Chicken  19866894222602_1
gaaacagaagttgtggtgtcccttcccttctctgctcttcattctttctgcatgctggacgaccacagggccatggtggtgataagatactttagttggtattagaggtaatcattactggagaaagcattcagaataatgcttttatgactactaagtttggtaactgcagcagagcattggggctgaaatgacaacagtctgttggtaattaacatttagttcaagtcttacttggcataactataaaccatgtgtattctcctgtcttaacaggatagttataaaaataaatattgycagctgtgtgtatgcctgccacaatgcacagcccatcccttgtaacaaacaactactagacagataattccagatggaatacattttttttgactgctcattaagagaaactgcttccattgtatggaaataatgtaatgctcttctaccagttattatgtctctagaaaataattaatacaaacttttctttggcaagccaaatacttatttaaaaaaaaggaaaaaaacatcttctcaatatctatctatatctcaagcagaacagcaaaaaaaaaaagcaaagatcctttgttttca

SEQ ID NO: 15805 - DNA, 600 bp, Chicken  19866894222605_1
ccttaaggagaatctcagcttgccagaccttaactgagaacaccatgtaattaatacaaacaggtctacgagattcttaaaataccttgacgacaactttctagtacgagtactaagggagttgatgagaacaggtgcactcctagacttgcgacttgttatttgtgagtgaagcggcagtagatggctgtcttggacatagtgatcatgaaatagttgaatttaaaatgtttggtgataggaggaaaactggcaccaaagccttaacactgagtacagggagagcagatttcaggctaytcagggaacaacttatattcattaattatacaaccagraggagtgatcttaataagctgtaaaatttatagtcataaatgcagtgaagacaaagaacgatwtctttcatctatctacagtgcaccaggatgttaaatatttatattatatttttccccatgaatggaaacatttattgtatgaatgggcacagatacagtcctatcaagtaagaactgtcataatcatgtataaaaatgtatgctttctgttttactacatagagtgtattataaagaaatacaaaaatatttcttaaaa

SEQ ID NO: 15806 - DNA, 600 bp, Chicken  19866894222605_2
aacaccatgtaattaatacaaacaggtctacgagattcttaaaataccttgacgacaactttctagtacgagtactaagggagttgatgagaacaggtgcactcctagacttgcgacttgttatttgtgagtgaagcggcagtagatggctgtcttggacatagtgatcatgaaatagttgaatttaaaatgtttggtgataggaggaaaactggcaccaaagccttaacactgagtacagggagagcagatttcaggctaytcagggaacaacttatattcattaattatacaaccagraggagtgatcttaataagctgtaaaatttatagtcataaatgcagtgaagacaaagaacgatwtctttcatctatctacagtgcaccaggatgttaaatatttatattatatttttccccatgaatggaaacatttattgtatgaatgggcacagatacagtcctatcaagtaagaactgtcataatcatgtataaaaatgtatgctttctgttttactacatagagtgtattataaagaaatacaaaaatatttcttaaaatataaatctgcatgacttcaaattcattttcttcaact

SEQ ID NO: 15807 - DNA, 600 bp, Chicken  19866894222605_3
tagtacgagtactaagggagttgatgagaacaggtgcactcctagacttgcgacttgttatttgtgagtgaagcggcagtagatggctgtcttggacatagtgatcatgaaatagttgaatttaaaatgtttggtgataggaggaaaactggcaccaaagccttaacactgagtacagggagagcagatttcaggctaytcagggaacaacttatattcattaattatacaaccagraggagtgatcttaataagctgtaaaatttatagtcataaatgcagtgaagacaaagaacgatwtctttcatctatctacagtgcaccaggatgttaaatatttatattatatttttccccatgaatggaaacatttattgtatgaatgggcacagatacagtcctatcaagtaagaactgtcataatcatgtataaaaatgtatgctttctgttttactacatagagtgtattataaagaaatacaaaaatatttcttaaaatataaatctgcatgacttcaaattcattttcttcaactgatgtagtatcagaaaaattatgggcaaaaaaaaatatttgaaaattattgtcatggtaacta

SEQ ID NO: 15808 - DNA, 600 bp, Chicken  19866894222608_1
agccattccttacagctttagcaacctatctgagataagagacacaaaggtctggattcttacagtattttacttaaaacctgcatcagcttaaaattattctaactctgccttcttttgtacttctgaggttaaaataaaaaataaaaaaagatgatatcgactaataggaaagaattaaatagcaaaataaaaaaaaatgtttatgaaataattagcaagagcacagcaagcagtgctgggtgcaacagagaggtctgtcagaaatcaggaagaatcagaatgtgaccctttgcttcratgcttcttcacttcttttctcctccctgaaagacaaattttatattctatacgcagaacgcttgccattaatatataacactttactcttgcacgaataagagaggggaggggatacctcattgtggccatccgatatttgaaaggagcgtataaacaggaaaggagagcaactgtttacaagggtgaatagtgataggacaagggggaatggttaatggttttaaactaagacaggggatgtttagattagatactatgaggaaatttttcgttcaaagggtagtgacacactggagc

SEQ ID NO: 15809 - DNA, 599 bp, Chicken  19866894222610_1
  misc_feature (1)..(203): n is any nucleotide
nnnnnnnnnnnnnnnnnnnnnnnnnnnnnnnnnnnnnnnnnnnnnnnnnnnnnnnnnnnnnnnnnnnnnnnnnnnnnnnnnnnnnnnnnnnnnnnnnnnnnnnnnnnnnnnnnnnnnnnnnnnnnnnnnnnnnnnnnnnnnnnnnnnnnnnnnnnnnnnnnnnnnnnnnnnnnnnnnnnnnnnnnnnnnnnnnnnnnnnnnnnatgtgcatcagcacttgtgaaggttctattcattgcttttcccagctcaccaattccaagatgagtgttgatggatgcataacgggcagttcctgtyaggtttttattttcacgatatgggatatgttggtgagttcgggcatcccgatacttctttgctaatccaaagtctatgatgtagacaagattgcctttcttccccaggcccattaggaagttatctggcttcacatctcggtggatgaaattcttagagtgaatatattcaattcgactaatctacatacagaagacaaaaaacaattgagatatcagtcatacccttttctctcagaaaaatgctagcaacgttatcgctattatcacattatcttagtgataaaccagataaagatt

SEQ ID NO: 15810 - DNA, 600 bp, Chicken  19866894222610_2
tcacgatatgggatatgttggtgagttcgggcatcccgatacttctttgctaatccaaagtctatgatgtagacaagattgcctttcttccccaggcccattaggaagttatctggcttcacatctcggtggatgaaattcttagagtgaatatattcaattcgactaatctacatacagaagacaaaaaacaattgagatatcagtcatacccttttctctcagaaaaatgctagcaacgttatcgctattatcacattatcttagtgataaaccagataaagattttattggaaaagrgcattaaagagaataatttagaagacaataagtataccttccctccaactctttccctgtgtctattttacatttgtttctaaaaacttccttcatatttgagccataacatcaggcttgcaaactgcaaccaaattaaaactctgtaaccacttttgatacaacatrttatatttaacaaaactcatctcgagttttttccccctctaacgatacatcctattcacctctaaatatgaacaaaaagttcaataaaatacatcttggtcactcaagacattttaactagcttaacatact

SEQ ID NO: 15811 - DNA, 600 bp, Chicken  19866894222610_3
atctacatacagaagacaaaaaacaattgagatatcagtcatacccttttctctcagaaaaatgctagcaacgttatcgctattatcacattatcttagtgataaaccagataaagattttattggaaaagrgcattaaagagaataatttagaagacaataagtataccttccctccaactctttccctgtgtctattttacatttgtttctaaaaacttccttcatatttgagccataacatcaggcttgcaaactgcaaccaaattaaaactctgtaaccacttttgatacaacatrttatatttaacaaaactcatctcgagttttttccccctctaacgatacatcctattcacctctaaatatgaacaaaaagttcaataaaatacatcttggtcactcaagacattttaactagcttaacatacttggcagtcacaaacaacaatgcagttccctaccatttggtcagcaagtaacaagactgtcttgagactaaatttccttgaacaaaaattgaagaggtcttcaagactgggtcccagcagctccatcaccatgacattgtagtcyccttcagcaccacaccacttaata

SEQ ID NO: 15812 - DNA, 600 bp, Chicken  19866894222610_4
tgtaaccacttttgatacaacatrttatatttaacaaaactcatctcgagttttttccccctctaacgatacatcctattcacctctaaatatgaacaaaaagttcaataaaatacatcttggtcactcaagacattttaactagcttaacatacttggcagtcacaaacaacaatgcagttccctaccatttggtcagcaagtaacaagactgtcttgagactaaatttccttgaacaaaaattgaagaggtcttcaagactgggtcccagcagctccatcaccatgacattgtagtcyccttcagcaccacaccacttaatagtggggatacccactggaagaaaaggaaacagtttattaagcataatttgatttatgaagttcatacacacagatcttcagggttcttaagatgaactctaagagtcattactgtcagtgtttgtatctacagtgacccttaatattttatgatactttcaggcattttgaaattaagtgtttgatcccttcacagctggaccaatacaaaactggagcacaagagatctgaaaatagctgtcttcttgcctggtcccctcccagtctttgtgttt

SEQ ID NO: 15813 - DNA, 600 bp, Chicken  19866894222613_1
cgtgtggatgaaagaaaaccactaaactcatgtacatctcccccaactacaagggcaaacaccaaatcccatgctaattttcaacgaatcagtcttttcctgcccaccccataggacagactgagagacagcaggtgggatgcagccgtccagagagatgcccacctgctgcagatagacagctggctctgcggatggacagacaagtgttgagctctttgatgtgcttgaaaagccctctggaagcctctatcagctctggaggtggtcaccaacctgctaataagagccaacacctgkgctgcccaggtgatgggaccttctwctagaactgtaaataaataaaccctgctgggacctgaagcacaggttcagaggagaagcagaacttgttgtgcaagttgcaacgtggtgctaagtaaggtgggggagctgcactatatgtatattttataatacatggaaagtgacttttaaaggatctcaggtgatgttgtgatgacaagtggacccaaaactgccctgaaactcagtcactactgtctggtgttgcttggaagtgaagaggtttattcatggaatcatagaattatttgagtt

SEQ ID NO: 15814 - DNA, 600 bp, Chicken  19866894222613_2
actcatgtacatctcccccaactacaagggcaaacaccaaatcccatgctaattttcaacgaatcagtcttttcctgcccaccccataggacagactgagagacagcaggtgggatgcagccgtccagagagatgcccacctgctgcagatagacagctggctctgcggatggacagacaagtgttgagctctttgatgtgcttgaaaagccctctggaagcctctatcagctctggaggtggtcaccaacctgctaataagagccaacacctgkgctgcccaggtgatgggaccttctwctagaactgtaaataaataaaccctgctgggacctgaagcacaggttcagaggagaagcagaacttgttgtgcaagttgcaacgtggtgctaagtaaggtgggggagctgcactatatgtatattttataatacatggaaagtgacttttaaaggatctcaggtgatgttgtgatgacaagtggacccaaaactgccctgaaactcagtcactactgtctggtgttgcttggaagtgaagaggtttattcatggaatcatagaattatttgagttggaagggacctgtaaaggtcatcgt

SEQ ID NO: 15815 - DNA, 600 bp, Chicken  19866894222623_1
tctctgtgcaaggggaacaagaaagacttctattttccatgggggtgggtccacaaaaactttgcaccagactgaataccccttaatggaagaacaggattgctactgagtagcaggaattggcaaagacttgaatgaactaattcagccgcatcttcagagatgccacctttctgatagttgccttcaaacaacgggcagcacatatctctttccctgatgatgagaaggtatctgctcgttaggttgtaaggcagtgaggacatttttactttctaatcaaaatgtctgaaaactctraagatacgtggaaaaagcaaagatctgactgctgagcaagattctcaagagactgagcatagagcataaagctcccatagcattttcttttctctttcacccccttcaggatgcagccatacctatagagtctcacacaaggaacacacacacgataccatcatcttgaagcatatgacacaacgccctctgaatttatctatatttgtacctgttttattcaaaagtatttagtgcaagacttccatttgggaaatcaactgcataaactgcgttacaagcactgtctcacgtacagtg

SEQ ID NO: 15816 - DNA, 600 bp, Chicken  19866894222624_1
tcaagagtggagcagtgatttgagtgttttcacagtgtgacaggcaccatgataaacccaattagtgaaatacttgtgaaaaatatagaatactagaatacatttctgaccttattttttctttttcttcttccccaggacagcatttttgcctttttgtctctctggggattctcaagtaggaaagaaaactgtggtgttactgctgggaggatttttcctgatcctgagggaatccattctggaagcttgatccaaatgacagctgcctccaattaccactctacacattgctgtggktatttggttacaatcaagactggaggcttgatgacagctagaagtacyagcaaggaaacctcagatggttcaggctrcagcagcatgggtgcaggacaacctggatgwaagtcagcagaacatctacagggctaattaggaccatgaccttgaaaaggcattttccagtactgttcacttaggttgaagctagagacagaggaaggtatgcacttcccattatgagtgctactcctaagttttccaacaggtgccaagtatggtggctttgaaatgtattttggagagctaacaaagtgg

SEQ ID NO: 15817 - DNA, 600 bp, Chicken  19866894222624_2
atgataaacccaattagtgaaatacttgtgaaaaatatagaatactagaatacatttctgaccttattttttctttttcttcttccccaggacagcatttttgcctttttgtctctctggggattctcaagtaggaaagaaaactgtggtgttactgctgggaggatttttcctgatcctgagggaatccattctggaagcttgatccaaatgacagctgcctccaattaccactctacacattgctgtggktatttggttacaatcaagactggaggcttgatgacagctagaagtacyagcaaggaaacctcagatggttcaggctrcagcagcatgggtgcaggacaacctggatgwaagtcagcagaacatctacagggctaattaggaccatgaccttgaaaaggcattttccagtactgttcacttaggttgaagctagagacagaggaaggtatgcacttcccattatgagtgctactcctaagttttccaacaggtgccaagtatggtggctttgaaatgtattttggagagctaacaaagtggctaaagcagatgattcataacaggctgtactaagaccaaaaaaacccc

SEQ ID NO: 15818 - DNA, 600 bp, Chicken  19866894222624_3
gaaaaatatagaatactagaatacatttctgaccttattttttctttttcttcttccccaggacagcatttttgcctttttgtctctctggggattctcaagtaggaaagaaaactgtggtgttactgctgggaggatttttcctgatcctgagggaatccattctggaagcttgatccaaatgacagctgcctccaattaccactctacacattgctgtggktatttggttacaatcaagactggaggcttgatgacagctagaagtacyagcaaggaaacctcagatggttcaggctrcagcagcatgggtgcaggacaacctggatgwaagtcagcagaacatctacagggctaattaggaccatgaccttgaaaaggcattttccagtactgttcacttaggttgaagctagagacagaggaaggtatgcacttcccattatgagtgctactcctaagttttccaacaggtgccaagtatggtggctttgaaatgtattttggagagctaacaaagtggctaaagcagatgattcataacaggctgtactaagaccaaaaaaaccccaccaactggagtggtcattaatttgtgag

SEQ ID NO: 15819 - DNA, 600 bp, Chicken  19866894222624_4
accttattttttctttttcttcttccccaggacagcatttttgcctttttgtctctctggggattctcaagtaggaaagaaaactgtggtgttactgctgggaggatttttcctgatcctgagggaatccattctggaagcttgatccaaatgacagctgcctccaattaccactctacacattgctgtggktatttggttacaatcaagactggaggcttgatgacagctagaagtacyagcaaggaaacctcagatggttcaggctrcagcagcatgggtgcaggacaacctggatgwaagtcagcagaacatctacagggctaattaggaccatgaccttgaaaaggcattttccagtactgttcacttaggttgaagctagagacagaggaaggtatgcacttcccattatgagtgctactcctaagttttccaacaggtgccaagtatggtggctttgaaatgtattttggagagctaacaaagtggctaaagcagatgattcataacaggctgtactaagaccaaaaaaaccccaccaactggagtggtcattaatttgtgaggtgagcaggcagcactcaccaagcaagtggt

SEQ ID NO: 15820 - DNA, 599 bp, Chicken  19866894222625_1
  misc_feature (1)..(15): n is any nucleotide
nnnnnnnnnnnnnnncatttttaaagcactggtgggaaagcagtttgccagtggagagagaagtgttgcaatcatgcatcagacaagcagaactagaccaatatatttttcaaaatgtgctctctactctgctctagtgactagagtcagtctcaaggaaattcaaagccaatttggagaatggaatgcaactatatttatgaagattgctcactgtaacacatgctaataagaaatattcctgtgtgaattattgctgggcacatatgtttaccttaaggcttcagcaaatggtaaatrgcattctaaaaatttgatactaaatttaaactgagttgtatgttgatactactagcaataacagttctaatatccctagacaagtccaaacacagcagcaaaagcataacagcttcagagacagaaaccaaaagcagaaatttcactaagtcataaagcttatctgaaaagttttgtactgaaactatggctgyttacaagaccaaaagtctaaaagatatgatttatttcatgtctcagggcaaatgcaatagcagctgggttcaactcagtgctcactacasggttccaattttttt

SEQ ID NO: 15821 - DNA, 532 bp, Chicken  19866894222625_2
tatttatgaagattgctcactgtaacacatgctaataagaaatattcctgtgtgaattattgctgggcacatatgtttaccttaaggcttcagcaaatggtaaatrgcattctaaaaatttgatactaaatttaaactgagttgtatgttgatactactagcaataacagttctaatatccctagacaagtccaaacacagcagcaaaagcataacagcttcagagacagaaaccaaaagcagaaatttcactaagtcataaagcttatctgaaaagttttgtactgaaactatggctgyttacaagaccaaaagtctaaaagatatgatttatttcatgtctcagggcaaatgcaatagcagctgggttcaactcagtgctcactacasggttccaatttttttggaaaaaaaaaaaaaaaaattgaataaaaaagccaaacctaatggagtattgtagttgcaatctagggaaagaaaaatacccttaagtcctacagtaatattgcaatctacttcattttattttaat

SEQ ID NO: 15822 - DNA, 442 bp, Chicken  19866894222625_3
cagcaaatggtaaatrgcattctaaaaatttgatactaaatttaaactgagttgtatgttgatactactagcaataacagttctaatatccctagacaagtccaaacacagcagcaaaagcataacagcttcagagacagaaaccaaaagcagaaatttcactaagtcataaagcttatctgaaaagttttgtactgaaactatggctgyttacaagaccaaaagtctaaaagatatgatttatttcatgtctcagggcaaatgcaatagcagctgggttcaactcagtgctcactacasggttccaatttttttggaaaaaaaaaaaaaaaaattgaataaaaaagccaaacctaatggagtattgtagttgcaatctagggaaagaaaaatacccttaagtcctacagtaatattgcaatctacttcattttattttaat

SEQ ID NO: 15823 - DNA, 600 bp, Chicken  19866894222630_1
agtacaggcatggagcacagtcaggatacactggttactaaacagtacgtgctccaataaaccctaagcaacccatgagcacttggtgcattgagcactgacctgtgcaagtcacctgctctgttccaaggtttaatgttgtcctattcctctgcagaggtcattgctgtctccttctcccttccaccccccttcaaagaaccccgtacctttggagtgtcagcttgaataaggttgcctccagggtacagcacagagttatttcatctttcacctctctctgatatccgggtgtcccaygtggacaacttcaccttaataatgtgtgctctgcactgcatggatcgctttcyttgttgaaagaataactgtagagtattgtgggcagcrtcagctagcccagatgtgcacaccacagggctccaagctcagccttttttccacaagatagcccagcagcacttttccactgaagcctctatgtttttttttccagtggaaatactttcagattgagcttctcgttgaaaaacatcataaacttttaacatgaaaaaatgtttctttctcttctttttgactatttttactctaggtagt

SEQ ID NO: 15824 - DNA, 600 bp, Chicken  19866894222630_2
ccaataaaccctaagcaacccatgagcacttggtgcattgagcactgacctgtgcaagtcacctgctctgttccaaggtttaatgttgtcctattcctctgcagaggtcattgctgtctccttctcccttccaccccccttcaaagaaccccgtacctttggagtgtcagcttgaataaggttgcctccagggtacagcacagagttatttcatctttcacctctctctgatatccgggtgtcccaygtggacaacttcaccttaataatgtgtgctctgcactgcatggatcgctttcyttgttgaaagaataactgtagagtattgtgggcagcrtcagctagcccagatgtgcacaccacagggctccaagctcagccttttttccacaagatagcccagcagcacttttccactgaagcctctatgtttttttttccagtggaaatactttcagattgagcttctcgttgaaaaacatcataaacttttaacatgaaaaaatgtttctttctcttctttttgactatttttactctaggtagtaaacagctgaaagcatttcctgataaattccaattcttacatacgatgagcac

SEQ ID NO: 15825 - DNA, 600 bp, Chicken  19866894222630_3
ttgagcactgacctgtgcaagtcacctgctctgttccaaggtttaatgttgtcctattcctctgcagaggtcattgctgtctccttctcccttccaccccccttcaaagaaccccgtacctttggagtgtcagcttgaataaggttgcctccagggtacagcacagagttatttcatctttcacctctctctgatatccgggtgtcccaygtggacaacttcaccttaataatgtgtgctctgcactgcatggatcgctttcyttgttgaaagaataactgtagagtattgtgggcagcrtcagctagcccagatgtgcacaccacagggctccaagctcagccttttttccacaagatagcccagcagcacttttccactgaagcctctatgtttttttttccagtggaaatactttcagattgagcttctcgttgaaaaacatcataaacttttaacatgaaaaaatgtttctttctcttctttttgactatttttactctaggtagtaaacagctgaaagcatttcctgataaattccaattcttacatacgatgagcactatttgcttgtttaataggtggcaatgatctggaaca

SEQ ID NO: 15826 - DNA, 600 bp, Chicken  19866894222632_1
ctttatgtttaaaaagaagtaaaaataccatgtaacgaagttgcatgtctagattaaggatttgtctcaaattgcaagatgtattcttcctatggatggcgtatctttactgacacctacatgtgtctcatcagttattttccactcccaattactttcccccttaatctattcactcagtacccagtgctttctgatcataattctctagaaaaggagctgcagatgtttctcaaatcttcacaagaccggaaagccacatttgtatttgtttaactttctccttgttgaacatgacaytgggacatgttttcagtgaatgccttctgtgttcctcagatatctcacagccttgctgttgtattcggttatatatgaaaaacatttatcacctcatgcattcctctaccatgggcattatcccttaaataattcacactccactgtgccttactgcctgagctgcaaacaacataaaagatatttaaggacagtcttcacatagaactcacataatttcatatacgtacggttgaacagtctcatggaggtttgcttcaagaaaattccagctcagaaggaaatctattgtgccatgtg

SEQ ID NO: 15827 - DNA, 600 bp, Chicken  19866894222639_1
cgaaggacatgcccacgggactaagaggtggcacaaaaagggcaggaaacacagcaaggttatcctaagaacctcagcaacttccagagctgatgcgagcactgtgcgtcacgaaacagagtagttgggtgttgtgtgattaatacaatcctgtgatgttttttgaatcccaatcaccacgcctgacactgcagactgcataaacatcagtgcaaccaggccagctagctctcctccccaaccctgctggacaaaagcacagacgggatcaacctgaagcctcccagcccagcacacccygagcccaaggtgctcctgctcccctcctaccagacrttcttggtgctgtcctgctttccactgcaccccagacaccacaaataagagctccagatggctcttggtggaaccgatgcaaacccagtgaggtagcatggaagctgcatgctgacacatggctgcattggacccacgcatccgttccatataaaaccctgctccgcttgcaatgcagacaggatacagaaatatggctattccattacattcagatgcttaaatgagatcttcttagacttgagtgtcctggctgggatcctt

SEQ ID NO: 15828 - DNA, 600 bp, Chicken  19866894222639_2
aaagggcaggaaacacagcaaggttatcctaagaacctcagcaacttccagagctgatgcgagcactgtgcgtcacgaaacagagtagttgggtgttgtgtgattaatacaatcctgtgatgttttttgaatcccaatcaccacgcctgacactgcagactgcataaacatcagtgcaaccaggccagctagctctcctccccaaccctgctggacaaaagcacagacgggatcaacctgaagcctcccagcccagcacacccygagcccaaggtgctcctgctcccctcctaccagacrttcttggtgctgtcctgctttccactgcaccccagacaccacaaataagagctccagatggctcttggtggaaccgatgcaaacccagtgaggtagcatggaagctgcatgctgacacatggctgcattggacccacgcatccgttccatataaaaccctgctccgcttgcaatgcagacaggatacagaaatatggctattccattacattcagatgcttaaatgagatcttcttagacttgagtgtcctggctgggatccttgcacagactcgtggtttatgaatcaggctcgtagca

SEQ ID NO: 15829 - DNA, 600 bp, Chicken  19866894222650_1
aaaatcaaaaccaaattggagtgaatttgttttctcagcatcgtttctgcaacagtgataataatcttaaatctgtccttactccttggatcaaaagtcttctcaaacctcacgtagtagaattagccataaaatcttacctatatttacttgtgtctaggaaataattaaccacatccttccattgttcatcatctttattcagatgatcttccctataaattcagcttcagtacaggtagtgtattattaaatggctgtggttctcttctggtaaaacatccaatatgagattcaaaygttggaaaattagaagaaatggatgtgggacttctgcttttagaatyctgtcgtatttatactttgtcctcacaatacaactgcattctgttgttaccatgtcaacatgaaaatgctttaataacctataattcacccccctttttttaacatgcagctgtaatcttgcaatctgagatagggtcacagtttcatcgcagaatcttctctgtctgctttctcatttgttactaggcatttcagaaaacagacattttgcaatagattattttgaaaggatatatttaaagacttctaayt

SEQ ID NO: 15830 - DNA, 600 bp, Chicken  19866894222650_2
tgcaacagtgataataatcttaaatctgtccttactccttggatcaaaagtcttctcaaacctcacgtagtagaattagccataaaatcttacctatatttacttgtgtctaggaaataattaaccacatccttccattgttcatcatctttattcagatgatcttccctataaattcagcttcagtacaggtagtgtattattaaatggctgtggttctcttctggtaaaacatccaatatgagattcaaaygttggaaaattagaagaaatggatgtgggacttctgcttttagaatyctgtcgtatttatactttgtcctcacaatacaactgcattctgttgttaccatgtcaacatgaaaatgctttaataacctataattcacccccctttttttaacatgcagctgtaatcttgcaatctgagatagggtcacagtttcatcgcagaatcttctctgtctgctttctcatttgttactaggcatttcagaaaacagacattttgcaatagattattttgaaaggatatatttaaagacttctaaytgcttgctttccaaatagtatcttgtgctaagtatctggttaacatat

SEQ ID NO: 15831 - DNA, 587 bp, Chicken  19866894222650_3
ygttggaaaattagaagaaatggatgtgggacttctgcttttagaatyctgtcgtatttatactttgtcctcacaatacaactgcattctgttgttaccatgtcaacatgaaaatgctttaataacctataattcacccccctttttttaacatgcagctgtaatcttgcaatctgagatagggtcacagtttcatcgcagaatcttctctgtctgctttctcatttgttactaggcatttcagaaaacagacattttgcaatagattattttgaaaggatatatttaaagacttctaaytgcttgctttccaaatagtatcttgtgctaagtatctggttaacatattgcgctggagtatatacctgtgtaatgtttctcctacatcattaaagagtattcgtgttaccatatatcccagatgctacagttgttagtcaagacctcattattttaagttttgtggatattaaacaaaaggaggtatatcttttcaatatgacatgaagcagaagttatgactgtagtcagaaagatgggaaaaaggctattaatgataaaaaaaataaaaaaataggggcctacat

SEQ ID NO: 15832 - DNA, 600 bp, Chicken  19866894222654_1
gattaggtaattactttccacattttacacaaacatttgatgcactatcacaacagaagtgcacttctttcataaaataattttagacggtgtacatatatatatataaacaaagtctatatgaaggagcttaaaatgacaatttggattttcgtcttaactagttaatttatgttggaactcattcttcatgcacatctttgaagaggcataagaaaaactgcagaaaggcctattattttaaacattatccctttaaatttggttataaccttgtctgactgccacccattccgctaycctcaactaccacrttctttattgcagttcagcaatgggtaacatagtaatgaaaaagggacaaagatcagttagacayaacacctgtgcagaacatctgaaatacaactacaygagcaaygaccatgacatttccaagggaacttctttsttttctaacaagatcaatcccaaattctgatttttctgtagagttggtattttctacagaaaactgaagcagaatgagttttccctacataagagtttgcaaaacataggtaaaaacccaaacataagtaaaaataccccccaaacacc

SEQ ID NO: 15833 - DNA, 600 bp, Chicken  19866894222654_2
tttccacattttacacaaacatttgatgcactatcacaacagaagtgcacttctttcataaaataattttagacggtgtacatatatatatataaacaaagtctatatgaaggagcttaaaatgacaatttggattttcgtcttaactagttaatttatgttggaactcattcttcatgcacatctttgaagaggcataagaaaaactgcagaaaggcctattattttaaacattatccctttaaatttggttataaccttgtctgactgccacccattccgctaycctcaactaccacrttctttattgcagttcagcaatgggtaacatagtaatgaaaaagggacaaagatcagttagacayaacacctgtgcagaacatctgaaatacaactacaygagcaaygaccatgacatttccaagggaacttctttsttttctaacaagatcaatcccaaattctgatttttctgtagagttggtattttctacagaaaactgaagcagaatgagttttccctacataagagtttgcaaaacataggtaaaaacccaaacataagtaaaaataccccccaaacacctccatgcatactgt

SEQ ID NO: 15834 - DNA, 600 bp, Chicken  19866894222654_3
attttagacggtgtacatatatatatataaacaaagtctatatgaaggagcttaaaatgacaatttggattttcgtcttaactagttaatttatgttggaactcattcttcatgcacatctttgaagaggcataagaaaaactgcagaaaggcctattattttaaacattatccctttaaatttggttataaccttgtctgactgccacccattccgctaycctcaactaccacrttctttattgcagttcagcaatgggtaacatagtaatgaaaaagggacaaagatcagttagacayaacacctgtgcagaacatctgaaatacaactacaygagcaaygaccatgacatttccaagggaacttctttsttttctaacaagatcaatcccaaattctgatttttctgtagagttggtattttctacagaaaactgaagcagaatgagttttccctacataagagtttgcaaaacataggtaaaaacccaaacataagtaaaaataccccccaaacacctccatgcatactgttctgttcactacatccaaaagcatcaactagcagttttttgggcctctgtatgcaaactgaccat

SEQ ID NO: 15835 - DNA, 600 bp, Chicken  19866894222654_4
gtctatatgaaggagcttaaaatgacaatttggattttcgtcttaactagttaatttatgttggaactcattcttcatgcacatctttgaagaggcataagaaaaactgcagaaaggcctattattttaaacattatccctttaaatttggttataaccttgtctgactgccacccattccgctaycctcaactaccacrttctttattgcagttcagcaatgggtaacatagtaatgaaaaagggacaaagatcagttagacayaacacctgtgcagaacatctgaaatacaactacaygagcaaygaccatgacatttccaagggaacttctttsttttctaacaagatcaatcccaaattctgatttttctgtagagttggtattttctacagaaaactgaagcagaatgagttttccctacataagagtttgcaaaacataggtaaaaacccaaacataagtaaaaataccccccaaacacctccatgcatactgttctgttcactacatccaaaagcatcaactagcagttttttgggcctctgtatgcaaactgaccatttatcactacgtttaaccttaatcaaccatatgca

SEQ ID NO: 15836 - DNA, 600 bp, Chicken  19866894222654_5
tgaaggagcttaaaatgacaatttggattttcgtcttaactagttaatttatgttggaactcattcttcatgcacatctttgaagaggcataagaaaaactgcagaaaggcctattattttaaacattatccctttaaatttggttataaccttgtctgactgccacccattccgctaycctcaactaccacrttctttattgcagttcagcaatgggtaacatagtaatgaaaaagggacaaagatcagttagacayaacacctgtgcagaacatctgaaatacaactacaygagcaaygaccatgacatttccaagggaacttctttsttttctaacaagatcaatcccaaattctgatttttctgtagagttggtattttctacagaaaactgaagcagaatgagttttccctacataagagtttgcaaaacataggtaaaaacccaaacataagtaaaaataccccccaaacacctccatgcatactgttctgttcactacatccaaaagcatcaactagcagttttttgggcctctgtatgcaaactgaccatttatcactacgtttaaccttaatcaaccatatgcaaagccct

SEQ ID NO: 15837 - DNA, 600 bp, Chicken  19866894222654_6
tcgtcttaactagttaatttatgttggaactcattcttcatgcacatctttgaagaggcataagaaaaactgcagaaaggcctattattttaaacattatccctttaaatttggttataaccttgtctgactgccacccattccgctaycctcaactaccacrttctttattgcagttcagcaatgggtaacatagtaatgaaaaagggacaaagatcagttagacayaacacctgtgcagaacatctgaaatacaactacaygagcaaygaccatgacatttccaagggaacttctttsttttctaacaagatcaatcccaaattctgatttttctgtagagttggtattttctacagaaaactgaagcagaatgagttttccctacataagagtttgcaaaacataggtaaaaacccaaacataagtaaaaataccccccaaacacctccatgcatactgttctgttcactacatccaaaagcatcaactagcagttttttgggcctctgtatgcaaactgaccatttatcactacgtttaaccttaatcaaccatatgcaaagccctttatttttcagtaacttagtaagtcactaa

SEQ ID NO: 15838 - DNA, 599 bp, Chicken  19866894222663_1
  misc_feature (1)..(33): n is any nucleotide
nnnnnnnnnnnnnnnnnnnnnnnnnnnnnnnnnttatggaacacagtgagaacagaacccaccatgaaagtgctaaataatgtaaccacttcattgatgttcccaagtaacttcaaaagtgtcagtgttatgggaacagagaaatacatccaacattccacccattacaaacagcttcttccagctttgtttgtgctggaataatcaccagcacagaagattgcaaacaccttgtgaaatccatccgctttcatcagctattggtgtaaagcaagagttctctgcaagatggattttttyctgaccttcacagaaagcagcttcaagaacttactaagaaatttaggaaggaacttcccagccccagtaggctaaagggagcacagtttgcaaaggacaccaggggtgtgaccagaaaacagaaggacraatctgtggtataaaacacattgtctcacaacacaggtcatctcatctgaagacttaccaastacatctcactccaataatctaaattacaacattttctcaaatgtcagcaatggcaaatctgaaaccaaaatatatccatgtttcctagaatgccccattttcttcag

SEQ ID NO: 15839 - DNA, 600 bp, Chicken  19866894222663_2
atgggaacagagaaatacatccaacattccacccattacaaacagcttcttccagctttgtttgtgctggaataatcaccagcacagaagattgcaaacaccttgtgaaatccatccgctttcatcagctattggtgtaaagcaagagttctctgcaagatggattttttyctgaccttcacagaaagcagcttcaagaacttactaagaaatttaggaaggaacttcccagccccagtaggctaaagggagcacagtttgcaaaggacaccaggggtgtgaccagaaaacagaaggacraatctgtggtataaaacacattgtctcacaacacaggtcatctcatctgaagacttaccaastacatctcactccaataatctaaattacaacattttctcaaatgtcagcaatggcaaatctgaaaccaaaatatatccatgtttcctagaatgccccattttcttcagcataaagagtggctttgaagagagataaggctattgctcccactwtgctgttgggcctaacaaaagtgtgcacaggtgaaggacacagtatacacccacgcatttctctaaggaagttgtagacagaaat

SEQ ID NO: 15840 - DNA, 600 bp, Chicken  19866894222663_3
tgtgctggaataatcaccagcacagaagattgcaaacaccttgtgaaatccatccgctttcatcagctattggtgtaaagcaagagttctctgcaagatggattttttyctgaccttcacagaaagcagcttcaagaacttactaagaaatttaggaaggaacttcccagccccagtaggctaaagggagcacagtttgcaaaggacaccaggggtgtgaccagaaaacagaaggacraatctgtggtataaaacacattgtctcacaacacaggtcatctcatctgaagacttaccaastacatctcactccaataatctaaattacaacattttctcaaatgtcagcaatggcaaatctgaaaccaaaatatatccatgtttcctagaatgccccattttcttcagcataaagagtggctttgaagagagataaggctattgctcccactwtgctgttgggcctaacaaaagtgtgcacaggtgaaggacacagtatacacccacgcatttctctaaggaagttgtagacagaaatgtggtaaccttggtcacaatgccctttcggtagggaactgcaaacagagctcataacaagtt

SEQ ID NO: 15841 - DNA, 600 bp, Chicken  19866894222663_4
aggaaggaacttcccagccccagtaggctaaagggagcacagtttgcaaaggacaccaggggtgtgaccagaaaacagaaggacraatctgtggtataaaacacattgtctcacaacacaggtcatctcatctgaagacttaccaastacatctcactccaataatctaaattacaacattttctcaaatgtcagcaatggcaaatctgaaaccaaaatatatccatgtttcctagaatgccccattttcttcagcataaagagtggctttgaagagagataaggctattgctcccactwtgctgttgggcctaacaaaagtgtgcacaggtgaaggacacagtatacacccacgcatttctctaaggaagttgtagacagaaatgtggtaaccttggtcacaatgccctttcggtagggaactgcaaacagagctcataacaagttattgcagctgtaaaacccacgtgctttggaggtttaccacagctccatgcaatacactcagcttcacctgtgcacatgggccgttgtgtggcagcaaaagctgcatgtgctgagcagctcctgctcaccacgaaggccccacactcagcccag

SEQ ID NO: 15842 - DNA, 600 bp, Chicken  19866894222676_1
actaagtactgggtgtttgtggaaactgaagaactgtattgtttgatttgtgggttctgaagggaatgggacaaacagttttgatggtataagtaagtgtaattgttaatggtatacagaaacttgattgagggtatgtggaagtgtaactgagggtatgagcagtggacaaaggaaaaagggttaaagagaaagtgagtttatctgcactggcatgagagtagcccccccacaccattcccttgcgagcagaactctcggagtgagtgctggagtcagagactgctgttgtaaacagcrttacttgcgaatggggggaggtggagagaatggggcactggcagtgagaatagccttcatgtgcagagatctaggaaacccaacattccagtgttagcactggaaacctctggagaggaggaggtgaaactgaaatgtaatgctagtactttatgtaatgatgagagtttggaaagtgaaaagtttgaggatgcaggctgaggaaggcaaatatgagcaaggtgtcacagggttgtcagaaccaaagagggtgagcaatatgaagaaaaaagactaattgagaaacagagatagtaagga

SEQ ID NO: 15843 - DNA, 599 bp, Chicken  19866894222681_1
  misc_feature (1)..(31): n is any nucleotide
nnnnnnnnnnnnnnnnnnnnnnnnnnnnnnngagccctgcagtgcaaacacccctttgtcatttgtcattttatcatttatactgctccagggcataacagcttagtatgaaagattttgtaatacaggagtagtttcatgttctatgtgaggactataacaaaaaatgtacttagtgggtattcagagtcatctcagaaatgagcagggagaaacttttttctgcactgggagagaaaactcacaaaccaactgaaagccaagtaaggaacaggaacacagagcactcagttacctttyctgcagccttcctggtcttctttatgcatgaggagatatggcggggattcagggaagaagggcagagtgaacagctggaccagtgcaggaattccacaggaggccatcagcatgggccaccgggactggctgcccagcagctccctggcaggartaaaacaagtgtgtgtagaataaaagttcattgcattggtttttgagaagagaaataaatggatggaaaagcagcagaagaagcaaaagatagaaggatccagatatgaactgggtcggaaatcagttgtactatacctttgtcc

SEQ ID NO: 15844 - DNA, 600 bp, Chicken  19866894222681_2
ctataacaaaaaatgtacttagtgggtattcagagtcatctcagaaatgagcagggagaaacttttttctgcactgggagagaaaactcacaaaccaactgaaagccaagtaaggaacaggaacacagagcactcagttacctttyctgcagccttcctggtcttctttatgcatgaggagatatggcggggattcagggaagaagggcagagtgaacagctggaccagtgcaggaattccacaggaggccatcagcatgggccaccgggactggctgcccagcagctccctggcaggartaaaacaagtgtgtgtagaataaaagttcattgcattggtttttgagaagagaaataaatggatggaaaagcagcagaagaagcaaaagatagaaggatccagatatgaactgggtcggaaatcagttgtactatacctttgtcctgcaatttgccctacggcttttcccagtgaccaaaagaaagaggcagtagagtttgcaaatccacgtagcttcctaggggaaatttccccaacatactgatgatgcagaggagtagaaaagccttgaggtgaagaggaaattatgggagagaaga

SEQ ID NO: 15845 - DNA, 600 bp, Chicken  19866894222683_1
gagtgaaggggaatggaaaggaatgcaagacaaaccctattaaatgattagtaaaatagtagaggtgaatgaggatgtttctgcagaaaggtgcacagaaaagacgatgagaatggtaaggggtgaatcaggagaaatgatggcagggaaatcagggataacatttctggaaaagaagcactgctgatagtcgtggctgactggcaggtctaggaggatatgaattgcacattggttctgatcctcatcacagtgtttcactgcaagagttctcactgagaatggtgtcggtggagatcragggctggaaattgggttagacagactacagaaggacatctcagggataggatcttcaggctacagtttttactgtcaccggaggtttaaatgtagtacttattaagatttgagtaatagcctgactgcggctattatactatgcctgcacacacgatgagtgttagaggttgttggcaaaaactagtttacaaycaaatgggtagatggctttgtgtgactaacatttaaatcgttatcaaggagcatatcagagtcttaattctgggtactgggaaatgtttgtgagcagcgtgtttt

SEQ ID NO: 15846 - DNA, 600 bp, Chicken  19866894222683_2
gctgactggcaggtctaggaggatatgaattgcacattggttctgatcctcatcacagtgtttcactgcaagagttctcactgagaatggtgtcggtggagatcragggctggaaattgggttagacagactacagaaggacatctcagggataggatcttcaggctacagtttttactgtcaccggaggtttaaatgtagtacttattaagatttgagtaatagcctgactgcggctattatactatgcctgcacacacgatgagtgttagaggttgttggcaaaaactagtttacaaycaaatgggtagatggctttgtgtgactaacatttaaatcgttatcaaggagcatatcagagtcttaattctgggtactgggaaatgtttgtgagcagcgtgttttcaaaagtgtcttttgaggctcagtttcaatagtagtaaatttatgaagttaagctcttaatttggattttatttgctttctttgtttactcattgtttgaagttgctctttgtcgtttcttaactatggttgaggcagagctcaaagaaacttcaaaagtaatttttcatagtttgatttctgtaaaaataagct

SEQ ID NO: 15847 - DNA, 600 bp, Chicken  19866894222684_1
agacaaacagtagtttgctttactgtggaaagatctgtgattttagatttctgaaatccaattattctgtatttctttctcactgctttcacagtcttccatattgcccacttgtattttttctgagtcatacctacagtaattggaaaacaagtttagcttctttgatggaaaatctaggcaaattgaaatacagcacattgcttctctaatgtccaaactttgaacaatggccatgcagtttatcacacccattacattttattgggtttgctaatatgcagtacttctcttcaaggyattactgtagaagaaaacattaggctgtctaatgggccatttacaaatactgatttataaaatatcatacacatgtgcaagcaaccacaaagatgtctgcatggagaacaaccaattctataggttaaatggacttctagcccttttttttccctttttggttgttcaaaaataaatcctccaaaacacctatcttactcctggtcactgcaatatctccagcaaccatttgtcttgcatccatttcattacatcgtttccttacttttgaagcgcaaggagatcaaactgacctagtca

SEQ ID NO: 15848 - DNA, 600 bp, Chicken  19866894222688_1
aaacaaccctcttagtgagggcactttttagacagtgcatcatatgactgaactttatcccagggtgatattgtcagatagccttcatatctgtttctaactgttaccttcaccagccattctgcaatagaaaggtctcagtggagttatgttgtgctctgaaagtgtagaaaagtagtgaagatgcaggtggccgaagatgaaaattcaggccttctagagggcttaggagaaaaagacaaatgggtaaatcatagaacgtggccattggagaaatcactgaaacaggtctggaaaagrggaagagagaagctgaagaaagcacatcaattgaagttccactttatctcagggctgctgggttagaacagaactcatctcttaaaatctaaactgctaatttatttgtaagtgtgaatttgtggattcctaacatacttggcttctttcttgctagctgggggcccatggcttgaggcttgacaagaagtccccttactgttggcctgcttccatcatccctaaagcagcattaaatatttttaatgaataaatcctttctgttgccaaatgacctttactgagattcaatgtgagcta

SEQ ID NO: 15849 - DNA, 600 bp, Chicken  19866894222703_1
ccaaattaaagaattccacttgcaacaagaaaagtggctcatgcgctgactgctcaaataaactgctgcaagacaggagcaccgaacaactattagtacagatccagggagggaaagcagaagggagcagggggaggtcggggaagggctgcatgtttgtgtgaggttcttttaagtacagctagctccattttttccccaaattgaaacaaccaagtttcaaaagtgtcagatattccatctcttacgtttacacagggcagaagaaagcctcatctcagtttcccccatttaatagayaaaaataagagaacccacaaggacagcctagtatttctgtctctcacccctcactacaaaattytcttcttaattctatcacttctgccaaacaagcagagctgagttttactttattrcatcccttcaggggacacttccataatacagtcttgtttttattccttttttatctcataagcatgaagaaatgcatgttgccctctttacagtagttatactatgacttggaaaagcaggagaagcagccacacaagaataaggttttgctttttcaacttctcccttccacccccacct

SEQ ID NO: 15850 - DNA, 600 bp, Chicken  19866894222703_2
gctgcaagacaggagcaccgaacaactattagtacagatccagggagggaaagcagaagggagcagggggaggtcggggaagggctgcatgtttgtgtgaggttcttttaagtacagctagctccattttttccccaaattgaaacaaccaagtttcaaaagtgtcagatattccatctcttacgtttacacagggcagaagaaagcctcatctcagtttcccccatttaatagayaaaaataagagaacccacaaggacagcctagtatttctgtctctcacccctcactacaaaattytcttcttaattctatcacttctgccaaacaagcagagctgagttttactttattrcatcccttcaggggacacttccataatacagtcttgtttttattccttttttatctcataagcatgaagaaatgcatgttgccctctttacagtagttatactatgacttggaaaagcaggagaagcagccacacaagaataaggttttgctttttcaacttctcccttccacccccacctcccccttcaaaagagtctggtccacctacaaagcagcactgtgaaaaaaacagtttagaggtat

SEQ ID NO: 15851 - DNA, 600 bp, Chicken  19866894222703_3
gaagggagcagggggaggtcggggaagggctgcatgtttgtgtgaggttcttttaagtacagctagctccattttttccccaaattgaaacaaccaagtttcaaaagtgtcagatattccatctcttacgtttacacagggcagaagaaagcctcatctcagtttcccccatttaatagayaaaaataagagaacccacaaggacagcctagtatttctgtctctcacccctcactacaaaattytcttcttaattctatcacttctgccaaacaagcagagctgagttttactttattrcatcccttcaggggacacttccataatacagtcttgtttttattccttttttatctcataagcatgaagaaatgcatgttgccctctttacagtagttatactatgacttggaaaagcaggagaagcagccacacaagaataaggttttgctttttcaacttctcccttccacccccacctcccccttcaaaagagtctggtccacctacaaagcagcactgtgaaaaaaacagtttagaggtatgcaagagagtcagggrgttaattccttcagttttggcttctgcaaattctccctc

SEQ ID NO: 15852 - DNA, 600 bp, Chicken  19866894222703_4
aaaataagagaacccacaaggacagcctagtatttctgtctctcacccctcactacaaaattytcttcttaattctatcacttctgccaaacaagcagagctgagttttactttattrcatcccttcaggggacacttccataatacagtcttgtttttattccttttttatctcataagcatgaagaaatgcatgttgccctctttacagtagttatactatgacttggaaaagcaggagaagcagccacacaagaataaggttttgctttttcaacttctcccttccacccccacctrccccttcaaaagagtctggtccacctacaaagcagcactgtgaaaaaaacagtttagaggtatgcaagagagtcagggrgttaattccttcagttttggcttctgcaaattctccctcccctaaacccacttatgctccttaagtttcagtctaaagaggatcatctttgccatttcagacttcacaacatgcgtacaatctcagtatccctcctgagccaaagatgaccagttgaatgaggagcaccagagagctctgacaggtcacaaagaaaactggcttaggcaggcaagcggaag

SEQ ID NO: 15853 - DNA, 600 bp, Chicken  19866894222703_5
acttctgccaaacaagcagagctgagttttactttattrcatcccttcaggggacacttccataatacagtcttgtttttattccttttttatctcataagcatgaagaaatgcatgttgccctctttacagtagttatactatgacttggaaaagcaggagaagcagccacacaagaataaggttttgctttttcaacttctcccttccacccccacctcccccttcaaaagagtctggtccacctacaaagcagcactgtgaaaaaaacagtttagaggtatgcaagagagtcagggrgttaattccttcagttttggcttctgcaaattctccctcccctaaacccacttatgctccttaagtttcagtctaaagaggatcatctttgccatttcagacttcacaacatgcgtacaatctcagtatccctcctgagccaaagatgaccagttgaatgaggagcaccagagagctctgacaggtcacaaagaaaactggcttaggcaggcaagcggaagaaaaaaagcttcccacaaaaatcaatgcaaagggaaacttaaaatcttcaagggaaaaaaaatatatatatattacata

SEQ ID NO: 15854 - DNA, 600 bp, Chicken  19866894222705_1
tgtgtgtgcctccaggagttggccctctgccacaggcactgtgtggctgccaggggccagcagagccctgcttggatgcttcctctccatcccactcactctccagctgttcagcttcccatcgtatccccactctcatcgctcatcgtttctccctcgataaaggctttttaataacatctgacatttcagacatcatttcctttcttccactccaattttcttcctgttcttcataactaggaagcctttctttgtcctcagccagaggggaggtgtctgttattgctgctgttatcrtattccaggaggttttatcgggttaatgaatatcctctcttttgtgtcacttccactcccatcttctttagcccagtttctcaaggaaatgaaatggctcgtgttggygcagccttttccctcaccccatcactgtcaggcatgatggtctcatagcaaayccaatgggatagagagctcagaactctcccaggcctgtgaccacaggagaggtggacagacagacaatacctggcctttgtgtcccmagccctgttagctgggaaacaggctgcatcacccagctgctttactgcccag

SEQ ID NO: 15855 - DNA, 600 bp, Chicken  19866894222705_2
gttcagcttcccatcgtatccccactctcatcgctcatcgtttctccctcgataaaggctttttaataacatctgacatttcagacatcatttcctttcttccactccaattttcttcctgttcttcataactaggaagcctttctttgtcctcagccagaggggaggtgtctgttattgctgctgttatcrtattccaggaggttttatcgggttaatgaatatcctctcttttgtgtcacttccactcccatcttctttagcccagtttctcaaggaaatgaaatggctcgtgttggygcagccttttccctcaccccatcactgtcaggcatgatggtctcatagcaaayccaatgggatagagagctcagaactctcccaggcctgtgaccacaggagaggtggacagacagacaatacctggcctttgtgtcccmagccctgttagctgggaaacaggctgcatcacccagctgctttactgcccagctgctttgtgtgctcaggcagggaaccaggggaggagagctgctgtagcctcacaaatagggcattgggctcattttgagacacccaggctgtgtttccagatgcaga

SEQ ID NO: 15856 - DNA, 600 bp, Chicken  19866894222705_3
aaaggctttttaataacatctgacatttcagacatcatttcctttcttccactccaattttcttcctgttcttcataactaggaagcctttctttgtcctcagccagaggggaggtgtctgttattgctgctgttatcrtattccaggaggttttatcgggttaatgaatatcctctcttttgtgtcacttccactcccatcttctttagcccagtttctcaaggaaatgaaatggctcgtgttggygcagccttttccctcaccccatcactgtcaggcatgatggtctcatagcaaayccaatgggatagagagctcagaactctcccaggcctgtgaccacaggagaggtggacagacagacaatacctggcctttgtgtcccmagccctgttagctgggaaacaggctgcatcacccagctgctttactgcccagctgctttgtgtgctcaggcagggaaccaggggaggagagctgctgtagcctcacaaatagggcattgggctcattttgagacacccaggctgtgtttccagatgcagactcacgcatggctgtgctcgaggactcctcttgcagcggcaagagctgcagct

SEQ ID NO: 15857 - DNA, 600 bp, Chicken  19866894222705_4
ctttctttgtcctcagccagaggggaggtgtctgttattgctgctgttatcrtattccaggaggttttatcgggttaatgaatatcctctcttttgtgtcacttccactcccatcttctttagcccagtttctcaaggaaatgaaatggctcgtgttggygcagccttttccctcaccccatcactgtcaggcatgatggtctcatagcaaayccaatgggatagagagctcagaactctcccaggcctgtgaccacaggagaggtggacagacagacaatacctggcctttgtgtcccmagccctgttagctgggaaacaggctgcatcacccagctgctttactgcccagctgctttgtgtgctcaggcagggaaccaggggaggagagctgctgtagcctcacaaatagggcattgggctcattttgagacacccaggctgtgtttccagatgcagactcacgcatggctgtgctcgaggactcctcttgcagcggcaagagctgcagctgctttaagctgctgtgctgtgagctgcagtgacagaggagccagcagagacttcccacagtggccccagctcccattgcagcaggga

SEQ ID NO: 15858 - DNA, 599 bp, Chicken  19866894222708_1
  misc_feature (1)..(20): n is any nucleotide
nnnnnnnnnnnnnnnnnnnnaagtcagagaattcattgcagtaatatgccattgatagtaattttgccataaaatgaaagtgtttattttcagtttgtagcttttaataaaataattcctgttcagggaatttacctacaaaagttatttttctctatatgcagcaaatctttctagttatccagttactcctgggaaaaccagctacaagtgaaatgtaatgatatgtttttaaaaacaaagactgatcctctttttgtaaaagataagtcattaatgacattttaattatgtaattcstttttagactcataaattcaatgctgtttctatatttcatgaggaaattgttatgatacttctgaaaacaacttggtaatatatttgctcagtgatcacccacaatatgtctgaaaattcggagtagagttttaatrcatgaacttctgcataaaacagatatggaaataatatgaaaattgcacagctggrtaagagtgacaaaatacatattttgactgtggataaattgttccccccatgggaggtcaggaatagctgtttcatttgaaaactgagtagaatgaaggtaccagacg

SEQ ID NO: 15859 - DNA, 600 bp, Chicken  19866894222708_2
acaaaagttatttttctctatatgcagcaaatctttctagttatccagttactcctgggaaaaccagctacaagtgaaatgtaatgatatgtttttaaaaacaaagactgatcctctttttgtaaaagataagtcattaatgacattttaattatgtaattcstttttagactcataaattcaatgctgtttctatatttcatgaggaaattgttatgatacttctgaaaacaacttggtaatatatttgctcagtgatcacccacaatatgtctgaaaattcggagtagagttttaatrcatgaacttctgcataaaacagatatggaaataatatgaaaattgcacagctggrtaagagtgacaaaatacatattttgactgtggataaattgttccccccatgggaggtcaggaatagctgtttcatttgaaaactgagtagaatgaaggtaccagacgctgtgcaggtggttttactaaaaactttaacataaacaatgagatcttcaagctctggatgctagatttcttttccatgaaaagggcaaactgcctttcccaactgaaaagcataaagtgagtctatgtgagaaaagc

SEQ ID NO: 15860 - DNA, 600 bp, Chicken  19866894222708_3
tgggaaaaccagctacaagtgaaatgtaatgatatgtttttaaaaacaaagactgatcctctttttgtaaaagataagtcattaatgacattttaattatgtaattcstttttagactcataaattcaatgctgtttctatatttcatgaggaaattgttatgatacttctgaaaacaacttggtaatatatttgctcagtgatcacccacaatatgtctgaaaattcggagtagagttttaatrcatgaacttctgcataaaacagatatggaaataatatgaaaattgcacagctggrtaagagtgacaaaatacatattttgactgtggataaattgttccccccatgggaggtcaggaatagctgtttcatttgaaaactgagtagaatgaaggtaccagacgctgtgcaggtggttttactaaaaactttaacataaacaatgagatcttcaagctctggatgctagatttcttttccatgaaaagggcaaactgcctttcccaactgaaaagcataaagtgagtctatgtgagaaaagctttctctaggtttagcagaagggaagttctgggacaggatagtactggctgagac

SEQ ID NO: 15861 - DNA, 599 bp, Chicken  19866894222709_1
  misc_feature (1)..(11): n is any nucleotide
nnnnnnnnnnntgaggtccttttaacccggccttctatcattctctgatcccacctcatccacccccaagtatgaggcagcagccaagtcatttaaatcttccatacctctctttccctccttttgtgatttaaaatcattaaaaataaaagaaacagagaatggattgggttggagagcaaattcgagaccactgagttccaacccctgccgtgggccaggggttggaactggaacccatccaacctggccttgagcacctccagggatgggtcaagaagttaacgaggattccagcaygcaacccacagacgttccttcgagaactcaagcttctactcgaaagcgccaggcacgggaccgcaccacgaaagacayctaacagctctgaccttggtcaagtactccactttcaggttgtcgatcatgaggtttttctgcgacagctctatcttcagcagctgcaggttgtgcagcagctccttgcgctcgatcagctgcctggtgacccgcgcygcgccctccctctcctcggaggacgacagctcgtcrgtggggaccgtggtttccaagctgatgtcttccgattccagggagct

SEQ ID NO: 15862 - DNA, 600 bp, Chicken  19866894222709_2
agcagccaagtcatttaaatcttccatacctctctttccctccttttgtgatttaaaatcattaaaaataaaagaaacagagaatggattgggttggagagcaaattcgagaccactgagttccaacccctgccgtgggccaggggttggaactggaacccatccaacctggccttgagcacctccagggatgggtcaagaagttaacgaggattccagcaygcaacccacagacgttccttcgagaactcaagcttctactcgaaagcgccaggcacgggaccgcaccacgaaagacayctaacagctctgaccttggtcaagtactccactttcaggttgtcgatcatgaggtttttctgcgacagctctatcttcagcagctgcaggttgtgcagcagctccttgcgctcgatcagctgcctggtgacccgcgcygcgccctccctctcctcggaggacgacagctcgtcrgtggggaccgtggtttccaagctgatgtcttccgattccagggagctgggagatgttcaccttccggccttccttggagcttttacgggacattttctcacaccgtttgcttcttctagttaccag

SEQ ID NO: 15863 - DNA, 583 bp, Chicken  19866894222709_3
gccaggggttggaactggaacccatccaacctggccttgagcacctccagggatgggtcaagaagttaacgaggattccagcaygcaacccacagacgttccttcgagaactcaagcttctactcgaaagcgccaggcacgggaccgcaccacgaaagacayctaacagctctgaccttggtcaagtactccactttcaggttgtcgatcatgaggtttttctgcgacagctctatcttcagcagctgcaggttgtgcagcagctccttgcgctcgatcagctgcctggtgacccgcgcygcgccctccctctcctcggaggacgacagctcgtcrgtggggaccgtggtttccaagctgatgtcttccgattccagggagctgggagatgttcaccttccggccttccttggagcttttacgggacattttctcacaccgtttgcttcttctagttaccagtcgccctgaagagccaacggcggaaatcaaaaccacgaaggcgttacgccgcgatcgatgaaaattaaccaaacgagactgctaagcgaaactcctcacgtatcgttcccctcccctgaag

SEQ ID NO: 15864 - DNA, 547 bp, Chicken  19866894222709_4
ttgagcacctccagggatgggtcaagaagttaacgaggattccagcaygcaacccacagacgttccttcgagaactcaagcttctactcgaaagcgccaggcacgggaccgcaccacgaaagacayctaacagctctgaccttggtcaagtactccactttcaggttgtcgatcatgaggtttttctgcgacagctctatcttcagcagctgcaggttgtgcagcagctccttgcgctcgatcagctgcctggtgacccgcgcygcgccctccctctcctcggaggacgacagctcgtcrgtggggaccgtggtttccaagctgatgtcttccgattccagggagctgggagatgttcaccttccggccttccttggagcttttacgggacattttctcacaccgtttgcttcttctagttaccagtcgccctgaagagccaacggcggaaatcaaaaccacgaaggcgttacgccgcgatcgatgaaaattaaccaaacgagactgctaagcgaaactcctcacgtatcgttcccctcccctgaag

SEQ ID NO: 15865 - DNA, 600 bp, Chicken  19866894222716_1
agtacagaaataaggaaactagcagaaaattttttttccccccatgtcgtaagtaggaaaatcaaagaaggatacaggaattgggctgaaaggagatgagaaaggtgggagtagatggtaggagaatcccattgagtacatctcattgggcaactgcatggcttacttttgcctggtaatttgcctccaggttgaaacaaatcacaatatcctttggacaggaaatttcaaagaggagagaagccactttgacaataacttgactcctcaggcacttcagatttggttatggtgtatgtygctgttatgaattagccaagtcaaggatccagaggattaaccttcaccttagcagggatattgtgaagtggctgataacagttcactgtaccattcatgtatgccaactgcaatggcattaagtatgaagggaacttacaaggatggaaaagcctccagccaggaatctcatcctgcttctttgcctgaggatatctagtccagataggcaatctaaatccccactatggaagtgttgacacagaggatggaaacttcagctaacatttagctgaagcttcactgtgtcagcaaattcag

SEQ ID NO: 15866 - DNA, 600 bp, Chicken  19866894222718_1
atatcatcaagccccaagacaacaaggaaaagtatgaacacaccgtaccaccaagtacctttcctctcctcactttttctgagctgactttaagtagaaatgcagattaggaagggtagctattgcttgttgagggcaaagtgaggctaattctaaatatcattttttccccagtcagtattccagcaaggttattttattattatggggaagcatagaattatactcttttcaccactgtcactcaaattgttcagctcttcctcttaaataaagaaatggacagccttctgtggtgcktktttatttatttttaataccttgagaatcagttaactgttttagacttgtcctatttcttgtaatctccacttctatcagattaactttgtgcaagcttaacatttgggaaaaaaaataagcttgaggcctaccagctccctttcctcccactccctcctccactgcatacactcaccacttgtttttagccaagaagcagtgctctacagctccagttgctatgttgttcagattaagactgccagtaaaacattttcatctggcttctctgtcatacaagaagttgtaaaaataaaa

SEQ ID NO: 15867 - DNA, 600 bp, Chicken  19866894222718_2
atcatcaagccccaagacaacaaggaaaagtatgaacacaccgtaccaccaagtacctttcctctcctcactttttctgagctgactttaagtagaaatgcagattaggaagggtagctattgcttgttgagggcaaagtgaggctaattctaaatatcattttttccccagtcagtattccagcaaggttattttattattatggggaagcatagaattatactcttttcaccactgtcactcaaattgttcagctcttcctcttaaataaagaaatggacagccttctgtggtgcktktttatttatttttaataccttgagaatcagttaactgttttagacttgtcctatttcttgtaatctccacttctatcagattaactttgtgcaagcttaacatttgggaaaaaaaataagcttgaggcctaccagctccctttcctcccactccctcctccactgcatacactcaccacttgtttttagccaagaagcagtgctctacagctccagttgctatgttgttcagattaagactgccagtaaaacattttcatctggcttctctgtcatacaagaagttgtaaaaataaaagt

SEQ ID NO: 15868 - DNA, 600 bp, Chicken  19866894222720_1
tttctgattggttgtgaataccaggaggaggaaagatactcatcagctctgatcccttaatctagttttatattaactcctgcagatcacgatgaaccttgccttggcttaatgccacactgcacaggtctgacacacaacctgctctgacgaggctccagttcctgctctctggtaggattattatttctaatcctactcacagccactcagccacaactactgaacctaaaaggactgttacctttataactcggaacagtacctgacactgaatgctttgatatgaacagactcacyggagctgtgagcctggtctccatttgccagtagagctggcaatagccctcccagatcccacwttaaacgtgccctaaaatacattaagtacttcctaatattactcatccaactaaacagacaatgtgattgccaccaagatactgtgttaatctgragaagaacattaaagaatttggttcacccagaaacagaggctcaaagcattccctatcccaaaggtatacaaagttttaagggcttttaaccacccgattttacatcaactgctcaatgcccagcaagcatgcagcaaccctg

SEQ ID NO: 15869 - DNA, 600 bp, Chicken  19866894222720_2
tagttttatattaactcctgcagatcacgatgaaccttgccttggcttaatgccacactgcacaggtctgacacacaacctgctctgacgaggctccagttcctgctctctggtaggattattatttctaatcctactcacagccactcagccacaactactgaacctaaaaggactgttacctttataactcggaacagtacctgacactgaatgctttgatatgaacagactcacyggagctgtgagcctggtctccatttgccagtagagctggcaatagccctcccagatcccacwttaaacgtgccctaaaatacattaagtacttcctaatattactcatccaactaaacagacaatgtgattgccaccaagatactgtgttaatctgragaagaacattaaagaatttggttcacccagaaacagaggctcaaagcattccctatcccaaaggtatacaaagttttaagggcttttaaccacccgattttacatcaactgctcaatgcccagcaagcatgcagcaaccctgggaggggtatcccataatatccagaggtttgtcctgttattcattaacctctccatccttga

SEQ ID NO: 15870 - DNA, 538 bp, Chicken  19866894222720_3
ccagttcctgctctctggtaggattattatttctaatcctactcacagccactcagccacaactactgaacctaaaaggactgttacctttataactcggaacagtacctgacactgaatgctttgatatgaacagactcacyggagctgtgagcctggtctccatttgccagtagagctggcaatagccctcccagatcccacwttaaacgtgccctaaaatacattaagtacttcctaatattactcatccaactaaacagacaatgtgattgccaccaagatactgtgttaatctgragaagaacattaaagaatttggttcacccagaaacagaggctcaaagcattccctatcccaaaggtatacaaagttttaagggcttttaaccacccgattttacatcaactgctcaatgcccagcaagcatgcagcaaccctgggaggggtatcccataatatccagaggtttgtcctgttattcattaacctctccatccttgacatgcagttcatacacctgcaacttctctgaca

SEQ ID NO: 15871 - DNA, 588 bp, Chicken  19866894222721_1
aatgaggtcagatcaaatagttccttattaaaaaaaaaaaatagactctgtacacattgtgtcccaaagtgcacaatgtactgtatacttcacagtaagttgcctcaagtcctgtgactagttctttccctgtgcaagtttaatatctttgttagtagcaagttactgctagtaaagcttaagagtactcagtaattggaagtcatttctaacccagtatttgtcagtgattctgttaaggtctgattagtataactggatcactgtaaaggagtggatctgtgctgtttgcctttgatwgggttaatacagaacaagtctgacattcaaaatacagcctcacactcattttcagaagaaacagaaaactgtcctaggatcctrgaaatataagggagtctagttgtcacgtgaactgtttctgtgcctaatagcaaacatgacycaggatatgtgtgtttgacgtgactcctacaatgttgtgtatatctcagtagcttacagctaaaaaagcaaactgaaagtaagagagaattcagtagaacatgtaaacaaatctgaaaaaaaaaaaaaaatcttcctggcaat

SEQ ID NO: 15872 - DNA, 504 bp, Chicken  19866894222721_2
atacttcacagtaagttgcctcaagtcctgtgactagttctttccctgtgcaagtttaatatctttgttagtagcaagttactgctagtaaagcttaagagtactcagtaattggaagtcatttctaacccagtatttgtcagtgattctgttaaggtctgattagtataactggatcactgtaaaggagtggatctgtgctgtttgcctttgatwgggttaatacagaacaagtctgacattcaaaatacagcctcacactcattttcagaagaaacagaaaactgtcctaggatcctrgaaatataagggagtctagttgtcacgtgaactgtttctgtgcctaatagcaaacatgacycaggatatgtgtgtttgacgtgactcctacaatgttgtgtatatctcagtagcttacagctaaaaaagcaaactgaaagtaagagagaattcagtagaacatgtaaacaaatctgaaaaaaaaaaaaaaatcttcctggcaat

SEQ ID NO: 15873 - DNA, 443 bp, Chicken  19866894222721_3
tctttgttagtagcaagttactgctagtaaagcttaagagtactcagtaattggaagtcatttctaacccagtatttgtcagtgattctgttaaggtctgattagtataactggatcactgtaaaggagtggatctgtgctgtttgcctttgatwgggttaatacagaacaagtctgacattcaaaatacagcctcacactcattttcagaagaaacagaaaactgtcctaggatcctrgaaatataagggagtctagttgtcacgtgaactgtttctgtgcctaatagcaaacatgacycaggatatgtgtgtttgacgtgactcctacaatgttgtgtatatctcagtagcttacagctaaaaaagcaaactgaaagtaagagagaattcagtagaacatgtaaacaaatctgaaaaaaaaaaaaaaatcttcctggcaat

SEQ ID NO: 15874 - DNA, 599 bp, Chicken  19866894222722_1
  misc_feature (1)..(142): n is any nucleotide
nnnnnnnnnnnnnnnnnnnnnnnnnnnnnnnnnnnnnnnnnnnnnnnnnnnnnnnnnnnnnnnnnnnnnnnnnnnnnnnnnnnnnnnnnnnnnnnnnnnnnnnnnnnnnnnnnnnnnnnnnnnnnnnnnnnnnnnnnnnnnnaacaaaccccagaggatcaaaacttcctttaataaagttctgtggtctccaaacagcagaaaggtgatgccagacctctccaccaagcactaaatgctgggatgagcccttcctccccaaccaatcctaccgctcagccaactcctgtcctgctttgrgagagagaacagatcacagagacatcaaagccacctcctaagcaccagagctgccacaggtctcgccgcaggcgctgctctgcccycagcctcagcccaagcccaggcccacctggggaaaagactaaaggagaagtgctcaggaactgagctctggaggactccgttattggccctacctgaaggaaaccagggcctgaaggaaaacctcaggagagatcacaacatttgtcaagtgtagccagaaaagcagtagctcgagtaccttatctgcaaggcgcaaaacccctatggtctga

SEQ ID NO: 15875 - DNA, 599 bp, Chicken  19866894222722_2
  misc_feature (1)..(56): n is any nucleotide
nnnnnnnnnnnnnnnnnnnnnnnnnnnnnnnnnnnnnnnnnnnnnnnnnnnnnnnnaacaaaccccagaggatcaaaacttcctttaataaagttctgtggtctccaaacagcagaaaggtgatgccagacctctccaccaagcactaaatgctgggatgagcccttcctccccaaccaatcctaccgctcagccaactcctgtcctgctttgrgagagagaacagatcacagagacatcaaagccacctcctaagcaccagagctgccacaggtctcgccgcaggcgctgctctgcccycagcctcagcccaagcccaggcccacctggggaaaagactaaaggagaagtgctcaggaactgagctctggaggactccgttattggccctacctgaaggaaaccagggcctgaaggaaaacctcaggagagatcacaacatttgtcaagtgtagccagaaaagcagtagctcgagtaccttatctgcaaggcgcaaaacccctatggtctgacacgaggataacaagaaggacaatgtcactttggtagagttagatgctactgacccatgaaacctttcctccaccacctgctccca

SEQ ID NO: 15876 - DNA, 600 bp, Chicken  19866894222723_1
gcactgttttacagctgaagaaccaaaccccttattgcatgaaggcataagataagctgggcactacccaagtcagagagaacatctgatggagaaagctagttcaatttcaacccgtcaggctggtgccttgtctagagctgacatctgcatcacaccagcaggtaggaccagaacagacactgcttttcagaaagacctgggctcagtgttccgctaagctctgctgagtgcgttttgccttgctgtactgtggtgttagcagacaaaggtttccaaaagccctgcagcacttccacrtacttgttggggtacttgcggaagatgtccctgatgaccacaatggcctcctggacgacgtagttgaccttggtctgaatgaggtctagcagtgtgctcacacagcgctccgcggattgctggaagaagaacagaataagacaattaaaacaagatgaagaaatctttctctcacagcacgtactgagaaacctgggatgcgtgtgaaaaagggccaataggggaaaaataaaagcactatggctaccaactcagtacatatccaaaaaaaaaaacctgcaaggtgatagcagtctatga

SEQ ID NO: 15877 - DNA, 599 bp, Chicken  19866894222730_1
  misc_feature (1)..(104): n is any nucleotide
nnnnnnnnnnnnnnnnnnnnnnnnnnnnnnnnnnnnnnnnnnnnnnnnnnnnnnnnnnnnnnnnnnnnnnnnnnnnnnnnnnnnnnnnnnnnnnnnnnnnnnnnctcttcctcaacaagaaagacctatttgccgagaagatcaagaagtctcccctgacctctgcttccctgagtacgcaggtaggtgtggggcttgcagctcagggctggggaggggcaaggatgctgaggcacctccagggatgcaccagccctgggcattccttggggtcttgtgcacgtttggtgaattcttgcrgcgagcagcggggggttggagcgctcttggtgcattccaagtgtggaaagctctgtgctctgaagcgctgtgaacaccttcaccagcatttctgctgcttgctgtaatgcggttctcttcctgcctatggggctcccaacatgctcactggccatgggtcactcatcctctccccatgcaacaccagacccatggcgcggccgttgggttgtctgcagtcacccaaggggatgggccaccattggcatggaaaagaccaggccaatgaaggctgtggtcagggtgctcctgtgcttggc

SEQ ID NO: 15878 - DNA, 599 bp, Chicken  19866894222747_1
  misc_feature (1)..(119): n is any nucleotide
nnnnnnnnnnnnnnnnnnnnnnnnnnnnnnnnnnnnnnnnnnnnnnnnnnnnnnnnnnnnnnnnnnnnnnnnnnnnnnnnnnnnnnnnnnnnnnnnnnnnnnnnnnnnnnnnnnnnnnncttccgccctgcagatgcctggaagagataaggcagagaattagggaaaaagtacaaattatcagtttttttaaaaaaataaaatgtacaaacttaaattcatcatctcctttcaaccctacaatttctgtcagcaccctatacttaagcatgccctgtgctctttaaattactagcaagrttaagagtttattatatagtgaatatatatgtacctacattagaaccttctgttgaaggatggcaattttatacttattatagcctacaaatatagcataaatgaaaatcacacctgagttctctcataatccttccgtgcaatgaaatttagcctggmagactggccatctccaccccaaactgccaggtatgatgtccgaacaccactgctctgttatttctcttcatggtctttacacctatgaaggcagtccctcaaaaaggccagcccactgcagaaattggggtgggtacatt

SEQ ID NO: 15879 - DNA, 600 bp, Chicken  19866894222747_2
ttagggaaaaagtacaaattatcagtttttttaaaaaaataaaatgtacaaacttaaattcatcatctcctttcaaccctacaatttctgtcagcaccctatacttaagcatgccctgtgctctttaaattactagcaagrttaagagtttattatatagtgaatatatatgtacctacattagaaccttctgttgaaggatggcaattttatacttattatagcctacaaatatagcataaatgaaaatcacacctgagttctctcataatccttccgtgcaatgaaatttagcctggmagactggccatctccaccccaaactgccaggtatgatgtccgaacaccactgctctgttatttctcttcatggtctttacacctatgaaggcagtccctcaaaaaggccagcccactgcagaaattggggtgggtacatttccaggcagtcccttcaggactggtatcttcccagggccaccttgggaactaaggttagtacgtaatactgccctgatgaggtagtctatcttcttaacggaggttgaatgttagatagtagattaaaaaataatcatactgacctcactcacatctgca

SEQ ID NO: 15880 - DNA, 600 bp, Chicken  19866894222752_1
aaatgcaccactcactgcctcacagtgctcacatccactgtttcgtctccataaatgtgcagcaaccatcgatgaatgtcagtgggtgccattttttctacatagaggagttcagtgatacacctttgcttcatacatacttccatatcagatgccattgtgtcagactgccgctctgctgccatctgtcacacagcaacaacatgtaatgggatattggtgggaaggttcaacctctactgctgtaccaccagtgtccacctctgacatagtgagccaacagaataaaacaagaggcgytatttacagagcagccctcatagactagaaaaaatggttaatgtatttaaatcacaaaacccattttcacgttctttttaaattgaaatgtacaataaagagagcaacaaaaccataaagctcatgggatatgaccttgtttttgcgacactagctcaccagactggtscgatggcagcagttgcaattcacagtgagctctcaaggtgtttgtcagaaatttttgatgaagtttaactcttcctgtacttcatccttgataatrattgttcacaaatgtatgtactgcccaaaagcagt

SEQ ID NO: 15881 - DNA, 600 bp, Chicken  19866894222752_2
gccgctctgctgccatctgtcacacagcaacaacatgtaatgggatattggtgggaaggttcaacctctactgctgtaccaccagtgtccacctctgacatagtgagccaacagaataaaacaagaggcgytatttacagagcagccctcatagactagaaaaaatggttaatgtatttaaatcacaaaacccattttcacgttctttttaaattgaaatgtacaataaagagagcaacaaaaccataaagctcatgggatatgaccttgtttttgcgacactagctcaccagactggtscgatggcagcagttgcaattcacagtgagctctcaaggtgtttgtcagaaatttttgatgaagtttaactcttcctgtacttcatccttgataatrattgttcacaaatgtatgtactgcccaaaagcagtggcatttgtaaggcatggctgtgaggtgaggggtatatctctgtggtaagagagggcttatagaagttgggtaaagagatgtgatcaaattttggattgcaactctatacattccatttgaaaactcgcagctaacgtctttatgtcaaatgaaaatgaagtcacagat

SEQ ID NO: 15882 - DNA, 600 bp, Chicken  19866894222752_3
gacatagtgagccaacagaataaaacaagaggcgytatttacagagcagccctcatagactagaaaaaatggttaatgtatttaaatcacaaaacccattttcacgttctttttaaattgaaatgtacaataaagagagcaacaaaaccataaagctcatgggatatgaccttgtttttgcgacactagctcaccagactggtscgatggcagcagttgcaattcacagtgagctctcaaggtgtttgtcagaaatttttgatgaagtttaactcttcctgtacttcatccttgataatrattgttcacaaatgtatgtactgcccaaaagcagtggcatttgtaaggcatggctgtgaggtgaggggtatatctctgtggtaagagagggcttatagaagttgggtaaagagatgtgatcaaattttggattgcaactctatacattccatttgaaaactcgcagctaacgtctttatgtcaaatgaaaatgaagtcacagataaaccaaaaaattratttttttttggcaattttgaaacctgttctcaagattcctttatcacagcggaaagcacagctgcatagtttttgctgttc

SEQ ID NO: 15883 - DNA, 600 bp, Chicken  19866894222752_4
gcaattcacagtgagctctcaaggtgtttgtcagaaatttttgatgaagtttaactcttcctgtacttcatccttgataatrattgttcacaaatgtatgtactgcccaaaagcagtggcatttgtaaggcatggctgtgaggtgaggggtatatctctgtggtaagagagggcttatagaagttgggtaaagagatgtgatcaaattttggattgcaactctatacattccatttgaaaactcgcagctaacgtctttatgtcaaatgaaaatgaagtcacagataaaccaaaaaattratttttttttggcaattttgaaacctgttctcaagattcctttatcacagcggaaagcacagctgcatagtttttgctgttcacaggactgtgtttaaccagtgtatcaaaatctacaaacttatttgccataattcaagttagcactgcactgcagcctgagccctgctttcagcccacgtgaggttaatggctgagtgattgttgcttggtgaggcagagccactgccatgatggcgtggggcagggggcagttgcagtgtgagctgggccaggccacgtgtggcccacgtgttggac

SEQ ID NO: 15884 - DNA, 600 bp, Chicken  19866894222754_1
caaaatacagcctggggaatcccaccagcagtgcttttatttagcccaaatgaatgggcttgcattagagagtatctttaaaaaggaccctcctgtcttttgccttttaaaattccaggcctccagcgttcctgttgaggtgtaactggttgattatcctttatgtttggcactgtggaaatggtgctggcagagcatcagggctgcaaccagtagctggccctcagccatgagagtctgtcccccagcttctcctcatccccctccctcactgtagcagtggatacactcccctttaawtgtatacacttcttttagtgatttaattattgcttcgtttaatttagtgatttcatctgtgtctttaggtgctggcagcaactgcgggactcttagcaggtgacttttttttaaacagttgagtaaaccaggttgtcttctagttgttcattacaacttcacaaaaagctgtttttctccctacatgagaataattcactggtaaatgttgggtctgagctgatgcatcagtggtccttgacttttttgtttaattggtgcacttgcataacactgagatatgcagcataactggctggg

SEQ ID NO: 15885 - DNA, 600 bp, Chicken  19866894222754_2
aacagttgagtaaaccaggttgtcttctagttgttcattacaacttcacaaaaagctgtttttctccctacatgagaataattcactggtaaatgttgggtctgagctgatgcatcagtggtccttgacttttttgtttaattggtgcacttgcataacactgagatatgcagcataactggctggggagccagctagatgctacagttactgtttttttgttttaattcatctaaatgtgaccatcagcttgtcctgccctaggacatgagtattactactgccctgctttgtgacggygtgtcctagatcccgtctgctgtctggtggtggacatggacatgtgtgctgcctctgttccacctggaatatgcatgggttgtttttgtttcagtgcaagactgtgcttgagactgcagcttggtcccatgcgaagtaataaagaaaaaatgaatgaatgccttttcagcctgtgtcgaaacccagctggtaaactgtacagttaattttctgctgggatttggatgaaaggatgacacacagtgagagaatctctgctgcttgcagtgtgtttgaacaaagcaggagccggccctggct

SEQ ID NO: 15886 - DNA, 600 bp, Chicken  19866894222767_1
gcagaattggagcatttcccatttgtaatgaaaaagggaatcgctttttaaaggctagagctgccagattatcactaccttatgggaaattaatattttaagatggtctcaaactaaaagtttaaggcagaatgtagcaatatagtctgccacttctattgattgtgttaaaatccaatttaaaactgaaataccagaaacttaattcaagttctcagactgtaataacagatctttcctttttgattttctcctatcaaagttatctttcaagtagcagtgcatagaggaagggatggygaggagaggaaaaatktactcctttcttcagcttcagaaaaactattacagctcagtacactaccaatgaagcattaaggttaatacttcagatcttgctaaagaagccactkcttgtaagctcatcttaaaagcatggctctgcaccacagtttaatacacaggaaaaatgtggcacagaagagcacctcagggcagcagcactgcatgtgagccctgttgcagggttaactttagtgcaccttctccctgaacttgccttgaatttgtgcttaaaagtacaaatacagagcatttgca

SEQ ID NO: 15887 - DNA, 600 bp, Chicken  19866894222767_2
tcccatttgtaatgaaaaagggaatcgctttttaaaggctagagctgccagattatcactaccttatgggaaattaatattttaagatggtctcaaactaaaagtttaaggcagaatgtagcaatatagtctgccacttctattgattgtgttaaaatccaatttaaaactgaaataccagaaacttaattcaagttctcagactgtaataacagatctttcctttttgattttctcctatcaaagttatctttcaagtagcagtgcatagaggaagggatggygaggagaggaaaaatktactcctttcttcagcttcagaaaaactattacagctcagtacactaccaatgaagcattaaggttaatacttcagatcttgctaaagaagccactkcttgtaagctcatcttaaaagcatggctctgcaccacagtttaatacacaggaaaaatgtggcacagaagagcacctcagggcagcagcactgcatgtgagccctgttgcagggttaactttagtgcaccttctccctgaacttgccttgaatttgtgcttaaaagtacaaatacagagcatttgcactaatggctaatgcta

SEQ ID NO: 15888 - DNA, 600 bp, Chicken  19866894222767_3
ctaaaagtttaaggcagaatgtagcaatatagtctgccacttctattgattgtgttaaaatccaatttaaaactgaaataccagaaacttaattcaagttctcagactgtaataacagatctttcctttttgattttctcctatcaaagttatctttcaagtagcagtgcatagaggaagggatggygaggagaggaaaaatktactcctttcttcagcttcagaaaaactattacagctcagtacactaccaatgaagcattaaggttaatacttcagatcttgctaaagaagccactkcttgtaagctcatcttaaaagcatggctctgcaccacagtttaatacacaggaaaaatgtggcacagaagagcacctcagggcagcagcactgcatgtgagccctgttgcagggttaactttagtgcaccttctccctgaacttgccttgaatttgtgcttaaaagtacaaatacagagcatttgcactaatggctaatgctagcaaacacaagacccaaatccttccaagtacagccaggcagacctgcaggcaataggacacctgctttaacagcactgctgctgctgtcattttcct

SEQ ID NO: 15889 - DNA, 600 bp, Chicken  19866894222767_4
cctcattcgagagaagctgaaaatagaaatcagtgtgcttatgggggccaacatagccaaagaagtggctgatgagaagttctgtgaaaccaccattggtaactattgcaaagggcaaattcgatctcctgtctgtggcttaccctcatctatggctgggaaacaggatagtgtctgcaggcaacagtgggaggcagcctgcaatgagatgtgttgaggttctgcacgatgccagatgtgcagtgcgtgctgaactcattcaggggggcagctccctttccagggagattggtgctggcrggatatgatcccacatgacagcaggttccagtactgagggctgtgagctaatttcacccattaaaaaattacagcataaccctattcctataggagttaccagaagctacctgtctgtaaagcccagcgctgagtactgaggcagtcgatacactgtgcagtttgtcaagcaaagcgtaatcagaagctcacaccctctgaagtgtatttctccatctttatatttccctgtttaataagagcagcagtaacactctgttcttctctccctagaactgggactcacctgacttcgagagt

SEQ ID NO: 15890 - DNA, 600 bp, Chicken  19866894222767_5
agtttgtcaagcaaagcgtaatcagaagctcacaccctctgaagtgtatttctccatctttatatttccctgtttaataagagcagcagtaacactctgttcttctctccctagaactgggactcacctgacttcgagagttcacccagcagcttttaaaatccattgatttttgaagtcagcagaaattagtttcattcttcaatagctggtggaggtcaaggaaaaaaaataattattgcagtactgttcttttgctgtgcagaggttacagtaatagtgaaaaccataccagctggrcatttgttgttggaagagaaactagtcacraacagaacgagacaggatcaggagagttaggcaatattcattttcttggggggcagtttaatttctgctggctcagctttgagccatgacaggacaacagctgtgcagggatgcttgcttgccccttgcttttggggcctcaaagtgtttctccctacggaaagccacaaagcccattcgtaagcaaaggcaagaatgcttaccctggcttccagcagcaggagcaagcatcttcttcagcaatgcccagttattgtgaccacaaaaccc

SEQ ID NO: 15891 - DNA, 600 bp, Chicken  19866894222767_6
cacaccctctgaagtgtatttctccatctttatatttccctgtttaataagagcagcagtaacactctgttcttctctccctagaactgggactcacctgacttcgagagttcacccagcagcttttaaaatccattgatttttgaagtcagcagaaattagtttcattcttcaatagctggtggaggtcaaggaaaaaaaataattattgcagtactgttcttttgctgtgcagaggttacagtaatagtgaaaaccataccagctggrcatttgttgttggaagagaaactagtcacraacagaacgagacaggatcaggagagttaggcaatattcattttcttggggggcagtttaatttctgctggctcagctttgagccatgacaggacaacagctgtgcagggatgcttgcttgccccttgcttttggggcctcaaagtgtttctccctacggaaagccacaaagcccattcgtaagcaaaggcaagaatgcttaccctggcttccagcagcaggagcaagcatcttcttcagcaatgcccagttattgtgaccacaaaacccaaaggtccctaggctcttacttcaggtttc

SEQ ID NO: 15892 - DNA, 599 bp, Chicken  19866894222774_1
  misc_feature (1)..(159): n is any nucleotide
nnnnnnnnnnnnnnnnnnnnnnnnnnnnnnnnnnnnnnnnnnnnnnnnnnnnnnnnnnnnnnnnnnnnnnnnnnnnnnnnnnnnnnnnnnnnnnnnnnnnnnnnnnnnnnnnnnnnnnnnnnnnnnnnnnnnnnnnnnnnnnnnnnnnnnnnnnnnnnncatgcactgtctgggaaattcgtatgggttaagtgctgttggagcctgagagtctgcacagtgactcttttccagctaccccacagcgagagaacttctgagctaaaatcttggaggtcagaggcattggtccttgcccawtastacttattaatcaaagtttgatccaccgaacataggatactggaatggagcagcagcattttaggcaatgatggatgccttggtgtratcatgtgtacataagggcactgctgttgcaggatgcctggagccccaagcactgcagcccactggcatcgtatggccacgtagatgtggtttatgtgcaggagctaacatggaggctggtgggaagccaagccagcttgtgcccaaattcattgtacgttgctttagcaggctaggaaggtgtgccttggtagtacaagtgcctgaca

SEQ ID NO: 15893 - DNA, 599 bp, Chicken  19866894222774_2
  misc_feature (1)..(156): n is any nucleotide
nnnnnnnnnnnnnnnnnnnnnnnnnnnnnnnnnnnnnnnnnnnnnnnnnnnnnnnnnnnnnnnnnnnnnnnnnnnnnnnnnnnnnnnnnnnnnnnnnnnnnnnnnnnnnnnnnnnnnnnnnnnnnnnnnnnnnnnnnnnnnnnnnnnnnnnnnnnncatgcactgtctgggaaattcgtatgggttaagtgctgttggagcctgagagtctgcacagtgactcttttccagctaccccacagcgagagaacttctgagctaaaatcttggaggtcagaggcattggtccttgcccawtastacttattaatcaaagtttgatccaccgaacataggatactggaatggagcagcagcattttaggcaatgatggatgccttggtgtratcatgtgtacataagggcactgctgttgcaggatgcctggagccccaagcactgcagcccactggcatcgtatggccacgtagatgtggtttatgtgcaggagctaacatggaggctggtgggaagccaagccagcttgtgcccaaattcattgtacgttgctttagcaggctaggaaggtgtgccttggtagtacaagtgcctgacagca

SEQ ID NO: 15894 - DNA, 599 bp, Chicken  19866894222774_3
  misc_feature (1)..(69): n is any nucleotide
nnnnnnnnnnnnnnnnnnnnnnnnnnnnnnnnnnnnnnnnnnnnnnnnnnnnnnnnnnnnnnnnnnnnncatgcactgtctgggaaattcgtatgggttaagtgctgttggagcctgagagtctgcacagtgactcttttccagctaccccacagcgagagaacttctgagctaaaatcttggaggtcagaggcattggtccttgcccawtastacttattaatcaaagtttgatccaccgaacataggatactggaatggagcagcagcattttaggcaatgatggatgccttggtgtratcatgtgtacataagggcactgctgttgcaggatgcctggagccccaagcactgcagcccactggcatcgtatggccacgtagatgtggtttatgtgcaggagctaacatggaggctggtgggaagccaagccagcttgtgcccaaattcattgtacgttgctttagcaggctaggaaggtgtgccttggtagtacaagtgcctgacagcagtttgctccttggctgagcatcttcacaggtcttgctttgcaacaggaagaaagaaacccattgggaatggtgagatggtgagggaa

SEQ ID NO: 15895 - DNA, 600 bp, Chicken  19866894222774_4
agcaggctaggaaggtgtgccttggtagtacaagtgcctgacagcagtttgctccttggctgagcatcttcacaggtcttgctttgcaacaggaagaaagaaacccattgggaatggtgagatggtgagggaatgtctgcctttggagggcagcaaggtgtggggccttggctcactgcaggctgctgctcacacactgcagaactgctgggtgatcccctagcagataattccaccagccccgtgcctcagtttccccctttttagaagggagaatggctccattggagctctgttgckggggaaggmgctgctccccagggggaacgcagcattggcagatgaaaagggtttgctccatagttctcttcttcctctctgaaatattaaagagtccaatgaacacgctgaacagagattcattttctttttgcctaaagcwcataaccagcttatcaggagggcataaggtgcagaaagcagcacctccagccccacacctcccatgcagcctttcctcctgagyggagccggagaaatagatgagtctcaggcacagccaaacctgcaatcatttctccgagtccctttgcccatctg

SEQ ID NO: 15896 - DNA, 600 bp, Chicken  19866894222774_5
ggaaggtgtgccttggtagtacaagtgcctgacagcagtttgctccttggctgagcatcttcacaggtcttgctttgcaacaggaagaaagaaacccattgggaatggtgagatggtgagggaatgtctgcctttggagggcagcaaggtgtggggccttggctcactgcaggctgctgctcacacactgcagaactgctgggtgatcccctagcagataattccaccagccccgtgcctcagtttccccctttttagaagggagaatggctccattggagctctgttgckggggaaggmgctgctccccagggggaacgcagcattggcagatgaaaagggtttgctccatagttctcttcttcctctctgaaatattaaagagtccaatgaacacgctgaacagagattcattttctttttgcctaaagcwcataaccagcttatcaggagggcataaggtgcagaaagcagcacctccagccccacacctcccatgcagcctttcctcctgagyggagccggagaaatagatgagtctcaggcacagccaaacctgcaatcatttctccgagtccctttgcccatctggctccactt

SEQ ID NO: 15897 - DNA, 600 bp, Chicken  19866894222774_6
ttggagggcagcaaggtgtggggccttggctcactgcaggctgctgctcacacactgcagaactgctgggtgatcccctagcagataattccaccagccccgtgcctcagtttccccctttttagaagggagaatggctccattggagctctgttgckggggaaggmgctgctccccagggggaacgcagcattggcagatgaaaagggtttgctccatagttctcttcttcctctctgaaatattaaagagtccaatgaacacgctgaacagagattcattttctttttgcctaaagcwcataaccagcttatcaggagggcataaggtgcagaaagcagcacctccagccccacacctcccatgcagcctttcctcctgagyggagccggagaaatagatgagtctcaggcacagccaaacctgcaatcatttctccgagtccctttgcccatctggctccactttgtggatcatttagtgcaaagaaagcctttttttttctttttttgcctttgatactgaaagcaaccaggaggataattgcagtctggaaggtgcagcagctatcgagcaatctcagcccttgcagacctctgc

SEQ ID NO: 15898 - DNA, 600 bp, Chicken  19866894222774_7
ataattccaccagccccgtgcctcagtttccccctttttagaagggagaatggctccattggagctctgttgckggggaaggmgctgctccccagggggaacgcagcattggcagatgaaaagggtttgctccatagttctcttcttcctctctgaaatattaaagagtccaatgaacacgctgaacagagattcattttctttttgcctaaagcwcataaccagcttatcaggagggcataaggtgcagaaagcagcacctccagccccacacctcccatgcagcctttcctcctgagyggagccggagaaatagatgagtctcaggcacagccaaacctgcaatcatttctccgagtccctttgcccatctggctccactttgtggatcatttagtgcaaagaaagcctttttttttctttttttgcctttgatactgaaagcaaccaggaggataattgcagtctggaaggtgcagcagctatcgagcaatctcagcccttgcagacctctgctgcaccgtacagctccaaggagagttacaattccttcctggcgacctgggcaatgatttatctyrtaggcacgtggaagaaaag

SEQ ID NO: 15899 - DNA, 600 bp, Chicken  19866894222774_8
tgcagcctttcctcctgagyggagccggagaaatagatgagtctcaggcacagccaaacctgcaatcatttctccgagtccctttgcccatctggctccactttgtggatcatttagtgcaaagaaagcctttttttttctttttttgcctttgatactgaaagcaaccaggaggataattgcagtctggaaggtgcagcagctatcgagcaatctcagcccttgcagacctctgctgcaccgtacagctccaaggagagttacaattccttcctggcgacctgggcaatgatttatctyrtaggcacgtggaagaaaagctccctgatctgtttggttgtgattttgatctttttatgtgtgggggtgggttggtttggttttcttttttcgcttttcttttttttttcccctcctgtacctgatcagaatatgtcgtatctcagattaaagggagcttttcctttcagacgccgtgaggaaaagctgtgcattctgtgattctatgacttttggttattcatgacctttaaaacaatattcctgatgagaaagaaggtgttggtgtgctggtgtcctcagcagctggatgcagagctc

SEQ ID NO: 15900 - DNA, 600 bp, Chicken  19866894222774_9
gcagcctttcctcctgagyggagccggagaaatagatgagtctcaggcacagccaaacctgcaatcatttctccgagtccctttgcccatctggctccactttgtggatcatttagtgcaaagaaagcctttttttttctttttttgcctttgatactgaaagcaaccaggaggataattgcagtctggaaggtgcagcagctatcgagcaatctcagcccttgcagacctctgctgcaccgtacagctccaaggagagttacaattccttcctggcgacctgggcaatgatttatctyrtaggcacgtggaagaaaagctccctgatctgtttggttgtgattttgatctttttatgtgtgggggtgggttggtttggttttcttttttcgcttttcttttttttttcccctcctgtacctgatcagaatatgtcgtatctcagattaaagggagcttttcctttcagacgccgtgaggaaaagctgtgcattctgtgattctatgacttttggttattcatgacctttaaaacaatattcctgatgagaaagaaggtgttggtgtgctggtgtcctcagcagctggatgcagagctca

SEQ ID NO: 15901 - DNA, 600 bp, Chicken  19866894222784_1
ttcaggctactgacagtcatttcagttgtgctgattctattgcagagggaaagattttaccatcgttctcctccatggtatggaggagaaattcagtaatgttatatctcacctcacatcttttacggttctttggaatgagaaactcatgccactgtgagcagcacctgtattgaccaagcacaggaatttggactatatgaaggaacttggaagactgtcaccccttgcatttcttgtgctgtttgttactacatagatacaaaatccttatcaatttagttcttcaaaaatgtgcayggacaaggwgttacaatatgaatcttcatacatttccacacggtgtttgcttgcaaatctgtgaaagtgcagcagatcttgcagaaaaggatcaccaccaccaccagactggtttgcttgattttgtttggaaagataatagcattttacagacaccagtggacacgttttcatgcacttcatrtggctttagctgcttgagtcccatcaccaycacagggagtcaagcaggcaaatctacatgcattgcactgaaaatgtacccctgagggcctaattcacaggagcagaaacaacaca

SEQ ID NO: 15902 - DNA, 600 bp, Chicken  19866894222784_2
ctgacagtcatttcagttgtgctgattctattgcagagggaaagattttaccatcgttctcctccatggtatggaggagaaattcagtaatgttatatctcacctcacatcttttacggttctttggaatgagaaactcatgccactgtgagcagcacctgtattgaccaagcacaggaatttggactatatgaaggaacttggaagactgtcaccccttgcatttcttgtgctgtttgttactacatagatacaaaatccttatcaatttagttcttcaaaaatgtgcayggacaaggwgttacaatatgaatcttcatacatttccacacggtgtttgcttgcaaatctgtgaaagtgcagcagatcttgcagaaaaggatcaccaccaccaccagactggtttgcttgattttgtttggaaagataatagcattttacagacaccagtggacacgttttcatgcacttcatrtggctttagctgcttgagtcccatcaccaycacagggagtcaagcaggcaaatctacatgcattgcactgaaaatgtacccctgagggcctaattcacaggagcagaaacaacacaagccatctt

SEQ ID NO: 15903 - DNA, 600 bp, Chicken  19866894222784_3
aggaatttggactatatgaaggaacttggaagactgtcaccccttgcatttcttgtgctgtttgttactacatagatacaaaatccttatcaatttagttcttcaaaaatgtgcayggacaaggwgttacaatatgaatcttcatacatttccacacggtgtttgcttgcaaatctgtgaaagtgcagcagatcttgcagaaaaggatcaccaccaccaccagactggtttgcttgattttgtttggaaagataatagcattttacagacaccagtggacacgttttcatgcacttcatrtggctttagctgcttgagtcccatcaccaycacagggagtcaagcaggcaaatctacatgcattgcactgaaaatgtacccctgagggcctaattcacaggagcagaaacaacacaagccatcttaccctcaggacttctgcttctgtgatccatgaagagaggaaaatacactttgtggctcattaaaccttttcacagtacacaagagaacacatgcagctgggtaatagttggtgctctccagtcactgctgaaaggaagcatgctgtactgtgcacttactgagcatttaaatatt

SEQ ID NO: 15904 - DNA, 600 bp, Chicken  19866894222784_4
agactgtcaccccttgcatttcttgtgctgtttgttactacatagatacaaaatccttatcaatttagttcttcaaaaatgtgcayggacaaggwgttacaatatgaatcttcatacatttccacacggtgtttgcttgcaaatctgtgaaagtgcagcagatcttgcagaaaaggatcaccaccaccaccagactggtttgcttgattttgtttggaaagataatagcattttacagacaccagtggacacgttttcatgcacttcatrtggctttagctgcttgagtcccatcaccaycacagggagtcaagcaggcaaatctacatgcattgcactgaaaatgtacccctgagggcctaattcacaggagcagaaacaacacaagccatcttaccctcaggacttctgcttctgtgatccatgaagagaggaaaatacactttgtggctcattaaaccttttcacagtacacaagagaacacatgcagctgggtaatagttggtgctctccagtcactgctgaaaggaagcatgctgtactgtgcacttactgagcatttaaatattaaactgagatttgagaaaaaaaaagaaaag

SEQ ID NO: 15905 - DNA, 593 bp, Chicken  19866894222786_1
ttcagcagcgggctgttttcatttagatttttggcagcatttttaacaagaatatgtttttttgtgactttcaaaccagacacatcatcttggatgaactataatggtaataaaagcattgcaaatctctctatttctaacccaggttttgctggaaacatcttaatacttagaggagcaatggagccttcctgtgtagtaagaacttgcttagaagtgagagcgtcccaaagcacattcctggttttgctcacaccccagcttcactcttactgtccctcccttggtttgctcggtgcrcgccacaccatcttgttatggatggcttctcctttcatctacctctactgcaggaacttcagaagcttgtgcccaggtgtaccttccttctgaagtatgtggtgtgtttgctatgagagtgtttcatatacatgatggcttgttggaggagtaaagtcttttcaggcagctgctgaggatgaggaaggtctgctaggatagaagatgttgcagtctggagcaagctctgctttgaacagtgctgtgtaaatattttgcaaataacagggcatatatagaagtacatcgttcag

SEQ ID NO: 15906 - DNA, 600 bp, Chicken  19866894222788_1
aagccgatttttatagtctctaggaattattaaaaaaaaaccctcaaaatctctctcattccctaaatccacactcagatggtctagccagtagtctgatccagctgtgctctatttttactctgggtgatggaaaaagggaaggagcatttgcatcgctttgtgctagctgcagtcatacagctgtagctgctttgattcagatgggatgagacagaggaggtctcatttgccacagtgactgtgaaagtgcttttctagcacaagacgacaccgtggcacacagtgcacaaggatggygtaagatcttgccactcagattcagtaggactccatgcctgtcacgctgaagtctcagtggcttgctgctgtgggtgaagagtagcagtggatcagtactgccctttctgcatacgtgagtgaaaagactggggagtaagaagatattccctgaatgtagcttgtaaaagcagagaaaaaatatctttttccttaattccacgatgcctccttccagatttattgaatatgtataagaaaagtttatcagaaaatgcaactccttctcctgctcaaatatttgagtatttttttttattt

SEQ ID NO: 15907 - DNA, 600 bp, Chicken  19866894222789_1
caacgtgggcaattgccactgagatcaagaatttctaggttgtaaaggttacttaaatcatgttcctgaacctcttgaattctgttattgtaaatatacaattcctttaacgttgaagataagttgggtggaataaaagttaagttgttagacttcagggatagtactgtcaaatttttcagattcagaaaggctgtttcttcaatttcaaaagaaacattgcatggattacggtagtaacagttttgtcccagatacaataattctatattccttagctctgaaaaagtgttttttttwatagaaaaaatgttgtttgcttccagactcagcagacgtaaagtagcaggaagaccccgtggaattttcgacagttggtttgcatccaaatacaatgacttcagtcttgwcagagcagcaaaactaccattctcaattgatggcggtgtgatgcacacattatctttgggccccagtctgggaggcacgcagttgcaccctgaagtcaatctccacaaggttttcaagctgagtaaaggatgctggagagatacgggggatatggttaatagtcagggtcagggtagtagcgtttccagg

SEQ ID NO: 15908 - DNA, 552 bp, Chicken  19866894222789_2
cgttgaagataagttgggtggaataaaagttaagttgttagacttcagggatagtactgtcaaatttttcagattcagaaaggctgtttcttcaatttcaaaagaaacattgcatggattacggtagtaacagttttgtcccagatacaataattctatattccttagctctgaaaaagtgttttttttwatagaaaaaatgttgtttgcttccagactcagcagacgtaaagtagcaggaagaccccgtggaattttcgacagttggtttgcatccaaatacaatgacttcagtcttgwcagagcagcaaaactaccattctcaattgatggcggtgtgatgcacacattatctttgggccccagtctgggaggcacgcagttgcaccctgaagtcaatctccacaaggttttcaagctgagtaaaggatgctggagagatacgggggatatggttaatagtcagggtcagggtagtagcgtttccagggatccctctggggacttccttgaggcgacgggcactgcagtctactctcacagtactttcaa

SEQ ID NO: 15909 - DNA, 600 bp, Chicken  19866894222791_1
atgtggtatggttattagtgtgttgggttgtaacgtgtctactttgacatgcatttcttgtggtaatgacttttctctccaaccttagccataggtctgagctgcttgggaaaagctttgttccgatgcagatgaatacagagtgtgtcctatgttgagcttttgttagcattcttattctgagcagctgtgaaactttgaagtgagtcttcctgcttacaacatgctgactagactcacagtgtgattttggtgcacaggggttaaatccctttcatgacaaagtgaagctgtacaccyaccctagatgttaaggtctcagcaagtgcacttggacagggatgtaaacatctagaccagtgagtgatactggtatacagctttggaagtttaagttccacaagtgatgtatctgtctcttgttcacagcagaactgaaagtcaagcagatgaggttacgagcctgctattgctatacgaaaacatgaattggtatcctaccatttcccctgtgtgggagtaatgcaatggaaacttaatagcatactgcctgctctagatagtgaacagcatattgctgtagtgttaaagctcttcact

SEQ ID NO: 15910 - DNA, 600 bp, Chicken  19866894222797_1
gtgttttggtgtcccgagggtcacatagtcaaagcaatgtcattcaaatacgggttgtttgggaagcgtctccatttttggccttcgcgctggttgagccttgggaactattttgggcaggcacaagaagtgctggcgcttttcagcactaatgaaaatctgcaacctgacacatcagggagagcatccaaggcgaccagcgcagcaaaaatgcagctcttgcaagatcccatcttgccatcatctgatggcacgttacataattctgaacccatcgatcgttactgctataaattgtcyttgtgctttatgctgccttatagttggaaaatatatagctctcttaaaaggagaaggaaaattgtgtccccatggacagagtctcttcacagcatgtgcaacgcggccttttctcatggtgatgttatgtggtgaagttttgaatggcagtgaactgcaggctctgtagcgagctcttctgctttcaagtttttagagaaaaacattcagtgaggccaacctgttctgcagccttgagcccattctggagttcctttggaaggaagcaggctgtgtctgtgatgaagtccagcctcagtc

SEQ ID NO: 15911 - DNA, 599 bp, Chicken  19866894222801_1
  misc_feature (1)..(30): n is any nucleotide
nnnnnnnnnnnnnnnnnnnnnnnnnnnnnnctgaactcctttggacttcgtaaagaatgacattctcaaaatgtttttgctgtactttaaacgttgatcctgctctgcattagagcaggctgaaaccttccagccaagcacaattccatcaaaaattgacattcttaaaagcatgcaactgggggatatcccaaggtttggatagtgctgcaacacagcagcaacgtttatactgaaaacatataattttgttggcattattctagaaatagggcctctatcaacttctgcaatgcaatwcagaaaatgaaaaaagaagggagtcagcttctagcatagggagacacaagcagacaaacagtgggctttccaagagctgccatgctaggatcactatgctgcactgtctcacatgatgtatagcttgcaatgcagtttctgcagcaaaactcttcaccacggacctcactgtcatatgaaatctcacagaattcagcaaggccatccacaaccctacattcaggcacagcyttaayacacctgttggaacctcctgggaagagagagatcgacacaagactgctgagggcagtttgtaa

SEQ ID NO: 15912 - DNA, 600 bp, Chicken  19866894222801_2
actgaaaacatataattttgttggcattattctagaaatagggcctctatcaacttctgcaatgcaatwcagaaaatgaaaaaagaagggagtcagcttctagcatagggagacacaagcagacaaacagtgggctttccaagagctgccatgctaggatcactatgctgcactgtctcacatgatgtatagcttgcaatgcagtttctgcagcaaaactcttcaccacggacctcactgtcatatgaaatctcacagaattcagcaaggccatccacaaccctacattcaggcacagcyttaayacacctgttggaacctcctgggaagagagagatcgacacaagactgctgagggcagtttgtaactgtatgaaggaatcagaaaccaactactgataaagtctgctcactgactcccagggaatcacagacacagaagagctattgctcaataaagcaaggcagcattcagaagtaatgaaactaaaatccctggaaatgttatgggagggaaagtcccattacctttgtactggtgtaggtacaactcagctcacctctgtgcagggacagaaagcagccagctgagtaaggatg

SEQ ID NO: 15913 - DNA, 600 bp, Chicken  19866894222801_3
aaacatataattttgttggcattattctagaaatagggcctctatcaacttctgcaatgcaatwcagaaaatgaaaaaagaagggagtcagcttctagcatagggagacacaagcagacaaacagtgggctttccaagagctgccatgctaggatcactatgctgcactgtctcacatgatgtatagcttgcaatgcagtttctgcagcaaaactcttcaccacggacctcactgtcatatgaaatctcacagaattcagcaaggccatccacaaccctacattcaggcacagcyttaayacacctgttggaacctcctgggaagagagagatcgacacaagactgctgagggcagtttgtaactgtatgaaggaatcagaaaccaactactgataaagtctgctcactgactcccagggaatcacagacacagaagagctattgctcaataaagcaaggcagcattcagaagtaatgaaactaaaatccctggaaatgttatgggagggaaagtcccattacctttgtactggtgtaggtacaactcagctcacctctgtgcagggacagaaagcagccagctgagtaaggatgtgggc

SEQ ID NO: 15914 - DNA, 600 bp, Chicken  19866894222806_1
actctaattatctttttcctcatgcttttgctctattcccctgtgcctcaaatcagactgaagatctgaatataagctttgtatttctaataacaaaatcatcaagatctttcagaactgccagaataaatttgtattttttcttgcagtggaaagtcatcttagaatgtatgaaactaattcttcatgtttttaataggaaaaattacaataagtctatttcaatacgaaatatatttgatttaccatggcaacaaacattctgaggacattcttttagacattaatcttctttcactmatttacagtttagtccagaagcttttagacaaaactctgactatgtgagcaactattcagagctgttgactcaatgcacaacactctgcattttcagtttttcttattaaatattttattgcctttgtggacatacacgtgtgcaaaaaagaaaccataggtacatatttttatcaaaagcaggtacatatttttatcaaaagcattgttaagtgctaagaatatgtggacaaaatgaaatacgtattttaattcccattgatttacatccacgttctgattgttggctctttaggatgt

SEQ ID NO: 15915 - DNA, 600 bp, Chicken  19866894222806_2
atccacgttctgattgttggctctttaggatgtttctctacaaacacagttccattgacttgaatgtcaatacctatggagtaaatgacttctgtcttcttgagtagcaccaaagcagtaaaataatggtgccagctcaacctccgctcttttttctcccacttcaggtttgaatactgggttgtttgagagagtctcaggcaagtataatactgatatcatcaagacatcactgaatatcaaaatagcttctagtttagaagaccagtgttcttcatgcttccttgttaccacagacargcgcttcagctaaagagatttcctgtttctgaaaactgttatctatttagcttctatttgtgtaaaaagtctatccggcaaagaagcatttcccaaaaggatataaaagcttggaagctgaatttcttttgttattatgttatatatcaatataaacagtacaaaatgttcgggtattttttttaacatataaaattagtgtgcaaaaagttcagatgggaaaaacttcactgtgattggtgagggaagacggctacacacatttaggcagaaatcctaaatacaaaatacttgaaatgt

SEQ ID NO: 15916 - DNA, 600 bp, Chicken  19866894222826_1
tacagtaattattgtcccttcatattcaaacaacctgttctgtgttatgatcgttgtcttctgccatcacacattttagtaaagagcatacttttcagtcatcttatggcatgagcttcagccttctaactgtttggtgatctccagtgagtcttttcatcagcttcttgtgctgaggaggtagttggggtaacaaatgccaagtcgggtgcggtaccagatgaagaacagtcccataatgtactggctatgcctttgtccttacagtgtgctatgctgttaaccttgctcactgcttgragatattgctgcctccaagtctatcatgtatcaggtctcctcacatcattttcatcatagttagttttgtccccataatacaaattctgtgctataatatttctgtatttcactgtgcaagtcatttttcaagcagacaaacgttccaggactatatgaccatgtacagtcttgtcacacattctctgcaatacgttcatgtttcttcatagcaatctaattcctttagaatatgagtagttgaaaaaaaaaaggcaggcaaggttaaagctgcaggccaaaagaagtgtttcttgaagg

SEQ ID NO: 15917 - DNA, 600 bp, Chicken  19866894222829_1
caagctatttttaaacagttaagatggggatgcatatgattttcatttaactgaatatgtcattgttttaattgccaggggtgccgtaggaaagctcacaaactggtagagagcattgtgtaaacaaccatcagtaaaaatcccactaaacatccagattattgttttgtcaggagtgcaggttctctggggcaagagccacggctttgttggcgtcacaccaagcataatagctctgctccccgcccaagcctcccagccacggcaagaaagggaacggattattgactctcccagtgygyacggacggacccaggcagcttttcctcctgaagagaaggttcagcataatggagagagcaactgtccgtgttcaaattgctgacaggaaccacagagtccgccccccatgccgctaaactgagccacctcacatggggcggagacggagcggaagagctgtggtgcagcttcacaccactgtttgctctggatttgctctggtttaattaacacttgggagattgacagctcataacaacgacgatgtttgtttctgctccttctaccactactgaaaataaataggtttgtattccg

SEQ ID NO: 15918 - DNA, 600 bp, Chicken  19866894222829_2
agctatttttaaacagttaagatggggatgcatatgattttcatttaactgaatatgtcattgttttaattgccaggggtgccgtaggaaagctcacaaactggtagagagcattgtgtaaacaaccatcagtaaaaatcccactaaacatccagattattgttttgtcaggagtgcaggttctctggggcaagagccacggctttgttggcgtcacaccaagcataatagctctgctccccgcccaagcctcccagccacggcaagaaagggaacggattattgactctcccagtgygyacggacggacccaggcagcttttcctcctgaagagaaggttcagcataatggagagagcaactgtccgtgttcaaattgctgacaggaaccacagagtccgccccccatgccgctaaactgagccacctcacatggggcggagacggagcggaagagctgtggtgcagcttcacaccactgtttgctctggatttgctctggtttaattaacacttgggagattgacagctcataacaacgacgatgtttgtttctgctccttctaccactactgaaaataaataggtttgtattccgtt

SEQ ID NO: 15919 - DNA, 600 bp, Chicken  19866894222830_1
ggaacaatacaaaatgaatggctttgaccagtttgaatgcaccataagaagatcagacaaaggaagatgttgagccttcgcgaggaagacttctgaattcatccccacgaccaccagagggagacccctactacggacaacacatgcgccaggggatggtcagtatgtaaatgaatttctggaaggataatgaatatgtagatgggttccaagaattctgctgaatatgtttgaccttggcttacaaatttgtagcatttttgcctgctggtaggcaagtttggtggagtgatccccccytgcacctggccggctgaataaacataccagatttataacctacctgggttatagagtttgattccacacgtcactatcactggttacacgagagaagaggctgacccccagcacaacacaacctcccttcaggtagttatagagagcaataaggtctcccctgagcctcctcttctccagactgagcaatcccagctccttcagccgctcttcataaggtctgtgctccagacccctcaccagctttgttgccctcctctggacacgctccagggctttgatatctttcttacagtgagg

SEQ ID NO: 15920 - DNA, 599 bp, Chicken  19866894222832_1
  misc_feature (1)..(148): n is any nucleotide
nnnnnnnnnnnnnnnnnnnnnnnnnnnnnnnnnnnnnnnnnnnnnnnnnnnnnnnnnnnnnnnnnnnnnnnnnnnnnnnnnnnnnnnnnnnnnnnnnnnnnnnnnnnnnnnnnnnnnnnnnnnnnnnnnnnnnnnnnnnnnnnnnnnnattccttctcccaaagagtggtgaggcagcggcacagctgtccagggagtggtgcggtcactgtccctgggggtgtcccaaggctgtggggatgtggcactgagggacgtgggtagtgggcacagtgggtgtgggtcgatggctggactggmtgatcttagtgctcatttccaaccttaatgattctaaaccagcttccacctgacactcctgtggctccatccccagtggctgcatcctgcccagccaccagccatagtgtcacaaagcaaaggctttcctttgggcacacatctttccatgtaggccctccaaatgaattgcccacctgcagggcttcctacggaggcaggtgctgtagggcacagataggccctgtgctggctccttgctgtgtggctttgctttggggtcgggttaagatggaagagggctggagcaagcttggaaa

SEQ ID NO: 15921 - DNA, 600 bp, Chicken  19866894222832_2
agcaaaggctttcctttgggcacacatctttccatgtaggccctccaaatgaattgcccacctgcagggcttcctacggaggcaggtgctgtagggcacagataggccctgtgctggctccttgctgtgtggctttgctttggggtcgggttaagatggaagagggctggagcaagcttggaaaggggagctgcagcttcaggtctgggctgtcagatgctctctacagaagatctgtggagactgtgaagatcactgtcaaaaataattaagaagtttaattagcttgactggaaagtrcccctctaaaaagaaatcagcaatttacctatttgtggtcttaagggccatgatggcagttttccttttgcaccatagaggcatttaaaagctgcccggtccttgtaattctgttaaatttctgtcagtaccacgctgttcctgatctgatccagaaaaggcttctagttgtgctcctgagctgttatcactgttatttgaggaacagaaggaattcctgtttacgtttcagagcacagaaaggctctagtgtcatggctgctgcatgcacagcctttgtaaatcatatctgccttgctt

SEQ ID NO: 15922 - DNA, 600 bp, Chicken  19866894222839_1
gaaagactttctgtggttttccatgaaaatttggagagccagaaagagaaatggagaacagaaaaagctaaataaaagaacggcattttgaagccttctactagtggacttgtgaccacagttgtccacggttgtttgaggattgacagagatctgatgattagtctgtaaaattacagtagctcacagaattctacaaggtattcctagttcttgtgtaaggcaaatgtcacagctgaaaaggtaggtaagcagcctcttctggtgtggatgctgcaggtatggtttcagcaggtgaawgtgcatgtccagcagtgttgttgtgtcccagtactagcttcattctccacttcttcctttgccatctgtctataatagtcagttttatgccattattttattcttattttattgctcagcctagtccttgcaattagaaacccacagctgtgtgaacatctcaaagaacctaatacatctgagctgccctacgtaattttctcctgaaacctctgtgctcacattatttatcatatcttactgtcggtggtaagttgggtgaaagggctgagccttcacagcaaaaatagatttcacaat

SEQ ID NO: 15923 - DNA, 600 bp, Chicken  19866894222840_1
accatcatgcaccatgaaatcctacacagaaaacatagcaataaggtcatgcaacgttgcaagaatatccttggaatactgaaaaggacacatcacataatatcagcagagctgacagcagtgccatatagacgtgtcagcaccaatattcagctgccactgtgaagcactgcagacaaacaggacgagaaaccttttagaagtggggatttccatgcacctacccttttccccacaggttcgcagtgccagcctatcagcattcagaatctgtggaagagattcttgtagaagcaaggsgagtctttaggattccagctagcgaaaccattagttaaacctgaaagtcatcttatgttaattcatacttctgggtttgctctttcacgtggatcattttcttacatagtttgctttttactaatgctttaactataaacaatgtgttttgttttcctgtttcttaagtaaaatatcaattaggagttaagccagctttcaaaacaaacattatcatccagaggaattggggagctgcctctccatgcaggtaaacagcaatactgacagaagaaggctgaggtcggtgtctgtcacttt

SEQ ID NO: 15924 - DNA, 538 bp, Chicken  19866894222840_2
tttgctctttcacgtggatcattttcttacatagtttgctttttactaatgctttaactataaacaatgtgttttgttttcctgtttcttaagtaaaatatcaattaggagttaagccagctttcaaaacaaacattatcatccagaggaattggggagctgcctctccatgcaggtaaacagcaatactgacagaagaaggctgaggtcggtgtctgtcactttctgtttttacctcctccacgtcattctgacagcacacccacgctgagataaggatcagagcttttcacacccatsagtggttttcttcaaaggcagaggagctgcagactgcaggctggcggagcttccagcgctgggttgtgagggatgaggtgctcagggctcgctgagatcaggcccccacaataccttgttgccctctgcttttactycaggacaagggcccaggctgaccccaaggcagttcctgaactctggtttgtctgttacaaaccaatcagccctttactccccattccccaagcccaccccg

SEQ ID NO: 15925 - DNA, 401 bp, Chicken  19866894222840_3
atcatccagaggaattggggagctgcctctccatgcaggtaaacagcaatactgacagaagaaggctgaggtcggtgtctgtcactttctgtttttacctcctccacgtcattctgacagcacacccacgctgagataaggatcagagcttttcacacccatsagtggttttcttcaaaggcagaggagctgcagactgcaggctggcggagcttccagcgctgggttgtgagggatgaggtgctcagggctcgctgagatcaggcccccacaataccttgttgccctctgcttttactycaggacaagggcccaggctgaccccaaggcagttcctgaactctggtttgtctgttacaaaccaatcagccctttactccccattccccaagcccaccccg

SEQ ID NO: 15926 - DNA, 600 bp, Chicken  19866894222841_1
acacagaggcttctgccagagaaacaccattaaatgatcagctagaccaggtcatggacagaaaagtagcagcaaaccacctgaaatggtcaaagattttgttcgtctcttatactcaattcaagcagccagtgatttcatcggtaggattacacattgctaacagctaaaagcaaaatgaaacatctggtatttctctccagatatatatgtggtgtagtgcaatttgatccatcactagcactgtgatgccctcaggatgaaaacctttctgtgtttatgcagatcttagcagtgctsagtccatagctctgatctggagatcaaagatcagtgagtaccaagtgtgtgatcacacttgcatttgtgttcagttgcctgtgagggatgagggacctatcttaaattcaagatgacaaagaaagagcaggatccaagcagcaaaatatggctggtgattaggttgatttctttctattgcccattattctagagtcaagggttcaaccacctggcccaaacgtcctaattctgctcagagagaagcagctgcacagttgctgcttcacagccctgagtacaaatacacaacacaaatca

SEQ ID NO: 15927 - DNA, 600 bp, Chicken  19866894222845_1
cacataagagaataatggaagagcagttgtaaggagatccattaactggtctgtctttttttctacagtgcagaatgaatggtagactgaaaataaatgtacaaatatttgtatggtgggcccaatcctaaccacagtgaggtcaaatattccagctcaacaaccttcctgaaaaaatgttttcctggaggcccttcctattccaaagacatgtatcacagtcagtaattaaacatagtctgtcaactatcaaaatgaggtttcagtatgcaactccatacagaagaggttcagcattgyggacataaatcagatttgctccaccaaacaataggctcaaagcctggccaaaaagacccacaacaaagttagtattgagagtgttgaccagggtaagtattctgctttgtctcaatggaaactggcagtgctgtgagctctggaggccactggttctaatcgagcttgtctcaatagtttcctccttcttgtcagcagctggacaaaagcagaattaatgcctcagcccatctgcactagttcagtactgggaagaggagtttccatgaagccatgagatagacctttgggagtagacag

SEQ ID NO: 15928 - DNA, 600 bp, Chicken  19866894222845_2
caaaaaaataaggagacctggggtcagaaaaggagttgtttttgtggcttcaggcctgaatgaagtcatgtcttagcagaggattttatgtgtagccttgctgtttttgtgatctctatttaaagtgaaaagaattggtagttttactgtgtactaacaatacttaaattcatcatctttggtccatgcctgtatagcctcttatccagtatggatttcaacatatgcttagtttggcacatgtaaaacatctcgttccattcaaagatttgattgatggttaaaaagatatgtatgtcygtaatgactcaaagcaatatgtttttaggacaagaactgtccttcactccatgcctgtacattacccagcccagggaggcatatcattactgtggaataataatggtgatgtactggacaaagaattgctctgagtttgccttccagtaagaaactgaccccatctcaagttcccagcattatcatacagcaatggaatgagattattgtttcctctaatctgttaattggtagtagggaccaaatgccctcatttaaattcactgtgataggtgccacatagaaaagagtcatttttgt

SEQ ID NO: 15929 - DNA, 600 bp, Chicken  19866894222849_1
gagagcaatgggacctgacctcatcacatccacgctgggctggggacaggggtggagaggctccccgaggaacaaggaagcattgagcccaccgtatctctctggggcacgggaagcggaaaggcgataagagccctctcgaatgaggaattccttctcactttcccctgtttgcttttcatcggagataacacgaggctcaggcagcttacctggaagccagtgcaagaaggggcagccccagcacccccagcagcacccataccttctgtgtgctctgtgaggggagcagcccagccrcggcccccactccttacctccacagctgacccatgtccccatgtccctaagtcccccctggttggtcactgccaggagctgtaacacaaggagcggctcggaaaagtgaaatgagattatgaacagtacagccaagactgataatgatggcagaatgtttgggcagtgtttcactatgggtctgtcagagggggagctgtctccggcctgccttgggcatgtgggcgggaaagtcgatctctgctgaccctcacagtcctcaagmcacacagcatgatgatggtccgttcatagagtcct

SEQ ID NO: 15930 - DNA, 600 bp, Chicken  19866894222849_2
cttctgtgtgctctgtgaggggagcagcccagccrcggcccccactccttacctccacagctgacccatgtccccatgtccctaagtcccccctggttggtcactgccaggagctgtaacacaaggagcggctcggaaaagtgaaatgagattatgaacagtacagccaagactgataatgatggcagaatgtttgggcagtgtttcactatgggtctgtcagagggggagctgtctccggcctgccttgggcatgtgggcgggaaagtcgatctctgctgaccctcacagtcctcaagmcacacagcatgatgatggtccgttcatagagtcctggaatcccagaaccattttggttggaaaagacctctaagatcacctggcccagccaccagcccacccccaccatgcccactgaccatgtcctcagtgccacatccacacggctctgaaacacctccagggacggtgactgcaccacctccctgtgcagcctgtgccacygcagcaccgctctttctgagaagaaattcttcatgatattcgacctgaacctctcctggcacaacttgaggccattccacctcatcctattgcygt

SEQ ID NO: 15931 - DNA, 600 bp, Chicken  19866894222849_3
ttcactatgggtctgtcagagggggagctgtctccggcctgccttgggcatgtgggcgggaaagtcgatctctgctgaccctcacagtcctcaagmcacacagcatgatgatggtccgttcatagagtcctggaatcccagaaccattttggttggaaaagacctctaagatcacctggcccagccaccagcccacccccaccatgcccactgaccatgtcctcagtgccacatccacacggctctgaaacacctccagggacggtgactgcaccacctccctgtgcagcctgtgccacygcagcaccgctctttctgagaagaaattcttcatgatattcgacctgaacctctcctggcacaacttgaggccattccacctcatcctattgcygttacctgggagaagaggccatctcccatcttgcccagagaagcatttcttccaaactaagtccattctataacttcagaaggggctgatctccagactgccttcctaaatacaaagacaaaaactgccctcttcctctctttctcctgccatgcaggacgcagtctaaatattctgtcttgccaagcccttccccaggccatatt

SEQ ID NO: 15932 - DNA, 600 bp, Chicken  19866894222849_4
gmcacacagcatgatgatggtccgttcatagagtcctggaatcccagaaccattttggttggaaaagacctctaagatcacctggcccagccaccagcccacccccaccatgcccactgaccatgtcctcagtgccacatccacacggctctgaaacacctccagggacggtgactgcaccacctccctgtgcagcctgtgccacygcagcaccgctctttctgagaagaaattcttcatgatattcgacctgaacctctcctggcacaacttgaggccattccacctcatcctattgcygttacctgggagaagaggccatctcccatcttgcccagagaagcatttcttccaaactaagtccattctataacttcagaaggggctgatctccagactgccttcctaaatacaaagacaaaaactgccctcttcctctctttctcctgccatgcaggacgcagtctaaatattctgtcttgccaagcccttccccaggccatattactgtgattataatggctccagggccagctcctagcagtgtgacacagcaaggtacaagcaccttatgtgctcagtggccagctggggtcacct

SEQ ID NO: 15933 - DNA, 506 bp, Chicken  19866894222856_1
tctctggaaatgcattgctgctaacatatattggaatcagcgtgctgaaatgttggctagtgcttagctgttcagcaaagagggacctgtcacagaggttgaaaaacctctgcaatattaaaaaaccaaccaaacagcctgaaacgagactgttggctcaggtacctcaatgaggcacaaaacaaaatcacctcatggaaattatggagaggagtgtctaacgtgtattttttaatgtgccacctactgtgtggctgcagtcccatcgtctgcaaagtggatgtgacggatctcagcctygggtgttagtaatgctgatagaacgtggttccattttacccacttcagattgttccagtcactaccactcaatggattgagtaacaccccgcacagagatcctgcaagtgtaattttggtgtaatagacaattaaaaaaaaaaaaaatagaggagtattggttgtgaagattaagctatatacgtattttttaaattaagaatctg

SEQ ID NO: 15934 - DNA, 600 bp, Chicken  19866894222869_1
gaactttacaatgaaggtacctactgcatttgtaaaactcctttttttaatcagcttgtcaaaccttttgagaagcaatctgggcaatcagatgtggtatttgttgtgtctactgtgaatacagccaattatagaatcagagatcgctctctccatacagtgctgatgaaaaagaggtgtaatccagggctccaggaacagaacctgggcccgtgtattgtggcattctcttgatgcagtactgagcctgctcaggaggcagctctcgacgtaactcatctgccaggatataaggctgtrgggggggggaaatgatggacaaattcagtatgtattcttcaaagacatcaaatatattcattatgtgactaataagcktggatgttctgcctactttcctgaaaccaaatgttttccttggtcaactctaacctttaatgatgagttgaaggagacaatcctaccaacaaactgattaggtcaaaatccagtctcaggctaggtaactgtgtgtgttagccagtgaatactatgcagccatagatagcctgctactaatacaggagatcatccctagtgtgcctcactgctgcttctgag

SEQ ID NO: 15935 - DNA, 600 bp, Chicken  19866894222869_2
tctgggcaatcagatgtggtatttgttgtgtctactgtgaatacagccaattatagaatcagagatcgctctctccatacagtgctgatgaaaaagaggtgtaatccagggctccaggaacagaacctgggcccgtgtattgtggcattctcttgatgcagtactgagcctgctcaggaggcagctctcgacgtaactcatctgccaggatataaggctgtrgggggggggaaatgatggacaaattcagtatgtattcttcaaagacatcaaatatattcattatgtgactaataagcktggatgttctgcctactttcctgaaaccaaatgttttccttggtcaactctaacctttaatgatgagttgaaggagacaatcctaccaacaaactgattaggtcaaaatccagtctcaggctaggtaactgtgtgtgttagccagtgaatactatgcagccatagatagcctgctactaatacaggagatcatccctagtgtgcctcactgctgcttctgaggtgatagaactgacatgctttcagttagactctgttagtttcaacagcctaatgtatttattatgaaagatgtactat

SEQ ID NO: 15936 - DNA, 600 bp, Chicken  19866894222874_1
cgatgttttaaactaatcagtaatgttaatattctatggatttgctctttcctctaacacttctcttaaaagcttttttaacctgacactaaataatttagaagagcaagatttttttttttatttctaatccagcaaataaaaaaggccagcttactggtattcgcataggcactggaaagcacaggtcattgggcctgggtggctgagggtgtttaataacccagagtacccttttccaaggagaagtgtcagactccaatctcatgatattgatgtacaaatgcaggttcatcaacygacacagaatcccattatctcaaatggggctttacgcaggcatctgccctactagcaagaatcaagaactttacgattggaacctcactcctgaacaacgggagttcacatctcataacctcctccctcctctgtgccccattcccatgccgtcacacagttgacagactgcaaaaacttaggaaaaacagatgcaaggactcttttagtctacagactgactcttcactatcacgacccgaagcacacttattggttagtacaataacccatgaggtgatttggtctgtagataaatac

SEQ ID NO: 15937 - DNA, 572 bp, Chicken  19866894222877_1
accatcactcagacaacagctcttcataaactcgcctgtaccaaaccagacagaagcagtacagaaacggaagatgtgcataggtcataaacgtccttatttctaccatgctgccgttagtgatgggccattgctttaggatttccagagtttgaaatacagactggcctccgataactacaccgtgacagccatcaattaacacgttattaaacagtacaccaataaagaacacattatgcctaatggccaatgtggaatcagaaggaattagtaaaatgagattcgataaaatgcaamccataaagataagcttctgaagattggatctgactttttgtccctgctttaaaggaaataaatggccagcgcagtgaattcctttctgctgctcctctacctgccttgaattcacaacacaccacgcactgtgggcaggaacagacactgagggcactggagtgtgacacttgggacaaaccaacacaacattacagcttttttttttttttttttttttttttgtctccaggcagaacacacagttttgatgattctttttcagatctaga

SEQ ID NO: 15938 - DNA, 599 bp, Chicken  19866894222879_1
  misc_feature (1)..(141): n is any nucleotide
nnnnnnnnnnnnnnnnnnnnnnnnnnnnnnnnnnnnnnnnnnnnnnnnnnnnnnnnnnnnnnnnnnnnnnnnnnnnnnnnnnnnnnnnnnnnnnnnnnnnnnnnnnnnnnnnnnnnnnnnnnnnnnnnnnnnnnnnnnnnntcaatctatcccaaatgtttgcacagcacctggagctgtgtgggctttgcagaaacgtttccaaaagcaagatagatatgtgcaaaaaatgttcctgtgtttttaggcggtattaacatacagactatggcaaaagagtaagaagaggaaggtgttaawttttttttctcaattcttcttgtaacctactggaaagagcagcaaaaactgccggtccatgaaatccacaaccacgtggaggcacgtgctccctragtcaaacagtgcrgcacatgcggtgtgtgggagagagaaagagcaaggcagcaaggtgggcatggagcattcatgccagaatccaggcatctctgttcctgtagaccagaacaagattaggatgtctgcttcagagtgttttccatgcttagtgccttttgcttgcagcaggaatctgtgatcatggaatgcctgttctctag

SEQ ID NO: 15939 - DNA, 599 bp, Chicken  19866894222879_2
  misc_feature (1)..(46): n is any nucleotide
nnnnnnnnnnnnnnnnnnnnnnnnnnnnnnnnnnnnnnnnnnnnnntcaatctatcccaaatgtttgcacagcacctggagctgtgtgggctttgcagaaacgtttccaaaagcaagatagatatgtgcaaaaaatgttcctgtgtttttaggcggtattaacatacagactatggcaaaagagtaagaagaggaaggtgttaawttttttttctcaattcttcttgtaacctactggaaagagcagcaaaaactgccggtccatgaaatccacaaccacgtggaggcacgtgctccctragtcaaacagtgcrgcacatgcggtgtgtgggagagagaaagagcaaggcagcaaggtgggcatggagcattcatgccagaatccaggcatctctgttcctgtagaccagaacaagattaggatgtctgcttcagagtgttttccatgcttagtgccttttgcttgcagcaggaatctgtgatcatggaatgcctgttctctagctttgagtagtagtagaaagagtacattcttcacaatgactcctgtttagttatcagctgagtgcataccaatttcagaaagcaggtatttcatt

SEQ ID NO: 15940 - DNA, 599 bp, Chicken  19866894222879_3
  misc_feature (1)..(32): n is any nucleotide
nnnnnnnnnnnnnnnnnnnnnnnnnnnnnnnntcaatctatcccaaatgtttgcacagcacctggagctgtgtgggctttgcagaaacgtttccaaaagcaagatagatatgtgcaaaaaatgttcctgtgtttttaggcggtattaacatacagactatggcaaaagagtaagaagaggaaggtgttaawttttttttctcaattcttcttgtaacctactggaaagagcagcaaaaactgccggtccatgaaatccacaaccacgtggaggcacgtgctccctragtcaaacagtgcrgcacatgcggtgtgtgggagagagaaagagcaaggcagcaaggtgggcatggagcattcatgccagaatccaggcatctctgttcctgtagaccagaacaagattaggatgtctgcttcagagtgttttccatgcttagtgccttttgcttgcagcaggaatctgtgatcatggaatgcctgttctctagctttgagtagtagtagaaagagtacattcttcacaatgactcctgtttagttatcagctgagtgcataccaatttcagaaagcaggtatttcatttgaagtcacttgaa

SEQ ID NO: 15941 - DNA, 600 bp, Chicken  19866894222889_1
gggcttggcttttgcctgttttataaaaaacttttcagtaggctcagaaaaagtcaacagcaagtcttggttctgctaaaggtgaaagaaaaagcacacgcagctccctgttttggtgcagggtagggtttaagggcttccgcctgcagcagaagatgcccccagcccagggcagtggcagtcactgaagtgctgagtgtcccttccctgtcatcaaagcctctgcatttttttatttcatgccttttaaaatttagaaatattttatttccttccttcggaaggacataattatctctktttttagctggatcccagtttcttaggaataatgtcatgaatcctatgaatgcattttatatgtcatacatgtgtgatcagtaggttttttagacttatataccatagactatcaatattacatttgctgctccaaccaggaggctttaataatacagatctaactttttactcttctgcaagacaaggcagcaaatttagattcctttaatcacatgaaaaatgatggatataactaggggattgaattttggaaacaatgcgaggacaaaagagttcctgatgggattctataaatat

SEQ ID NO: 15942 - DNA, 600 bp, Chicken  19866894222900_1
tgaagaaggagacttcaatcaaaatgtgcctaaaactaaggttcttaattgctgttattatttcactatatgaattactattattgatatcatgccaagcgtttaaccggaatcccccacactatcacactgtacacctaagcaaaccaggagtagtggtgggtacctcttatgtttgtttcatctcggctttttcttgttttcaactgaagctatccagggaaaatacagaagaaggtgattcataggatatatgaagaaatgaaggggtgctgggaagctagagagaaaataaatcaytgtgtgtgagggataggaaagggtatgagtagcagaaggtgataggtgaggaaacatgaagcactgggacaaatagtctttagcagaaaaggcagttttgagatgaaaaagagcatagtctgataaagtcaggggagctttcagagcaatctataaccctattcacttttgttgagaaagatcaggatagttttcttctttactttcttcagtacgctttgggaagacacatgtgggaagatcaagctaccgcttgtactaaaatgctctccaaaacctgaccacacttcatcttccctg

SEQ ID NO: 15943 - DNA, 600 bp, Chicken  19866894222904_1
ctcactggttgagtgtgctccttgtgtgctcctcggtcacaagcataagatgcaggagccacatgacagcagcaggagcagacatgcactgcagagggtgagtgtacagccagagtcctgagcagggcacaactgtggtctgtgcccttaggactgggaatggaaatatgagcggctcactgcaagctgcgtggtctgagtttctttatcaaatgcttttcaaaccaagcagtcatcattagcaacaggagaggaaacaaacatcaggtttgttcctaaatgactcctgaagttttatcrctgccagtaggtaaagtcacaaattcaaggtttaaaaagacaaaaacaaattatgctgcctacaacaacagctcagatctctgacaagtgtagacrgagatccatcactgaaccaacttcagtgatattcttctcattttttttaaatagaactaagctccatataaagttacttgtgtacagtgatttatgattatcccccttctcacataacttcctgccttccagaatgaggaacgcctctctcagctctatacaacagttactggccatctttccagtgacctcaactaacacata

SEQ ID NO: 15944 - DNA, 600 bp, Chicken  19866894222904_2
ggtgagtgtacagccagagtcctgagcagggcacaactgtggtctgtgcccttaggactgggaatggaaatatgagcggctcactgcaagctgcgtggtctgagtttctttatcaaatgcttttcaaaccaagcagtcatcattagcaacaggagaggaaacaaacatcaggtttgttcctaaatgactcctgaagttttatcrctgccagtaggtaaagtcacaaattcaaggtttaaaaagacaaaaacaaattatgctgcctacaacaacagctcagatctctgacaagtgtagacrgagatccatcactgaaccaacttcagtgatattcttctcattttttttaaatagaactaagctccatataaagttacttgtgtacagtgatttatgattatcccccttctcacataacttcctgccttccagaatgaggaacgcctctctcagctctatacaacagttactggccatctttccagtgacctcaactaacacatatcaaattgaacttaatcttaagacataacagcaaaaagtgaagagtgagtacactgacccagtatgtttttaactcaatgccatggaaaggcaaac

SEQ ID NO: 15945 - DNA, 600 bp, Chicken  19866894222904_3
gtctgtgcccttaggactgggaatggaaatatgagcggctcactgcaagctgcgtggtctgagtttctttatcaaatgcttttcaaaccaagcagtcatcattagcaacaggagaggaaacaaacatcaggtttgttcctaaatgactcctgaagttttatcrctgccagtaggtaaagtcacaaattcaaggtttaaaaagacaaaaacaaattatgctgcctacaacaacagctcagatctctgacaagtgtagacrgagatccatcactgaaccaacttcagtgatattcttctcartttttttaaatagaactaagctccatataaagttacttgtgtacagtgatttatgattatcccccttctcacataacttcctgccttccagaatgaggaacgcctctctcagctctatacaacagttactggccatctttccagtgacctcaactaacacatatcaaattgaacttaatcttaagacataacagcaaaaagtgaagagtgagtacactgacccagtatgtttttaactcaatgccatggaaaggcaaacgcttgcagctcctgctgacttcacagggagaggcagggaac

SEQ ID NO: 15946 - DNA, 600 bp, Chicken  19866894222904_4; identical to SEQ ID NO: 15945

SEQ ID NO: 15947 - DNA, 600 bp, Chicken  19866894222907_1
tagccagagggcactggaagtggggaaatggtagatagaacagggatgacagcatctgccagggtttgtgtactcacaggaatttcccatcgggttgtgccccggagtagagcctccgctcagcttcatcccgggcaatgttgccatggtaccagggcatcctctcatgggctgtggtggcaatgagcttctccacctgcggggcctggcttataatggcctgttcaagggcatccccctggaagagagagagaagtgaggcatggctccagcgcatcttggagtgatgtcacaagaaayttggatggtcccrtaactgaagcaccaatggctttaatcatgcccgaagcacagctggatagaattttgttattctgtgtatcactattactcacttatctaaattgctttctcctcttaaacgcatctgatgcccatttatttgctggtgagggaacgagaggtaatggcctcaattgctgcaggggaggttcgagttggatagtatgaacaatttcttctcaaaaagggtgatgatatattggccagggaagtggtgaagtcaccatccctggaggtgtccaagaatcgtggagatgt

SEQ ID NO: 15948 - DNA, 600 bp, Chicken  19866894222907_2
ctggaagtggggaaatggtagatagaacagggatgacagcatctgccagggtttgtgtactcacaggaatttcccatcgggttgtgccccggagtagagcctccgctcagcttcatcccgggcaatgttgccatggtaccagggcatcctctcatgggctgtggtggcaatgagcttctccacctgcggggcctggcttataatggcctgttcaagggcatccccctggaagagagagagaagtgaggcatggctccagcgcatcttggagtgatgtcacaagaaayttggatggtcccrtaactgaagcaccaatggctttaatcatgcccgaagcacagctggatagaattttgttattctgtgtatcactattactcacttatctaaattgctttctcctcttaaacgcatctgatgcccatttatttgctggtgagggaacgagaggtaatggcctcaattgctgcaggggaggttcgagttggatagtatgaacaatttcttctcaaaaagggtgatgatatattggccagggaagtggtgaagtcaccatccctggaggtgtccaagaatcgtggagatgtggcactgagagac

SEQ ID NO: 15949 - DNA, 600 bp, Chicken  19866894222908_1
aatctagactattttgcataatgatgaaaatcagttgtctgactcgaggaagtaaatcctgtctaaaccatcacaaatatatcaacttcaagtcagtggagcataatattgagtagttgtactgtgccagcttacatgggttctcattattatgtttagataatggctttttgtaaatagaaataatacttttatctcttttcagagacattactgtcttaaaagatttctatgtacatcagtagttatattttcactgacacatgcttatttattaaacaaaaccaaccaaagaaaaaraaactgataatgtgggaaggaaacatttatgctatggattctcaataaaggatttaatttcctacctacagaacaaggatcaaagaaattacttcttcaaaagaacttgatatccatatgccacgtgagctctagtttagcattgcctcttaatgaaagagaaactgtagagaatagttagagaaactcctgcttttgcaaaaaaatatggaatgtttgtgagggaaagtagtcattttagttttccatttcaaaagggaaataaagtgcataaaacaattgcataaaattgattaatta

SEQ ID NO: 15950 - DNA, 599 bp, Chicken  19866894222909_1
  misc_feature (1)..(231): n is any nucleotide
nnnnnnnnnnnnnnnnnnnnnnnnnnnnnnnnnnnnnnnnnnnnnnnnnnnnnnnnnnnnnnnnnnnnnnnnnnnnnnnnnnnnnnnnnnnnnnnnnnnnnnnnnnnnnnnnnnnnnnnnnnnnnnnnnnnnnnnnnnnnnnnnnnnnnnnnnnnnnnnnnnnnnnnnnnnnnnnnnnnnnnnnnnnnnnnnnnnnnnnnnnnnnnnnnnnnnnnnnnnnnnnnnnnnnnnttacgagctctgggaaaacaaccagtgacacttgcacctctctaatgtgctacttgctgcctgtggctrcttcctgtgctgcctatccaaagcgtcccagagaccacacaaggcttcttcctgccatgaagtgctggggcagttgagactgctgcagacagaaaagctaactctctgctacaagtacagtctctccagagctgtragtgatgtggggcaaccaggctggatggctgagggtcaccaaggagcttaacacaaggcccaggggatgaaaggaccacctgagaacwgtcccaggtaatgcaacagcaagaagcaatgctgactggygaccattttctaagacagtaaagacaatttaaaaa

SEQ ID NO: 15951 - DNA, 600 bp, Chicken  19866894222909_10
agaatatttgctcctgcaacagcttcctttcttgctcttgtaatcaaacaccatgcatgactagcaaagcagtcatccgactggcaagacaacagtttaagccaaaaccagatgtgcaagttagtgttttatcagttcatccatccctcarcaggccctgctgttaaaatggttctaaaacgttaaatactgcatcagctgccattttattttagaagtgatcttctaaaagggctctaaagccatacccgcaggaaacacattwaactccagggccaagcagagcaccaagcagatgaygcagctcttccaggctgctgggcaaatccattccctactctctccacttgagcagataacgacaggagcccagggaacacagcacagctctggtacrgttgaggaagagttgaaacgatgctgaaacattcaaacacttccaactcttgacccataaatgctctgagcttcaagtcagctgacagcagctcagttgcttttcatggcacaaggaaaagtatgtcaagctagaatgctggtggtgaaactgtgtcttgaaaagaccactctgtatactgactgcctatggctcacagactg

SEQ ID NO: 15952 - DNA, 600 bp, Chicken  19866894222909_11
taagccaaaaccagatgtgcaagttagtgttttatcagttcatccatccctcarcaggccctgctgttaaaatggttctaaaacgttaaatactgcatcagctgccattttattttagaagtgatcttctaaaagggctctaaagccatacccgcaggaaacacattwaactccagggccaagcagagcaccaagcagatgaygcagctcttccaggctgctgggcaaatccattccctactctctccacttgagcagataacgacaggagcccagggaacacagcacagctctggtacrgttgaggaagagttgaaacgatgctgaaacattcaaacacttccaactcttgacccataaatgctctgagcttcaagtcagctgacagcagctcagttgcttttcatggcacaaggaaaagtatgtcaagctagaatgctggtggtgaaactgtgtcttgaaaagaccactctgtatactgactgcctatggctcacagactgcaactgtcagagcctggagagactgcagaactcttccatccctgggtttatccgggaaaaaatgtcaagtttttggatatataatttcttactagtc

SEQ ID NO: 15953 - DNA, 599 bp, Chicken  19866894222909_2
  misc_feature (1)..(95): n is any nucleotide
nnnnnnnnnnnnnnnnnnnnnnnnnnnnnnnnnnnnnnnnnnnnnnnnnnnnnnnnnnnnnnnnnnnnnnnnnnnnnnnnnnnnnnnnnnnnnnnttacgagctctgggaaaacaaccagtgacacttgcacctctctaatgtgctacttgctgcctgtggctrcttcctgtgctgcctatccaaagcgtcccagagaccacacaaggcttcttcctgccatgaagtgctggggcagttgagactgctgcagacagaaaagctaactctctgctacaagtacagtctctccagagctgtragtgatgtggggcaaccaggctggatggctgagggtcaccaaggagcttaacacaaggcccaggggatgaaaggaccacctgagaacwgtcccaggtaatgcaacagcaagaagcaatgctgactggygaccattttctaagacagtaaagacaatttaaaaaaaaacacaaccagttaagcctcattcaaacaaaactgawagcttcaaaaacctccgtttacaaattagaaggggactgttttgcagtgcagttaagcttaccaagttgctatayagatatggctgtacagaatttg

SEQ ID NO: 15954 - DNA, 599 bp, Chicken  19866894222909_3
  misc_feature (1)..(7): n is any nucleotide
nnnnnnnttacgagctctgggaaaacaaccagtgacacttgcacctctctaatgtgctacttgctgcctgtggctrcttcctgtgctgcctatccaaagcgtcccagagaccacacaaggcttcttcctgccatgaagtgctggggcagttgagactgctgcagacagaaaagctaactctctgctacaagtacagtctctccagagctgtragtgatgtggggcaaccaggctggatggctgagggtcaccaaggagcttaacacaaggcccaggggatgaaaggaccacctgagaacwgtcccaggtaatgcaacagcaagaagcaatgctgactggygaccattttctaagacagtaaagacaatttaaaaaaaaacacaaccagttaagcctcattcaaacaaaactgawagcttcaaaaacctccgtttacaaattagaaggggactgttttgcagtgcagttaagcttaccaagttgctatayagatatggctgtacagaatttgtttaaaaaataagygaggttgtgaacttctagacagctcacacttgtagccacgtgcaagttaagatgacgtgtacagtaccatcctg

SEQ ID NO: 15955 - DNA, 600 bp, Chicken  19866894222909_4
gcacctctctaatgtgctacttgctgcctgtggctrcttcctgtgctgcctatccaaagcgtcccagagaccacacaaggcttcttcctgccatgaagtgctggggcagttgagactgctgcagacagaaaagctaactctctgctacaagtacagtctctccagagctgtragtgatgtggggcaaccaggctggatggctgagggtcaccaaggagcttaacacaaggcccaggggatgaaaggaccacctgagaacwgtcccaggtaatgcaacagcaagaagcaatgctgactggygaccattttctaagacagtaaagacaatttaaaaaaaaacacaaccagttaagcctcattcaaacaaaactgawagcttcaaaaacctccgtttacaaattagaaggggactgttttgcagtgcagttaagcttaccaagttgctatayagatatggctgtacagaatttgtttaaaaaataagygaggttgtgaacttctagacagctcacacttgtagccacgtgcaagttaagatgacgtgtacagtaccatcctgcttaccttcaacgtcttccaacacaagtttcacctgaaacc

SEQ ID NO: 15956 - DNA, 600 bp, Chicken  19866894222909_5
acaaggcttcttcctgccatgaagtgctggggcagttgagactgctgcagacagaaaagctaactctctgctacaagtacagtctctccagagctgtragtgatgtggggcaaccaggctggatggctgagggtcaccaaggagcttaacacaaggcccaggggatgaaaggaccacctgagaacwgtcccaggtaatgcaacagcaagaagcaatgctgactggygaccattttctaagacagtaaagacaatttaaaaaaaaacacaaccagttaagcctcattcaaacaaaactgawagcttcaaaaacctccgtttacaaattagaaggggactgttttgcagtgcagttaagcttaccaagttgctatayagatatggctgtacagaatttgtttaaaaaataagygaggttgtgaacttctagacagctcacacttgtagccacgtgcaagttaagatgacgtgtacagtaccatcctgcttaccttcaacgtcttccaacacaagtttcacctgaaaccaaactgcacagaataatgctgtaagaccatataacatacacaatgccaaggtatcctttgactccttaaaatac

SEQ ID NO: 15957 - DNA, 600 bp, Chicken  19866894222909_6
agtacagtctctccagagctgtragtgatgtggggcaaccaggctggatggctgagggtcaccaaggagcttaacacaaggcccaggggatgaaaggaccacctgagaacwgtcccaggtaatgcaacagcaagaagcaatgctgactggygaccattttctaagacagtaaagacaatttaaaaaaaaacacaaccagttaagcctcattcaaacaaaactgawagcttcaaaaacctccgtttacaaattagaaggggactgttttgcagtgcagttaagcttaccaagttgctatayagatatggctgtacagaatttgtttaaaaaataagygaggttgtgaacttctagacagctcacacttgtagccacgtgcaagttaagatgacgtgtacagtaccatcctgcttaccttcaacgtcttccaacacaagtttcacctgaaaccaaactgcacagaataatgctgtaagaccatataacatacacaatgccaaggtatcctttgactccttaaaatactgtgatttcttgcatgttctcactgcctaatgttaaatacattcgaaacaagtgaaagcgtttgtatagtcagct

SEQ ID NO: 15958 - DNA, 600 bp, Chicken  19866894222909_7
aaccaggctggatggctgagggtcaccaaggagcttaacacaaggcccaggggatgaaaggaccacctgagaacwgtcccaggtaatgcaacagcaagaagcaatgctgactggygaccattttctaagacagtaaagacaatttaaaaaaaaacacaaccagttaagcctcattcaaacaaaactgawagcttcaaaaacctccgtttacaaattagaaggggactgttttgcagtgcagttaagcttaccaagttgctatayagatatggctgtacagaatttgtttaaaaaataagygaggttgtgaacttctagacagctcacacttgtagccacgtgcaagttaagatgacgtgtacagtaccatcctgcttaccttcaacgtcttccaacacaagtttcacctgaaaccaaactgcacagaataatgctgtaagaccatataacatacacaatgccaaggtatcctttgactccttaaaatactgtgatttcttgcatgttctcactgcctaatgttaaatacattcgaaacaagtgaaagcgtttgtatagtcagcttgaaattgccagtctctacacttgtgcagcactgta

SEQ ID NO: 15959 - DNA, 600 bp, Chicken  19866894222909_8
aacgctgtgttactgaggtcgagtcttcaaacattgtatccaatcaggcctcgtttgcctatgatctcaccaatgtaaaaccacatcagcacctctgtggccaccaaaccgttcctcagcgcttcctgaaagaaaaaaagccacaatttagaatatttgctcctgcaacagcttcctttcttgctcttgtaatcaaacaccatgcatgactagcaaagcagtcatccgactggcaagacaacagtttaagccaaaaccagatgtgcaagttagtgttttatcagttcatccatccctcarcaggccctgctgttaaaatggttctaaaacgttaaatactgcatcagctgccattttattttagaagtgatcttctaaaagggctctaaagccatacccgcaggaaacacattwaactccagggccaagcagagcaccaagcagatgaygcagctcttccaggctgctgggcaaatccattccctactctctccacttgagcagataacgacaggagcccagggaacacagcacagctctggtacrgttgaggaagagttgaaacgatgctgaaacattcaaacacttccaactcttgac

SEQ ID NO: 15960 - DNA, 600 bp, Chicken  19866894222909_9
ctcagcgcttcctgaaagaaaaaaagccacaatttagaatatttgctcctgcaacagcttcctttcttgctcttgtaatcaaacaccatgcatgactagcaaagcagtcatccgactggcaagacaacagtttaagccaaaaccagatgtgcaagttagtgttttatcagttcatccatccctcarcaggccctgctgttaaaatggttctaaaacgttaaatactgcatcagctgccattttattttagaagtgatcttctaaaagggctctaaagccatacccgcaggaaacacattwaactccagggccaagcagagcaccaagcagatgaygcagctcttccaggctgctgggcaaatccattccctactctctccacttgagcagataacgacaggagcccagggaacacagcacagctctggtacrgttgaggaagagttgaaacgatgctgaaacattcaaacacttccaactcttgacccataaatgctctgagcttcaagtcagctgacagcagctcagttgcttttcatggcacaaggaaaagtatgtcaagctagaatgctggtggtgaaactgtgtcttgaaaagacc

SEQ ID NO: 15961 - DNA, 599 bp, Chicken  19866894222914_1
  misc_feature (1)..(111): n is any nucleotide
nnnnnnnnnnnnnnnnnnnnnnnnnnnnnnnnnnnnnnnnnnnnnnnnnnnnnnnnnnnnnnnnnnnnnnnnnnnnnnnnnnnnnnnnnnnnnnnnnnnnnnnnnnnnnnngcctttgtctttggtgaagacctgatgccttcagagcactgcaaaaattgcagggatcagttagtatgtgacacacacagcgctgcaggcttcattacctgtgggcactcaggcaacaggcatgaggtggaatttgattagtcttaaaaggagttctaaagggattaagtggaattggtagtagttcaytgaggatttcagaacattttacagctctgtgatattcccagtgggtggcaaccctgtcggtggcagggggtggaactggatgatctttaaggtcccttacaacctaagccattctttgatttggtgattctatgatttctgatgcttaatttgatccggattgtcatttgagcatcagaaaggtaaaatgaaacacatacgacgagctgtttgtattacagaaggccatgtcatgacagtgggacccagaaccacttctcagctcccagatatttcctcactgtgctgggatgtgtctg

SEQ ID NO: 15962 - DNA, 600 bp, Chicken  19866894222916_1
tatggtcgtccattggctgtttgcagtagaattttcaaaagttttcagaaatcacctttgccagggaagtttgcatttcattttaacaggacaaacgttattctatcccatattagttaaaccagaaagctactcttccctattcccttcttcctcttccgtccatgtgcagaagatgttaatgggggaggcctgaggtgtttcccaatctcctcctgccccggtgatggcatgcagtgctgtgtgcccccccgggtgctggagggaagcactgggctggcaggatccacggatgcccaygatgttctgagatagtcttccaaaactggatctccacatgcttacctgcaaatgttcttagagttaaaaatcttaaaaaaaaagaaagggaaaaaatgcaataaaatatgtcagcaattgtccacagggctgatacgtagcagaattaagtattaactatgggctttctgtgctagcactgcagagaggcacctcataaggacagatggtgccaaaggctgcctgtgtcagaaatccatacaggagatgtaaagcgtgtgggaaatccccaccttcgcaaacccctggggctgtgtggga

SEQ ID NO: 15963 - DNA, 560 bp, Chicken  19866894222919_1
ccggctgggttaagtgtggggttggcttttatttccatttgaagctgagattccccagtgcctggggccattctgctccactgaggcacgtggagctccaggcaaggtgacacctgaccctagaaaagtcccttgctgaaccaatagaaccctgcacagagatatgatagagaaatcactgctgtgatggatgtgagtgcgtgtctgccgtgtactgtctgtggtaatgcatctggagggaaatgtccatcattttccaggttactgaatccctgtgtagccctcagccatgaggctaasagttgccattctgtgtttgcttcagagatcagtataatcccaacctacaggctggctcctttcacagacattttgtgtccttagtcgtgttttgtaaaaagaaactggacaaccagcccgaaaaatacccttttattcttcatgttgcctaagcaatatctgaaaataagctccttctgcatttgtacctatttaatttaaaactgctcctatagatcagtgatattaaggtgttgctcagcatctttcatgggcagagg

SEQ ID NO: 15964 - DNA, 499 bp, Chicken  19866894222926_1
tggtttgattctcccataaaagggttggaaatccaatacaactattgacatgcagagatctttacaacagcagaaagcagatgctctggccaaggatcaaagctttgagcactggtttaggccatccaggaggtcatttcctgacctccaaatctccctttccaacatgaaagttctgctgatttattctttcacttgtttgcactgcttatgtggatgagatagagcacagaaactggaacttttaggagctgtgtggcactgggagagaaatgaggggtgtggggcagaaacaaggargcatgaaggcaccacatggttggggttgggttggtggcactgcatggtaggtgttggggtgatggcaccatgtgtttggggttgggttggtggcaccatgtggttggggttgggttagcaacaccacaaggttgaggttgggttggtgacactgcatggttggggtagggggcactgcatggtggttggggttgggttg

SEQ ID NO: 15965 - DNA, 600 bp, Chicken  19866894222936_1
gaaatcctcctgctctaagaacagccaattttatgccagaaaaataatttaagagaaaagacaaagaaaaacgattaactgctttgaacattcttatataatagagtacataggatatatatatgtatgtacgtatgtatgtatgtatatatttgttgttgttgttgttatggtttattctgcctcacttgttttagaataaaagacagtcttggaaaagtgagctgattatgttccagggatgagctctttatttagtagctaggctttatttggtagctaggctcaaccatattactyctgacatacatgcagaagttaaattaatacaactctttctgttttcattctttttgcatttttggttgatttaaaaactattgattgaacaagcatgggttgaagagtgagatttcagtattattccactgaaaagtgctgtaagtttgtcataaatgtttgctgtattgtacactaacagaaagtgttaaacgttcatatagagtgcttcgtagaaatgcagtatttcaaaaggcattgagagcacaaaaagtatgtgatattgccagttaacatctgctgacagaacattatcaacag

SEQ ID NO: 15966 - DNA, 600 bp, Chicken  19866894222942_1
agaatttatccctcaacgctgtatgtttctttgaatgaaacctgcactatcctgaacagtcctgaacaaagagagagagttttcttcatttacaataaaattcagaaattgaaatgatcagtaaaatgtatgaggcatagcaggcagaatggtttggttaaaacataagatactatgatttctaaggctagtaaaacagtggctggatttttttcccccctagaatgactaaaatataagcatacagaccctcactcctcttgttttgtaactacagactcattacaatgctgttgcagyggtgtaaaaaggcaccactawcacatttttattagacttggttttccacttcactagaaaaataaaactactgaaatttgatgcgttgacattatctttagtacagtgaatgctcttatttcaaaatatttattaaaaactcaaagcatttgtataaccaagtaaatccaatgtactgtaaaatataaaggaaagcatgatattaatttcacttcaggcttgactacagatgataaggactacaggaaaatgacttgtcgttttgtgattgtaagtttaggcttttgaatcaggtaacac

SEQ ID NO: 15967 - DNA, 600 bp, Chicken  19866894222942_2
tatgtttctttgaatgaaacctgcactatcctgaacagtcctgaacaaagagagagagttttcttcatttacaataaaattcagaaattgaaatgatcagtaaaatgtatgaggcatagcaggcagaatggtttggttaaaacataagatactatgatttctaaggctagtaaaacagtggctggatttttttcccccctagaatgactaaaatataagcatacagaccctcactcctcttgttttgtaactacagactcattacaatgctgttgcagyggtgtaaaaaggcaccactawcacatttttattagacttggttttccacttcactagaaaaataaaactactgaaatttgatgcgttgacattatctttagtacagtgaatgctcttatttcaaaatatttattaaaaactcaaagcatttgtataaccaagtaaatccaatgtactgtaaaatataaaggaaagcatgatattaatttcacttcaggcttgactacagatgataaggactacaggaaaatgacttgtcgttttgtgattgtaagtttaggcttttgaatcaggtaacacaaaatgttgtgtattcatcca

SEQ ID NO: 15968 - DNA, 599 bp, Chicken  19866894222945_1
  misc_feature (1)..(104): n is any nucleotide
nnnnnnnnnnnnnnnnnnnnnnnnnnnnnnnnnnnnnnnnnnnnnnnnnnnnnnnnnnnnnnnnnnnnnnnnnnnnnnnnnnnnnnnnnnnnnnnnnnnnnnnnatgtaaaggcaagtgaatttgcaacataatagtacttttctaatcttcattcctactattaatcagtctttaatgttgcttatctggatataaacaatataactggaaataggactttatattacgaagaaacttgactgaattgaaagcttgttttatgtaactttctgtttcattgcaagtaatcaaattgctrtatatataaaaaaaatatatgaagttcatgctgccaatatgccatattttaggtatcgaagaagagctcacgtaacacctaaatcttatctctctttcatcaatggctacaaagaagtttatgctgaaaagttagcaagtattaatgaacaagctgaacgtatgcaaattggtaagcrtgatgagatatattttcatgtttagtctcaaatgatctgtgtttttaatattaagcatcttaatcagtgatgacttagaatcatttctgttaatcacagtcctaaaccagtagccggtgat

SEQ ID NO: 15969 - DNA, 600 bp, Chicken  19866894222945_2
gttgcttatctggatataaacaatataactggaaataggactttatattacgaagaaacttgactgaattgaaagcttgttttatgtaactttctgtttcattgcaagtaatcaaattgctrtatatataaaaaaaatatatgaagttcatgctgccaatatgccatattttaggtatcgaagaagagctcacgtaacacctaaatcttatctctctttcatcaatggctacaaagaagtttatgctgaaaagttagcaagtattaatgaacaagctgaacgtatgcaaattggtaagcrtgatgagatatattttcatgtttagtctcaaatgatctgtgtttttaatattaagcatcttaatcagtgatgacttagaatcatttctgttaatcacagtcctaaaccagtagccggtgataaycacttttgagcacttcagctatcacagagccacaataaccctcttaaaagcatgcctcaaagaasttgtctatttaatcatccatcatagcattatactaaactttagtacttccactttagcatttttaatagaaagtaggacatgaaatggccaaagagagccccttatttcct

SEQ ID NO: 15970 - DNA, 600 bp, Chicken  19866894222945_3
tatataaaaaaaatatatgaagttcatgctgccaatatgccatattttaggtatcgaagaagagctcacgtaacacctaaatcttatctctctttcatcaatggctacaaagaagtttatgctgaaaagttagcaagtattaatgaacaagctgaacgtatgcaaattggtaagcrtgatgagatatattttcatgtttagtctcaaatgatctgtgtttttaatattaagcatcttaatcagtgatgacttagaatcatttctgttaatcacagtcctaaaccagtagccggtgataaycacttttgagcacttcagctatcacagagccacaataaccctcttaaaagcatgcctcaaagaasttgtctatttaatcatccatcatagcattatactaaactttagtacttccactttagcatttttaatagaaagtaggacatgaaatggccaaagagagccccttatttcctcttgtagagaggcagatctaaaggctattatttatttctggacttcacagagtcctagaatcacttaacttagaccctcaaaaatcatctagtccaactctcaacttgtctatgaaaaccyttc

SEQ ID NO: 15971 - DNA, 600 bp, Chicken  19866894222945_4
tcacgtaacacctaaatcttatctctctttcatcaatggctacaaagaagtttatgctgaaaagttagcaagtattaatgaacaagctgaacgtatgcaaattggtaagcrtgatgagatatattttcatgtttagtctcaaatgatctgtgtttttaatattaagcatcttaatcagtgatgacttagaatcatttctgttaatcacagtcctaaaccagtagccggtgataaycacttttgagcacttcagctatcacagagccacaataaccctcttaaaagcatgcctcaaagaasttgtctatttaatcatccatcatagcattatactaaactttagtacttccactttagcatttttaatagaaagtaggacatgaaatggccaaagagagccccttatttcctcttgtagagaggcagatctaaaggctattatttatttctggacttcacagagtcctagaatcacttaacttagaccctcaaaaatcatctagtccaactctcaacttgtctatgaaaaccyttctatacaatctgattgtttcattgttgatttatttaagatttctgctgtgcaatgagcagctgctg

SEQ ID NO: 15972 - DNA, 600 bp, Chicken  19866894222945_5
aaycacttttgagcacttcagctatcacagagccacaataaccctcttaaaagcatgcctcaaagaasttgtctatttaatcatccatcatagcattatactaaactttagtacttccactttagcatttttaatagaaagtaggacatgaaatggccaaagagagccccttatttcctcttgtagagaggcagatctaaaggctattatttatttctggacttcacagagtcctagaatcacttaacttagaccctcaaaaatcatctagtccaactctcaacttgtctatgaaaaccyttctatacaatctgattgtttcattgttgatttatttaagatttctgctgtgcaatgagcagctgctgtgtgtggtcattttataaatagagatctgaaatacaggaaagtaagacttacatgttcttctaattttaagtatctgtttgaagtgatcyaattttccacttacagtacttaatacttaattttccacttaatagtactgaataggttcatagtacagtttcagttttctaccatttgcatttagacakactttcrtaaatctacaatggaacagtttagaaaacttgatag

SEQ ID NO: 15973 - DNA, 600 bp, Chicken  19866894222945_6
aaagagagccccttatttcctcttgtagagaggcagatctaaaggctattatttatttctggacttcacagagtcctagaatcacttaacttagaccctcaaaaatcatctagtccaactctcaacttgtctatgaaaaccyttctatacaatctgattgtttcattgttgatttatttaagatttctgctgtgcaatgagcagctgctgtgtgtggtcattttataaatagagatctgaaatacaggaaagtaagacttacatgttcttctaattttaagtatctgtttgaagtgatcyaattttccacttacagtacttaatacttaattttccacttaatagtactgaataggttcatagtacagtttcagttttctaccatttgcatttagacakactttcrtaaatctacaatggaacagtttagaaaacttgatagaaggtactctattttagtttaccaaaacagagaaacatatacataagattttttcttacaaacttttaaaaaaaaaaaaaaagacatagttttagacaatgattaagaatgcagcatgaagaatagaataagcatgtgtgggtattttattcacaggc

SEQ ID NO: 15974 - DNA, 600 bp, Chicken  19866894222945_7
caaaaatcatctagtccaactctcaacttgtctatgaaaaccyttctatacaatctgattgtttcattgttgatttatttaagatttctgctgtgcaatgagcagctgctgtgtgtggtcattttataaatagagatctgaaatacaggaaagtaagacttacatgttcttctaattttaagtatctgtttgaagtgatcyaattttccacttacagtacttaatacttaattttccacttaatagtactgaataggttcatagtacagtttcagttttctaccatttgcatttagacakactttcrtaaatctacaatggaacagtttagaaaacttgatagaaggtactctattttagtttaccaaaacagagaaacatatacataagattttttcttacaaacttttaaaaaaaaaaaaaaagacatagttttagacaatgattaagaatgcagcatgaagaatagaataagcatgtgtgggtattttattcacaggctgctgaatcaggacggtacataggaaaataagtgatccacaacattttgacataatgcacatttccctgcacagatctgttgccagttctagaaatcat

SEQ ID NO: 15975 - DNA, 600 bp, Chicken  19866894222945_8
catctagtccaactctcaacttgtctatgaaaaccyttctatacaatctgattgtttcattgttgatttatttaagatttctgctgtgcaatgagcagctgctgtgtgtggtcattttataaatagagatctgaaatacaggaaagtaagacttacatgttcttctaattttaagtatctgtttgaagtgatcyaattttccacttacagtacttaatacttaattttccacttaatagtactgaataggttcatagtacagtttcagttttctaccatttgcatttagacakactttcrtaaatctacaatggaacagtttagaaaacttgatagaaggtactctattttagtttaccaaaacagagaaacatatacataagattttttcttacaaacttttaaaaaaaaaaaaaaagacatagttttagacaatgattaagaatgcagcatgaagaatagaataagcatgtgtgggtattttattcacaggctgctgaatcaggacggtacataggaaaataagtgatccacaacattttgacataatgcacatttccctgcacagatctgttgccagttctagaaatcataggattc

SEQ ID NO: 15976 - DNA, 600 bp, Chicken  19866894222963_1
ccagcgaggaacaacgaaaaggtttttctgcccctccttgcaaaaattcctccccaaactctgccaggtgctccctctgtgttccttgcctaatccttttcactttgttttccgctttgctttactgtgttctcgtatatttctttaaccggccttaaactttgtgacgtaacgtctgctttggtaattcgttaatggctcacaaactgctgagcactgaaagaatctggtccttttcgcctcagtttctcttacctccttaatgaggacagtcactctgagcacaaaccaaagtccacrtagctggggcaggcaggctgtggaagcaygggacacaacagaggagaaagaaggcagcactgatttccgtctgctgcttttaccttgtgaaactggtaatrggagactgctctgctgctctggcagataaggcctctctgacaaagacacaattatttgcagcctgttctccattccccggagacgcctattgagttcagtggctcagcagactgtacctgttttgaactcaagcattttacagcaaggaacgctcttccatttctcagaagcatcagccgaccacagctctgagcagaa

SEQ ID NO: 15977 - DNA, 586 bp, Chicken  19866894222963_2
gcccctccttgcaaaaattcctccccaaactctgccaggtgctccctctgtgttccttgcctaatccttttcactttgttttccgctttgctttactgtgttctcgtatatttctttaaccggccttaaactttgtgacgtaacgtctgctttggtaattcgttaatggctcacaaactgctgagcactgaaagaatctggtccttttcgcctcagtttctcttacctccttaatgaggacagtcactctgagcacaaaccaaagtccacrtagctggggcaggcaggctgtggaagcaygggacacaacagaggagaaagaaggcagcactgatttccgtctgctgcttttaccttgtgaaactggtaatrggagactgctctgctgctctggcagataaggcctctctgacaaagacacaattatttgcagcctgttctccattccccggagacgcctattgagttcagtggctcagcagactgtacctgttttgaactcaagcattttacagcaaggaacgctcttccatttctcagaagcatcagccgaccacagctctgagcagaatcccgctctacacaa

SEQ ID NO: 15978 - DNA, 514 bp, Chicken  19866894222963_3
actttgttttccgctttgctttactgtgttctcgtatatttctttaaccggccttaaactttgtgacgtaacgtctgctttggtaattcgttaatggctcacaaactgctgagcactgaaagaatctggtccttttcgcctcagtttctcttacctccttaatgaggacagtcactctgagcacaaaccaaagtccacrtagctggggcaggcaggctgtggaagcaygggacacaacagaggagaaagaaggcagcactgatttccgtctgctgcttttaccttgtgaaactggtaatrggagactgctctgctgctctggcagataaggcctctctgacaaagacacaattatttgcagcctgttctccattccccggagacgcctattgagttcagtggctcagcagactgtacctgttttgaactcaagcattttacagcaaggaacgctcttccatttctcagaagcatcagccgaccacagctctgagcagaatcccgctctacacaa

SEQ ID NO: 15979 - DNA, 600 bp, Chicken  19866894222966_1
ggctcagaggagacctcattgcactctacaacttcctgaagggaggctgtgatgaggaggggtttggcctcttctcccaggcaacaaacaggacctgaggaaacagccacaagttgtatcagaggagatttagattagacataaggagaaactttttctctcggagagtggtcaggcactggaatggcctgcccagggaggtggtggagttgccatccctggcagtgttcaagaggcatctggatgaggagctacaagatatggtttagtagcttgtggtagcagtggtaatgggaggayggttggactagatggccttgtaggtcctttccaaccttgtgatcctatgattctgtgatacagatctatggtagtgaggtgatctattgtctggaaactgcagcactccaggacagggggctgtgtcgtttctcataaggggtggactacataggttcacacagacctgggggctgctgggcagtggcagccaggtgctgttgatataggtgtcctgggggattttcctatcaccagcttgttaactgaagctgaaggctgcayctcaaggcaaaatcygcatttaggcttggcggattt

SEQ ID NO: 15980 - DNA, 600 bp, Chicken  19866894222966_2
tttagtagcttgtggtagcagtggtaatgggaggayggttggactagatggccttgtaggtcctttccaaccttgtgatcctatgattctgtgatacagatctatggtagtgaggtgatctattgtctggaaactgcagcactccaggacagggggctgtgtcgtttctcataaggggtggactacataggttcacacagacctgggggctgctgggcagtggcagccaggtgctgttgatataggtgtcctgggggattttcctatcaccagcttgttaactgaagctgaaggctgcayctcaaggcaaaatcygcatttaggcttggcggattttaatgttggctttaagaaagtagtcttctccaaagttgatacctttgggaggatagttgtgagctgtagcacctgagcaggtgggcatctcacacttgaggattcttttctatccagcagttacagtgggagcctggagtaaatgcagttctcatacagattcatctattaaccctaaacacaagaacacaatgagaatagctgggggccacacctgatctgaatcttctctgcttcctctctgctttccagccatactttggt

SEQ ID NO: 15981 - DNA, 600 bp, Chicken  19866894222966_3
tagcagtggtaatgggaggayggttggactagatggccttgtaggtcctttccaaccttgtgatcctatgattctgtgatacagatctatggtagtgaggtgatctattgtctggaaactgcagcactccaggacagggggctgtgtcgtttctcataaggggtggactacataggttcacacagacctgggggctgctgggcagtggcagccaggtgctgttgatataggtgtcctgggggattttcctatcaccagcttgttaactgaagctgaaggctgcayctcaaggcaaaatcygcatttaggcttggcggattttaatgttggctttaagaaagtagtcttctccaaagttgatacctttgggaggatagttgtgagctgtagcacctgagcaggtgggcatctcacacttgaggattcttttctatccagcagttacagtgggagcctggagtaaatgcagttctcatacagattcatctattaaccctaaacacaagaacacaatgagaatagctgggggccacacctgatctgaatcttctctgcttcctctctgctttccagccatactttggttctttcttgggctgg

SEQ ID NO: 15982 - DNA, 599 bp, Chicken  19866894222972_1
  misc_feature (1)..(162): n is any nucleotide
nnnnnnnnnnnnnnnnnnnnnnnnnnnnnnnnnnnnnnnnnnnnnnnnnnnnnnnnnnnnnnnnnnnnnnnnnnnnnnnnnnnnnnnnnnnnnnnnnnnnnnnnnnnnnnnnnnnnnnnnnnnnnnnnnnnnnnnnnnnnnnnnnnnnnnnnnnnnnnnnnnctgaatgaaactaatgttgttatcctttgtaaggtaaagagtagagctcatttccgctgttctacttaaaaagtgaaagacatctgtaccataactgtaattattatttttatttactttgtggtagtacatggaggyctttgctagtatctttgtgctattattctttgtgaaaagtacagcaaagacacagttcctattcaagagagctaataatttgagaaaatgtgaaataccaggacatttttatgcacgcttgtctcttaactaatagtatctagatttaaactttaaactgctttcttttaccatgtgatgagttatrtcatccgttgtcatttctgcaggatatggaacattggcatgatacatttgttcttattaaagtaaacagtgaaattattgaaagctcttttgcaatcaataattttgtattt

SEQ ID NO: 15983 - DNA, 600 bp, Chicken  19866894222972_2
tttgtaaggtaaagagtagagctcatttccgctgttctacttaaaaagtgaaagacatctgtaccataactgtaattattatttttatttactttgtggtagtacatggaggyctttgctagtatctttgtgctattattctttgtgaaaagtacagcaaagacacagttcctattcaagagagctaataatttgagaaaatgtgaaataccaggacatttttatgcacgcttgtctcttaactaatagtatctagatttaaactttaaactgctttcttttaccatgtgatgagttatrtcatccgttgtcatttctgcaggatatggaacattggcatgatacatttgttcttattaaagtaaacagtgaaattattgaaagctcttttgcaatcaataattttgtatttcccccaaagttgacagataatattcytttttcctttttctttytgacagctggatggtatgtctamagttgttataattcataggtgaacagaggggagggagttttcaaaacaatgtattgtgatagcttaaaactgtggccataaaccagtgtttatccactttaaaagaagtgtgtgcatgtctc

SEQ ID NO: 15984 - DNA, 600 bp, Chicken  19866894222972_3
ttctttgtgaaaagtacagcaaagacacagttcctattcaagagagctaataatttgagaaaatgtgaaataccaggacatttttatgcacgcttgtctcttaactaatagtatctagatttaaactttaaactgctttcttttaccatgtgatgagttatrtcatccgttgtcatttctgcaggatatggaacattggcatgatacatttgttcttattaaagtaaacagtgaaattattgaaagctcttttgcaatcaataattttgtatttcccccaaagttgacagataatattcytttttcctttttctttytgacagctggatggtatgtctamagttgttataattcataggtgaacagaggggagggagttttcaaaacaatgtattgtgatagcttaaaactgtggccataaaccagtgtttatccactttaaaagaagtgtgtgcatgtctcactccatgaagggtacttctgtgactctcacagaagtcataaatccagatgaaaatctggtatggaaatagagccctgcacagtggcaaaagaaactccttgttacatgtgaggtctgagaaaaaattttgtaaggct

SEQ ID NO: 15985 - DNA, 600 bp, Chicken  19866894222972_4
agcaaagacacagttcctattcaagagagctaataatttgagaaaatgtgaaataccaggacatttttatgcacgcttgtctcttaactaatagtatctagatttaaactttaaactgctttcttttaccatgtgatgagttatrtcatccgttgtcatttctgcaggatatggaacattggcatgatacatttgttcttattaaagtaaacagtgaaattattgaaagctcttttgcaatcaataattttgtatttcccccaaagttgacagataatattcytttttcctttttctttytgacagctggatggtatgtctamagttgttataattcataggtgaacagaggggagggagttttcaaaacaatgtattgtgatagcttaaaactgtggccataaaccagtgtttatccactttaaaagaagtgtgtgcatgtctcactccatgaagggtacttctgtgactctcacagaagtcataaatccagatgaaaatctggtatggaaatagagccctgcacagtggcaaaagaaactccttgttacatgtgaggtctgagaaaaaattttgtaaggcttatacaaagttcctcat

SEQ ID NO: 15986 - DNA, 600 bp, Chicken  19866894222972_5
agagagctaataatttgagaaaatgtgaaataccaggacatttttatgcacgcttgtctcttaactaatagtatctagatttaaactttaaactgctttcttttaccatgtgatgagttatrtcatccgttgtcatttctgcaggatatggaacattggcatgatacatttgttcttattaaagtaaacagtgaaattattgaaagctcttttgcaatcaataattttgtatttcccccaaagttgacagataatattcytttttcctttttctttytgacagctggatggtatgtctamagttgttataattcataggtgaacagaggggagggagttttcaaaacaatgtattgtgatagcttaaaactgtggccataaaccagtgtttatccactttaaaagaagtgtgtgcatgtctcactccatgaagggtacttctgtgactctcacagaagtcataaatccagatgaaaatctggtatggaaatagagccctgcacagtggcaaaagaaactccttgttacatgtgaggtctgagaaaaaattttgtaaggcttatacaaagttcctcattggtggtggggaagaataggata

SEQ ID NO: 15987 - DNA, 600 bp, Chicken  19866894222973_1
caaacttctctgtaaaaggtaagatataagattgtgggaaaggaacattaaggaaaaatgtgcagaatcagactgaaatgcagaaaacattctttattagttgatagctgaagctaccaaattatcatctcagatgctttaaatacaaataaacaaaacgagagcaagcatttgggtgtataaaccactcctcataagacaagcaaataaacaatttctctgaagcttttgtgagatttcagaagtacaaatatagtatcagtcgcatacaagttgcataattcctgtatgtttatacasacaccctccaataattttcttccaaggacaaagattcagatttacccataaaggctagtaagaagtgtgggagtgttatcacttcacgacttctggtagagtagtttgcaggaaacacctcaaagaaatggttattcatgtctttcccagtgcagaattcttttgaccgataatagctatagaaagtagaagagaatatatattaatttcacaaaaaaacaatttggtgccaaagtaaacatatttttgtatcatagggcaaatctgcgtgcatcatgttttaataactggcttacgtat

SEQ ID NO: 15988 - DNA, 600 bp, Chicken  19866894222982_1
ctgtgctgttttgctgctcctatgccttcactggagattttacaatatgtcttgctgtgctactgaagaaatgcttcttagcagcagctactaagaattagatatctcgttgtgcgttgtaaacaaatatcagattaaggttacttgttaaaaatgtacacagagctgtaagagcagttggacagtacagcctaaattgccatcaaattaactggccaaaaaaaaagtatactttgctgtactcgttttcataaacaataatattcaatgagtatgggcaacttattccacttaagtctmgtttaaagcctaacagtttataattacgattgaaaagtgaaagtttttatgttacaatgttctgattggtgaaaaaacataaaaagacagaacagccsataaaaaatacaatgacagtttgaaaaaaaaagaaaggcacaactgggccttgttagaaaaactacaaccggatttcttttgcgccccatttaaggcttcagttccctttttcactgggagccaatatttatatgaaaactgaatgccattctaaaaacaaaacagccgatagatctgaaattaccagacaaatagatgtgc

SEQ ID NO: 15989 - DNA, 600 bp, Chicken  19866894222982_2
tagatatctcgttgtgcgttgtaaacaaatatcagattaaggttacttgttaaaaatgtacacagagctgtaagagcagttggacagtacagcctaaattgccatcaaattaactggccaaaaaaaaagtatactttgctgtactcgttttcataaacaataatattcaatgagtatgggcaacttattccacttaagtctmgtttaaagcctaacagtttataattacgattgaaaagtgaaagtttttatgttacaatgttctgattggtgaaaaaacataaaaagacagaacagccsataaaaaatacaatgacagtttgaaaaaaaaagaaaggcacaactgggccttgttagaaaaactacaaccggatttcttttgcgccccatttaaggcttcagttccctttttcactgggagccaatatttatatgaaaactgaatgccattctaaaaacaaaacagccgatagatctgaaattaccagacaaatagatgtgcagaggcacatctattttgtttgcataccattgcttttcagggcttttctttatccagtttgtgcttattcaggctggctacacaagcaatcatttgtc

SEQ ID NO: 15990 - DNA, 600 bp, Chicken  19866894222982_3
tacaaccggatttcttttgcgccccatttaaggcttcagttccctttttcactgggagccaatatttatatgaaaactgaatgccattctaaaaacaaaacagccgatagatctgaaattaccagacaaatagatgtgcagaggcacatctattttgtttgcataccattgcttttcagggcttttctttatccagtttgtgcttattcaggctggctacacaagcaatcatttgtcttgtcttcagatacatgtgcacaattcctttgacatcagtgctgtttacacgcatgggtagartagagaaatctgctcagcatttaagtcgtgcaaactctcattacaagtacctgatagagtgctgtaatttgtcagaccagagtgaggctatgcagtactcaaataacttattaactaacagagccaaaataaaactttgcagtagttctcagcckcatgcatttctggatttttgcaccgcttacacrtactgatagcaggaataatagaaatgacctagtttaaatcactggggtcactgtccgtgaaagtggatttgcagttttagccatgaaaggcttgcagtgcagtgtgactgtg

SEQ ID NO: 15991 - DNA, 600 bp, Chicken  19866894222982_4
acaaccggatttcttttgcgccccatttaaggcttcagttccctttttcactgggagccaatatttatatgaaaactgaatgccattctaaaaacaaaacagccgatagatctgaaattaccagacaaatagatgtgcagaggcacatctattttgtttgcataccattgcttttcagggcttttctttatccagtttgtgcttattcaggctggctacacaagcaatcatttgtcttgtcttcagatacatgtgcacaattcctttgacatcagtgctgtttacacgcatgggtagarragagaaatctgctcagcatttaagtcgtgcaaactctcattacaagtacctgatagagtgctgtaatttgtcagaccagagtgaggctatgcagtactcaaataacttattaactaacagagccaaaataaaactttgcagtagttctcagcckcatgcatttctggatttttgcaccgcttacacrtactgatagcaggaataatagaaatgacctagtttaaatcactggggtcactgtccgtgaaagtggatttgcagttttagccatgaaaggcttgcagtgcagtgtgactgtgt

SEQ ID NO: 15992 - DNA, 600 bp, Chicken  19866894222982_5
caaccggatttcttttgcgccccatttaaggcttcagttccctttttcactgggagccaatatttatatgaaaactgaatgccattctaaaaacaaaacagccgatagatctgaaattaccagacaaatagatgtgcagaggcacatctattttgtttgcataccattgcttttcagggcttttctttatccagtttgtgcttattcaggctggctacacaagcaatcatttgtcttgtcttcagatacatgtgcacaattcctttgacatcagtgctgtttacacgcatgggtagartrgagaaatctgctcagcatttaagtcgtgcaaactctcattacaagtacctgatagagtgctgtaatttgtcagaccagagtgaggctatgcagtactcaaataacttattaactaacagagccaaaataaaactttgcagtagttctcagcckcatgcatttctggatttttgcaccgcttacacrtactgatagcaggaataatagaaatgacctagtttaaatcactggggtcactgtccgtgaaagtggatttgcagttttagccatgaaaggcttgcagtgcagtgtgactgtgtc

SEQ ID NO: 15993 - DNA, 600 bp, Chicken  19866894222982_6
tgtttgcataccattgcttttcagggcttttctttatccagtttgtgcttattcaggctggctacacaagcaatcatttgtcttgtcttcagatacatgtgcacaattcctttgacatcagtgctgtttacacgcatgggtagartagagaaatctgctcagcatttaagtcgtgcaaactctcattacaagtacctgatagagtgctgtaatttgtcagaccagagtgaggctatgcagtactcaaataacttattaactaacagagccaaaataaaactttgcagtagttctcagcckcatgcatttctggatttttgcaccgcttacacrtactgatagcaggaataatagaaatgacctagtttaaatcactggggtcactgtccgtgaaagtggatttgcagttttagccatgaaaggcttgcagtgcagtgtgactgtgtccagacccagatagaagaatactgtcgcctgtttgttgtattttccattgtggacttttgtatgcacattcagcaccaaaccgtggactcctgctctatctttttgggccttttgtacagactgtttctcacatgagcaatctccaaaggaatc

SEQ ID NO: 15994 - DNA, 600 bp, Chicken  19866894222982_7
ttatccagtttgtgcttattcaggctggctacacaagcaatcatttgtcttgtcttcagatacatgtgcacaattcctttgacatcagtgctgtttacacgcatgggtagartagagaaatctgctcagcatttaagtcgtgcaaactctcattacaagtacctgatagagtgctgtaatttgtcagaccagagtgaggctatgcagtactcaaataacttattaactaacagagccaaaataaaactttgcagtagttctcagcckcatgcatttctggatttttgcaccgcttacacrtactgatagcaggaataatagaaatgacctagtttaaatcactggggtcactgtccgtgaaagtggatttgcagttttagccatgaaaggcttgcagtgcagtgtgactgtgtccagacccagatagaagaatactgtcgcctgtttgttgtattttccattgtggacttttgtatgcacattcagcaccaaaccgtggactcctgctctatctttttgggccttttgtacagactgtttctcacatgagcaatctccaaaggaatctgggttgcatacttaataaaaacttgtactgta

SEQ ID NO: 15995 - DNA, 600 bp, Chicken  19866894222984_1
tgaggtattttttgcaaagcacaagatgagttttgtgtcagtgatacagtcatgtgtcagtgggcattggcatattgttcagctggcttaaagtagatcacttagcatgtgccctggagatacgttgacagagaccaaaatatttgaacttctgcagtagatctgacaaaggctgctttcctctgaattcttctcaagggtgggagggtttgtgcaagcccacgtgtgttctgtgctcctcagcatatggactgtgcaacagggcagtttctctctcccctcttctattcttcttggccycttacttccacagaatcttttttggaatttgacacttcagcacattctgttgctgtcaaattcttcagaaatgaaaatattccaaagagaagagtgcagcactgataggtgcatattaacgtaaatccctcggtgaaaaaggctaggctaaaaatacatatccagctactctctcataccctgyttttgtgttcatgcttgaggtctgctatcagttaatgctttgatggatattaaaatattctttgattcagacttttagattaggaattgtatacacatttttccccatgtgacatg

SEQ ID NO: 15996 - DNA, 600 bp, Chicken  19866894222984_2
gaattcttctcaagggtgggagggtttgtgcaagcccacgtgtgttctgtgctcctcagcatatggactgtgcaacagggcagtttctctctcccctcttctattcttcttggccycttacttccacagaatcttttttggaatttgacacttcagcacattctgttgctgtcaaattcttcagaaatgaaaatattccaaagagaagagtgcagcactgataggtgcatattaacgtaaatccctcggtgaaaaaggctaggctaaaaatacatatccagctactctctcataccctgyttttgtgttcatgcttgaggtctgctatcagttaatgctttgatggatattaaaatattctttgattcagacttttagattaggaattgtatacacatttttccccatgtgacatgtatgtataaaattactatctaactctgaaaatatggtctcgtataagaaggtatatcaggcttgcagctgcaagtaattgcattccatacgagagtacggaatcagaagtctccttcctcaaaatgtggaagaaatatggataaggcattggaaacagctaattcattgtaaatgacgtgtcga

SEQ ID NO: 15997 - DNA, 600 bp, Chicken  19866894222985_1
tcttcagctttaatgcttccactgaacattcaaacaggtggataaccggaggaaacacagaccaggaataaacctctgtgtttaaaacatacttgtatagttgagaaatgcatttaactgattatttcaaatcctaatcagtgaacttgaatatataagaataaaataaatgaaaaaaaaaaatgcatccagagcaagacacagctcaacaggaacttctggtgtagaagaacgatggctattaactgggcaaacaacctgacaatcttatactgagagaaagtaacaatgaggcttacscaactccaaacagaagctgaccattagaacctctgggccctcgccctttaagagatagaaaayccctttattgcctaaatagtaaaaattcttaccacctaaaagtaggtaagaatcaccatcaagaataccaaaagacctttgagatctaaaactgcagattagggctatttattttgtgtcttggctctggtctgattcatcagtgccatcagaggtgtttctacactgccctgttctaaaacgttctccatcgaaaattttagattccatctattaccatacattattaatttctat

SEQ ID NO: 15998 - DNA, 570 bp, Chicken  19866894222985_2
taaccggaggaaacacagaccaggaataaacctctgtgtttaaaacatacttgtatagttgagaaatgcatttaactgattatttcaaatcctaatcagtgaacttgaatatataagaataaaataaatgaaaaaaaaaaatgcatccagagcaagacacagctcaacaggaacttctggtgtagaagaacgatggctattaactgggcaaacaacctgacaatcttatactgagagaaagtaacaatgaggcttacscaactccaaacagaagctgaccattagaacctctgggccctsgccctttaagagatagaaaayccctttattgcctaaatagtaaaaattcttaccacctaaaagtaggtaagaatcaccatcaagaataccaaaagacctttgagatctaaaactgcagattagggctatttattttgtgtcttggctctggtctgattcatcagtgccatcagaggtgtttctacactgccctgttctaaaacgttctccatcgaaaattttagattccatctattaccatacattattaatttctatggaaaaacttca

SEQ ID NO: 15999 - DNA, 549 bp, Chicken  19866894222985_3
aggaataaacctctgtgtttaaaacatacttgtatagttgagaaatgcatttaactgattatttcaaatcctaatcagtgaacttgaatatataagaataaaataaatgaaaaaaaaaaatgcatccagagcaagacacagctcaacaggaacttctggtgtagaagaacgatggctattaactgggcaaacaacctgacaatcttatactgagagaaagtaacaatgaggcttacscaactccaaacagaagctgaccattagaacctctgggccctcgccctttaagagatagaaaayccctttattgcctaaatagtaaaaattcttaccacctaaaagtaggtaagaatcaccatcaagaataccaaaagacctttgagatctaaaactgcagattagggctatttattttgtgtcttggctctggtctgattcatcagtgccatcagaggtgtttctacactgccctgttctaaaacgttctccatcgaaaattttagattccatctattaccatacattattaatttctatggaaaaacttca

SEQ ID NO: 16000 - DNA, 599 bp, Chicken  19866894222986_1
  misc_feature (1)..(9): n is any nucleotide
nnnnnnnnnaccacagtgtaatagtctttgacatcctcttgcttctgcagctttatgaaggctagatttagactgatttgcaattaaaggacggccaacttggtgccaaatgtacacttttgaaccccagtcatgtcagctctacagctgttccaataaagttaactatctctaataattgaaaaagtgctttaaaaaatattctaatggcaaaatgtctctgtgtaggtttgggactggttagactataaatgagtcaattagtaaaaaatcctcataacagagaagtgaagctgtgargttgatcacatagatcatgcatgtgaagcataacataaaaagcattggcagtgacataycaagctctccagggaagaaactagcactaagggggtacttggatttgcacaagtcagccagccctccacttttctagaaagaaaagggagaatagctttgtgagggggtgcctatgacagagcaatgattttgctgaacctgtgagcaaatgctatccaaaagcaaatataaatgctaatgtataccacacagagtggaaaaagagaaccaaagctttctgccagccaacaactggtagc

SEQ ID NO: 16001 - DNA, 600 bp, Chicken  19866894222986_2
ggctagatttagactgatttgcaattaaaggacggccaacttggtgccaaatgtacacttttgaaccccagtcatgtcagctctacagctgttccaataaagttaactatctctaataattgaaaaagtgctttaaaaaatattctaatggcaaaatgtctctgtgtaggtttgggactggttagactataaatgagtcaattagtaaaaaatcctcataacagagaagtgaagctgtgargttgatcacatagatcatgcatgtgaagcataacataaaaagcattggcagtgacataycaagctctccagggaagaaactagcactaagggggtacttggatttgcacaagtcagccagccctccacttttctagaaagaaaagggagaatagctttgtgagggggtgcctatgacagagcaatgattttgctgaacctgtgagcaaatgctatccaaaagcaaatataaatgctaatgtataccacacagagtggaaaaagagaaccaaagctttctgccagccaacaactggtagcagggtccagcagcagccacatagcagtgccacgtgactttcagttccatatgggtgttag

SEQ ID NO: 16002 - DNA, 600 bp, Chicken  19866894222986_3
agcaagtctgaaggtcaagaaacgcaaagtgttgctgcaacttctggaaacaaatgaggtccctacatataaattaaatgaaaatatttgtgcagattaatttaacatttctaagcatcatgtgttaccaggacaaatttgagcaaggtccccattttattctgtcagtggctttcaggttaaatcttttcaagctataatgtgcacaccagcactatctgtagaggtaatttacatcataacacaacatcaggtaggttgctcgcccacagaaaagcacacaggttcaaaagccttcarggatcaagacccagttcagacatttgattactcactgaaacgctaatgcttgtaaagtgagtctaacttcactgcaattattcactcatgtggttccgcttccctgtcccttgtcctaccacccttccacagaacacagtaattctgataatggtgagagctagtaatttcatcagtagtagtaattagcccatgcagaacaaacagacaaagctgaccctgaaataataatcaagctttctagcttttctcaatgcatgctgtgtatggtgtgtaaggaccaggtgttcctcttgctca

SEQ ID NO: 16003 - DNA, 600 bp, Chicken  19866894222992_1
gaagaatactttgtgggaatgtagactgaaagtcttgggtcttctgttgagcataatgtactgttgcagtggataagaggcaataattcattttacatacagcagataatgtgacggagggggagtaaatggagcacatcagttaagtctgctaaacaaagtaaggaattttaaaaatgtcttctctgagagttagagccgtcctagaaatcatgctgtatcagttaacaacacctagaggaaagttggatgtggcaagaaaaggtctactactgatagtgaatgtgatgtcttcagtcrgttgtgtatccagacattggagtggtggcaaacgtctgtgtctaaaaatgacttacacagccagagaatatgttaaagtttgtacagtttggcacaagagcaacgaagtctgtcttgaatatatgtattattaaacagattttgacacagawgaactgaagaaaagaagctcacttttgaaattcctctacaggcttacacttagacacaaaggtcaaattcctaccatgtaagaaagcacctgagtcacagcaaacctgagccaacgagtccccaggccagagcacaaggcagatacag

SEQ ID NO: 16004 - DNA, 478 bp, Chicken  19866894222992_2
taaacaaagtaaggaattttaaaaatgtcttctctgagagttagagccgtcctagaaatcatgctgtatcagttaacaacacctagaggaaagttggatgtggcaagaaaaggtctactactgatagtgaatgtgatgtcttcagtcrgttgtgtatccagacattggagtggtggcaaacgtctgtgtctaaaaatgacttacacagccagagaatatgttaaagtttgtacagtttggcacaagagcaacgaagtctgtcttgaatatatgtattattaaacagattttgacacagawgaactgaagaaaagaagctcacttttgaaattcctctacaggcttacacttagacacaaaggtcaaattcctaccatgtaagaaagcacctgagtcacagcaaacctgagccaacgagtccccaggccagagcacaaggcagatacagcagctcaaggcagttcaagtgtgtttgcag

SEQ ID NO: 16005 - DNA, 600 bp, Chicken  19866894222998_1
tccatagggatgggctgcagaccggtgctgctactttgctctgcttcctttttgccctggaacagagggaggtgagcacggcccccccagcaccctcattctcctggcttggagcagcaggaggatgcaggggatacctgaaaggccaactggcagagctgctcgatccactcatcccgctgctcggctgccagcacgtagttcttctcggtggtggtgaggtagaaggcagcagtggctttggggcagctctcagtgcccatggggccaacggagacgcagtcggacagacggatgacrcggcgggcgcagcgctgcagggagatgtcagacactgtgccgtgatcccgtgcatcaaacttctccatgcgggccacgccgaaggggctggcagcaaagagctgtgctcgaatcttcctccaggtccgctggaatggaggaagggtacggatatgaacaagtgacagcagggagctgtctgccatagccacgtggcttgggattgggcacgcaggggtctctgcctgcgaggctgcgcacggcgacagggcacagaaagctgctctgatgccagaccgccatgcaaatgaaagccatttt

SEQ ID NO: 16006 - DNA, 600 bp, Chicken  19866894223011_1
caagcactctaatgtttgggtggtatttcagtggcagggattttataagggaagtgtgatgttgttttatggggtgctagccagatcccactgagccatactctcagtcttcagtcttcttagtcacagttttttcaacagagcattcatctgttcataaagttgccagtgttcaaacattatcattgctaaggactggcctatatttacgtatttttgacactacaactggctcagaagtggggtttttatagtttcattctgttgttgttataaaggcatagtcattagtgggagtgmagttatattaggacaagtatcacctagtgtggtataagtcttgttcaacatcttcatcagtgacckggatgaatggctagaatgcaccctcagcaartttgctgatggtacaaagctgggaggagcggttgacacacccgaaggctgtgctgacattgatgaggtgtggacaggctggagagctgggcagaaaggaacctgatgaggttcaacaagtcctacacctgggaggaataaccacatgcatcagtacaagtttggggctgacctgctggaaaggagtttttcagagaagcccct

SEQ ID NO: 16007 - DNA, 600 bp, Chicken  19866894223011_2
ttatggggtgctagccagatcccactgagccatactctcagtcttcagtcttcttagtcacagttttttcaacagagcattcatctgttcataaagttgccagtgttcaaacattatcattgctaaggactggcctatatttacgtatttttgacactacaactggctcagaagtggggtttttatagtttcattctgttgttgttataaaggcatagtcattagtgggagtgmagttatattaggacaagtatcacctagtgtggtataagtcttgttcaacatcttcatcagtgacckggatgaatggctagaatgcaccctcagcaartttgctgatggtacaaagctgggaggagcggttgacacacccgaaggctgtgctgacattgatgaggtgtggacaggctggagagctgggcagaaaggaacctgatgaggttcaacaagtcctacacctgggaggaataaccacatgcatcagtacaagtttggggctgacctgctggaaaggagtttttcagagaagcccctgggcgtcctggtggayaacaggttggccatgarccagcaaagtgcccttgtggccaagaaggccaa

SEQ ID NO: 16008 - DNA, 600 bp, Chicken  19866894223011_3
atactctcagtcttcagtcttcttagtcacagttttttcaacagagcattcatctgttcataaagttgccagtgttcaaacattatcattgctaaggactggcctatatttacgtatttttgacactacaactggctcagaagtggggtttttatagtttcattctgttgttgttataaaggcatagtcattagtgggagtgmagttatattaggacaagtatcacctagtgtggtataagtcttgttcaacatcttcatcagtgacckggatgaatggctagaatgcaccctcagcaartttgctgatggtacaaagctgggaggagcggttgacacacccgaaggctgtgctgacattgatgaggtgtggacaggctggagagctgggcagaaaggaacctgatgaggttcaacaagtcctacacctgggaggaataaccacatgcatcagtacaagtttggggctgacctgctggaaaggagtttttcagagaagcccctgggcgtcctggtggayaacaggttggccatgarccagcaaagtgcccttgtggccaagaaggccaatggtatcctcagatgcattaaaaagagcgtg

SEQ ID NO: 16009 - DNA, 600 bp, Chicken  19866894223011_4
gtatcacctagtgtggtataagtcttgttcaacatcttcatcagtgacckggatgaatggctagaatgcaccctcagcaartttgctgatggtacaaagctgggaggagcggttgacacacccgaaggctgtgctgacattgatgaggtgtggacaggctggagagctgggcagaaaggaacctgatgaggttcaacaagtcctacacctgggaggaataaccacatgcatcagtacaagtttggggctgacctgctggaaaggagtttttcagagaagcccctgggcgtcctggtggayaacaggttggccatgarccagcaaagtgcccttgtggccaagaaggccaatggtatcctcagatgcattaaaaagagcgtggccagcaggttgaggaatgtcrtcctcctcttctattctgccctggtgagaccacttctggaacactgtgtccagttctatgctccccagttcaagaaagacagggaactgttggagagagacsarctttgggccacaaagatgatgagaagcctggagcatctccctcatgaggaaaggctgagggacctggggctgttcagtgtggaggagactgag

SEQ ID NO: 16010 - DNA, 600 bp, Chicken  19866894223011_5
ataagtcttgttcaacatcttcatcagtgacckggatgaatggctagaatgcaccctcagcaartttgctgatggtacaaagctgggaggagcggttgacacacccgaaggctgtgctgacattgatgaggtgtggacaggctggagagctgggcagaaaggaacctgatgaggttcaacaagtcctacacctgggaggaataaccacatgcatcagtacaagtttggggctgacctgctggaaaggagtttttcagagaagcccctgggcgtcctggtggayaacaggttggccatgarccagcaaagtgcccttgtggccaagaaggccaatggtatcctcagatgcattaaaaagagcgtggccagcaggttgaggaatgtcrtcctcctcttctattctgccctggtgagaccacttctggaacactgtgtccagttctatgctccccagttcaagaaagacagggaactgttggagagagacsarctttgggccacaaagatgatgagaagcctggagcatctccctcatgaggaaaggctgagggacctggggctgttcagtgtggaggagactgagaggaggggatcttatca

SEQ ID NO: 16011 - DNA, 600 bp, Chicken  19866894223011_6
gaggagcggttgacacacccgaaggctgtgctgacattgatgaggtgtggacaggctggagagctgggcagaaaggaacctgatgaggttcaacaagtcctacacctgggaggaataaccacatgcatcagtacaagtttggggctgacctgctggaaaggagtttttcagagaagcccctgggcgtcctggtggayaacaggttggccatgarccagcaaagtgcccttgtggccaagaaggccaatggtatcctcagatgcattaaaaagagcgtggccagcaggttgaggaatgtcrtcctcctcttctattctgccctggtgagaccacttctggaacactgtgtccagttctatgctccccagttcaagaaagacagggaactgttggagagagacsarctttgggccacaaagatgatgagaagcctggagcatctccctcatgaggaaaggctgagggacctggggctgttcagtgtggaggagactgagaggaggggatcttatcaatgcttataaataggagtctagtggttggaaccaggctcttttcagtgatacccattgacaaaacaaggggcagtgggcacaaact

SEQ ID NO: 16012 - DNA, 600 bp, Chicken  19866894223011_7
cacctgggaggaataaccacatgcatcagtacaagtttggggctgacctgctggaaaggagtttttcagagaagcccctgggcgtcctggtggayaacaggttggccatgarccagcaaagtgcccttgtggccaagaaggccaatggtatcctcagatgcattaaaaagagcgtggccagcaggttgaggaatgtcrtcctcctcttctattctgccctggtgagaccacttctggaacactgtgtccagttctatgctccccagttcaagaaagacagggaactgttggagagagacsarctttgggccacaaagatgatgagaagcctggagcatctccctcatgaggaaaggctgagggacctggggctgttcagtgtggaggagactgagaggaggggatcttatcaatgcttataaataggagtctagtggttggaaccaggctcttttcagtgatacccattgacaaaacaaggggcagtgggcacaaactggaaaatgggaagttccaactgaacacgaggaagaacttcttcactgtgagggtgacagcactggaacaggctgcccaagggggtggtggagtctccttctc

SEQ ID NO: 16013 - DNA, 600 bp, Chicken  19866894223011_8
cctgggaggaataaccacatgcatcagtacaagtttggggctgacctgctggaaaggagtttttcagagaagcccctgggcgtcctggtggayaacaggttggccatgarccagcaaagtgcccttgtggccaagaaggccaatggtatcctcagatgcattaaaaagagcgtggccagcaggttgaggaatgtcrtcctcctcttctattctgccctggtgagaccacttctggaacactgtgtccagttctatgctccccagttcaagaaagacagggaactgttggagagagacsarctttgggccacaaagatgatgagaagcctggagcatctccctcatgaggaaaggctgagggacctggggctgttcagtgtggaggagactgagaggaggggatcttatcaatgcttataaataggagtctagtggttggaaccaggctcttttcagtgatacccattgacaaaacaaggggcagtgggcacaaactggaaaatgggaagttccaactgaacacgaggaagaacttcttcactgtgagggtgacagcactggaacaggctgcccaagggggtggtggagtctccttctctg

SEQ ID NO: 16014 - DNA, 599 bp, Chicken  19866894223019_1
  misc_feature (1)..(185): n is any nucleotide
nnnnnnnnnnnnnnnnnnnnnnnnnnnnnnnnnnnnnnnnnnnnnnnnnnnnnnnnnnnnnnnnnnnnnnnnnnnnnnnnnnnnnnnnnnnnnnnnnnnnnnnnnnnnnnnnnnnnnnnnnnnnnnnnnnnnnnnnnnnnnnnnnnnnnnnnnnnnnnnnnnnnnnnnnnnnnnnnnnnnnnnnntattaagatatttattcttacaagtccaacaactaatggtcatgaagtgttaggtttactgacttgcttatttccctgctcaaccttgaaacaaattctctctccaactaaaaaytcatttaaataatttttaatctgtcatttagactgcttgctcagtctgttgtacacttgagccctcagcctcttagaamtgaaatgttcctctttagcagaggaaccaaagcaccaccactcatcaccccactgtaaaaagcccacagctatagtctcatctaggatatatattttcttaaatcccagygagtctttccattgctactccatcttacagctttcttagaataacctgttcatcccccagccatgagaagtatgccatccaagcagatattcaatgcaagtttcttccaa

SEQ ID NO: 16015 - DNA, 599 bp, Chicken  19866894223019_2
  misc_feature (1)..(106): n is any nucleotide
nnnnnnnnnnnnnnnnnnnnnnnnnnnnnnnnnnnnnnnnnnnnnnnnnnnnnnnnnnnnnnnnnnnnnnnnnnnnnnnnnnnnnnnnnnnnnnnnnnnnnnnnnntattaagatatttattcttacaagtccaacaactaatggtcatgaagtgttaggtttactgacttgcttatttccctgctcaaccttgaaacaaattctctctccaactaaaaaytcatttaaataatttttaatctgtcatttagactgcttgctcagtctgttgtacacttgagccctcagcctcttagaamtgaaatgttcctctttagcagaggaaccaaagcaccaccactcatcaccccactgtaaaaagcccacagctatagtctcatctaggatatatattttcttaaatcccagygagtctttccattgctactccatcttacagctttcttagaataacctgttcatcccccagccatgagaagtatgccatccaagcagatattcaatgcaagtttcttccaacatgcatggctcaaccataagagcacagacaccgcagagtacacatccatccagtgtctgtttaagaaaatgaagcagt

SEQ ID NO: 16016 - DNA, 600 bp, Chicken  19866894223019_3
aagatatttattcttacaagtccaacaactaatggtcatgaagtgttaggtttactgacttgcttatttccctgctcaaccttgaaacaaattctctctccaactaaaaaytcatttaaataatttttaatctgtcatttagactgcttgctcagtctgttgtacacttgagccctcagcctcttagaamtgaaatgttcctctttagcagaggaaccaaagcaccaccactcatcaccccactgtaaaaagcccacagctatagtctcatctaggatatatattttcttaaatcccagygagtctttccattgctactccatcttacagctttcttagaataacctgttcatcccccagccatgagaagtatgccatccaagcagatattcaatgcaagtttcttccaacatgcatggctcaaccataagagcacagacaccgcagagtacacatccatccagtgtctgtttaagaaaatgaagcagtttagtatccttgaacacattctttatgcatttcaaaactggaccaggtgaacaggaacaaattcacataccattcaggtgggatagtgacagatttaaaatgagggatgaa

SEQ ID NO: 16017 - DNA, 583 bp, Chicken  19866894223026_1
atcaataaaacaagcggttaatttttaatgagatgttaaaagccctctcaaacttgatctatatttccataaaattgttggaggcaaatttaaaaaaagaatatttattgaggaaattccattacaactgtttagttgtgagggatagaggaatgtgcagcccattcccctacttaactttccagcataatttctagttagcaatgcaaatctgtagagctattgtgaatttcagctgcgtgttttttgtgctattttcactgtaggagtacacaaggtactttgcaagtgtatggcaargctggttgcctcttccagtgagcagaaacgttgtgtaggacaacttccaggaaatgttgcttggcaagagcaatctagacaaaacaggctgctagttgttgcagtgttcgttgttaatgataaataaatggacattgattacgtgtaagtgcgtcccaagcaaaatattcctgaggatatcataaaggaaaagtgagtttggagaaacaaagaacaacgtgatttgaattgatttttgggggaaggattccatgctctgagcttgcagtgaagaaggagttga

SEQ ID NO: 16018 - DNA, 599 bp, Chicken  19866894223030_1
  misc_feature (1)..(99): n is any nucleotide
nnnnnnnnnnnnnnnnnnnnnnnnnnnnnnnnnnnnnnnnnnnnnnnnnnnnnnnnnnnnnnnnnnnnnnnnnnnnnnnnnnnnnnnnnnnnnnnnnnnttcttgttgttttaaggcatcaaacctgcaagcactgcccatctcaatcattctgatgacatcttcagaacagctgacttgtttctcttgcagaccaacaacctgaacctgctgcttgccatcctccaggactcgaagctttgccttcttattcaagaggtcaaacacctacattcaggcaataagattgaggcaaatttraacaaagactccttgcaggtagcctgtactggctttacagagagcagtacaggaacaccacatttaacagaggcttaacagactataaaaaaaagtagctgaattaaatttacatgtgaaacatacagccaaagtcaggccaggattaaaagaaaacaagaagtcttacctttccattatatatttcaaagaaagtcacatagacatccaggtcctgactcctgtatctgggctggcttagaagaaagaagacatcttgtgctggtgaaggaagacaggaacttagttaactagtttaa

SEQ ID NO: 16019 - DNA, 600 bp, Chicken  19866894223030_2
gtcctgactcctgtatctgggctggcttagaagaaagaagacatcttgtgctggtgaaggaagacaggaacttagttaactagtttaaaacatgtcctagttgctacttgaactactgctgaacatcactagccataaaagcagtgactagcagcttaatgacagccatcctaagcaaattgtaatgaaacagttagtgacgtgctaccatctggaagccagtttcagcagcattgtcatccagaaactaaaaacagggatatggatgtttctactgctaatattacctgcagacagcarctcttgctgatctaayaagatcagtgtaagtaaaaactgcacacatccccctgatgtgggcaacatcaaaatctgttattgctttggacaggcctgcaaaagccaagtatttgtttgaaatgcttcctgcagggaacatagacaacactttcatgctgctggagatgatataccagaacagttgaccctctggttgaacttcaaccaacttgctgcactgacagtttcacaatatgcctttctataagaaaagtagaacagagtttgtgtactttctaggcattatatcaaggaggggct

SEQ ID NO: 16020 - DNA, 600 bp, Chicken  19866894223030_3
ctgggctggcttagaagaaagaagacatcttgtgctggtgaaggaagacaggaacttagttaactagtttaaaacatgtcctagttgctacttgaactactgctgaacatcactagccataaaagcagtgactagcagcttaatgacagccatcctaagcaaattgtaatgaaacagttagtgacgtgctaccatctggaagccagtttcagcagcattgtcatccagaaactaaaaacagggatatggatgtttctactgctaatattacctgcagacagcarctcttgctgatctaayaagatcagtgtaagtaaaaactgcacacatccccctgatgtgggcaacatcaaaatctgttattgctttggacaggcctgcaaaagccaagtatttgtttgaaatgcttcctgcagggaacatagacaacactttcatgctgctggagatgatataccagaacagttgaccctctggttgaacttcaaccaacttgctgcactgacagtttcacaatatgcctttctataagaaaagtagaacagagtttgtgtactttctaggcattatatcaaggaggggctaataagcacctgcttc

SEQ ID NO: 16021 - DNA, 600 bp, Chicken  19866894223031_1
tgaagggtcatgttggatattaggaaaagcttcttcaccaagagggaggtcaagtgctggaactggctcctcggggctattatcatgggcctaagcctgtccgagttcaagaagaatttagacaatgctcctagacataggattttatttttgtatggtgctgtatgaagttaaggtcttgatgatctttgtgtgtcctttcaaactcagagtaatatatgattttgattgctcagtgcataatgaaggctccaaaagcatatacctcaaagtcatctgcctaaatgttatatgctacastctttaggtacttattgggtacaatctgaggtttaagtcatagagcagcataaaattctggggtctgtccttgaccaaggttataatcaactatctgggttgcaagagtgagtcattttattttacagatttgagatatttactagatatgttctgttcaattccgtgtttttattattattattattgttcagcacaactctgatctttattagaccattttgttaaattgtctgcctgaattcccttgcccttaagaaaaaactgcccttcttaaaatatttttccagataacgcatc

SEQ ID NO: 16022 - DNA, 505 bp, Chicken  19866894223032_1
cagaacaaatgcacatctgcagtggttttcacacaaggacttcaaagaatactacaaagggaacattcacttttcaggtaggtgaaaaaagaaactaagtagctatgttctaattctcagaggattgaaacctcaatttaagaatttagaaatgcccaacactttcaaaaagcatgcaacaaggctgctacgagtaacctgaccaatcttaaccatgtgtcaccagcagagtattctcatttatcataacacactgcctcctttcagcaagtgttctgaaaataagaaaagaatcacttracgtagtcccttatttctccttacttgactttattttattaggaaaaaaaaagtgtccatgtcattatgaaagcagcctgtttcagtaacacagtaaggtttatgtactgcagtctagtggtcagaacaagaaacagactgcagtcagaaatgcctctgttgtaatctttgctcttctacaacatgcctagtcctgggcaaaagc

SEQ ID NO: 16023 - DNA, 600 bp, Chicken  19866894223035_1
ttatctttgctcacatactaaatgtctaccagagactaagcagggtaatgttcgatattcacattgcagtcaggctatctggaagccccttggtgactttgatgcagtgaaaactaaaggctctgctacttctgtatttatttgttaaattgtgatctaatgtgatgcactgatctgtgttcatttctttcttgtagaaataatatcaagacatatagattgattgagggggaaaaaaatacatctatctaaatgcacaagtctgtagttgccatgtgaaaaatctttaaaaaaaaaaakgctgcttatatgtagtgcagtgtggaaaattaaaagatgartaacatttggaaatgagttaaaatctaaattttctggtagtaagttttctgtgtacctctgtgtctgtttaaagagtagttgtatcatatggtagttctgaacctggcttgyggaagagaaatgttttgtcattatattgcacaccaagggccaaaattaaaatatgtgtgtaatttatgagacaaagtgttgcacatagagattaagtattttgcatctttagaagctctaatttatagtctaatccaattaaaaggt

SEQ ID NO: 16024 - DNA, 600 bp, Chicken  19866894223035_2
agggtaatgttcgatattcacattgcagtcaggctatctggaagccccttggtgactttgatgcagtgaaaactaaaggctctgctacttctgtatttatttgttaaattgtgatctaatgtgatgcactgatctgtgttcatttctttcttgtagaaataatatcaagacatatagattgattgagggggaaaaaaatacatctatctaaatgcacaagtctgtagttgccatgtgaaaaatctttaaaaaaaaaaakgctgcttatatgtagtgcagtgtggaaaattaaaagatgartaacatttggaaatgagttaaaatctaaattttctggtagtaagttttctgtgtacctctgtgtctgtttaaagagtagttgtatcatatggtagttctgaacctggcttgyggaagagaaatgttttgtcattatattgcacaccaagggccaaaattaaaatatgtgtgtaatttatgagacaaagtgttgcacatagagattaagtattttgcatctttagaagctctaatttatagtctaatccaattaaaaggttaattctgttctattgacaagattctggctctgctatgttg

SEQ ID NO: 16025 - DNA, 600 bp, Chicken  19866894223035_3
gatctaatgtgatgcactgatctgtgttcatttctttcttgtagaaataatatcaagacatatagattgattgagggggaaaaaaatacatctatctaaatgcacaagtctgtagttgccatgtgaaaaatctttaaaaaaaaaaakgctgcttatatgtagtgcagtgtggaaaattaaaagatgartaacatttggaaatgagttaaaatctaaattttctggtagtaagttttctgtgtacctctgtgtctgtttaaagagtagttgtatcatatggtagttctgaacctggcttgyggaagagaaatgttttgtcattatattgcacaccaagggccaaaattaaaatatgtgtgtaatttatgagacaaagtgttgcacatagagattaagtattttgcatctttagaagctctaatttatagtctaatccaattaaaaggttaattctgttctattgacaagattctggctctgctatgttgtaaaaatactcacttgtaatcgcatgaaaacttgcttccgatgataaattaccacatcctaaaaatttattgttagataaattaactgattatatgtttatcatagcacact

SEQ ID NO: 16026 - DNA, 600 bp, Chicken  19866894223046_1
cccacccactgccctggccaggccttgaccaggccttgagcacacctcaactaggcctcgactaggcctcgaccaggcctcaaccaggccttgaccacacctcaactaggcctcaactaggcctcaaccaggttctaaccaggccttgacagggcattgaccacgcctcaattaggcctcaactagacctcaaccaggccctaaccagaccttgaccaggccttgaccgcgcctcaaccaggccctgaaggccccagccacgctccaaatgccacaaccaggctctgaaggcctcaaccrggccccaaacaccccaaccaggccctgaccaggccctgacaccaccacaaccatcaccccctgagtccccccttccctccccaccaactccccgagctgcgtgctgagggcaacagccctggggggggccacagctggcccctgccaacaatggtgccctgtgtcagccccgcgcccacggccagacagccatcacctcggggcacaccgccggccgctctcacctctacactgctcgctgcttcccagctccctcctgacaaatccctgctcccgatcgcttctcctccccgcgggtcc

SEQ ID NO: 16027 - DNA, 600 bp, Chicken  19866894223051_1
gatgatttctaacacgagagagaaaatatattcctgctttgagtcagggctgtactccgggacccagagggagaaggggcaaagtcagtaaacactgagccgagtctctttccaaaacaaaatttaaaactcaaacactgacttctcaaaaacacacagagggatcatggtttttctgggttgctgcaggaaagtgtaatgcagagtgtgtttgattcatcacctctggaatcttgaaaggcatttgatctaaagggtattttatctcctaagatctcccctcagttcctttgctctccygcagtggatgatatcactgatatctaaaccaagagagaggtggttgcctggaagctacagtcacrgtgacactctgctcttgyaaggaaaacagagctttgaggtgtttttctatacttatgctttttctgtgatcaaattatgtcatggatttactttaagtttgtaaaatagtaacrgaatataaggcgragaagaaagaartgcagtactgggagcagacagccaatgctgtactgaatcttaatgaaacaaggtaggaagtaccagctcccagagacacgtgttccttcacatctt

SEQ ID NO: 16028 - DNA, 600 bp, Chicken  19866894223051_2
agagggagaaggggcaaagtcagtaaacactgagccgagtctctttccaaaacaaaatttaaaactcaaacactgacttctcaaaaacacacagagggatcatggtttttctgggttgctgcaggaaagtgtaatgcagagtgtgtttgattcatcacctctggaatcttgaaaggcatttgatctaaagggtattttatctcctaagatctcccctcagttcctttgctctccygcagtggatgatatcactgatatctaaaccaagagagaggtggttgcctggaagctacagtcacrgtgacactctgctcttgyaaggaaaacagagctttgaggtgtttttctatacttatgctttttctgtgatcaaattatgtcatggatttactttaagtttgtaaaatagtaacrgaatataaggcgragaagaaagaartgcagtactgggagcagacagccaatgctgtactgaatcttaatgaaacaaggtaggaagtaccagctcccagagacacgtgttccttcacatcttttcattaagcacgctggtgtttccagcactctcccttgtcagcaaggtgagcaaacccgctgtca

SEQ ID NO: 16029 - DNA, 600 bp, Chicken  19866894223051_3
gtcagtaaacactgagccgagtctctttccaaaacaaaatttaaaactcaaacactgacttctcaaaaacacacagagggatcatggtttttctgggttgctgcaggaaagtgtaatgcagagtgtgtttgattcatcacctctggaatcttgaaaggcatttgatctaaagggtattttatctcctaagatctcccctcagttcctttgctctccygcagtggatgatatcactgatatctaaaccaagagagaggtggttgcctggaagctacagtcacrgtgacactctgctcttgyaaggaaaacagagctttgaggtgtttttctatacttatgctttttctgtgatcaaattatgtcatggatttactttaagtttgtaaaatagtaacrgaatataaggcgragaagaaagaartgcagtactgggagcagacagccaatgctgtactgaatcttaatgaaacaaggtaggaagtaccagctcccagagacacgtgttccttcacatcttttcattaagcacgctggtgtttccagcactctcccttgtcagcaaggtgagcaaacccgctgtcacgttgctctgaccttccc

SEQ ID NO: 16030 - DNA, 600 bp, Chicken  19866894223051_4
gttgctgcaggaaagtgtaatgcagagtgtgtttgattcatcacctctggaatcttgaaaggcatttgatctaaagggtattttatctcctaagatctcccctcagttcctttgctctccygcagtggatgatatcactgatatctaaaccaagagagaggtggttgcctggaagctacagtcacrgtgacactctgctcttgyaaggaaaacagagctttgaggtgtttttctatacttatgctttttctgtgatcaaattatgtcatggatttactttaagtttgtaaaatagtaacrgaatataaggcgragaagaaagaartgcagtactgggagcagacagccaatgctgtactgaatcttaatgaaacaaggtaggaagtaccagctcccagagacacgtgttccttcacatcttttcattaagcacgctggtgtttccagcactctcccttgtcagcaaggtgagcaaacccgctgtcacgttgctctgaccttccctctcccttcaccacctgctcctcaggagccatcagctctctgggagatgtattaggaaattcctctatgccttctgctaaaatcgtggtttgggtt

SEQ ID NO: 16031 - DNA, 600 bp, Chicken  19866894223051_5
agtgtaatgcagagtgtgtttgattcatcacctctggaatcttgaaaggcatttgatctaaagggtattttatctcctaagatctcccctcagttcctttgctctccygcagtggatgatatcactgatatctaaaccaagagagaggtggttgcctggaagctacagtcacrgtgacactctgctcttgyaaggaaaacagagctttgaggtgtttttctatacttatgctttttctgtgatcaaattatgtcatggatttactttaagtttgtaaaatagtaacrgaatataaggcgragaagaaagaartgcagtactgggagcagacagccaatgctgtactgaatcttaatgaaacaaggtaggaagtaccagctcccagagacacgtgttccttcacatcttttcattaagcacgctggtgtttccagcactctcccttgtcagcaaggtgagcaaacccgctgtcacgttgctctgaccttccctctcccttcaccacctgctcctcaggagccatcagctctctgggagatgtattaggaaattcctctatgccttctgctaaaatcgtggtttgggttgccctgaccagca

SEQ ID NO: 16032 - DNA, 600 bp, Chicken  19866894223051_6
agtgtgtttgattcatcacctctggaatcttgaaaggcatttgatctaaagggtattttatctcctaagatctcccctcagttcctttgctctccygcagtggatgatatcactgatatctaaaccaagagagaggtggttgcctggaagctacagtcacrgtgacactctgctcttgyaaggaaaacagagctttgaggtgtttttctatacttatgctttttctgtgatcaaattatgtcatggatttactttaagtttgtaaaatagtaacrgaatataaggcgragaagaaagaartgcagtactgggagcagacagccaatgctgtactgaatcttaatgaaacaaggtaggaagtaccagctcccagagacacgtgttccttcacatcttttcattaagcacgctggtgtttccagcactctcccttgtcagcaaggtgagcaaacccgctgtcacgttgctctgaccttccctctcccttcaccacctgctcctcaggagccatcagctctctgggagatgtattaggaaattcctctatgccttctgctaaaatcgtggtttgggttgccctgaccagcagctggcagtctc

SEQ ID NO: 16033 - DNA, 600 bp, Chicken  19866894223053_1
gctaattgtccgagatgaattgcttctcatcttgttctccagtttccattgttggtttattgcagatttgtaccctgtgtcaaatttcaaggtattgctgataaacctttccaaccagcagcaagaagttcaaaaactttctgtcaatgtaacagaaaacactatgtatataacatttatgtagcaataaatgtgccatctttttttaacatggtaaatcagtgagttttttacatttctctctcgtaggtaccgtgttgcttgacaaacactggcaaaacagctgctgcctttctccawgtagaacgtaacatacattcygaaagcacgcagcaggtgttgcaggctcaaggagtgytcttgctgctccccgcggtgcagaaattcctactgaggaggagcgcctcatctgcactcgctgctgtatgcagagggaactgcacaggcaaacagcagttggagcagaggctgctccccattggcacctccctgcggctgcgtcttgcacctctactttgcctgtccctgagacacacctgtaacaaacatcccagctcctcttgtatactgagttactttgaattagctgatgcacctgtg

SEQ ID NO: 16034 - DNA, 600 bp, Chicken  19866894223053_2
gcttctcatcttgttctccagtttccattgttggtttattgcagatttgtaccctgtgtcaaatttcaaggtattgctgataaacctttccaaccagcagcaagaagttcaaaaactttctgtcaatgtaacagaaaacactatgtatataacatttatgtagcaataaatgtgccatctttttttaacatggtaaatcagtgagttttttacatttctctctcgtaggtaccgtgttgcttgacaaacactggcaaaacagctgctgcctttctccawgtagaacgtaacatacattcygaaagcacgcagcaggtgttgcaggctcaaggagtgytcttgctgctccccgcggtgcagaaattcctactgaggaggagcgcctcatctgcactcgctgctgtatgcagagggaactgcacaggcaaacagcagttggagcagaggctgctccccattggcacctccctgcggctgcgtcttgcacctctactttgcctgtccctgagacacacctgtaacaaacatcccagctcctcttgtatactgagttactttgaattagctgatgcacctgtgcatgttttgtgggraaaaaaa

SEQ ID NO: 16035 - DNA, 600 bp, Chicken  19866894223053_3
attgcagatttgtaccctgtgtcaaatttcaaggtattgctgataaacctttccaaccagcagcaagaagttcaaaaactttctgtcaatgtaacagaaaacactatgtatataacatttatgtagcaataaatgtgccatctttttttaacatggtaaatcagtgagttttttacatttctctctcgtaggtaccgtgttgcttgacaaacactggcaaaacagctgctgcctttctccawgtagaacgtaacatacattcygaaagcacgcagcaggtgttgcaggctcaaggagtgytcttgctgctccccgcggtgcagaaattcctactgaggaggagcgcctcatctgcactcgctgctgtatgcagagggaactgcacaggcaaacagcagttggagcagaggctgctccccattggcacctccctgcggctgcgtcttgcacctctactttgcctgtccctgagacacacctgtaacaaacatcccagctcctcttgtatactgagttactttgaattagctgatgcacctgtgcatgttttgtgggraaaaaaaatgtctgtggcttaagcttgaatttaaaatgttgata

SEQ ID NO: 16036 - DNA, 600 bp, Chicken  19866894223053_4
acattcygaaagcacgcagcaggtgttgcaggctcaaggagtgytcttgctgctccccgcggtgcagaaattcctactgaggaggagcgcctcatctgcactcgctgctgtatgcagagggaactgcacaggcaaacagcagttggagcagaggctgctccccattggcacctccctgcggctgcgtcttgcacctctactttgcctgtccctgagacacacctgtaacaaacatcccagctcctcttgtatactgagttactttgaattagctgatgcacctgtgcatgttttgtgggraaaaaaaatgtctgtggcttaagcttgaatttaaaatgttgataatttttcttgcaagtgtcaatgaaaaaaaatggaagtatacaggtttcaaatcacacgaaggcagtagtgaaatcttcatgtctaattcataactgcttaagccaaaagccccacaaaacaagcaggcttcaaatctttgttttcttaaactctcctctagggaaaatatccctggtataaaagcacaccrgagaaaaaggcaaacagatgccatatatgaaagtgaatgtggtgtatgccatgcagtgtggctgc

SEQ ID NO: 16037 - DNA, 600 bp, Chicken  19866894223053_5
cccagctcctcttgtatactgagttactttgaattagctgatgcacctgtgcatgttttgtgggraaaaaaaatgtctgtggcttaagcttgaatttaaaatgttgataatttttcttgcaagtgtcaatgaaaaaaaatggaagtatacaggtttcaaatcacacgaaggcagtagtgaaatcttcatgtctaattcataactgcttaagccaaaagccccacaaaacaagcaggcttcaaatctttgttttcttaaactctcctctagggaaaatatccctggtataaaagcacaccrgagaaaaaggcaaacagatgccatatatgaaagtgaatgtggtgtatgccatgcagtgtggctgctgtgcgcagcattgtttccaactcttagtattgcccttgctgtgcaatgattaagttctagtttatgcttgtcagcatagttttactggtaagttctctaatgtggcagtgcttctacagacaactttctaacatggtctgaccacgtgagactcagccatgtaagtacttttagttgttaacctctgttaggagctgtggaagtggtgccttggtgccttccccagctgaatct

SEQ ID NO: 16038 - DNA, 600 bp, Chicken  19866894223057_1
agatccactctgtttttaacagtgcctcctaaatgcatagaggcaaaaggaacgtaatacaggctacatctgtaggaatggtagctgctgctaaaagtgattgaacagatgagagaataatttgcagtataactcaaaattctacgttcatctacatgagacacagactcttagtcctgagcttttcctgagaaaagcatgagacatacctgtgcaggtcatacagatggcacaaatgctgctcctttcactttgcactgacagcactgaaatattaagataaatttgtttgggaaaacwcaacagtccagctcttaaaaaaaaaaaaaawaatccaacttaaagtaaatggacatcatagtaaacttgtgtggaaaacaaatacaacggcttgctaacctggtaaggtggatttttggtacaactctcttattacctgctgaggccttttctgtctgccctcactatattttaatggctaaggaagacatggggaatgccagaacacactgatctagattacttgtttacattcattaagttcagtggttcattatgcttgtagaagttgagatataattgtgcactagtgcacatctt

SEQ ID NO: 16039 - DNA, 600 bp, Chicken  19866894223057_2
aatgcatagaggcaaaaggaacgtaatacaggctacatctgtaggaatggtagctgctgctaaaagtgattgaacagatgagagaataatttgcagtataactcaaaattctacgttcatctacatgagacacagactcttagtcctgagcttttcctgagaaaagcatgagacatacctgtgcaggtcatacagatggcacaaatgctgctcctttcactttgcactgacagcactgaaatattaagataaatttgtttgggaaaacwcaacagtccagctcttaaaaaaaaaaaaaawaatccaacttaaagtaaatggacatcatagtaaacttgtgtggaaaacaaatacaacggcttgctaacctggtaaggtggatttttggtacaactctcttattacctgctgaggccttttctgtctgccctcactatattttaatggctaaggaagacatggggaatgccagaacacactgatctagattacttgtttacattcattaagttcagtggttcattatgcttgtagaagttgagatataattgtgcactagtgcacatcttctctatgcagcttgcaaagaggaaaaggaaa

SEQ ID NO: 16040 - DNA, 600 bp, Chicken  19866894223063_1
atgcctttccctaccatatattggtgatcagcattttggtgggattttatcaggtgtgatatagcctggaggacaccagtagtgagaaatgatactgtcagagccactaatctgattcacaaccaattgcttgcaggagagtctgggcagcccattgatggaaccattcacacaggactggcacaacctgaggtcttatgttgaatgtaataaggagaacaataataatgatgatgatacaagagaaaaggagaagagaagaggaaaggagagtagtggagaaggaaagaaaaaaaaacwaagaaaggaaaggagaaaggagaaaggagaaaggagaaaggagaaaggagaaaggagaaaaaggaaaaaggaaaaaaggaaaaggagagaaaaggaaaggaaaaggaaaagaacagagaaaaccgcaacactgagaatgtttcctaaaaggtgaaattgtcttttggttattgggaagccattggcaagacagcactcctaggactggtggctgttcacaatatggcaagcctgtgggattttggtacatttgctaattgtgtggttttcctggatatatctatacgggtaaaataaaca

SEQ ID NO: 16041 - DNA, 600 bp, Chicken  19866894223063_2; identical to SEQ ID NO: 16040

SEQ ID NO: 16042 - DNA, 600 bp, Chicken  19866894223063_3; identical to SEQ ID NO: 16040

SEQ ID NO: 16043 - DNA, 600 bp, Chicken  19866894223063_4; identical to SEQ ID NO: 16040

SEQ ID NO: 16044 - DNA, 600 bp, Chicken  19866894223063_5
cctttccctaccatatattggtgatcagcattttggtgggattttatcaggtgtgatatagcctggaggacaccagtagtgagaaatgatactgtcagagccactaatctgattcacaaccaattgcttgcaggagagtctgggcagcccattgatggaaccattcacacaggactggcacaacctgaggtcttatgttgaatgtaataaggagaacaataataatgatgatgatacaagagaaaaggagaagagaagaggaaaggagagtagtggagaaggaaagaaaaaaaaacaaawaaaggaaaggagaaaggagaaaggagaaaggagaaaggagaaaggagaaaggagaaaaaggaaaaaggaaaaaaggaaaaggagagaaaaggaaaggaaaaggaaaagaacagagaaaaccgcaacactgagaatgtttcctaaaaggtgaaattgtcttttggttattgggaagccattggcaagacagcactcctaggactggtggctgttcacaatatggcaagcctgtgggattttggtacatttgctaattgtgtggttttcctggatatatctatacgggtaaaataaacagag

SEQ ID NO: 16045 - DNA, 600 bp, Chicken  19866894223063_6
cctaccatatattggtgatcagcattttggtgggattttatcaggtgtgatatagcctggaggacaccagtagtgagaaatgatactgtcagagccactaatctgattcacaaccaattgcttgcaggagagtctgggcagcccattgatggaaccattcacacaggactggcacaacctgaggtcttatgttgaatgtaataaggagaacaataataatgatgatgatacaagagaaaaggagaagagaagaggaaaggagagtagtggagaaggaaagaaaaaaaaacaaagaaaggwaaggagaaaggagaaaggagaaaggagaaaggagaaaggagaaaggagaaaaaggaaaaaggaaaaaaggaaaaggagagaaaaggaaaggaaaaggaaaagaacagagaaaaccgcaacactgagaatgtttcctaaaaggtgaaattgtcttttggttattgggaagccattggcaagacagcactcctaggactggtggctgttcacaatatggcaagcctgtgggattttggtacatttgctaattgtgtggttttcctggatatatctatacgggtaaaataaacagagccagac

SEQ ID NO: 16046 - DNA, 600 bp, Chicken  19866894223063_7; identical to SEQ ID NO: 16045

SEQ ID NO: 16047 - DNA, 599 bp, Chicken  19866894223066_1
  misc_feature (1)..(104): n is any nucleotide
nnnnnnnnnnnnnnnnnnnnnnnnnnnnnnnnnnnnnnnnnnnnnnnnnnnnnnnnnnnnnnnnnnnnnnnnnnnnnnnnnnnnnnnnnnnnnnnnnnnnnnnnacgttctgctgtagcagctccaggggacagtgctagcccaagccatggctacaaaggtgggatggagcaagctattgctggtgaaatagcagtcatctctgcagggcagcaatgaacagccccacagtcccaatgcacagcaaagagcagagctacggtcatcagagcaccaaaccacctgcttaggaggggacayggctacttgctgagagctgcaagcccaccacgtcargaagctgtcagattgccaagcatggagaagaaatgagaaagatgcagaataaaccactgcaatggcagtcttttcttgctcagtgcctgacrcagctcctttacaatagctgcgtgggatgcagtatgaactcaaaagccatcttgtgcagaacaaagcagcacaggcttttggaggactgggacaggagggaagagatgggattgctgtaagcacaaagcagctgaggaagggcagctatgccaggtactgtgtgtgattta

SEQ ID NO: 16048 - DNA, 599 bp, Chicken  19866894223066_2
  misc_feature (1)..(68): n is any nucleotide
nnnnnnnnnnnnnnnnnnnnnnnnnnnnnnnnnnnnnnnnnnnnnnnnnnnnnnnnnnnnnnnnnnnnacgttctgctgtagcagctccaggggacagtgctagcccaagccatggctacaaaggtgggatggagcaagctattgctggtgaaatagcagtcatctctgcagggcagcaatgaacagccccacagtcccaatgcacagcaaagagcagagctacggtcatcagagcaccaaaccacctgcttaggaggggacayggctacttgctgagagctgcaagcccaccacgtcargaagctgtcagattgccaagcatggagaagaaatgagaaagatgcagaataaaccactgcaatggcagtcttttcttgctcagtgcctgacrcagctcctttacaatagctgcgtgggatgcagtatgaactcaaaagccatcttgtgcagaacaaagcagcacaggcttttggaggactgggacaggagggaagagatgggattgctgtaagcacaaagcagctgaggaagggcagctatgccaggtactgtgtgtgatttagctcctggtgagccagactgtctctgagcagtctct

SEQ ID NO: 16049 - DNA, 600 bp, Chicken  19866894223066_3
ggacagtgctagcccaagccatggctacaaaggtgggatggagcaagctattgctggtgaaatagcagtcatctctgcagggcagcaatgaacagccccacagtcccaatgcacagcaaagagcagagctacggtcatcagagcaccaaaccacctgcttaggaggggacayggctacttgctgagagctgcaagcccaccacgtcargaagctgtcagattgccaagcatggagaagaaatgagaaagatgcagaataaaccactgcaatggcagtcttttcttgctcagtgcctgacrcagctcctttacaatagctgcgtgggatgcagtatgaactcaaaagccatcttgtgcagaacaaagcagcacaggcttttggaggactgggacaggagggaagagatgggattgctgtaagcacaaagcagctgaggaagggcagctatgccaggtactgtgtgtgatttagctcctggtgagccagactgtctctgagcagtctcttcctgcaaggctttggatgtgcaatacagcatggagccattgctgaaacagaacgtgcccagagccataaacaactactttgtgcataagaat

SEQ ID NO: 16050 - DNA, 600 bp, Chicken  19866894223067_1
cgagttctcattcgagttcttattgtgttacaagggtatacttcattttcatagggaatatcgaattataaataaataaataaataaataaataaataatctatactcctgaaagaatggaagcatatgagacatcaggcattttcagctccctaaaaagattcctacatttccatatatcttaagttggaaaacaattatttgcacatgtctgatttgtgtggaaatagtgcaaaatatttatatgttttatagaattctgcttttaatttaagatcatttcattttcagatgctacartcatgaaggcaaaaactatcccctttggacaccacaaactgaaatcttttatccacccatgttattagccattaaaagcaataaattaaaattggggcagtgttttacaagagggagatactgcttccattgtcacctaatgtaccatttaaaccaactaattcttgccactgctcatgatattgcctctgagcaactgatccccatgcctgaatttacagtctggcacattaaccttagacctcattttacctcagagaatcttcttcatttcctctaaaaagtatggaaaccttttaa

SEQ ID NO: 16051 - DNA, 599 bp, Chicken  19866894223068_1
  misc_feature (1)..(35): n is any nucleotide
nnnnnnnnnnnnnnnnnnnnnnnnnnnnnnnnnnnacagtccagtgcctcttggctgtgttttacagaggtggccacatcttctctagttttgggaacatcccatcactgtgtactagagtctgtggagaaaagagagccccatatctgaattgttctaagagggctggatgcagcctatgccagtccagccgatggttatcctgacacaacccacctccttttcctaatgtggaggtgtccactccatcttcttgctactgcatcccccttcatgcttccccattggaaagattcagcygccaggaaatacagtgtgaagaccatggtggaaattagggtgcctgaatctgggtaattcttagtgcttcggttgcccagctaacarcgctgcctttccccatcactgtggatggaagcgtgttagagacatcttaacatcagttacagaactgaggagatggtccaactgctgacctgctttccctgcagcctagctgtggatgatggtggtctgggagaagttaacaggacgtaatttggctccatgtgtttccttgaggtattcagtctaaraaggctcagcagctttgcctatcc

SEQ ID NO: 16052 - DNA, 600 bp, Chicken  19866894223068_2
gttttgggaacatcccatcactgtgtactagagtctgtggagaaaagagagccccatatctgaattgttctaagagggctggatgcagcctatgccagtccagccgatggttatcctgacacaacccacctccttttcctaatgtggaggtgtccactccatcttcttgctactgcatcccccttcatgcttccccattggaaagattcagcygccaggaaatacagtgtgaagaccatggtggaaattagggtgcctgaatctgggtaattcttagtgcttcggttgcccagctaacarcgctgcctttccccatcactgtggatggaagcgtgttagagacatcttaacatcagttacagaactgaggagatggtccaactgctgacctgctttccctgcagcctagctgtggatgatggtggtctgggagaagttaacaggacgtaatttggctccatgtgtttccttgaggtattcagtctaaraaggctcagcagctttgcctatccgcatctcggtttcctgaccagagatgaggtgcgaggagctgaactacattccctgggaagagctgatagagtctcccccacctcttcc

SEQ ID NO: 16053 - DNA, 600 bp, Chicken  19866894223068_3
gcttccccattggaaagattcagcygccaggaaatacagtgtgaagaccatggtggaaattagggtgcctgaatctgggtaattcttagtgcttcggttgcccagctaacarcgctgcctttccccatcactgtggatggaagcgtgttagagacatcttaacatcagttacagaactgaggagatggtccaactgctgacctgctttccctgcagcctagctgtggatgatggtggtctgggagaagttaacaggacgtaatttggctccatgtgtttccttgaggtattcagtctaaraaggctcagcagctttgcctatccgcatctcggtttcctgaccagagatgaggtgcgaggagctgaactacattccctgggaagagctgatagagtctcccccacctcttcccctcctctggtgctctgaaccaaaacagctgcaaacttcttgtggctggagatgtgctgagtggcctggcaggggttcaggaggatgtaaaggaatcccacccaccagtagtgagggctctgtgccaccaccagcmcttgtgtgccccaaatcctgacttcctggtaactactatctccataaatact

SEQ ID NO: 16054 - DNA, 600 bp, Chicken  19866894223068_4
ttaacaggacgtaatttggctccatgtgtttccttgaggtattcagtctaaraaggctcagcagctttgcctatccgcatctcggtttcctgaccagagatgaggtgcgaggagctgaactacattccctgggaagagctgatagagtctcccccacctcttcccctcctctggtgctctgaaccaaaacagctgcaaacttcttgtggctggagatgtgctgagtggcctggcaggggttcaggaggatgtaaaggaatcccacccaccagtagtgagggctctgtgccaccaccagcmcttgtgtgccccaaatcctgacttcctggtaactactatctccataaatactggtcagccggcaggagaggggactgacatcactgagctgcgttgtatcacgtgaaatatgaggtgacacccaatacactggcattaggcacaggagttgtctgctgatgtggtgacacgcttgaagcaaagctggaaaatttgatcccttcctgcccgcggtctcccaggctctgtggtgaggcacgcttgacttgctttgcttgggtttggggaaatgggaaaatgtagcacgcaggccagaaccat

SEQ ID NO: 16055 - DNA, 600 bp, Chicken  19866894223068_5
aggggactgacatcactgagctgcgttgtatcacgtgaaatatgaggtgacacccaatacactggcattaggcacaggagttgtctgctgatgtggtgacacgcttgaagcaaagctggaaaatttgatcccttcctgcccgcggtctcccaggctctgtggtgaggcacgcttgacttgctttgcttgggtttggggaaatgggaaaatgtagcacgcaggccagaaccatctgcagttcgtgaactcaaatgtgtcaggttggcaaatgccctccaggccgttctgtctgctgccatsaggccctgtcacagctggagagctgggctgagcacagcacggccagctcggcccctggtgaagctcaagggaggtgaagaatgctgagctgcttttggcaatgctgtatcagtgacaactttggccagtagtcagtctggctccagacctggcttgaaatgcctccctgcagcagggactgccctgtgtcgcttcctcctcccccagcaccattgcctgcctgctttcctgttgaaccagggacggagctggtgtgtggttcttctaaacatgtggcccaggagctgtgaacccttcgct

SEQ ID NO: 16056 - DNA, 600 bp, Chicken  19866894223071_1
caacaacaaacaagaacaaaacacaaattggcgtgggaagtgcatatgctgctaatcagcaccagaagcaaaatgatccatatttcaacagctaagaccacacagtatactttatgtctagtcttaaccagatatcgctgttactgtaatggtgtccagaaaacacaggcaggatcaagggaccctattatattagctgattgcaaattagatgaaggaagggagggaaggaggagggaagaaagaaaagaaatgtgaatatgtgaattgacttgctcacattactgaacaaaacagcarcgaaagaggactcgatcctacctaaccttcagtttctccatgtcacacctgtgggaggaattcaacctatctaactttactctgcacaaatttagtgcctaatgtgagctagacatctaaatccaggcacagcttccacagaggsatgttcatcccatcctgaggcagaacataaaatatgggagaaagaactgttctctgtcaatgcctctttttaccccttgactaattcaactagatgctgtacttttaatagtgttactttattaaagaatcccaacttayttcagtagctcagag

SEQ ID NO: 16057 - DNA, 600 bp, Chicken  19866894223071_2
gtaatggtgtccagaaaacacaggcaggatcaagggaccctattatattagctgattgcaaattagatgaaggaagggagggaaggaggagggaagaaagaaaagaaatgtgaatatgtgaattgacttgctcacattactgaacaaaacagcarcgaaagaggactcgatcctacctaaccttcagtttctccatgtcacacctgtgggaggaattcaacctatctaactttactctgcacaaatttagtgcctaatgtgagctagacatctaaatccaggcacagcttccacagaggsatgttcatcccatcctgaggcagaacataaaatatgggagaaagaactgttctctgtcaatgcctctttttaccccttgactaattcaactagatgctgtacttttaatagtgttactttattaaagaatcccaacttayttcagtagctcagaggccattttggatggggccccaggcaaactgatctagcagctgattttgtggctggaaacccttttgaagaaagggattggaactagatgacccttgaggtctcttccaacccaagccattctatgatcctatgactctgtgactc

SEQ ID NO: 16058 - DNA, 600 bp, Chicken  19866894223071_3
tgaacaaaacagcarcgaaagaggactcgatcctacctaaccttcagtttctccatgtcacacctgtgggaggaattcaacctatctaactttactctgcacaaatttagtgcctaatgtgagctagacatctaaatccaggcacagcttccacagaggsatgttcatcccatcctgaggcagaacataaaatatgggagaaagaactgttctctgtcaatgcctctttttaccccttgactaattcaactagatgctgtacttttaatagtgttactttattaaagaatcccaacttayttcagtagctcagaggccattttggatggggccccaggcaaactgatctagcagctgattttgtggctggaaacccttttgaagaaagggattggaactagatgacccttgaggtctcttccaacccaagccattctatgatcctatgactctgtgactctcaaagaacacttttcattatcctagatatacagcattaggatcttcagatagtcagaactgtaagtcctgtatgcaactgtgtaatgacatcgtaatgtaaatttccatctagctgtgaatggttgaagtaataggttt

SEQ ID NO: 16059 - DNA, 600 bp, Chicken  19866894223076_1
cttatgtactgaaaatgtttctttttaagcactgaaaaggcttaaagcgtgtgccccaggtcctgtcaccaacgtataacctcccctgtgttgcccctgtgtgatttttactgcatccctgtaagttaccgttcttatagcactgcttacctcagttctggaggtgaagttccttctagagaagctcaggaacgtcatttccttcgggcaaggcaatgctcagcagtgctgcaaacggccctcccgttgatctgctctgaggatccctttagtaggacgagagattgtagccccaggtgycaccyggagagattcaggttggatatgaggaaaaaattgtgctccaaaagagtggaaatgcagtggcacagctgcccagggaggtggtggggtcaccgtccctggaggtgtcccwgagccgtggggatgtggcacttggggacatggtttagtgggcagagggcacggaagctttgggtggcactgggagtggcagagctgccayagtgcagcacaatgaaccctgctgtactcctgtattgagtttagcagatttctgatgtgttttaggcatagaggaggacacagggagaaagccac

SEQ ID NO: 16060 - DNA, 600 bp, Chicken  19866894223076_2
gtactgaaaatgtttctttttaagcactgaaaaggcttaaagcgtgtgccccaggtcctgtcaccaacgtataacctcccctgtgttgcccctgtgtgatttttactgcatccctgtaagttaccgttcttatagcactgcttacctcagttctggaggtgaagttccttctagagaagctcaggaacgtcatttccttcgggcaaggcaatgctcagcagtgctgcaaacggccctcccgttgatctgctctgaggatccctttagtaggacgagagattgtagccccaggtgycaccyggagagattcaggttggatatgaggaaaaaattgtgctccaaaagagtggaaatgcagtggcacagctgcccagggaggtggtggggtcaccgtccctggaggtgtcccwgagccgtggggatgtggcacttggggacatggtttagtgggcagagggcacggaagctttgggtggcactgggagtggcagagctgccayagtgcagcacaatgaaccctgctgtactcctgtattgagtttagcagatttctgatgtgttttaggcatagaggaggacacagggagaaagccactgtgg

SEQ ID NO: 16061 - DNA, 600 bp, Chicken  19866894223076_3
tccctgtaagttaccgttcttatagcactgcttacctcagttctggaggtgaagttccttctagagaagctcaggaacgtcatttccttcgggcaaggcaatgctcagcagtgctgcaaacggccctcccgttgatctgctctgaggatccctttagtaggacgagagattgtagccccaggtgycaccyggagagattcaggttggatatgaggaaaaaattgtgctccaaaagagtggaaatgcagtggcacagctgcccagggaggtggtggggtcaccgtccctggaggtgtcccwgagccgtggggatgtggcacttggggacatggtttagtgggcagagggcacggaagctttgggtggcactgggagtggcagagctgccayagtgcagcacaatgaaccctgctgtactcctgtattgagtttagcagatttctgatgtgttttaggcatagaggaggacacagggagaaagccactgtggtttgtttaagccgtgttgcagtattactgatgtgtacgctgagtttaattgccctcgcagctcagaaagccarctgtcctgcacaactgtactttggctgcaccaaaagc

SEQ ID NO: 16062 - DNA, 600 bp, Chicken  19866894223076_4
gggcaaggcaatgctcagcagtgctgcaaacggccctcccgttgatctgctctgaggatccctttagtaggacgagagattgtagccccaggtgycaccyggagagattcaggttggatatgaggaaaaaattgtgctccaaaagagtggaaatgcagtggcacagctgcccagggaggtggtggggtcaccgtccctggaggtgtcccwgagccgtggggatgtggcacttggggacatggtttagtgggcagagggcacggaagctttgggtggcactgggagtggcagagctgccayagtgcagcacaatgaaccctgctgtactcctgtattgagtttagcagatttctgatgtgttttaggcatagaggaggacacagggagaaagccactgtggtttgtttaagccgtgttgcagtattactgatgtgtacgctgagtttaattgccctcgcagctcagaaagccarctgtcctgcacaactgtactttggctgcaccaaaagcagcgtggccagcaggtcagggaagtgatcctacccctctgctctgtgctgtgaggcctcacctggagtactgcattcagatgtggagtcc

SEQ ID NO: 16063 - DNA, 600 bp, Chicken  19866894223076_5
gggaggtggtggggtcaccgtccctggaggtgtcccwgagccgtggggatgtggcacttggggacatggtttagtgggcagagggcacggaagctttgggtggcactgggagtggcagagctgccayagtgcagcacaatgaaccctgctgtactcctgtattgagtttagcagatttctgatgtgttttaggcatagaggaggacacagggagaaagccactgtggtttgtttaagccgtgttgcagtattactgatgtgtacgctgagtttaattgccctcgcagctcagaaagccarctgtcctgcacaactgtactttggctgcaccaaaagcagcgtggccagcaggtcagggaagtgatcctacccctctgctctgtgctgtgaggcctcacctggagtactgcattcagatgtggagtcctcagcacaggagagacatggagctgttggagtgcatccagaggagggccacaaaaatgatcccagggctggaacagctctcctacgaggacaggctgagagagctggggctgtgcagcctggagaagagaaggctgtgaggtgacctgagagcaacctgtcagtatctaaagg

SEQ ID NO: 16064 - DNA, 599 bp, Chicken  19866894223077_1
  misc_feature (1)..(47): n is any nucleotide
nnnnnnnnnnnnnnnnnnnnnnnnnnnnnnnnnnnnnnnnnnnnnnntggtttgatttctatgcttttgtctaaaatttttaataaactttatttctcagatagctgaagtaggttctcctgagcctgactgcttacagtgaggttctgtcagagccattctgggtggtttcatgcttctggtgatggcgctcgcagaactgcactgactgctttgcttccctgcttgatgtcagccttagaagtggtctaaatctatggtgaaaatgtcgaactcgtattgtaaaagtaggtagtgcaratctcccagtgagcatttgctttctctcaaatgacatyataatttttctttcygtaggactgatttgctgctttccttcttgtaggtttgctcttatacatttatttcctacagctttttccttgccatcacagctcgctttctcgggcagttaccctcacagctcttctttgcaaagacccggtgtgcagaaggagcaaaggactgctgcaggttgaagcaatrtcctcttgctgcgcagccaggctggaagcaggagctgctcaatgctatgagtatttcatgggcaactgtgccca

SEQ ID NO: 16065 - DNA, 599 bp, Chicken  19866894223077_2
  misc_feature (1)..(9): n is any nucleotide
nnnnnnnnntggtttgatttctatgcttttgtctaaaatttttaataaactttatttctcagatagctgaagtaggttctcctgagcctgactgcttacagtgaggttctgtcagagccattctgggtggtttcatgcttctggtgatggcgctcgcagaactgcactgactgctttgcttccctgcttgatgtcagccttagaagtggtctaaatctatggtgaaaatgtcgaactcgtattgtaaaagtaggtagtgcaratctcccagtgagcatttgctttctctcaaatgacatyataatttttctttcygtaggactgatttgctgctttccttcttgtaggtttgctcttatacatttatttcctacagctttttccttgccatcacagctcgctttctcgggcagttaccctcacagctcttctttgcaaagacccggtgtgcagaaggagcaaaggactgctgcaggttgaagcaatrtcctcttgctgcgcagccaggctggaagcaggagctgctcaatgctatgagtatttcatgggcaactgtgcccaagctgcaattagagccaggagtccacccacatctgctt

SEQ ID NO: 16066 - DNA, 600 bp, Chicken  19866894223077_3
gatttctatgcttttgtctaaaatttttaataaactttatttctcagatagctgaagtaggttctcctgagcctgactgcttacagtgaggttctgtcagagccattctgggtggtttcatgcttctggtgatggcgctcgcagaactgcactgactgctttgcttccctgcttgatgtcagccttagaagtggtctaaatctatggtgaaaatgtcgaactcgtattgtaaaagtaggtagtgcaratctcccagtgagcatttgctttctctcaaatgacatyataatttttctttcygtaggactgatttgctgctttccttcttgtaggtttgctcttatacatttatttcctacagctttttccttgccatcacagctcgctttctcgggcagttaccctcacagctcttctttgcaaagacccggtgtgcagaaggagcaaaggactgctgcaggttgaagcaatrtcctcttgctgcgcagccaggctggaagcaggagctgctcaatgctatgagtatttcatgggcaactgtgcccaagctgcaattagagccaggagtccacccacatctgcttactgcccttcagcatg

SEQ ID NO: 16067 - DNA, 600 bp, Chicken  19866894223077_4
ttgatgtcagccttagaagtggtctaaatctatggtgaaaatgtcgaactcgtattgtaaaagtaggtagtgcaratctcccagtgagcatttgctttctctcaaatgacatyataatttttctttcygtaggactgatttgctgctttccttcttgtaggtttgctcttatacatttatttcctacagctttttccttgccatcacagctcgctttctcgggcagttaccctcacagctcttctttgcaaagacccggtgtgcagaaggagcaaaggactgctgcaggttgaagcaatrtcctcttgctgcgcagccaggctggaagcaggagctgctcaatgctatgagtatttcatgggcaactgtgcccaagctgcaattagagccaggagtccacccacatctgcttactgcccttcagcatgcatccttgagctgtccttgtcattctttgctggrtttggtgggtttggagtcctttatccacctcttctggcacccttagagcctactgagagtaatatgcaacttctcatggtttgttttgctacacagaagctgtctttctgctctcataatgcaatattatagtattaa

SEQ ID NO: 16068 - DNA, 600 bp, Chicken  19866894223077_5
ttgctcttatacatttatttcctacagctttttccttgccatcacagctcgctttctcgggcagttaccctcacagctcttctttgcaaagacccggtgtgcagaaggagcaaaggactgctgcaggttgaagcaatrtcctcttgctgcgcagccaggctggaagcaggagctgctcaatgctatgagtatttcatgggcaactgtgcccaagctgcaattagagccaggagtccacccacatctgcttactgcccttcagcatgcatccttgagctgtccttgtcattctttgctggrtttggtgggtttggagtcctttatccacctcttctggcacccttagagcctactgagagtaatatgcaacttctcatggtttgttttgctacacagaagctgtctttctgctctcataatgcaatattatagtattaaaatattagagagcaacctcattttaaagggcggagaaaygaatacaggagcatctatttgcttagttcaaggaacagtaagctttgtacctttgctccttgaacatagatttcaaagaactcagggtagtactaaacaaatattaaagtgttcagctgttaa

SEQ ID NO: 16069 - DNA, 600 bp, Chicken  19866894223077_6
caatgctatgagtatttcatgggcaactgtgcccaagctgcaattagagccaggagtccacccacatctgcttactgcccttcagcatgcatccttgagctgtccttgtcattctttgctggrtttggtgggtttggagtcctttatccacctcttctggcacccttagagcctactgagagtaatatgcaacttctcatggtttgttttgctacacagaagctgtctttctgctctcataatgcaatattatagtattaaaatattagagagcaacctcattttaaagggcggagaaaygaatacaggagcatctatttgcttagttcaaggaacagtaagctttgtacctttgctccttgaacatagatttcaaagaactcagggtagtactaaacaaatattaaagtgttcagctgttaatgcccttctaacctataaaggtcaggtataaaatcccaggatattggaatatacgaggtgtgagtggtgctgcaccaacagctgtaactcctattgaaaacagcagccatagcagtgacagtgcggtgttaattcattggggtaaagggttgcatgttctgattgcagcagcccctt

SEQ ID NO: 16070 - DNA, 600 bp, Chicken  19866894223081_1
cttattggctatgaacacatggcatataccccaaagagaaaaaaaaaaaaaaaagcaaagaattttgcaaagatgtctgaattgttctttgctcatattaagcacggtacacttgaagcaaataaaaagagaagcattttacttgttcagatgctgcagtggtgagggcctacaaacacatagcgaggcaaaacataaaatttttcaataatatattttcctgtagcaaactcacatgcagcagtgaaggcagaaaactaaaatttgatccttcaaacaaattcatattaacaattcagmttttcagtattgatatggcagattacaaatatcaaatatatcaatgcttagatgattttctcgtttattctatgacccataaagagtttgcgttatagagaacactgtaccatctatctgaaaacatcatgggattatcgcaaatggcaagagtctgtatgatatgtagagaaatcaagtcctaaaatgactagccttcaataattatgattagaacaaaaatctatcactggaataaaagtaaaacatcagcgtattatttttattctgtggtaaacataacacaaagggtcttgcaag

SEQ ID NO: 16071 - DNA, 600 bp, Chicken  19866894223087_1
tgtgcacggtttcaggctgccgtggctcagggacaggctgttggtctcgctgcacactgtaacactacactgttgtgcagtatctgtgctttacattaacatgctttgccgtgtgtttcatggaaaatagatggtgactgctacatggagtgatttgctcagtgattgcttcccagtgctgctaaacatatttcattgtgctgccccttagaaaggttcggtgtgtctacaggctgttgtacgatgcagttgtattggtatgcaattaaaaagtcacccaatcaaaaatgtaaaagagartatttatgttctgtgtattagtttatggcgctattttagatagatgtaaatcatataatgtacctactacgttataaaactttatatgttttttacttattttcatgtgtatatttaaatctatctcatgcatgacattataaaaactatataaaaatatatatctatgttagtacaatgcttccagctatagtttgtcagtgaggttgcacagttttcagaaaaccactgtaagcaagcagatctaaacaaatttatttagaatgcaggaaaaacagcactaagaaagggatatgaatg

SEQ ID NO: 16072 - DNA, 599 bp, Chicken  19866894223091_1
  misc_feature (1)..(213): n is any nucleotide
nnnnnnnnnnnnnnnnnnnnnnnnnnnnnnnnnnnnnnnnnnnnnnnnnnnnnnnnnnnnnnnnnnnnnnnnnnnnnnnnnnnnnnnnnnnnnnnnnnnnnnnnnnnnnnnnnnnnnnnnnnnnnnnnnnnnnnnnnnnnnnnnnnnnnnnnnnnnnnnnnnnnnnnnnnnnnnnnnnnnnnnnnnnnnnnnnnnnnnnnnnnnnnnnnnnnncctttttaacccatttttcttttcctttgctgcctatttattggtttcctctatttgtgaggtctgctaaggagaaagtaatagacyttcttttgcagtgttgagaagtgtaaccagtagctgtaatgatggcattaggawgatcagtgcttgaaattactgtcacatgagtgtgcttttgtcctgatagtgagacatttttctatacctagccaaaaatggatagcaatttactcttgcaagcagaacactccacgttgttgtcttgacaggtctgcttaggaattttgaatgtatttatttgtgcaactgtttaaaatgcttgtgctcttaaaggactctgctggagagattcstaagcacaaatggtgaagagagagacactt

SEQ ID NO: 16073 - DNA, 599 bp, Chicken  19866894223091_2
  misc_feature (1)..(159): n is any nucleotide
nnnnnnnnnnnnnnnnnnnnnnnnnnnnnnnnnnnnnnnnnnnnnnnnnnnnnnnnnnnnnnnnnnnnnnnnnnnnnnnnnnnnnnnnnnnnnnnnnnnnnnnnnnnnnnnnnnnnnnnnnnnnnnnnnnnnnnnnnnnnnnnnnnnnnnnnnnnnnnncctttttaacccatttttcttttcctttgctgcctatttattggtttcctctatttgtgaggtctgctaaggagaaagtaatagacyttcttttgcagtgttgagaagtgtaaccagtagctgtaatgatggcattaggawgatcagtgcttgaaattactgtcacatgagtgtgcttttgtcctgatagtgagacatttttctatacctagccaaaaatggatagcaatttactcttgcaagcagaacactccacgttgttgtcttgacaggtctgcttaggaattttgaatgtatttatttgtgcaactgtttaaaatgcttgtgctcttaaaggactctgctggagagattcstaagcacaaatggtgaagagagagacacttggaaaaggggaatagtctgcaaataaggaaggatcttttgtagtagttttcctg

SEQ ID NO: 16074 - DNA, 600 bp, Chicken  19866894223091_3
gtgaggtctgctaaggagaaagtaatagacyttcttttgcagtgttgagaagtgtaaccagtagctgtaatgatggcattaggawgatcagtgcttgaaattactgtcacatgagtgtgcttttgtcctgatagtgagacatttttctatacctagccaaaaatggatagcaatttactcttgcaagcagaacactccacgttgttgtcttgacaggtctgcttaggaattttgaatgtatttatttgtgcaactgtttaaaatgcttgtgctcttaaaggactctgctggagagattcstaagcacaaatggtgaagagagagacacttggaaaaggggaatagtctgcaaataaggaaggatcttttgtagtagttttcctgtaataaggagaaatgttttaagcttttgaaaaagtgtttttaatcttcatgtgaatccagtagtgaagctactctgtactactgagtagcatgccctgctgtatacaattaaarttcctgccatgccagaaaataacaatactagcatgattgtttatatgctcccgattacaagaagagatacaaaagctgattacrggattgcartaggctcct

SEQ ID NO: 16075 - DNA, 593 bp, Chicken  19866894223091_4
acgttgttgtcttgacaggtctgcttaggaattttgaatgtatttatttgtgcaactgtttaaaatgcttgtgctcttaaaggactctgctggagagattcstaagcacaaatggtgaagagagagacacttggaaaaggggaatagtctgcaaataaggaaggatcttttgtagtagttttcctgtaataaggagaaatgttttaagcttttgaaaaagtgtttttaatcttcatgtgaatccagtagtgaagctactctgtactactgagtagcatgccctgctgtatacaattaaarttcctgccatgccagaaaataacaatactagcatgattgtttatatgctcccgattacaagaagagatacaaaagctgattacrggattgcartaggctccttctgctgaacacagtttttattggaaaagaatagggatgctgaacacaacttacttcctggagaatagctttgatttttatgactgaaagcataaacccacacagtgcttcgtcttaagtagcaacgatgatagattcttaattataatagtttggtgaaagcactactaaacctgtaaagggatttctcc

SEQ ID NO: 16076 - DNA, 509 bp, Chicken  19866894223091_5
ctctgctggagagattcstaagcacaaatggtgaagagagagacacttggaaaaggggaatagtctgcaaataaggaaggatcttttgtagtagttttcctgtaataaggagaaatgttttaagcttttgaaaaagtgtttttaatcttcatgtgaatccagtagtgaagctactctgtactactgagtagcatgccctgctgtatacaattaaarttcctgccatgccagaaaataacaatactagcatgattgtttatatgctcccgattacaagaagagatacaaaagctgattacrggattgcartaggctccttctgctgaacacagtttttattggaaaagaatagggatgctgaacacaacttacttcctggagaatagctttgatttttatgactgaaagcataaacccacacagtgcttcgtcttaagtagcaacgatgatagattcttaattataatagtttggtgaaagcactactaaacctgtaaagggatttctcc

SEQ ID NO: 16077 - DNA, 500 bp, Chicken  19866894223091_6
agagattcstaagcacaaatggtgaagagagagacacttggaaaaggggaatagtctgcaaataaggaaggatcttttgtagtagttttcctgtaataaggagaaatgttttaagcttttgaaaaagtgtttttaatcttcatgtgaatccagtagtgaagctactctgtactactgagtagcatgccctgctgtatacaattaaarttcctgccatgccagaaaataacaatactagcatgattgtttatatgctcccgattacaagaagagatacaaaagctgattacrggattgcartaggctccttctgctgaacacagtttttattggaaaagaatagggatgctgaacacaacttacttcctggagaatagctttgatttttatgactgaaagcataaacccacacagtgcttcgtcttaagtagcaacgatgatagattcttaattataatagtttggtgaaagcactactaaacctgtaaagggatttctcc

SEQ ID NO: 16078 - DNA, 600 bp, Chicken  19866894223093_1
gtcaccagcttgcagccctcatctttgcccgccatgtagttgagcaccgctgcatcatagatgaaggcatccagcttcctgcccaccaccgagagggctgggtgagggggggctcctcaggaggagggcagacccctttctgggggagctgtgcccctttcagttggctgcatcccggggcggtaccctttggaggatctcaaccccatcctggagagtcacaaccccacccaggggaggggaacccaatctggggggggatgtatcccacctgagggagctgtaggaagctctatcccytctgcacggggttgtagcatttttgggggtcccataacccaactaggaaagccttatggacccataacaccccaaagcgcagagccgtaccctccggatgagctgtgtccgaactggggaagctacagctcacttgagggggggctgtaccctagctgaggaacccatgctccacctgggcagcactgcatcccacctcaaggagccacatgggaccacactttgttttggggacccctaccctgcctgggggaaccataccccattttgaggctggtgagggcgtcctccacggagcgc

SEQ ID NO: 16079 - DNA, 600 bp, Chicken  19866894223093_2
tagctgaggaacccatgctccacctgggcagcactgcatcccacctcaaggagccacatgggaccacactttgttttggggacccctaccctgcctgggggaaccataccccattttgaggctggtgagggcgtcctccacggagcgctggttgtacttcaccatgtgggtgtgcatgtcggggtagttgctgcggatgttcctctcggtgctgccgttggggaccgtgccgaagcggaacggggggtactgctcctgcggcttctggaactgcggggagccccgggtggcagcgtcacrggggggcacatccctgctgtgtccccactgtgtccgcagcatctctccccagccaactctccatcctcccacacacgcacaaccacaaagcccctcaagggctccccacctggataaccttaatttcgggyggggggagaagagcccagccagcacctcaccttcctgtcgctcagccctgacacagtgtcgatgtactgctcctggatcatgaaggctgccaggttggcggtgtagctggcgaggaagatgacggcgaagaaggcccagatgagcaccatgatcttgctggtggtgccc

SEQ ID NO: 16080 - DNA, 600 bp, Chicken  19866894223093_3
cgtcctccacggagcgctggttgtacttcaccatgtgggtgtgcatgtcggggtagttgctgcggatgttcctctcggtgctgccgttggggaccgtgccgaagcggaacggggggtactgctcctgcggcttctggaactgcggggagccccgggtggcagcgtcacrggggggcacatccctgctgtgtccccactgtgtccgcagcatctctccccagccaactctccatcctcccacacacgcacaaccacaaagcccctcaagggctccccacctggataaccttaatttcgggyggggggagaagagcccagccagcacctcaccttcctgtcgctcagccctgacacagtgtcgatgtactgctcctggatcatgaaggctgccaggttggcggtgtagctggcgaggaagatgacggcgaagaaggcccagatgagcaccatgatcttgctggtggtgcccttggggttctcgatgggcacggagttgttgaagaccagagcccacagcagccacaccgacttgccgatggtgaaggtgggaccgcccggccctggtggggacagggggcagagggacaggtgtcagcacgg

SEQ ID NO: 16081 - DNA, 600 bp, Chicken  19866894223095_1
ttttctcttccagcccaatgatttattaatgattacatataaattaaacaggaaaaggtgcaggagcacaccctaagctagaaaagtctatttggtgaatagctggtccagatgacatcttccaggcacatgaaagaattaaaccagctctcccttctgctcaggaatggtctcggggtcacaccagtgtattttgttacaagaaggagaggtccgtggccatttgaccatcatctgaagaaagatggccactgctacgctttgtgccaaaagcttacatgcttttccaagtgaggttgyggtgtggctgcacaggtatgaggagccgcacgttgctcccatgcaatcagcaaagctagcccacacttttcctcctctttcccttgaacatactaaaagctgcccttsaagttgtgctctacttattggtccattccatagccccagtcattggcataaccaaggttaaaaaacaaaataaaaaaaggcaaaataaaacccaatattaatactcttccaaaagagagcatggagatggttggctacagttaggttaggctgggattacactcttagtttatgaccgtcttgccaagaaaa

SEQ ID NO: 16082 - DNA, 600 bp, Chicken  19866894223095_2
cagatgacatcttccaggcacatgaaagaattaaaccagctctcccttctgctcaggaatggtctcggggtcacaccagtgtattttgttacaagaaggagaggtccgtggccatttgaccatcatctgaagaaagatggccactgctacgctttgtgccaaaagcttacatgcttttccaagtgaggttgyggtgtggctgcacaggtatgaggagccgcacgttgctcccatgcaatcagcaaagctagcccacacttttcctcctctttcccttgaacatactaaaagctgcccttsaagttgtgctctacttattggtccattccatagccccagtcattggcataaccaaggttaaaaaacaaaataaaaaaaggcaaaataaaacccaatattaatactcttccaaaagagagcatggagatggttggctacagttaggttaggctgggattacactcttagtttatgaccgtcttgccaagaaaaaaactctatttttttcacatacaggtttgtgatgagaacatctaaacacgtatgaaaaatgctgtttgccacctgacgttttgcttttgctgcccgagaggtttgtta

SEQ ID NO: 16083 - DNA, 599 bp, Chicken  19866894223096_1
  misc_feature (1)..(77): n is any nucleotide
nnnnnnnnnnnnnnnnnnnnnnnnnnnnnnnnnnnnnnnnnnnnnnnnnnnnnnnnnnnnnnnnnnnnnnnnnnnnnctctccccaattttccagagcataaagctacatcactgtacaacttgaagctggccaagctaaaggaaaagaccaatcttcacccggtgcctgtatcatattcttcatttctgggaagagagcccaaccaagacatacagtgtcttcactggtttggacagatttactagctgtagaaaaagccatcttgttttccaaatatgaaaatgagtttcattagttyctctcttctactgtacatgggaaatcaaatattttggttggtaaggagaaaaggttacagactaaattcctttgctatgttttctgcctatgattgaacagctgggaaacagaaaaaaagcttatggatataaaatatacaattctaagaaatgggtgaaatttgccacttagataacatcattatccactgatgcccgcaakacctgttagcaggcataaacagaagataagatgcataagagcctcaaaagattagactctcaagaccagtttcacagctgacactcactgaaacag

SEQ ID NO: 16084 - DNA, 600 bp, Chicken  19866894223096_2
accaagacatacagtgtcttcactggtttggacagatttactagctgtagaaaaagccatcttgttttccaaatatgaaaatgagtttcattagttyctctcttctactgtacatgggaaatcaaatattttggttggtaaggagaaaaggttacagactaaattcctttgctatgttttctgcctatgattgaacagctgggaaacagaaaaaaagcttatggatataaaatatacaattctaagaaatgggtgaaatttgccacttagataacatcattatccactgatgcccgcaakacctgttagcaggcataaacagaagataagatgcataagagcctcaaaagattagactctcaagaccagtttcacagctgacactcactgaaacagataaaattatagaacyaccatatcccaaagctatgattacagattctaagtaatgcttactctcttcactctgaaccaaaatgagttcccaccaagttcacattcaggttgaacactcttttgctttaagttctatatgctttaagttctatactattttgcagagctgcatgaaaaccctgaattgatgagatttaatttatt

SEQ ID NO: 16085 - DNA, 600 bp, Chicken  19866894223096_3
catgggaaatcaaatattttggttggtaaggagaaaaggttacagactaaattcctttgctatgttttctgcctatgattgaacagctgggaaacagaaaaaaagcttatggatataaaatatacaattctaagaaatgggtgaaatttgccacttagataacatcattatccactgatgcccgcaakacctgttagcaggcataaacagaagataagatgcataagagcctcaaaagattagactctcaagaccagtttcacagctgacactcactgaaacagataaaattatagaacyaccatatcccaaagctatgattacagattctaagtaatgcttactctcttcactctgaaccaaaatgagttcccaccaagttcacattcaggttgaacactcttttgctttaagttctatatgctttaagttctatactattttgcagagctgcatgaaaaccctgaattgatgagatttaatttattgctatcaaaaaacgatgttccttaacaatattttgtttctctttgtccctttgcacaccctgaacatgaaaactctgaagtaatttacatggaaagtccgaatttactattt

SEQ ID NO: 16086 - DNA, 599 bp, Chicken  19866894223107_1
  misc_feature (1)..(50): n is any nucleotide
nnnnnnnnnnnnnnnnnnnnnnnnnnnnnnnnnnnnnnnnnnnnnnnnnntaaacaatttaaatgtttatttgaaaaacatgaaccagtacaaatcagcatgggaagactgggcctacttagtaagccagtattgtagattctttttttccttgattttgagatgtcacatagcactgtcacaaatacaaacagaacccttgtgaacaagccaagttttaagtgctaacaatttttatgatcattagggggtcataaaagtataaagtgcttgaaatacaaatctacctttttaaatttygttttgcatatatgtcaaattacttgagcaatacaaatgtttggtagtgatactttccttgcaaggcacactcaaccctaagagacctgaatccaggttgggcagctctgttttggcttgcaggcacacgtaacgtttgtgatactcctttgtccttttctgaaaagtggcatttggagacttcaggacaccctgaatgtcatcagctggctacttaggagagctgttttatctgtaggtgtgaaggcagccagcatcctgtctgagctgcacagaagtgacttcacagaagttaaaac

SEQ ID NO: 16087 - DNA, 600 bp, Chicken  19866894223117_1
agaaaaataaatcctctggggacaattaaaaataataacaacgacaattcataaagtaatctgctcacacgtcctaactaacagcaacacggctcaactccttatttctgataagagcagaaacctaacacacatgttgccaaaaaaaatttcccagaaatctgattgtctttacagcaactccatatccaagtaacaaagcagtactaacgggaatggccaaattcaaggcggcacaaagatacacacacagttctgaagggttttgtttcgttctgagtcttcattcagggtaatacrtttgtgytcgrcacraataacagcttttggggtttttttcctcctcttaagactttcaaaatcccgattcttgatgttgagttgatgtcaatgtggatacaccagggatgcctcacggataaacacaggctgctctgaaagaagctgtggacaactgatgagtaaatttacacaaaagctggaaaatctcactcagcagtcacttttgaggtgcttaacaattaggctctagctgaatctagtgctctttagcagagctatgaaatgcagtttaggtgacaaaggcagttaagacaataa

SEQ ID NO: 16088 - DNA, 600 bp, Chicken  19866894223117_2
taaatcctctggggacaattaaaaataataacaacgacaattcataaagtaatctgctcacacgtcctaactaacagcaacacggctcaactccttatttctgataagagcagaaacctaacacacatgttgccaaaaaaaatttcccagaaatctgattgtctttacagcaactccatatccaagtaacaaagcagtactaacgggaatggccaaattcaaggcggcacaaagatacacacacagttctgaagggttttgtttcgttctgagtcttcattcagggtaatacrtttgtgytcgrcacraataacagcttttggggtttttttcctcctcttaagactttcaaaatcccgattcttgatgttgagttgatgtcaatgtggatacaccagggatgcctcacggataaacacaggctgctctgaaagaagctgtggacaactgatgagtaaatttacacaaaagctggaaaatctcactcagcagtcacttttgaggtgcttaacaattaggctctagctgaatctagtgctctttagcagagctatgaaatgcagtttaggtgacaaaggcagttaagacaataacattttt

SEQ ID NO: 16089 - DNA, 600 bp, Chicken  19866894223117_3
tcctctggggacaattaaaaataataacaacgacaattcataaagtaatctgctcacacgtcctaactaacagcaacacggctcaactccttatttctgataagagcagaaacctaacacacatgttgccaaaaaaaatttcccagaaatctgattgtctttacagcaactccatatccaagtaacaaagcagtactaacgggaatggccaaattcaaggcggcacaaagatacacacacagttctgaagggttttgtttcgttctgagtcttcattcagggtaatacrtttgtgytcgrcacraataacagcttttggggtttttttcctcctcttaagactttcaaaatcccgattcttgatgttgagttgatgtcaatgtggatacaccagggatgcctcacggataaacacaggctgctctgaaagaagctgtggacaactgatgagtaaatttacacaaaagctggaaaatctcactcagcagtcacttttgaggtgcttaacaattaggctctagctgaatctagtgctctttagcagagctatgaaatgcagtttaggtgacaaaggcagttaagacaataacattttttaac

SEQ ID NO: 16090 - DNA, 600 bp, Chicken  19866894223117_4
ctggggacaattaaaaataataacaacgacaattcataaagtaatctgctcacacgtcctaactaacagcaacacggctcaactccttatttctgataagagcagaaacctaacacacatgttgccaaaaaaaatttcccagaaatctgattgtctttacagcaactccatatccaagtaacaaagcagtactaacgggaatggccaaattcaaggcggcacaaagatacacacacagttctgaagggttttgtttcgttctgagtcttcattcagggtaatacrtttgtgytcgrcacraataacagcttttggggtttttttcctcctcttaagactttcaaaatcccgattcttgatgttgagttgatgtcaatgtggatacaccagggatgcctcacggataaacacaggctgctctgaaagaagctgtggacaactgatgagtaaatttacacaaaagctggaaaatctcactcagcagtcacttttgaggtgcttaacaattaggctctagctgaatctagtgctctttagcagagctatgaaatgcagtttaggtgacaaaggcagttaagacaataacattttttaactgct

SEQ ID NO: 16091 - DNA, 599 bp, Chicken  19866894223137_1
  misc_feature (1)..(40): n is any nucleotide
nnnnnnnnnnnnnnnnnnnnnnnnnnnnnnnnnnnnnnnnaaattttgattgatgtcactgcctgcctgtcaagtgaaacaagcagggccaacctaatcatgttagattagtgcatacagacatgatataatatttttgtgttatagatatgcacatagaacgtgcatgcacagaatcactagcatacaagtatatctttcaaataatacgagtacgtatgagaaaacgtgcattaccaccaaactcttaggcaatgcatgtggattttttttttcttttactcatatgtaagtaaacgrtgcatttgcaagagtctgcagtagaccctctgcatattttctggaggctaaattcattagtttattttttacatcactaaactgaactaggtaatttaaagaataaatctgaagtgaaattgatgcagccaccttttctagacaataaacatgcagatttaaataccaagtaatgcagattatcttctgataataagctaaatagattttttgaaagtgaaaatatctgaagacaacaaatcttctgtatgaaggtcatagagaaatcttatcagccagagtgtgcaaaacaagaaaaa

SEQ ID NO: 16092 - DNA, 600 bp, Chicken  19866894223160_1
cgagcttcctggcttactcccattccctgcggtgacgggatgagcgaatcaacagacaaccacaagctatgctggatgcaaggtggtaactatctctctcgctttctacaaagactccttacttctgtttcctatctcctttctatcgcctgtctccctaagtgactaggactggtcggacaaacatttgacacgttgggtcttaatctcaccgtcgggtgtatatataagaaagaacctcctctctccagtaattagcaggagacgcactctaaggtgcatcccttgccaacctgttcrcatatttagtgccttcatggtcaaagctcgtcggaagactggtagccattttttaacaatattctaaagcgttcccactgagatttgattaaaggttcgcattccaaccattcaagggctagagagttcacattatgagcctgaaagtctagtccacaatataaaatcactatttatttattttctataacacgcaagtgtgagttcaaaaacagtgagaaacccaccgagagagcagccaggtcggggctacaatttccaggttacccggcctcccccccccagagggaagcaggcagg

SEQ ID NO: 16093 - DNA, 600 bp, Chicken  19866894223161_1
agagtgggatttttggcagccagtgcagcactgtgaattacattctgggaattgggtgcgtagctctgccccaagctgtgtagctcatcccagtactgaagtcttttagaagaagttttagatcttaatgtcattatatttattaagtttaatgtttccccaccagattaattgaagccagctgcttctctctagtgaggactggtaaatgttttttttttagaggagacaagaatgtttgtctcatcttttggattttcagagaaggaatgtttgcccagaaaatgtacccagtttcgytgttaatgctgagatgttctaaaaagagaagataattctcacctaatctaatctatttagagtatttcaagagagcccattaccggtgtctgagtgacaaatgaaggtctggattgcacctgctaggtatgtgtctggggaaaaggcatgtgcagctcataagggtaaaggcatgcgtgtcctcacgctctcatgcaggagctatcccctctacagatttttctagtgagacatataataattcccagcagacaacaggtcagatttctaaaagaatatcaatagctataggcytgccta

SEQ ID NO: 16094 - DNA, 600 bp, Chicken  19866894223161_2
tttcgytgttaatgctgagatgttctaaaaagagaagataattctcacctaatctaatctatttagagtatttcaagagagcccattaccggtgtctgagtgacaaatgaaggtctggattgcacctgctaggtatgtgtctggggaaaaggcatgtgcagctcataagggtaaaggcatgcgtgtcctcacgctctcatgcaggagctatcccctctacagatttttctagtgagacatataataattcccagcagacaacaggtcagatttctaaaagaatatcaatagctataggcytgcctatatgtgagcaggcaaaatacatgaggatgtaaactgagtagcctgctgtacggtctgcagggtgctggcattggtatgtggaaaattgcatacatatgtgccattatttaactgaatttacttatatagacgtaaaatatagctaacataatgcccataccaaattataggcatttcttgtgagaatgagaagtgccactatacagcagtcaaaattagtggctcctatccagattttgaagatgatagcctttatctctaattggcaactcctgtcatcctcctcaacctggt

SEQ ID NO: 16095 - DNA, 461 bp, Chicken  19866894223161_3
ttggcaactcctgtcatcctcctcaacctggtgcagacatgagcatgatgcacagatttcagcgttagcaatagcagatgatttctttctagaaagaagatggggacaaacaatcatcctgttctgttcctttcagaaagaacatctctctctgttcctgctgcagttgcttgttccttagggccagtcacaccaaacagcatttagcaaacaatttgagatttcacacctaaggcttcatcatctcgcctgtaaccacctctggaccatagcagggaagtctctggcttgtccggcttyctgccccccctcccagccttttacatgagctccactgacaagaaaagtctaagaccaagcctaggagggtgttgtgccataggggaaaggaagatgcagtgtacagtattccctggataccaycaatatcctgtattttctcatcagtagagggaggaagg

SEQ ID NO: 16096 - DNA, 338 bp, Chicken  19866894223161_4
ctgttcctttcagaaagaacatctctctctgttcctgctgcagttgcttgttccttagggccagtcacaccaaacagcatttagcaaacaatttgagatttcacacctaaggcttcatcatctcgcctgtaaccacctctggaccatagcagggaagtctctggcttgtccggcttyctgccccccctcccagccttttacatgagctccactgacaagaaaagtctaagaccaagcctaggagggtgttgtgccataggggaaaggaagatgcagtgtacagtattccctggataccaycaatatcctgtattttctcatcagtagagggaggaagg

SEQ ID NO: 16097 - DNA, 599 bp, Chicken  19866894223162_1
  misc_feature (1)..(52): n is any nucleotide
nnnnnnnnnnnnnnnnnnnnnnnnnnnnnnnnnnnnnnnnnnnnnnnnnnnnatcacactgcaagagacagagatgtctgcatcataggtatggtagacatcccatgccatagagtcaagctagctacgtatgacctgattgactcaacaacttatcttcacttcagaggttctgacgtttcagtgaaggcagctacacaaaagcactctatttcctgttgtaaaggaatggtctttctaagctgaactcaccttgctgtgattcctcggtccatacgaagtgcaaagctttcccatgaygaatgctgatggaagatgcctgaaattgtctcactcttgcctagattgaaagatgatactgcttcccagagagaaattctyggtgaggaatcaagtgatgtaggctttaaaccttatgtttttaacagacctattgaacgttcataaggcaatactcttccatacaggtgaccactactccagaagagcagagagcatttccctaccaaactttccaggaggagatccaaaccaattcactgttttgaggcaaactgctctgaaaatgggataaattgaaagaatttccaaaccttagc

SEQ ID NO: 16098 - DNA, 600 bp, Chicken  19866894223162_2
atcataggtatggtagacatcccatgccatagagtcaagctagctacgtatgacctgattgactcaacaacttatcttcacttcagaggttctgacgtttcagtgaaggcagctacacaaaagcactctatttcctgttgtaaaggaatggtctttctaagctgaactcaccttgctgtgattcctcggtccatacgaagtgcaaagctttcccatgaygaatgctgatggaagatgcctgaaattgtctcactcttgcctagattgaaagatgatactgcttcccagagagaaattctyggtgaggaatcaagtgatgtaggctttaaaccttatgtttttaacagacctattgaacgttcataaggcaatactcttccatacaggtgaccactactccagaagagcagagagcatttccctaccaaactttccaggaggagatccaaaccaattcactgttttgaggcaaactgctctgaaaatgggataaattgaaagaatttccaaaccttagcaacactaagcacaaactagatcactcctagcccaagtcaaggaatgaattacgtgcaagttctgaccagcagccacacttaa

SEQ ID NO: 16099 - DNA, 600 bp, Chicken  19866894223163_1
tgtcagttaccagtgggaggggagggaaaggggtgggagaatctgtgcatgcatatgtatttaaagtgcattgaccaaagtttgttttctttcttgaacctgtgaagttttaatatctgtgaagtcatcagactgctgggcagtgaggagccactggtgctgctgggtctgtcttggttacatttcttaataagcattaaaataataaaatatatttgtaaaagtgagcatgagtgtctttgtccaagggagatctgtctattttgtgaacattttattattcttttattagctttttcyataggctyattcttccggagagctctgtccctggcactacctattaaagatgtcagcatggacaaggtgatggacccagacagactgggagcccctcacaactctgacatcctgggatctgtcatgctggcagtaagcaaaaatgtttacagctgtgtcctgaacacaaggtagagtgctgtattttcccagaacactgcagtgtcaggaacggtgctacatagcagaatctggaagaggtacctggaacacagctatgactggagcatctcagccttctggctctccttccatgcatca

SEQ ID NO: 16100 - DNA, 600 bp, Chicken  19866894223163_2
accagtgggaggggagggaaaggggtgggagaatctgtgcatgcatatgtatttaaagtgcattgaccaaagtttgttttctttcttgaacctgtgaagttttaatatctgtgaagtcatcagactgctgggcagtgaggagccactggtgctgctgggtctgtcttggttacatttcttaataagcattaaaataataaaatatatttgtaaaagtgagcatgagtgtctttgtccaagggagatctgtctattttgtgaacattttattattcttttattagctttttcyataggctyattcttccggagagctctgtccctggcactacctattaaagatgtcagcatggacaaggtgatggacccagacagactgggagcccctcacaactctgacatcctgggatctgtcatgctggcagtaagcaaaaatgtttacagctgtgtcctgaacacaaggtagagtgctgtattttcccagaacactgcagtgtcaggaacggtgctacatagcagaatctggaagaggtacctggaacacagctatgactggagcatctcagccttctggctctccttccatgcatcaggcctcyc

SEQ ID NO: 16101 - DNA, 600 bp, Chicken  19866894223163_3
yattcttccggagagctctgtccctggcactacctattaaagatgtcagcatggacaaggtgatggacccagacagactgggagcccctcacaactctgacatcctgggatctgtcatgctggcagtaagcaaaaatgtttacagctgtgtcctgaacacaaggtagagtgctgtattttcccagaacactgcagtgtcaggaacggtgctacatagcagaatctggaagaggtacctggaacacagctatgactggagcatctcagccttctggctctccttccatgcatcaggcctcyctgtaacatcactgcttcagccctctgtctgccagtgctgcttagactgggcttgccccagcgtgatgtcagccaaagtagtctggaaatggaagcagtgaatctaratactactggtgcttctcaggccaattctaagcaacgttgacagaatgcagcaggaataatttccagcttttcacagctggcagctcctagatgagtatgggggggctagtgaaagtctgtacgatccaggagcatttggaattgggaagtgttgaaatggaagttcaccagataaccatcagctaatgccca

SEQ ID NO: 16102 - DNA, 600 bp, Chicken  19866894223163_4
ggatctgtcatgctggcagtaagcaaaaatgtttacagctgtgtcctgaacacaaggtagagtgctgtattttcccagaacactgcagtgtcaggaacggtgctacatagcagaatctggaagaggtacctggaacacagctatgactggagcatctcagccttctggctctccttccatgcatcaggcctcyctgtaacatcactgcttcagccctctgtctgccagtgctgcttagactgggcttgccccagcgtgatgtcagccaaagtagtctggaaatggaagcagtgaatctaratactactggtgcttctcaggccaattctaagcaacgttgacagaatgcagcaggaataatttccagcttttcacagctggcagctcctagatgagtatgggggggctagtgaaagtctgtacgatccaggagcatttggaattgggaagtgttgaaatggaagttcaccagataaccatcagctaatgcccattccctcttcccgttcactttgcagctggtctggaggccccagtggaggccctgctgtcgtggagaggtgccggcaccctggtgctgtgtggccagctgtgcccgag

SEQ ID NO: 16103 - DNA, 600 bp, Chicken  19866894223163_5
tcatctggaaatctaacttcggagatctacaccttggcatggtcacccagagaaactgaactgcagagctgctgccgtagactgagctgagagacaacttagctcgtcagtgcaatatttactgcactactgggaactgatgacattattgagtgttgaaataggatggagcagtggaggatggtgttttccctgcaaacaggtggatggtatgctttgtctaaaaggtgttttacagctttaaagcagcaggatcttctttgtcgcttgaacaggaagcctttgctgctaagaatagcrcatacaagcgcctgctgtgctcacacctactatgtatttcaaggagaaatttgggggggttaaaagctctgagcatcttttctggggccctatggacctcaccatttactttcactggaaagattccccactgtcttgcatttggctgaagtgaacaagtgagattcccaatgtgtgacttctgccagctcggatcctgggaagagtccacctctgatccctgaagttagatgatgcaactcactgcacattggggtctcactgaatataagtggagtgtgttattcttcctgactttcc

SEQ ID NO: 16104 - DNA, 527 bp, Chicken  19866894223167_1
agataatcaaattttcacgtgtaaaattaccatgattaaatagccagatactcctgataagcctgtctactcttaaaatacacactgtggaagaactaatggcactgagaagcatctttaacctcatcaggatgagaaacgtgcaagttactcaacagggaatgattcactaaagcaaaacctgaacaagaaatgttagctgatgcaaccttaccttacctcaccgcctctgctatcaccaacagtttgctatgggcagcatgagcaatgagtgcctgctgcactttgtgacactattcrgaagattatcagacaaataagaaagtctgaaatatatccctgttttgaaagcacacttactacccagactcctgcttcctcagccccttcaggatgagttccgcagcttttgtctcagaccaaagatggtgactgggctgcgggcacccacacgtcagaatagcagacgtgcgggctgttctaattcatcctgacagtgatatttctagcgtccaaactcctcagaa

SEQ ID NO: 16105 - DNA, 600 bp, Chicken  19866894223171_1
catactccaagactgtcctgcagattaacccaaaatatgatcagaggtggtgatgagacgatttgaagagtaagtgttcttctgatctattctgaaatacaaatgtagccacacctttattttttgtagattccacaggaaaaaaaatgatgatagaaatattctaaacccacctggatgcctacctgtgcaacctggtctagggagtctgcattggcagcgggttgcactaaatgatctctagaggtcccatccatcccctacaattctgtgattctgtgattcttctgatgacacagsttctttttgtattaacattggtgagccctccatttgcttttccattatctgaagctttgagggtgtaacaactactgtgctgtgttcagatgagcaaagggcatcttgtaatctggcatatcctggggatatgctcacaaggtactgatgacgataaacacgttttgccacaaattagagcctgtttcttatcaactctgccaatctctgccaaaatgccaggtagtgaacaatgaaaaccaggtgctatattgaacactttagtcattttagacatggaacagtgaagaggacaacata

SEQ ID NO: 16106 - DNA, 599 bp, Chicken  19866894223172_1
  misc_feature (1)..(45): n is any nucleotide
nnnnnnnnnnnnnnnnnnnnnnnnnnnnnnnnnnnnnnnnnnnnnttgaatggcagacagcagatagctgtcaatgtctatgtagacaggaaaatagccacactctggtctaaatgtactcaggtgcacgccacagtgcaaaagttaagtatttcataatagcagacttaaggggagaaaacatcttctgttttctgtttcatgtaacggttacatcagcagaaagaagagaaagtccatgactggaacacttcattgatctatctcaagggaaaaacaaacaaaacaaaaaaatccatycccaatcataaactattgaacatcttttcagagaaggaaaacttacgcgctgttcacattttctcaaggacagaatgtatttctcwtatcagctactctatcagagcttctttactagtaaatgctgtctgaaaactacatcgtagtcctgtgcttaaagcattctttcaggatactgccttaaatcctagcgcagccactctaaaaagcaagtaggcactgcatgcagctccaacaacgcatgagcacttttgataatgtgtgattatagttttaaaatatttatccaaacaataaat

SEQ ID NO: 16107 - DNA, 600 bp, Chicken  19866894223172_2
caggaaaatagccacactctggtctaaatgtactcaggtgcacgccacagtgcaaaagttaagtatttcataatagcagacttaaggggagaaaacatcttctgttttctgtttcatgtaacggttacatcagcagaaagaagagaaagtccatgactggaacacttcattgatctatctcaagggaaaaacaaacaaaacaaaaaaatccatycccaatcataaactattgaacatcttttcagagaaggaaaacttacgcgctgttcacattttctcaaggacagaatgtatttctcwtatcagctactctatcagagcttctttactagtaaatgctgtctgaaaactacatcgtagtcctgtgcttaaagcattctttcaggatactgccttaaatcctagcgcagccactctaaaaagcaagtaggcactgcatgcagctccaacaacgcatgagcacttttgataatgtgtgattatagttttaaaatatttatccaaacaataaatattcaatgttgaaataaagcacagacttataaaaaaaacttcttggagttgtacaggtaggaattgccaaccatgaaaactgaattc

SEQ ID NO: 16108 - DNA, 600 bp, Chicken  19866894223172_3
gaagcccaaaaatctccttaaaaaccaaactctgtaaaagccaaagggaggagaaagagaaaggaaaactgacagtgcagcagagaagctggaagctttttacactcactcttcaagtctgacaataacctgctctgacatctcaacaacgtgatgtttccagcaggcttcttctcctcccagtccagcaaatgaaaacatcctaagtaatttcctacatgtactatatgcacattctgtacagtatgcagaaaatggtaaaagcaaactgctaagctaccatacctacaaacaagtttyatccaacacaatttttgcacrctgatttaagcaaaagtgtttttctcctattaaagaagaaaaaaaatagtaaagatgtacttgccttcagataccaatatttgattcacaaaaatgacctgtgaaccatgaggctacacgttgtggcggtagtttaaagtggcaaatttctgtcaccaaatcttcttttgttctctactgtttccaggtcaaatgcagtctagctgaggagtaaattccagaggcatgcctaagaatggtttatgaaatagcaccaagactcccagcgcctcgctggca

SEQ ID NO: 16109 - DNA, 600 bp, Chicken  19866894223172_4
aaaccaaactctgtaaaagccaaagggaggagaaagagaaaggaaaactgacagtgcagcagagaagctggaagctttttacactcactcttcaagtctgacaataacctgctctgacatctcaacaacgtgatgtttccagcaggcttcttctcctcccagtccagcaaatgaaaacatcctaagtaatttcctacatgtactatatgcacattctgtacagtatgcagaaaatggtaaaagcaaactgctaagctaccatacctacaaacaagtttyatccaacacaatttttgcacrctgatttaagcaaaagtgtttttctcctattaaagaagaaaaaaaatagtaaagatgtacttgccttcagataccaatatttgattcacaaaaatgacctgtgaaccatgaggctacacgttgtggcggtagtttaaagtggcaaatttctgtcaccaaatcttcttttgttctctactgtttccaggtcaaatgcagtctagctgaggagtaaattccagaggcatgcctaagaatggtttatgaaatagcaccaagactcccagcgcctcgctggcaactgcacttgcctccacctcg

SEQ ID NO: 16110 - DNA, 600 bp, Chicken  19866894223173_1
cctgaagccatgtttctaccaggacttcgaggctgagatcccgccgcagcaccgcaccatggccaagcggctctactacctctggatgcgtgagtcggggttggccgtgtgttcagcaccagccaaacaggggtggtgtgcctcgtccccctccagacctttgtgcccaaacccactggggatggggttgggctgcggcaacccccggatctcgtagaattgcagaatcacagaatttggtttggaagggatcttaaagatcatccagttccaacccgtttgcgatgagcagggttgccraccgctaaatcgggcactggaacagctttggtggaggatttgccaccagcgaaggctctctgagtgtctttgacatcaaggggctttcctcatggacctgagctcctcacagcccctttgttggttcccaaacgccccacgtccaagctggtcacatgggctggatccctcctggagttttgcctgttctttgcatgcttctgcgtgccgtgctccatgctgagagccactgctcttctctaaccccttcagctgccctgatctctctaacatcctccgcatgcctcctgtcacttttcc

SEQ ID NO: 16111 - DNA, 599 bp, Chicken  19866894223176_1
  misc_feature (1)..(146): n is any nucleotide
nnnnnnnnnnnnnnnnnnnnnnnnnnnnnnnnnnnnnnnnnnnnnnnnnnnnnnnnnnnnnnnnnnnnnnnnnnnnnnnnnnnnnnnnnnnnnnnnnnnnnnnnnnnnnnnnnnnnnnnnnnnnnnnnnnnnnnnnnnnnnnnnnncatagcggcaataccatgagctgcactgttctaccttcccatgaaagaaaaagaacaacaagatattgggtaaactcttaaattttctctttagttggctgtctatgtagaagcgcagcatcatctctgccacaaacaagacgtatgaccaagragaagaaaactcactccacatttaacttcagttagtgcttaataagcatttttgggactgagctctcagtaggcatagcatgacactttcaaatcagcatgatacagggcatttgggagtattttgagagcatataaaatagaaagttgcttgatcaggcaatgaaaaaattatgcaaaccacrtgaagtgcaattccgaatttgttactgtcttcatgcacacatagcacttattttcacttttttttttaaactactgaaaatgctgccaatgaaartgcactatgcaatgccaaat

SEQ ID NO: 16112 - DNA, 600 bp, Chicken  19866894223176_2
ccatgaaagaaaaagaacaacaagatattgggtaaactcttaaattttctctttagttggctgtctatgtagaagcgcagcatcatctctgccacaaacaagacgtatgaccaagragaagaaaactcactccacatttaacttcagttagtgcttaataagcatttttgggactgagctctcagtaggcatagcatgacactttcaaatcagcatgatacagggcatttgggagtattttgagagcatataaaatagaaagttgcttgatcaggcaatgaaaaaattatgcaaaccacrtgaagtgcaattccgaatttgttactgtcttcatgcacacatagcacttattttcacttttttttttaaactactgaaaatgctgccaatgaaartgcactatgcaatgccaaattcttgaaaatatatggctagacaaatctaaacagatttgacacttaatttyaagaagagagtctggattcagggacttgtctatccagtggttaattagcctcatctcagtctacctaaaacttcagttttttccttttccacactagaaagatttctgcttttgatttatataatctgaataga

SEQ ID NO: 16113 - DNA, 600 bp, Chicken  19866894223176_3
aaacaagacgtatgaccaagragaagaaaactcactccacatttaacttcagttagtgcttaataagcatttttgggactgagctctcagtaggcatagcatgacactttcaaatcagcatgatacagggcatttgggagtattttgagagcatataaaatagaaagttgcttgatcaggcaatgaaaaaattatgcaaaccacrtgaagtgcaattccgaatttgttactgtcttcatgcacacatagcacttattttcacttttttttttaaactactgaaaatgctgccaatgaaartgcactatgcaatgccaaattcttgaaaatatatggctagacaaatctaaacagatttgacacttaatttyaagaagagagtctggattcagggacttgtctatccagtggttaattagcctcatctcagtctacctaaaacttcagttttttccttttccacactagaaagatttctgcttttgatttatataatctgaatagacttaaaattctgcttgcagacatcaggtaataaaaactcccttagaggaaaaaatgccttctgatagaataagcaaaacctcctttagctctgta

SEQ ID NO: 16114 - DNA, 600 bp, Chicken  19866894223176_4
tttgggactgagctctcagtaggcatagcatgacactttcaaatcagcatgatacagggcatttgggagtattttgagagcatataaaatagaaagttgcttgatcaggcaatgaaaaaattatgcaaaccacrtgaagtgcaattccgaatttgttactgtcttcatgcacacatagcacttattttcacttttttttttaaactactgaaaatgctgccaatgaaartgcactatgcaatgccaaattcttgaaaatatatggctagacaaatctaaacagatttgacacttaatttyaagaagagagtctggattcagggacttgtctatccagtggttaattagcctcatctcagtctacctaaaacttcagttttttccttttccacactagaaagatttctgcttttgatttatataatctgaatagacttaaaattctgcttgcagacatcaggtaataaaaactcccttagaggaaaaaatgccttctgatagaataagcaaaacctcctttagctctgtaggtagctctagtatgttccgatagaaaaattaatggctgcagtttttgcaaagacatatttgtcaggagaa

SEQ ID NO: 16115 - DNA, 600 bp, Chicken  19866894223176_5
tagctctagtatgttccgatagaaaaattaatggctgcagtttttgcaaagacatatttgtcaggagaaataatggttctttattgatatttacttcctttgtaactttctttatgacttgcacaattcaaatttttttgtgcaagctgtggatgtattgttggaatgcactggtactaaacctttatttattttgaatttccttttacatttagtaagctgtcaggagggaatcataaggctttcctgctgcaagagtagtaaactaaaagactaaataaaattctttatagacacagmcatctacaaatataaatctgagcagcatttggcctcttttaaaatgaagattttgagtgccattaagatctcaatactggaatgttaaagcaaaagatgggctaaagcttgaatttattttcacctatattgtgaggataacagtgagactcaaccctaaattatttctctgggaactgtttatactaagctgctgaactgttatataygaaacaggcccttgtaaatctcatttgcatggaggcatgaacatattggtttgatttccaaccaagatatctaacttgattaagaggaatt

SEQ ID NO: 16116 - DNA, 600 bp, Chicken  19866894223176_6
atttagtaagctgtcaggagggaatcataaggctttcctgctgcaagagtagtaaactaaaagactaaataaaattctttatagacacagmcatctacaaatataaatctgagcagcatttggcctcttttaaaatgaagattttgagtgccattaagatctcaatactggaatgttaaagcaaaagatgggctaaagcttgaatttattttcacctatattgtgaggataacagtgagactcaaccctaaattatttctctgggaactgtttatactaagctgctgaactgttatataygaaacaggcccttgtaaatctcatttgcatggaggcatgaacatattggtttgatttccaaccaagatatctaacttgattaagaggaattttaccttgcggtaacttccagtacatattaaagaccaacatacagcaacaacctacgagaaaacattgattgcaacaaggaatagcatttgccacagaaaaatcactaaacctcgcagccagtgcaaaacaagacaaacgtcagccacactgctagctgaatgcgttaacagaaataaaagagaaaacataacagatgatcattttatg

SEQ ID NO: 16117 - DNA, 525 bp, Chicken  19866894223177_1
agatttgaattgcatctacagagccacctcatacttcagggcttaggagaacaacacctggagcccagaggaacacctaacagcacagggtggttatctgctattcacttctgatcattttgcagcttctccagcacacatctgtcctgttgctaaagagctgctaccaaacacgtgactggtagttccgccaaatcctgccttcatacatcactccatatttctggaagcttaatggtcaaactcaagttaaaagcacttttgaaagccccagctttcaaaaccatttctctctgcatyccagctccattttacaaatgctcaggaagtgctctgaatctgggcactggaaggggcaagccagagcagcccacggattgcccaccattcactggtggagtgcagcagcatgacgtatggcacctctgtcccagtaacctcaaacccttgctggtttcactgggcactgagaggagagcttctgctggagccgcaatgcaacctgtgggtgtgcaacacgatctg

SEQ ID NO: 16118 - DNA, 600 bp, Chicken  19866894223189_1
tccaaattctaatgtcatagaatcataatagaatcatagaacagcttaggttggagaaggtcttaaagatcacccagtttcaacccccttgctgcctcaccaccagctcaagctgcccagggccccattcaacttggccatgaatgccttcagagaaggggcatccacagctctttgggcaatattgccagtgcctcatcactctgagtgaaaaatttctacctaatgtctaacctaaatctccactcttttagtttaaagcctttctctcttgtgccaccactatcaaccatgtaaaaygtcagtctctctccagcttgtaagctcccttcaatactggaaggctgcaatgaggtcttccttctcttctccaagctatccagacccaagtccctcaacctttctacataggagaggttctccagcccttaggtcatctggatcctctgttcatgttactaggcatcctcagaaatgtattgaaatttcattagaactataaataacatatgcatatggatattacattcaaaatatgtagatcgttgtaattagcaattagctggggaacatcaaagtaccaaacgcattaagaataaa

SEQ ID NO: 16119 - DNA, 600 bp, Chicken  19866894223192_1
atctttcccggatccagtctctaggtcagatattatgcaccgtgaagtccaggggtagggtttgtgctagccagcctcctgccaaagaggtttgactagaggcagtatcttgcccacattccctccgcctagttggaggatacttgggtaaggcattctgaatagcagctcaaaggaggatatgtcttcctatgtctctgctggttttgccctcatttgggccagggctaaaggtagcagtctggcccaagggaagcaagtttccatcaccagtttcagaaaacgtttctttattttccygttctttcctaccacccttcctgaactttgggggtaccagaggatgttcaagtccaattgtatccctaatgcagttatgattcctctcaacacgttcccactgaattgagttcctctatctaaatttattgtctctattatcccatacctgggaatgatttgttccaggaatatgtttatgacagagccagaagttgcacgaagctaggggaaatgcttccagccatccattaagctagcctgttatcactaggaggcatttaagttgcccagcccttggcaactcagtaaaagctacct

SEQ ID NO: 16120 - DNA, 600 bp, Chicken  19866894223194_1
ctttgaataaatacagctagtatttttaaaaaagatgaagtcacttgaacaattttaatgatacttgggaggccagctcctgagtttctctgaaaaccctgtcctgtccaaagaggaatttctttcctctgtgtacctgctcattatgtgcctgcttgcttaaaatcaccatgccgggctaacagggacatggggaaagccttaaattgtgggaatggtcaacatggttagattgccttaactctgatttctgtgcgtgagtgtgctgagcatgcttgggaatgtaaaagaagaacgagraggcaacagcaagagcgtctgtgttaagcatttctccaaaatgtcctgtgaatccttggtactactggctctctctagttgcacaacttgacccactgaacatgtcasaacctgcaggctcagagagctttttgcaggtggtggctgaggcgaggagaaaaacaagacagcctttgataggtgtatgaaatggtgtgtgtggaactgcccccataaatccctgtgctgccatggtgatttattgtatgtgcgaacctcagaacatggaaatggagctggtgctgtgcttgctaatagctg

SEQ ID NO: 16121 - DNA, 600 bp, Chicken  19866894223194_2
caaagaggaatttctttcctctgtgtacctgctcattatgtgcctgcttgcttaaaatcaccatgccgggctaacagggacatggggaaagccttaaattgtgggaatggtcaacatggttagattgccttaactctgatttctgtgcgtgagtgtgctgagcatgcttgggaatgtaaaagaagaacgagraggcaacagcaagagcgtctgtgttaagcatttctccaaaatgtcctgtgaatccttggtactactggctctctctagttgcacaacttgacccactgaacatgtcasaacctgcaggctcagagagctttttgcaggtggtggctgaggcgaggagaaaaacaagacagcctttgataggtgtatgaaatggtgtgtgtggaactgcccccataaatccctgtgctgccatggtgatttattgtatgtgcgaacctcagaacatggaaatggagctggtgctgtgcttgctaatagctggacctgaaatgaattaatgcaatgtcataattcactgaaggagctctgctcatgtcacagaacctgagagcacagtatgagtgttttatcactctggcagtgagcaga

SEQ ID NO: 16122 - DNA, 599 bp, Chicken  19866894223199_1
  misc_feature (1)..(7): n is any nucleotide
nnnnnnnccagaaagcatcacaacatttcaactgtgttgctgcccagcaactaattgtaatgtaagcaatttattctagaagatacacaggaaaaaacaaaaaaaacagttctttaaaactactgaatctcagtgcttgactcaaaagctgtttccaatgtaagaattcgagaagaaccatactaggttatacagttcatctgccttcccctcaacagcagtcatttgtcagtgctcacagggagcattaacagaatagtatagtaacatcttccctgatacaccctgctgtttctgtgrcttaagraaattaaaaggatgaatttacatctttgtttttgaattatttctctactaatgttttcagaagctagacaattgttttcaaaggggatgttgctatgcttttatcagtaggattgagtccctttgtcccagaagagatttcttccatgttgtagtctttttttcctcttaaatcatacaaataaattggactctggacagtatcatactccaatgatgcagccttttctatcacactcctttgagtcttagggctttgtaaactttctgaagcatatagagttgttttaaca

SEQ ID NO: 16123 - DNA, 600 bp, Chicken  19866894223199_2
ccagaaagcatcacaacatttcaactgtgttgctgcccagcaactaattgtaatgtaagcaatttattctagaagatacacaggaaaaaacaaaaaaaacagttctttaaaactactgaatctcagtgcttgactcaaaagctgtttccaatgtaagaattcgagaagaaccatactaggttatacagttcatctgccttcccctcaacagcagtcatttgtcagtgctcacagggagcattaacagaatagtatagtaacatcttccctgatacaccctgctgtttctgtgrcttaagraaattaaaaggatgaatttacatctttgtttttgaattatttctctactaatgttttcagaagctagacaattgttttcaaaggggatgttgctatgcttttatcagtaggattgagtccctttgtcccagaagagatttcttccatgttgtagtctttttttcctcttaaatcatacaaataaattggactctggacagtatcatactccaatgatgcagccttttctatcacactcctttgagtcttagggctttgtaaactttctgaagcatatagagttgttttaacagtagcatt

SEQ ID NO: 16124 - DNA, 600 bp, Chicken  19866894223200_1
tcccaaagatgactcttttttttctttgagaggaaagtacttccctcaaataacttcaaaactttaggattataaaagttcccctcaccctttgtgcctaaagagaagaaatgcttttcaaacctgaaaacaactgtccaggtcttctccttaggctgggagaactacaagctggatttggctgtgaagcattgggtctgctttcagcaaagggaccacaggaacagtgctgctttggaaaatattacaactgatactggcaaatccaaaagctcaaattaataattcagtccctaaacmaatatttcaaaatgagtattttttgacaagtttgtatttacagcttatccttaaggtctgtatcacgtcgcaggagttctgacggataatttcaggacctgcgactcacagcaaaatggcacatcttacaggaatgacgacggaaggcctgaccttctgtcaccgcagccaatgagcaggaaagggtctcaaatcatgtggatagcagcagtcagctgtcacatccctgctgatcacagccatgctgcaaagagattatctacgcctatggctagactgcagtctgatatacacatttgt

SEQ ID NO: 16125 - DNA, 599 bp, Chicken  19866894223204_1
  misc_feature (1)..(1): n is any nucleotide
nctgtggaaaaaggggaatggctcttcagtcttctttctttgtttttataaaaaggtttcaagatgattttctggatttgtttgaataacaaacgtttaagccaggagtggaagcagcaccttttttctttccctgaagcaccaaaccgtgccaggagggcttgcgttttctcctgccccactgtcacctgctgggtgccagttattgctggacccaggtgaccacccatgtgtggatttggtggcctccgtccaccttcaccaagcccccaagcagggatccactcagcatgagaacayagacacaatctgaggacccattagcctcagcccaaaygatgaacagatacagaccagtaacaagcagtggggagagccttagccaagccctatgcacaagggcaaattactcccacaacgaataaaagcctttacttagtatttagctctgtagcaagaagcctcttcggcctgctcctaaaagagatgttacagttaatttagtgtaaaattatcacctgctgtacaataaaacaacaaactgcagtcaaataatctcttaataaatgaaaatgtgtaataaactgtgtcagcaccac

SEQ ID NO: 16126 - DNA, 600 bp, Chicken  19866894223204_2
ctttgtttttataaaaaggtttcaagatgattttctggatttgtttgaataacaaacgtttaagccaggagtggaagcagcaccttttttctttccctgaagcaccaaaccgtgccaggagggcttgcgttttctcctgccccactgtcacctgctgggtgccagttattgctggacccaggtgaccacccatgtgtggatttggtggcctccgtccaccttcaccaagcccccaagcagggatccactcagcatgagaacayagacacaatctgaggacccattagcctcagcccaaaygatgaacagatacagaccagtaacaagcagtggggagagccttagccaagccctatgcacaagggcaaattactcccacaacgaataaaagcctttacttagtatttagctctgtagcaagaagcctcttcggcctgctcctaaaagagatgttacagttaatttagtgtaaaattatcacctgctgtacaataaaacaacaaactgcagtcaaataatctcttaataaatgaaaatgtgtaataaactgtgtcagcaccacagagagttggcaaggctggataccctaaaggtaccaat

SEQ ID NO: 16127 - DNA, 486 bp, Chicken  19866894223205_1
actgcagccacagagacaaggatgaaataggtaggctcctttattcatctttcaggaacatatcctgagataatgaatgtattaatacctaagttacagcttggtgctgggtggaatttggaccttgaagacttccctccatccttgcttggctttgagtcggagtcttgcctctgtcattcaattgcattacctgtgatgggcacaaacctgtggctgatgagcagctgttcttcgctgacaattagctaagaatctgttatggtaatccagctggctatttctagactttcctcaaawgattctttaaacacagctgccttacagtcatggtaaacattcttcacaaaggccagtttgctctgcaggcccaaaggaatgtgacagcttgatatctggataagcctgggctcggtttctctttctgcagaaagctggagtctctggtgggtgttggtaaacaagccctggagccattactcagta

SEQ ID NO: 16128 - DNA, 600 bp, Chicken  19866894223206_1
tcgggcggtgctctcacagcctttcctctctccttaggtgtctaattgccgacctcccagccccccagatcgcagcacagtgctagcctccctgagaagctggtaatgaaaacccatctctctccagccttctcctcctccttcatctggcttctccgggcagatcattagggagccgataaaaataggttttcttattgatttatctcctttccccatgccctcgcccctgagcagctgactggtttccttagcaagtctgctaatccccaggcacacctgcagcccaattcccatcckgggtggagaagggtccctgaggccacagtgtccccaaacaatgtccccgcaaccatcaytgtgcaggcagatgtgcaatggtgatggagatgccaaacttgcccatcttccccacccaggagatgttgctcacgaggagagcacgaagatggatttgcaatgctggtggcacagcgatgcgacctcaccaagtggttggacctcaccaagtggatggatgaacccatccccaggtccrggtgaggtgtcggagctgcagggagccctcctcacccccttgctccgcaggagcctggtgct

SEQ ID NO: 16129 - DNA, 600 bp, Chicken  19866894223206_2
gccccccagatcgcagcacagtgctagcctccctgagaagctggtaatgaaaacccatctctctccagccttctcctcctccttcatctggcttctccgggcagatcattagggagccgataaaaataggttttcttattgatttatctcctttccccatgccctcgcccctgagcagctgactggtttccttagcaagtctgctaatccccaggcacacctgcagcccaattcccatcckgggtggagaagggtccctgaggccacagtgtccccaaacaatgtccccgcaaccatcaytgtgcaggcagatgtgcaatggtgatggagatgccaaacttgcccatcttccccacccaggagatgttgctcacgaggagagcacgaagatggatttgcaatgctggtggcacagcgatgcgacctcaccaagtggttggacctcaccaagtggatggatgaacccatccccaggtccrggtgaggtgtcggagctgcagggagccctcctcacccccttgctccgcaggagcctggtgctcacacctcctcccactttcaggcaggaaggtgtggaaggaacagaagaaaaagatggaa

SEQ ID NO: 16130 - DNA, 450 bp, Chicken  19866894223206_3
tgactggtttccttagcaagtctgctaatccccaggcacacctgcagcccaattcccatcckgggtggagaagggtccctgaggccacagtgtccccaaacaatgtccccgcaaccatcaytgtgcaggcagatgtgcaatggtgatggagatgccaaacttgcccatcttccccacccaggagatgttgctcacgaggagagcacgaagatggatttgcaatgctggtggcacagcgatgcgacctcaccaagtggttggacctcaccaagtggatggatgaacccatccccaggtccrggtgaggtgtcggagctgcagggagccctcctcacccccttgctccgcaggagcctggtgctcacacctcctcccactttcaggcaggaaggtgtggaaggaacagaagaaaaagatggaagccacctgggcatctccaaagggcaggag

SEQ ID NO: 16131 - DNA, 600 bp, Chicken  19866894223220_1
tcccaataataatttttgattaaaaaaaacaaaacaaagaaacaaacaaaaaaccaaaacaaaaaacaaggtgagtaatgctgtgacccattctgaataagggaagatgtttaatgatgacattcctgaaagatttcagctaagcgttggatggaacttcagcagatataagtgtgaatctgatcttgaatgtaatcggtgactttgagtcgagctaccatttttagtacatttacagaagagaggagttaatggacagccattgtatctccaggtttttgccagcaaccacaactactytttctagttcagaaaacatcattgcaagtcacgtttaaacatgtgtattgggcctatgtggcaaggttttgatagctggagcctgcaggggtagcctttgtgagcagagcccgacgctgccccatgtcagatcagagcagctccagctgctccaacgtggctccactgaggccagagctgagccctgagcaatgctgggagagcagatttatggaagggaaaaactgctgcacaacagcagctggaagagaggtgtgagggatgggagagaaacacctgtgtgagtcacatcacacttay

SEQ ID NO: 16132 - DNA, 600 bp, Chicken  19866894223220_2
tttctagttcagaaaacatcattgcaagtcacgtttaaacatgtgtattgggcctatgtggcaaggttttgatagctggagcctgcaggggtagcctttgtgagcagagcccgacgctgccccatgtcagatcagagcagctccagctgctccaacgtggctccactgaggccagagctgagccctgagcaatgctgggagagcagatttatggaagggaaaaactgctgcacaacagcagctggaagagaggtgtgagggatgggagagaaacacctgtgtgagtcacatcacacttaygcacttgtaccctctgctataagcaacacggacagaagtgcaggaatggctcctccattgacacactcaaatgctccacattaacagcacctcattccatttctttgcccccgagattctcagaaaattctcygttcggttttatttcatcagtataaaaaacaaagagaggaaaacaaagtcgatttttgttccacaacctttcagatgawgaagaagaagaaaaaagataatttaaataaccaagctatggcttgttgttcaaaacgatgccaaacatataaaatatgtaattactca

SEQ ID NO: 16133 - DNA, 600 bp, Chicken  19866894223220_3
agagcagctccagctgctccaacgtggctccactgaggccagagctgagccctgagcaatgctgggagagcagatttatggaagggaaaaactgctgcacaacagcagctggaagagaggtgtgagggatgggagagaaacacctgtgtgagtcacatcacacttaygcacttgtaccctctgctataagcaacacggacagaagtgcaggaatggctcctccattgacacactcaaatgctccacattaacagcacctcattccatttctttgcccccgagattctcagaaaattctcygttcggttttatttcatcagtataaaaaacaaagagaggaaaacaaagtcgatttttgttccacaacctttcagatgawgaagaagaagaaaaaagataatttaaataaccaagctatggcttgttgttcaaaacgatgccaaacatataaaatatgtaattactcaactgtttttcttaacttcattaaaatgaaaggaaataaaatgcttgcttcattgtttctttctgattcactgcctacaaacctgtagtgcttgaagaggatgtcaaaacaagagcttaatgggaacttttcaa

SEQ ID NO: 16134 - DNA, 600 bp, Chicken  19866894223220_4
ggaagggaaaaactgctgcacaacagcagctggaagagaggtgtgagggatgggagagaaacacctgtgtgagtcacatcacacttaygcacttgtaccctctgctataagcaacacggacagaagtgcaggaatggctcctccattgacacactcaaatgctccacattaacagcacctcattccatttctttgcccccgagattctcagaaaattctcygttcggttttatttcatcagtataaaaaacaaagagaggaaaacaaagtcgatttttgttccacaacctttcagatgawgaagaagaagaaaaaagataatttaaataaccaagctatggcttgttgttcaaaacgatgccaaacatataaaatatgtaattactcaactgtttttcttaacttcattaaaatgaaaggaaataaaatgcttgcttcattgtttctttctgattcactgcctacaaacctgtagtgcttgaagaggatgtcaaaacaagagcttaatgggaacttttcaattaaatgtttttcaccagaaaatgcagttccattgaaacaaaaacgtttcaaggaaatctataactgtagttgaaactt

SEQ ID NO: 16135 - DNA, 599 bp, Chicken  19866894223227_1
  misc_feature (1)..(117): n is any nucleotide
nnnnnnnnnnnnnnnnnnnnnnnnnnnnnnnnnnnnnnnnnnnnnnnnnnnnnnnnnnnnnnnnnnnnnnnnnnnnnnnnnnnnnnnnnnnnnnnnnnnnnnnnnnnnnnnnnnnnnagtcatgtagtgctgttcctggtcattacctgcaaaagaaatacatgataacgattataaatacattaacttaaaagtgttaactaggcaaagcaagatttggggtttgtttggttttttgttttgttttgttttaaacaagcatttccagatatttatttttttaaatacagaaaacaatgyccattgcagacaaaaccaaaggaaaacaaagaaatctccaccatcctagattttaaataacatcataaaacaatgcatttacacctaaaatggcatctgttactatattcagtgcctgtatgtgctttatatattacagaatgacctaggaataacattattttagaacagacagatctatacagtaccaaaacaggcacatatttatctctgtcctaaggccaaaaatagctaatcttgctggtcactggtgccaaagttacttaaggagaagtgtaatgtaacgatttttgtgccag

SEQ ID NO: 16136 - DNA, 600 bp, Chicken  19866894223234_1
tggtttctctaggtgctcgtgtcgaagagaagtggcgattgtggcatcctgctgaagcctaagggatgtaaaagcacttgctcctctcaggggaggatcagtgatctcaagtcgctccacgggtagtctggtgcagaggtggggaacagaggctgctcgcaccacagctggacagggcaggtcaggctgtgaggctccctgtgctggtgtcatggcttttgcagcacatctcatgcttcccacatagtagactgggctgaggacccctttgctgtccttcctgagcagaggtaacctccrcatacggtccaacaggcttagcattgatgaagtgctggagaagcccccaagctgcgctgcagatctgagcgtccccactgcactgcagctgacccccagagggcacaggcctgcatgctggggccgtgatggaggtggtggtagtcttagcactgggtctgacagcagagctgggcagggcagataaaagctgcagttgcctgcgggaagtcacgtgtcaggcacgggagcggctgctttcccctagtgctgcttttggggactttcagtgccccctccacgttactgggacccacgagg

SEQ ID NO: 16137 - DNA, 600 bp, Chicken  19866894223244_1
cctgtcgccctcaaagtaaaaaagttttgttttctacttttccctccattttcattagtagtgtccattcgctttgtgtaaattattcagaaatacatgggggaatacttgcatttatttttttcaaattgctcataaagtgtgacaagcaatcttaatctgggaatcattcatgaactttcaactagctctatgtttaagagcaacacaaaaatcccaaaaccctcatatgccctcagcctgtctttcttatcacagtctaggacagatgaaaagagtatttgcagttatgttttcaakatattatttcactacaaaaataattctgaagttgctgtgtgggaagggtgaaatatcccattttatgagcttaccaaaggattttgtgtctattcttgctcctagctactattcctttgtgcttttctctggaccacttgtgtctaacaattctggactgagacctcacagttgcttgcccatcgctggcctccagcaggaggtacagttgttggagacttgcagctgggcagtatgttatgaacacttccaaactgatctctaatgatgtactctgctctagctcatactcactggagt

SEQ ID NO: 16138 - DNA, 518 bp, Chicken  19866894223247_1
cacaatgacatatctgttcacaatactaccactgtataacaacatgggaaaaggtagtcagcttcatctccccagtaagaatacctttgaacagtaaccatatacgtactctgcatttcaattagttgcaagtcagaaccattctctaagcctactatatctggactcatgccatcacttttagagtatttctgtctttcttcttccaattgcatcttcagttttctaacctgaaacacaaatttcactttgtgaaaacacagaaattcagtagtagcacatctaaacattcagcgaggmcaagcagtgctgmgatgcyacttgctgagaccattctgcaagtgggaatagcagagccatgcaggagaggcagggagtccattccaagatgtctgcctacacaatcatttcccaaccgttgctaggtgaggactctctgcatgcgatctttgcaatgggagttgcaaaatcccaattcatgatataaaccaaatcttttaattatttttacacttata

SEQ ID NO: 16139 - DNA, 505 bp, Chicken  19866894223247_2
ctgttcacaatactaccactgtataacaacatgggaaaaggtagtcagcttcatctccccagtaagaatacctttgaacagtaaccatatacgtactctgcatttcaattagttgcaagtcagaaccattctctaagcctactatatctggactcatgccatcacttttagagtatttctgtctttcttcttccaattgcatcttcagttttctaacctgaaacacaaatttcactttgtgaaaacacagaaattcagtagtagcacatctaaacattcagcgaggmcaagcagtgctgmgatgcyacttgctgagaccattctgcaagtgggaatagcagagccatgcaggagaggcagggagtccattccaagatgtctgcctacacaatcatttcccaaccgttgctaggtgaggactctctgcatgcgatctttgcaatgggagttgcaaaatcccaattcatgatataaaccaaatcttttaattatttttacacttata

SEQ ID NO: 16140 - DNA, 499 bp, Chicken  19866894223247_3
acaatactaccactgtataacaacatgggaaaaggtagtcagcttcatctccccagtaagaatacctttgaacagtaaccatatacgtactctgcatttcaattagttgcaagtcagaaccattctctaagcctactatatctggactcatgccatcacttttagagtatttctgtctttcttcttccaattgcatcttcagttttctaacctgaaacacaaatttcactttgtgaaaacacagaaattcagtagtagcacatctaaacattcagcgaggmcaagcagtgctgmgatgcyacttgctgagaccattctgcaagtgggaatagcagagccatgcaggagaggcagggagtccattccaagatgtctgcctacacaatcatttcccaaccgttgctaggtgaggactctctgcatgcgatctttgcaatgggagttgcaaaatcccaattcatgatataaaccaaatcttttaattatttttacacttata

SEQ ID NO: 16141 - DNA, 600 bp, Chicken  19866894223253_1
atacatccatagataaatgaaagtggcaaacatttaaataatgtctgccatgtgatatactgaggtatataactggttccttaaatagcatctgattataaatgagctgtaaagcacagacataggataattacttctgctttacagaaatatttctggtggggcaggtaaaagttttgcctttttgacaaataggcattttatacctccactagccaatgccactctgcaatgctcagtactgcacctcttcctttagcaacgtattttatttattaaagttgtctaatgaatccttcraagtattcttgtaggattcttcactatcactaagaaggggaaataatatcagcagtcactcacagcattgatttctccagttttgggaccccacggtgtatttggttctacaagcatatcacattcaatgcctttttcatcacagagcccaataccagagtcacttagggaaagatgtgagacaaaaataacttttttttccatttcacaatttagaatcaatctgcttttactcattaygtattgaaagaaaaaaaaaacgtccaagtaagccacataacattttgataacaacccatt

SEQ ID NO: 16142 - DNA, 600 bp, Chicken  19866894223253_2
actgcacctcttcctttagcaacgtattttatttattaaagttgtctaatgaatccttcraagtattcttgtaggattcttcactatcactaagaaggggaaataatatcagcagtcactcacagcattgatttctccagttttgggaccccacggtgtatttggttctacaagcatatcacattcaatgcctttttcatcacagagcccaataccagagtcacttagggaaagatgtgagacaaaaataacttttttttccatttcacaatttagaatcaatctgcttttactcattaygtattgaaagaaaaaaaaaacgtccaagtaagccacataacattttgataacaacccattaaaatacagataagtagaggaatgaatggttatggaggttgaccgtaaaaagcaacagtatttgttctttcttttccaaattgagtcacctttaccaagcaccatgtcactcatttaataagagagaagctaagtgtaacatgaacatattaagctttcaagactaagttatttcagtaacaatacaacattcttacctattctcatccttagtaaaaggaacaacaataacgtctctat

SEQ ID NO: 16143 - DNA, 600 bp, Chicken  19866894223254_1
ttcttctccacacagtgagctaagggaaggagtgctccaaggtgcagactcatgcatgggaggaggataactgtagtagccaaaggggcagcaaatactggggccatggcaaacactctgagtaacaagaagaaaacaaggagaaatagaaaagcagcagaagggacagggaggtggggagaaagcccatctactcatcccaaagcagaagagaaaacagccctcagccacaggggaagtatccaagacggatggaattcatgctgtagcttgtccagtccctcccatctgacagggagrggggtctcctttcatgtctgtgctgtaggagtcagcagaagcccagccgtggaggtaattaggtgcatgacagaaaagacaagtttaagttcagggcaggcagcagaggatggaagaggagagcactggagttgtctgtaccaggcagcggccctgctcttgaggttttttatacatccattgtagctgtgctgctctggctgcttctctttctgggggacgagtgctgcccaacacaatgaggttaaagatgctcctggctcctcgggatggctgggacacttcctgggaagtttggct

SEQ ID NO: 16144 - DNA, 599 bp, Chicken  19866894223259_1
  misc_feature (1)..(145): n is any nucleotide
nnnnnnnnnnnnnnnnnnnnnnnnnnnnnnnnnnnnnnnnnnnnnnnnnnnnnnnnnnnnnnnnnnnnnnnnnnnnnnnnnnnnnnnnnnnnnnnnnnnnnnnnnnnnnnnnnnnnnnnnnnnnnnnnnnnnnnnnnnnnnnnnnaagctcttacagaattccaagagaattccaggtacttgagcccttgagaacagcttcactccccaggtctccacagtctggtttctctcagattaaaccatggcgcaaggtaccttgctgcgtatgttagtccccttccagcaccctgttaaaamatgaaagtactagcaggatcttatctggggactagaagtgtactgtgcatcataaagaacacatgctaaacactagagtcataagcatcagtgcatctgctttagtgtattgaactgtggttctgcacagacttgcatctacaacttttcttayatcctgacgcacatgtrcttgaagaacaccatcatccaccagatctggccttctgcttttctttgcagtgtttttctcttaattgaagcaagagttgttatcttatctgactcatacttggttttgatagcttaatgccttttca

SEQ ID NO: 16145 - DNA, 600 bp, Chicken  19866894223259_2
cagaattccaagagaattccaggtacttgagcccttgagaacagcttcactccccaggtctccacagtctggtttctctcagattaaaccatggcgcaaggtaccttgctgcgtatgttagtccccttccagcaccctgttaaaamatgaaagtactagcaggatcttatctggggactagaagtgtactgtgcatcataaagaacacatgctaaacactagagtcataagcatcagtgcatctgctttagtgtattgaactgtggttctgcacagacttgcatctacaacttttcttayatcctgacgcacatgtrcttgaagaacaccatcatccaccagatctggccttctgcttttctttgcagtgtttttctcttaattgaagcaagagttgttatcttatctgactcatacttggttttgatagcttaatgccttttcaactgacccggtcatctcatacttatattgcgagtaatttttctctctacttgcacagaagtatctattatatgtaattcaaatattgaaccttttccaactgtagatagccaaggtacgttttgcatgtaaatggaacatgctgcgtgtcaactg

SEQ ID NO: 16146 - DNA, 600 bp, Chicken  19866894223259_3
tccaggtacttgagcccttgagaacagcttcactccccaggtctccacagtctggtttctctcagattaaaccatggcgcaaggtaccttgctgcgtatgttagtccccttccagcaccctgttaaaamatgaaagtactagcaggatcttatctggggactagaagtgtactgtgcatcataaagaacacatgctaaacactagagtcataagcatcagtgcatctgctttagtgtattgaactgtggttctgcacagacttgcatctacaacttttcttayatcctgacgcacatgtrcttgaagaacaccatcatccaccagatctggccttctgcttttctttgcagtgtttttctcttaattgaagcaagagttgttatcttatctgactcatacttggttttgatagcttaatgccttttcaactgacccggtcatctcatacttatattgcgagtaatttttctctctacttgcacagaagtatctattatatgtaattcaaatattgaaccttttccaactgtagatagccaaggtacgttttgcatgtaaatggaacatgctgcgtgtcaactgaattaaaaagtgaccct

SEQ ID NO: 16147 - DNA, 532 bp, Chicken  19866894223259_4
aacaccatcatccaccagatctggccttctgcttttctttgcagtgtttttctcttaattgaagcaagagttgttatcttatctgactcatacttggttttgatagcttaatgccttttcaactgacccggtcatctcatacttatattgcgagtaatttttctctctacttgcacagaagtatctattatatgtaattcaaatattgaaccttttccaactgtagatagccaaggtacgttttgcatgtaaatggaacatgctgcgtgtcaactgaattaaaaagtgacccttaaaacyctggttaccttttattcagtttcatcatgattatgccctatgcctggattaattttggaagcacttcattttcatatttgtttgtcttgttatatagtcttgtttggctaattaataactttttggggacttatttggcattcataatgatgctttcttatgcagaatataattaaaaaatgaataaaagaaaacttaaattatagattattaaactttcatgtattattta

SEQ ID NO: 16148 - DNA, 600 bp, Chicken  19866894223265_1
tttaactgatctaaaaggaaatgctagatcttgctcttaggatttgaatcccttcattttcaacaattattccaaatgtttggaaaagcatattaaagtataatatgcattttctagctgaaggaatcaccacttctgttaaactctaggtatagttactgtcttcctaaaaacccttaattttgatgaataacacatctttcaccaaagtatctgaatattgcctcctttacagaaaatgttgagtgcttttgtctgcaagctgttacttcttggtttaatcaaaaaggccacccaaarcattagaactctggctgttactcaagacgtgtctttgcgggctggcaaaggttttatgacagatacacaactctcttgttacttaatgcagaataatggagatttagatttagattaaaatgttccatgggggacagaagaagattattgaataatgaatttatgactcagaaaagattccatagcatcaaacaaaaaataaaacaaaacaaaaaaaaggaaacataaagatatggaacatcaactaaatttatcattgagagcatgcagctcagtgctgactggaaaaaacagtcacat

SEQ ID NO: 16149 - DNA, 599 bp, Chicken  19866894223267_1
  misc_feature (1)..(212): n is any nucleotide
nnnnnnnnnnnnnnnnnnnnnnnnnnnnnnnnnnnnnnnnnnnnnnnnnnnnnnnnnnnnnnnnnnnnnnnnnnnnnnnnnnnnnnnnnnnnnnnnnnnnnnnnnnnnnnnnnnnnnnnnnnnnnnnnnnnnnnnnnnnnnnnnnnnnnnnnnnnnnnnnnnnnnnnnnnnnnnnnnnnnnnnnnnnnnnnnnnnnnnnnnnnnnnnnnnnncagtgccctcctgccccggccgcacctggatgcacatgcaaggcaggtggagtggctgcggggaggatttgtggcatcagtgttgtcrgtgcrttgcacatgggatttctttcagggctgtyttcttgtgaaactgttggcttctgccactggttgaggaaggacaggaaaaacattctggtgatgcaaaaaaaatgttgtaaagtagaattatttttatgtaatcactttctgactgcatcaaactctttccgttgtgcatttctcaggctttattgagcccctgtccatttccttcagctttgtctcatttctcttcaaagtcatctcatctcagtctgcgatatttgtgttcctgtcctttctgcagaccctcatstgcatttg

SEQ ID NO: 16150 - DNA, 599 bp, Chicken  19866894223267_2
  misc_feature (1)..(207): n is any nucleotide
nnnnnnnnnnnnnnnnnnnnnnnnnnnnnnnnnnnnnnnnnnnnnnnnnnnnnnnnnnnnnnnnnnnnnnnnnnnnnnnnnnnnnnnnnnnnnnnnnnnnnnnnnnnnnnnnnnnnnnnnnnnnnnnnnnnnnnnnnnnnnnnnnnnnnnnnnnnnnnnnnnnnnnnnnnnnnnnnnnnnnnnnnnnnnnnnnnnnnnnnnnnnnnncagtgccctcctgccccggccgcacctggatgcacatgcaaggcaggtggagtggctgcggggaggatttgtggcatcagtgttgtcrgtgcrttgcacatgggatttctttcagggctgtyttcttgtgaaactgttggcttctgccactggttgaggaaggacaggaaaaacattctggtgatgcaaaaaaaatgttgtaaagtagaattatttttatgtaatcactttctgactgcatcaaactctttccgttgtgcatttctcaggctttattgagcccctgtccatttccttcagctttgtctcatttctcttcaaagtcatctcatctcagtctgcgatatttgtgttcctgtcctttctgcagaccctcatstgcatttgaaacc

SEQ ID NO: 16151 - DNA, 599 bp, Chicken  19866894223267_3
  misc_feature (1)..(178): n is any nucleotide
nnnnnnnnnnnnnnnnnnnnnnnnnnnnnnnnnnnnnnnnnnnnnnnnnnnnnnnnnnnnnnnnnnnnnnnnnnnnnnnnnnnnnnnnnnnnnnnnnnnnnnnnnnnnnnnnnnnnnnnnnnnnnnnnnnnnnnnnnnnnnnnnnnnnnnnnnnnnnnnnnnnnnnnnnnnnnnnnnncagtgccctcctgccccggccgcacctggatgcacatgcaaggcaggtggagtggctgcggggaggatttgtggcatcagtgttgtcrgtgcrttgcacatgggatttctttcagggctgtyttcttgtgaaactgttggcttctgccactggttgaggaaggacaggaaaaacattctggtgatgcaaaaaaaatgttgtaaagtagaattatttttatgtaatcactttctgactgcatcaaactctttccgttgtgcatttctcaggctttattgagcccctgtccatttccttcagctttgtctcatttctcttcaaagtcatctcatctcagtctgcgatatttgtgttcctgtcctttctgcagaccctcatstgcatttgaaacctggtgagagattatcagccccacgctgga

SEQ ID NO: 16152 - DNA, 600 bp, Chicken  19866894223267_4
gtgttgtcrgtgcrttgcacatgggatttctttcagggctgtyttcttgtgaaactgttggcttctgccactggttgaggaaggacaggaaaaacattctggtgatgcaaaaaaaatgttgtaaagtagaattatttttatgtaatcactttctgactgcatcaaactctttccgttgtgcatttctcaggctttattgagcccctgtccatttccttcagctttgtctcatttctcttcaaagtcatctcatctcagtctgcgatatttgtgttcctgtcctttctgcagaccctcatstgcatttgaaacctggtgagagattatcagccccacgctggaggtgtccatggccgccgtacacccggctgctgccccrcgcagtccctgttcaggctggcagcacgaggcagctgctctcctgtgctatccccaggagcacagcccttttatatacgccccattgtttcccaaaggaagtaaaatccccccgctgarctgcctgccctgctgacatttctcccaggtcttttccccttcctctccccttcttgcccagctctcagctgtgctgctcagtcctttctttggctgccggga

SEQ ID NO: 16153 - DNA, 600 bp, Chicken  19866894223267_5
gaaggacaggaaaaacattctggtgatgcaaaaaaaatgttgtaaagtagaattatttttatgtaatcactttctgactgcatcaaactctttccgttgtgcatttctcaggctttattgagcccctgtccatttccttcagctttgtctcatttctcttcaaagtcatctcatctcagtctgcgatatttgtgttcctgtcctttctgcagaccctcatstgcatttgaaacctggtgagagattatcagccccacgctggaggtgtccatggccgccgtacacccggctgctgccccrcgcagtccctgttcaggctggcagcacgaggcagctgctctcctgtgctatccccaggagcacagcccttttatatacgccccattgtttcccaaaggaagtaaaatccccccgctgarctgcctgccctgctgacatttctcccaggtcttttccccttcctctccccttcttgcccagctctcagctgtgctgctcagtcctttctttggctgccgggagcccatgggcacactgttagcagtgcggggctgtgggggtgatgtgaggcacggtgcgttcacctctgatgagtatttc

SEQ ID NO: 16154 - DNA, 600 bp, Chicken  19866894223267_6
gagcccctgtccatttccttcagctttgtctcatttctcttcaaagtcatctcatctcagtctgcgatatttgtgttcctgtcctttctgcagaccctcatstgcatttgaaacctggtgagagattatcagccccacgctggaggtgtccatggccgccgtacacccggctgctgccccrcgcagtccctgttcaggctggcagcacgaggcagctgctctcctgtgctatccccaggagcacagcccttttatatacgccccattgtttcccaaaggaagtaaaatccccccgctgarctgcctgccctgctgacatttctcccaggtcttttccccttcctctccccttcttgcccagctctcagctgtgctgctcagtcctttctttggctgccgggagcccatgggcacactgttagcagtgcggggctgtgggggtgatgtgaggcacggtgcgttcacctctgatgagtatttcggatcccaacgtgagcacctggccaatgagccgcggctccagcgctcgctgctgaagtgttgcaaacataatggggacaatatttgcttaaaacttgttttgaacatttatgggatttt

SEQ ID NO: 16155 - DNA, 600 bp, Chicken  19866894223270_1
gatacattacatagtccgatgtatttatttggttttgcgattagatgagaactgaagctgtcgcttttgttttcaaataaacacaacagaaaagcaccatgtctttttcccacttaatagttttttttcttctttttcttgcaggtttggtaggtttaccatagctgctcttcagtccaaagtagaacaaagcgaacgtgaaatgaaccgtctaaaaaaggcactggaaagaagtgataagtatatagaggaaatggagtgtcagcttttacagctgaaaagtgcaggtgaaggaactcrgaccataagtgctgttagtgagcaagcactttctgcagatgctaaaggaactgaaagcaatgaagatactacatgtttgaaaacccaggctgaggagaagaaagytgtgactaccagtcacagtcctgacagtcttgaacagctagcagatagtggaacatgttcaagctctttgagtcaggatggttcaaaaggttcaaacacccagagtatcccaaagaaagaattatttccaggatgtcagggagtccatctggatgaaaatagtacaagtatggatacttgcttagagcagcagtg

SEQ ID NO: 16156 - DNA, 600 bp, Chicken  19866894223270_2
tttcccacttaatagttttttttcttctttttcttgcaggtttggtaggtttaccatagctgctcttcagtccaaagtagaacaaagcgaacgtgaaatgaaccgtctaaaaaaggcactggaaagaagtgataagtatatagaggaaatggagtgtcagcttttacagctgaaaagtgcaggtgaaggaactcrgaccataagtgctgttagtgagcaagcactttctgcagatgctaaaggaactgaaagcaatgaagatactacatgtttgaaaacccaggctgaggagaagaaagytgtgactaccagtcacagtcctgacagtcttgaacagctagcagatagtggaacatgttcaagctctttgagtcaggatggttcaaaaggttcaaacacccagagtatcccaaagaaagaattatttccaggatgtcagggagtccatctggatgaaaatagtacaagtatggatacttgcttagagcagcagtggaataaaattgaggaatgtaccccgtataaggatgaggaactttatgatcttccagcaccatgcactccttttctgtctcttagtcgccttcagttgaacactcc

SEQ ID NO: 16157 - DNA, 600 bp, Chicken  19866894223271_1
ttatgtgatttttcaaaaggaaaaatatttcatatctcttcccttagaaaatcgcatctctacatacaactgcctcatgtttagagagaactgaactgatagaagatcaaattacatgataaacatagcgggtaagaaattgatacaattcagaaaaatagatgtccacaagcagtcttttcaagcaaagtttgttatgtagaacaacaattttttaattttaaattttatttttaatttaagattttcaaggaggcccatatcactgctgcaccataactagagtccttctggcctgcrtcaataaaagcacggtcagcagggtgagggaggtgatcctgccctctgctccgtgctggtgagatctcacctggagtaccgcatccagatgtggagtcctcaatacaggagagatgtagacctgttggagcacaacaagaagatggccacaaaaatgatataagagatggaacacctccactgtgaagagaggctgcgtgagctgggggctgttcagcccagaagagtgaaggctccacttgataacaactgtgatactgactcacactagagatgctatcattttgggaatattacaag

SEQ ID NO: 16158 - DNA, 599 bp, Chicken  19866894223273_1
  misc_feature (1)..(135): n is any nucleotide
nnnnnnnnnnnnnnnnnnnnnnnnnnnnnnnnnnnnnnnnnnnnnnnnnnnnnnnnnnnnnnnnnnnnnnnnnnnnnnnnnnnnnnnnnnnnnnnnnnnnnnnnnnnnnnnnnnnnnnnnnnnnnnnnnnnnnnntgttgatctggttgctttattgaggaagaacagataaaagcaagagtcaataacccctgagaaatgagaaaaatgtacatttgtgaacttaacagatggagataaggataggttcaaattattaagaaaacttacttgctaaaatgacaaaaacgtttaactttkgaatttcagaaataacacaattctaatataatttaatatgaagttgaaacttcaacaaaatgaaaccctcatcgcttaacagtataagcagttattctgcactctgtatttgttacttcttagacaggaatggaagaatctttggtttctttttgtgaaattggggttctattattttgaatctggtcctgkctgttttataaatactagctggraaatgtgataaactcaagctttgtgagaactcctcatcagttttcacagagtagaaaatccttcattctctgtatatgatgagc

SEQ ID NO: 16159 - DNA, 600 bp, Chicken  19866894223273_2
tgagaaatgagaaaaatgtacatttgtgaacttaacagatggagataaggataggttcaaattattaagaaaacttacttgctaaaatgacaaaaacgtttaactttkgaatttcagaaataacacaattctaatataatttaatatgaagttgaaacttcaacaaaatgaaaccctcatcgcttaacagtataagcagttattctgcactctgtatttgttacttcttagacaggaatggaagaatctttggtttctttttgtgaaattggggttctattattttgaatctggtcctgkctgttttataaatactagctggraaatgtgataaactcaagctttgtgagaactcctcatcagttttcacagagtagaaaatccttcattctctgtatatgatgagcatataagcactgtttttgaaaggttagtagttgttacggtttgtcctcagaatcttaattatgtaaagtaataaatttagcatgagtaattgtagcactattaattttaattcatatttcaagagtgcagaaacatatacagatagtagcaaactttttgaactgcattatgctaaatttttctccagattaa

SEQ ID NO: 16160 - DNA, 600 bp, Chicken  19866894223273_3
ttgtgaacttaacagatggagataaggataggttcaaattattaagaaaacttacttgctaaaatgacaaaaacgtttaactttkgaatttcagaaataacacaattctaatataatttaatatgaagttgaaacttcaacaaaatgaaaccctcatcgcttaacagtataagcagttattctgcactctgtatttgttacttcttagacaggaatggaagaatctttggtttctttttgtgaaattggggttctattattttgaatctggtcctgkctgttttataaatactagctggraaatgtgataaactcaagctttgtgagaactcctcatcagttttcacagagtagaaaatccttcattctctgtatatgatgagcatataagcactgtttttgaaaggttagtagttgttacggtttgtcctcagaatcttaattatgtaaagtaataaatttagcatgagtaattgtagcactattaattttaattcatatttcaagagtgcagaaacatatacagatagtagcaaactttttgaactgcattatgctaaatttttctccagattaattaaatgagtgctctttaactct

SEQ ID NO: 16161 - DNA, 600 bp, Chicken  19866894223278_1
gtaattacttgtctaaatctaccatgtagaaagattttttagaatccatacatatagttgcagacatacagtatattgcttttgcaactagaacactcctctatgagcagataattgttttttagaacaaaactctcttcactcagtaacttccaacagtttgtaaaaagcaaagcaataagttacatggctgacatcctatttaaagtatttaagtctaacatgcatcactccaaaacctcccacagtagatttagatattatagacttaaagatatgctgctccaccatcctgcagtytcttcctgcagtgtctcaaaaaaaaaaaaaaaaagattkctttttatagctgcaatgccaaaaatacttagcaaggtcaggcctgatttttgccagtgttttccttagagactaagtcatgacatcaacaccttttcttaatatatccagtttattttcaactctttctagcgtagcccacttaagtcttacatcyaatgtttttcttccaagtcacaattttatgatgatgtataaattttagactaaagcttgattcttttccattttcttgctcatctagatctgttttacattaaa

SEQ ID NO: 16162 - DNA, 600 bp, Chicken  19866894223278_2
tagaatccatacatatagttgcagacatacagtatattgcttttgcaactagaacactcctctatgagcagataattgttttttagaacaaaactctcttcactcagtaacttccaacagtttgtaaaaagcaaagcaataagttacatggctgacatcctatttaaagtatttaagtctaacatgcatcactccaaaacctcccacagtagatttagatattatagacttaaagatatgctgctccaccatcctgcagtytcttcctgcagtgtctcaaaaaaaaaaaaaaaaagattkctttttatagctgcaatgccaaaaatacttagcaaggtcaggcctgatttttgccagtgttttccttagagactaagtcatgacatcaacaccttttcttaatatatccagtttattttcaactctttctagcgtagcccacttaagtcttacatcyaatgtttttcttccaagtcacaattttatgatgatgtataaattttagactaaagcttgattcttttccattttcttgctcatctagatctgttttacattaaattcttgtaaagtctttctgcagtctggagaagaagctgt

SEQ ID NO: 16163 - DNA, 600 bp, Chicken  19866894223278_3
tcctatttaaagtatttaagtctaacatgcatcactccaaaacctcccacagtagatttagatattatagacttaaagatatgctgctccaccatcctgcagtytcttcctgcagtgtctcaaaaaaaaaaaaaaaaagattkctttttatagctgcaatgccaaaaatacttagcaaggtcaggcctgatttttgccagtgttttccttagagactaagtcatgacatcaacaccttttcttaatatatccagtttattttcaactctttctagcgtagcccacttaagtcttacatcyaatgtttttcttccaagtcacaattttatgatgatgtataaattttagactaaagcttgattcttttccattttcttgctcatctagatctgttttacattaaattcttgtaaagtctttctgcagtctggagaagaagctgtaactagctcatatccacgtagatcatttccttattaacatatttcaaatgctaaatatattcaattataattcacatatagatgtggtatgttaagataccttttcctgcttctagggtattttactgcaactccttgaagaactacttgctacata

SEQ ID NO: 16164 - DNA, 600 bp, Chicken  19866894223282_1
gtctgcttcttgctacttacttcctcagacaaacttaaggacttctgtggcgagcctgtacctatgacaacaatggagccatttcaagctatgcaaatatgttaagaatattttaatagataatagtgctttgcaattggcaagcttagaaacaaagtgatgctcagtagggtcaacaaataagtgttgctccttttgacaataatgttattacaacagtgttccagagcctaaaatattaaatgcatttgattcgttccaacaatttcaccaaaatatattataattctttttgtcagraaaataaaccaactatgccattcttctcagctggggcaagatctctttagaatgtaaaaatacccaggaaaaggctcagcactgtacatctgacctgttctagagagatgttaagactacctcagttagaatcattcaagagaaggacttaacttagacatctgcataaagggatcttaaataatccgcccagctccagctggctgagcagggatactcactgaaggtgacatgatcctttgtcagccccttcttcctgctggggtataagttcacagatggaacctgaagaacttggct

SEQ ID NO: 16165 - DNA, 600 bp, Chicken  19866894223284_1
ggtgcagtaatgcgagtaaccagctcgtcaatttgttggtgcatttttttagcatacagtttcattgcctgtttttctcctttcttcactttccgaaagacatcctccacctcccacgtccaccacacctgattggcagccagcaccatcatgccttggtagagtaacatccaatcaactctatgggaaatacatatagtatgggagtttgagttactgtttaagtaaatgatcacaacaaagaataggaagttcctcctatttctacaactacaacatgaccaaaactttataaagatkaataaaatcaaggtgtgaggtattatttctaaagcctaagaaatattctcatgaaaaacaacctatgctatgtgtaacaatgacaaggcagaatttataataagaaaaactgtgcacacattcctaaaaatgaaaactcaagacttggaaaaccactgagagtaaataacacattatttctggttagttaaaatactacatatgcaggtatccatactcctcctgcattatagaaatacaggctaagctgtgtatcaattagaaaatgaagtttctgttcttccgtatctctagtggttc

SEQ ID NO: 16166 - DNA, 600 bp, Chicken  19866894223290_1
aaacctctaaatgcaggggctgataacagccagtgggagaagacagtgttgaaaagagcagtccataagtaagaactgttttgccacttctagtcacacagggccggttacttcactgtctttgctgattcttttaaaatacaaagataattttggtattttggaacacaaagcgttctgcaagttgctcagtgagttctgacaaaagcactgcacagaaataaagaaactctccagctttgcatatttccacacatggtctcatacaggactgcataatccatttcaagccttcatttkaaaagtagttttcaatagaagtacctgaacatctgaggattttagcagcaagtttcttagagaagcgtagtattcagatggaagcacacagtcttcagtataacaaatatttaatctaagtgatcccaaatcatcagttttagaggacttgttaccattttctcttggttgaagtaagtacctgaaaaaaaatagggtaattacgaagctagtgaaatgaatgaaatttaaatctcactatttttgaataaagccaagtatcacatagtactatttcagtaatacccagtctgacaattg

SEQ ID NO: 16167 - DNA, 600 bp, Chicken  19866894223293_1
cttcaatgaaaaagaaacaaaacccaaacacactcatgcaaagttgatctacacctaccaggatggtatgatccagtttaaaagaagtgcagtactctgtaagtaaaactgcatcataaggctgttataatacattacttctaaatactgtgtaagaacttaaacctttttccatttatattttatacaattatacagaaaataagttgaatgtgcgatattcacatccgcaataataaactgatcattaaaactcaggaaagaggcaaacaagacaatgcagtttgtggcacgcatccrttacagaaaccattcatcaagttcacatctctagtactgaagaaaacaagtaattaatggtacatgtggtgaatgaggctatccatagccaaacaacaatgctgcacacaaaattgtttttactcagcagaccgtgattatgaaagcttgtggttatgatttgcctcctgtccagcagccagagtttgcaagactaaaactacagaagttaaaagaatacaacagagtatacagtcacttgaaactactggatacttccaaacacataaaaagaaagacttcatcttttttattattgtt

SEQ ID NO: 16168 - DNA, 600 bp, Chicken  19866894223293_2
aatgggatggtggggttttttatgactttttttttttggtgattttttcttcttttcttacaaaagtgacaaatcctatacaagcagcattttggacacacgaatataaaaagttctggtatttgctaactcagcgagacgttctcaacacccctcttgtgccaggaatcaaggctcagtgtgatacaacagagcactttgccacaaagccaacagcaggagcccgggcctgccatgtgggcctgtcgaaatctaacaatgagcccttctcccagccctctttacccaaaaaggcagaawacacagatttagttagtttaggtcatggggggaggcaaagttggaaaacataactaccaggcttctgctttcacagtaacactgatccaatgtgttagtggggcttcagtaatcttcaattgatctgatattcctgtatctgctgcacagcgggtgcatagcatgtggcacactacagacaaaaggcggagtttatgacactaactagtacctatctgttattgtgatcgtaagaagcatctaatgctctcttgaaagatgcaaagctcttagttcagtgccccttaaaaaataaaaatt

SEQ ID NO: 16169 - DNA, 600 bp, Chicken  19866894223296_1
gtacaaaattcaagtgaaagcagctgtaaagctagtcctgtacaaaaacttcacaataaagaagtattaatggaaggtaggttatttctgaaccagcaaaacagaagcaatgaagagcacatttaacaaaaaacagcaatcagaaattaaaatttaacattattacaatgtaacattcacaacttcacatatttctataagataacatcacaaaatccattacaaaacagaccctgtaaactacagaataatctagattcaaaattcaggtagcagtaggatgccttactacttagcacraggggaagctccaaacaaggcacaccacagtacttttgttttaaaagttagagatgctgatgagtaatcatcctaaaggaatgagaaacatgaaaagaccacctgcaaaccaaaggtgaacttatccttctgccctaaggtcagttccagtacttaactcaaaggcttcagcattattgctacttgcaatactaatgttcatctacttgcacatacttacttttccgtcttagttccatgatttcttcaactcaaaaccaccaagctgatatctcccctacttaagactagttctgcaag

SEQ ID NO: 16170 - DNA, 600 bp, Chicken  19866894223297_1
aaacttcctgctctctaactgaataagaacttgtgcctgttatctttagtctgtacactgtggcacacttgagaagcatctggctctgtcttctttaaaccctcccactacaaagctgatcacagccttaagatctaccctaagacttatcttaaaatgagcaaacccacttgtttctttctctccttggcattctggtgtgacagctgctcatctgactattggatgttgcataaatatatagaaaggatatgctctggaagggctcttacaggtcttctagtcccttcctctctctcragaccaggacaacaatttccatgccacatctgatagattttattgaccttgttctgtaccttgaaacaggaatttcactatctcttaaagctggagtcccatgatcactcttggtctcagcctcctctttgttcagtttaacaattcaaccaaacaacttgatcactctcagatctcctttyaggattcctttcacttggacctcagttttcttcatctatcgtgtctgcaagtgggcacagtactccgtgaagcagaaaggcttgtttatgcctccctaaaggatatctgtatctacta

SEQ ID NO: 16171 - DNA, 600 bp, Chicken  19866894223297_2
ctccttggcattctggtgtgacagctgctcatctgactattggatgttgcataaatatatagaaaggatatgctctggaagggctcttacaggtcttctagtcccttcctctctctcragaccaggacaacaatttccatgccacatctgatagattttattgaccttgttctgtaccttgaaacaggaatttcactatctcttaaagctggagtcccatgatcactcttggtctcagcctcctctttgttcagtttaacaattcaaccaaacaacttgatcactctcagatctcctttyaggattcctttcacttggacctcagttttcttcatctatcgtgtctgcaagtgggcacagtactccgtgaagcagaaaggcttgtttatgcctccctaaaggatatctgtatctactagtgcctttctttcttataaggctttcactaatcctggggctctggccagtagacaatgtattcgctcaggaaacagcaggatgaagatgtgaggaaaatgcttgctctggacaaaaggaaatgtatatcttaaggttttgaagttttcaatgaatagtgatgtctgggacagmtgtacggtg

SEQ ID NO: 16172 - DNA, 566 bp, Chicken  19866894223297_3
tctcctttyaggattcctttcacttggacctcagttttcttcatctatcgtgtctgcaagtgggcacagtactccgtgaagcagaaaggcttgtttatgcctccctaaaggatatctgtatctactagtgcctttctttcttataaggctttcactaatcctggggctctggccagtagacaatgtattcgctcaggaaacagcaggatgaagatgtgaggaaaatgcttgctctggacaaaaggaaatgtatatcttaaggttttgaagttttcaatgaatagtgatgtctgggacagmtgtacggtggagtctctcagattcacatgaatcagaacagatgtctctatctgctcagccacrgcacatctggctccataggagctctaacgtggtgaggggcaaaataccaarctgtcactggacaatgaacttgtcatgtcagaagataaagttcagtttggaccaataactgtatgagctgagagtggtttggtttgaaccatttcctcacagctggttgacagcagcctgagagaggtttatgaacttttctctgtcatcag

SEQ ID NO: 16173 - DNA, 503 bp, Chicken  19866894223297_4
gcacagtactccgtgaagcagaaaggcttgtttatgcctccctaaaggatatctgtatctactagtgcctttctttcttataaggctttcactaatcctggggctctggccagtagacaatgtattcgctcaggaaacagcaggatgaagatgtgaggaaaatgcttgctctggacaaaaggaaatgtatatcttaaggttttgaagttttcaatgaatagtgatgtctgggacagmtgtacggtggagtctctcagattcacatgaatcagaacagatgtctctatctgctcagccacrgcacatctggctccataggagctctaacgtggtgaggggcaaaataccaarctgtcactggacaatgaacttgtcatgtcagaagataaagttcagtttggaccaataactgtatgagctgagagtggtttggtttgaaccatttcctcacagctggttgacagcagcctgagagaggtttatgaacttttctctgtcatcag

SEQ ID NO: 16174 - DNA, 452 bp, Chicken  19866894223297_5
tctgtatctactagtgcctttctttcttataaggctttcactaatcctggggctctggccagtagacaatgtattcgctcaggaaacagcaggatgaagatgtgaggaaaatgcttgctctggacaaaaggaaatgtatatcttaaggttttgaagttttcaatgaatagtgatgtctgggacagmtgtacggtggagtctctcagattcacatgaatcagaacagatgtctctatctgctcagccacrgcacatctggctccataggagctctaacgtggtgaggggcaaaataccaarctgtcactggacaatgaacttgtcatgtcagaagataaagttcagtttggaccaataactgtatgagctgagagtggtttggtttgaaccatttcctcacagctggttgacagcagcctgagagaggtttatgaacttttctctgtcatcag

SEQ ID NO: 16175 - DNA, 599 bp, Chicken  19866894223299_1
  misc_feature (1)..(78): n is any nucleotide
nnnnnnnnnnnnnnnnnnnnnnnnnnnnnnnnnnnnnnnnnnnnnnnnnnnnnnnnnnnnnnnnnnnnnnnnnnnnnntaagtccgatgtacctgagagctgttataatgcctttctgctaatcagaatttatcacatagtggattttcagtccagtggtcacggtgaaggtagcagaaagggatgcttgagaaaaaataattttaaaatggcgtcaggaaaagctttttatttcttcttgtctacattacacacaatttctttttgggggatggtggtaactcttactgaatttgaaamtcccattctgggagcagaatatccacatgcccatttgctgtcaccactggggaatacacttagagcagagttgctcaggttgtaccagcttgcagtttgttttggaggcaagtgaaaaacattgctattgctctattaaaccataaagtatttcagtttgtaactgttcagggaaggggagggttcccaattcaaattattttgatcctttyattccctgtggagacttaacttgctgtcaagaccctctgacttcaagtgatagcagactttgtttctcctctgacatataggtttaa

SEQ ID NO: 16176 - DNA, 600 bp, Chicken  19866894223299_2
cgtcaggaaaagctttttatttcttcttgtctacattacacacaatttctttttgggggatggtggtaactcttactgaatttgaaamtcccattctgggagcagaatatccacatgcccatttgctgtcaccactggggaatacacttagagcagagttgctcaggttgtaccagcttgcagtttgttttggaggcaagtgaaaaacattgctattgctctattaaaccataaagtatttcagtttgtaactgttcagggaaggggagggttcccaattcaaattattttgatcctttyattccctgtggagacttaacttgctgtcaagaccctctgacttcaagtgatagcagactttgtttctcctctgacatataggtttaacattacagctcccttaacacaggactctatctatatcatgccctatagccttcagcaaatttgtctacattgcagttctgaactctcagaggtaacctttatgtatatctcaggttattttgcaccacaggaagcttctaggagccagtctgtatgtcattcastcatagatagcagagatggaggtgacagatgcagagatgccagaagtcg

SEQ ID NO: 16177 - DNA, 600 bp, Chicken  19866894223299_3
ctgttcagggaaggggagggttcccaattcaaattattttgatcctttyattccctgtggagacttaacttgctgtcaagaccctctgacttcaagtgatagcagactttgtttctcctctgacatataggtttaacattacagctcccttaacacaggactctatctatatcatgccctatagccttcagcaaatttgtctacattgcagttctgaactctcagaggtaacctttatgtatatctcaggttattttgcaccacaggaagcttctaggagccagtctgtatgtcattcastcatagatagcagagatggaggtgacagatgcagagatgccagaagtcggagatacttgcagtactgctcttatatgtctgagaccagaggatcatgtcatttcttgatatcctacaggaaaaaaagtgtgttcgtctctcaccatagtcgtgtaagccgtggaatctcctctatgaggctgatgctgaaaccagacctcacgttggctgacagactgtgttggtagctggttgtatgggctaaaaatgttaataagctgactccgactagagtcccaattgaaagtagctctctcctag

SEQ ID NO: 16178 - DNA, 600 bp, Chicken  19866894223315_1
ctaaactaaggtctggatttaggggctcccatggagaacatagggtctctgtggaggagctggttgtcacttggtggctggagggggtgttctggccccgcagctcctcacgtctgcactgcccacagagcagatttgtcagcggggctgggtgatgctgggggacatgttcataccaccctatggacagcctgggtgtgagcaaggaatgagagatagaagcatcacaggggcaccagctgcaaggcactcaaaggatacaagggctacagcaggctgcaagagacgcaaaggattcaragggctgcaatgggcacaaaggatgcaaaagatgcagtgcaaagaatgcaragggcttcaaggggcggaaaggatgcaaagggtgcagtgggctgcagagcttcaaaagggtgcagtgggctgcaagggttgcaaaggctgccaggagcaagaaggrtgcgaaggatacaagggctgcaaaggatgcaagggctgcaatgaatgaaaaggggttcgaaggggatgcaatgaatgaaaaggctctgctgggrtcacctgtgggcaggatgctgagcactgcgcctcggccatcatccccat

SEQ ID NO: 16179 - DNA, 600 bp, Chicken  19866894223315_2
tggaggagctggttgtcacttggtggctggagggggtgttctggccccgcagctcctcacgtctgcactgcccacagagcagatttgtcagcggggctgggtgatgctgggggacatgttcataccaccctatggacagcctgggtgtgagcaaggaatgagagatagaagcatcacaggggcaccagctgcaaggcactcaaaggatacaagggctacagcaggctgcaagagacgcaaaggattcaragggctgcaatgggcacaaaggatgcaaaagatgcagtgcaaagaatgcaragggcttcaaggggcggaaaggatgcaaagggtgcagtgggctgcagagcttcaaaagggtgcagtgggctgcaagggttgcaaaggctgccaggagcaagaaggrtgcgaaggatacaagggctgcaaaggatgcaagggctgcaatgaatgaaaaggggttcgaaggggatgcaatgaatgaaaaggctctgctgggrtcacctgtgggcaggatgctgagcactgcgcctcggccatcatccccatgtcttgtgcagcacagagggagmgcagccagccacagcagcctgcactgat

SEQ ID NO: 16180 - DNA, 600 bp, Chicken  19866894223315_3
ctgggggacatgttcataccaccctatggacagcctgggtgtgagcaaggaatgagagatagaagcatcacaggggcaccagctgcaaggcactcaaaggatacaagggctacagcaggctgcaagagacgcaaaggattcaragggctgcaatgggcacaaaggatgcaaaagatgcagtgcaaagaatgcaragggcttcaaggggcggaaaggatgcaaagggtgcagtgggctgcagagcttcaaaagggtgcagtgggctgcaagggttgcaaaggctgccaggagcaagaaggrtgcgaaggatacaagggctgcaaaggatgcaagggctgcaatgaatgaaaaggggttcgaaggggatgcaatgaatgaaaaggctctgctgggrtcacctgtgggcaggatgctgagcactgcgcctcggccatcatccccatgtcttgtgcagcacagagggagmgcagccagccacagcagcctgcactgatcatgtggctcctaatgaaatccagaccctggcagagcgatgacacagcgccatgatttgtgctcccatacagactaaacaagcacgagcactcccccgtatccagg

SEQ ID NO: 16181 - DNA, 600 bp, Chicken  19866894223315_4
caaaggatacaagggctacagcaggctgcaagagacgcaaaggattcaragggctgcaatgggcacaaaggatgcaaaagatgcagtgcaaagaatgcaragggcttcaaggggcggaaaggatgcaaagggtgcagtgggctgcagagcttcaaaagggtgcagtgggctgcaagggttgcaaaggctgccaggagcaagaaggrtgcgaaggatacaagggctgcaaaggatgcaagggctgcaatgaatgaaaaggggttcgaaggggatgcaatgaatgaaaaggctctgctgggrtcacctgtgggcaggatgctgagcactgcgcctcggccatcatccccatgtcttgtgcagcacagagggagmgcagccagccacagcagcctgcactgatcatgtggctcctaatgaaatccagaccctggcagagcgatgacacagcgccatgatttgtgctcccatacagactaaacaagcacgagcactcccccgtatccaggccagtgcaggcggggggataaatcaggtagtggtggtggaatgcctctgtccatcttctgtcaaagtggtcttgttggagtgcttgcatgcaaa

SEQ ID NO: 16182 - DNA, 600 bp, Chicken  19866894223315_5
tgcaaaagatgcagtgcaaagaatgcaragggcttcaaggggcggaaaggatgcaaagggtgcagtgggctgcagagcttcaaaagggtgcagtgggctgcaagggttgcaaaggctgccaggagcaagaaggrtgcgaaggatacaagggctgcaaaggatgcaagggctgcaatgaatgaaaaggggttcgaaggggatgcaatgaatgaaaaggctctgctgggrtcacctgtgggcaggatgctgagcactgcgcctcggccatcatccccatgtcttgtgcagcacagagggagmgcagccagccacagcagcctgcactgatcatgtggctcctaatgaaatccagaccctggcagagcgatgacacagcgccatgatttgtgctcccatacagactaaacaagcacgagcactcccccgtatccaggccagtgcaggcggggggataaatcaggtagtggtggtggaatgcctctgtccatcttctgtcaaagtggtcttgttggagtgcttgcatgcaaacgcactcatgctttcctaaattacactgaacagagctacagcaaaagctcaggctctcagatctgctcagag

SEQ ID NO: 16183 - DNA, 600 bp, Chicken  19866894223316_1
tctcagtaagaatctgtctgcaattttatttataattggcattattttcattactgttgttatgaagtatgtaaaatattgtctgtattgcagcttgtacagggcatgtgtctgtgcttgctttactctttttgagttgataaagttgctatacaaatgcaagaaaagatgttcaggtatctttgaatgttgttccttaatctgatttcagagccccaaacctttcagcctttaggtgcttaaggaaacagcagtattaacacaaaacatctcaaaaataaatacaggaattttaaaggkctacagtacaggactggaatgctgacactgctgtcccagtggtggtgctagagcaatggggaggacagtgaatatccagaaaatgcaagataccactggggactcctgagggaaaaggctcgttgtaggtgggaaatctattagaaaatgtgatgtcctttccatagggagcaggaagcacccacttctgcaaagcagagaagagaagggaaatatgttcatagtatcacctaaagataggccttgaaccatttaacttcccttattttttaagcagaggacatctagaacaggctctga

SEQ ID NO: 16184 - DNA, 600 bp, Chicken  19866894223318_1
tggtggagggggaaacataataattttcgtatctgtaaaagcagtgggcaaagaaaaaatagattagtgttttttcataaccaccaatcaataggaatagaaatggttggtttaaattgcaagaaaagagacttcagacacaaaaaggcagactaagtgacctgttgaggtctttttctgatctgattctatgcttactcgcaaactagctgctttaaagtcctttattgttgccagtaagcactgtctgttagaaaaggcagctgcagttataaaaagtagtgtagaacggaatgcctraattgcacaacacaccagttgatctggttagctttagtgataccaccctcagcttttaatcattcctcagcaaactttcagacgtctacgtaagtaggagtgccttcaaaccacttaattataaaataattattccttgaaacaccaagggctggtttaatcagtgttacaaattttcttcattttgttgagtctcatcaatctgatacagccctgttatagctgtgacatggtgtaatcagctatttcatttcttaaattgggaagaaaaaaaaagcaaacctctaaaattcacctgga

SEQ ID NO: 16185 - DNA, 600 bp, Chicken  19866894223328_1
gttcttctcttgggtttttgttcttttgcctcagatactttgcagtgatgaatcttggtttgatctttaagacatcagcaattatagccaggacagacttctgacatagtgcagaaaatatagtagtttttgatgatacgggtaagtcttagctatttttgaaaggtcccaatcatagtcctgtgaagtctttacttcagtagcctacagtaaggatcagctaaaatcacaaaaccaggatcagagttaaagagcattaggaaacggaatctttcgttatctcccatatgtagaagataytgtgcagaagctgctttccctactacctcatcaaagcagttctgaaataatttttactgtgctgtacttgaaggctgtgactgaagacttctctgtaagtgtacttagttaagcagtgaaagagaatgcaaggccactgaatctattttccattttgccattggtaagagagggaattatttagcaaaaagattactaaacaggcagctttcctgtatttccccgtctctctcttctctctacaattgcatacttccacccacacacccttttctccacaagaattgtctgcatgcagct

SEQ ID NO: 16186 - DNA, 506 bp, Chicken  19866894223328_2
acaggcagctttcctgtatttccccgtctctctcttctctctacaattgcatacttccacccacacacccttttctccacaagaattgtctgcatgcagctgaactgcaaaaccatttccaaagctgttaccagaaagaaaaacaaattttcaattcatttttaccttgtaattccttcatcccaatcagtggcttgcacctcatgtttattattcatgtaaggaattgtaaagtgagccacttgctctttattatgaaagacagattttattttctgatcatggactatagatacaaasggctgttgattataaaaccattatttaaactctgtgcccttcttgtagtttatagaaactattgcaattattttcctacttatacaatgcttggcctgctgtaactggactacaatagtgtaagagaagaattagagaacacttagctgtaagaaaatgaaagaggtgtgcagttcactaacatctggcattatgcacccctggaa

SEQ ID NO: 16187 - DNA, 599 bp, Chicken  19866894223329_1
  misc_feature (1)..(157): n is any nucleotide
nnnnnnnnnnnnnnnnnnnnnnnnnnnnnnnnnnnnnnnnnnnnnnnnnnnnnnnnnnnnnnnnnnnnnnnnnnnnnnnnnnnnnnnnnnnnnnnnnnnnnnnnnnnnnnnnnnnnnnnnnnnnnnnnnnnnnnnnnnnnnnnnnnnnnnnnnnnnntcttgctttgttttttctctctaaagctcagccattacagaactaaaactaatttaaacaaggtgagaaagaactgctgattgtaagagcatctcaagaagcatttcttttcatacatttgtgttggtgtagtagaagtaacrcaaaaaccttttatataaaatggccgtttctgttcattgtttgttcacgtgtttattagccaaagttacacacccataaccaacacagccaggtttgtttagaaaaaaatcaatcataaaatatcaaaaagtccctcttagtaacatttccccccaccccattcttaaaattactctgaaattacagacttgagaaggatgtaacaaggacgttctcaaaggcccaacttcatttcacattctttgccacaaactttatgttgctgaagttatatggggtaaattgcagaaattgggat

SEQ ID NO: 16188 - DNA, 600 bp, Chicken  19866894223330_1
tagcttagaaaggtatcactttgtaggaacaagaaccacactacttcttgggcctgtcccctcaatgaagactaagtttccatttgttccagacttctaacttggagagattcctctatggtcgtgcccatgaagttgtgttcctgcccccacaagctgctacaggttgccaaggttggccagcaggagagcagtgtgagaacttaagggtcatagcaaggcaggagaagagtaaggaccgtacctgcttgctgaaacagactgtgagcctgttggaaagagagactgttcaggctgttwacctccctsctaagaaagagcatcatcagggaaatggggtctcttgctaaacacctgggtactttcaggataaacttcagcattagattccattttgaaaattaagaaggcaaatagaactgcctttaaggagttgattaatagaacagattaatagacagasatctcaggcaggaagggtaagggtggtggaggggagaggggccacagtccaactccttcctctctgcgagaagtttcgcaccactgtcacctctgctgctatgatgatttgaagggcacttcagcaggcattttgct

SEQ ID NO: 16189 - DNA, 600 bp, Chicken  19866894223330_2
aaggtatcactttgtaggaacaagaaccacactacttcttgggcctgtcccctcaatgaagactaagtttccatttgttccagacttctaacttggagagattcctctatggtcgtgcccatgaagttgtgttcctgcccccacaagctgctacaggttgccaaggttggccagcaggagagcagtgtgagaacttaagggtcatagcaaggcaggagaagagtaaggaccgtacctgcttgctgaaacagactgtgagcctgttggaaagagagactgttcaggctgttwacctccctsctaagaaagagcatcatcagggaaatggggtctcttgctaaacacctgggtactttcaggataaacttcagcattagattccattttgaaaattaagaaggcaaatagaactgcctttaaggagttgattaatagaacagattaatagacagasatctcaggcaggaagggtaagggtggtggaggggagaggggccacagtccaactccttcctctctgcgagaagtttcgcaccactgtcacctctgctgctatgatgatttgaagggcacttcagcaggcattttgctgcagtcttt

SEQ ID NO: 16190 - DNA, 600 bp, Chicken  19866894223330_3
aggttgccaaggttggccagcaggagagcagtgtgagaacttaagggtcatagcaaggcaggagaagagtaaggaccgtacctgcttgctgaaacagactgtgagcctgttggaaagagagactgttcaggctgttwacctccctsctaagaaagagcatcatcagggaaatggggtctcttgctaaacacctgggtactttcaggataaacttcagcattagattccattttgaaaattaagaaggcaaatagaactgcctttaaggagttgattaatagaacagattaatagacagasatctcaggcaggaagggtaagggtggtggaggggagaggggccacagtccaactccttcctctctgcgagaagtttcgcaccactgtcacctctgctgctatgatgatttgaagggcacttcagcaggcattttgctgcagtctttctttcccagcgttgtctgcagtgttggtctggaccagaggcaaatccttcagactcgggttagtgcggacggctgctggactccagatgggaccgcttgccagctgctaacacactgctgctctctgcttgctcggagaacgggcgcttgtagg

SEQ ID NO: 16191 - DNA, 600 bp, Chicken  19866894223333_1
cagcagaaaggtttaaatccagctttgtttgtaattttgtagaaacaaaggcaacaattagctgcccttctgcatgtgtctcaaatccgaaagcaaagtgctgtgcaaaaggggctgcgcaacagactggagattggaacgccgtcccaggctgcagggctgtacgtggtgcttacagatgaaggcaagacaatagaaatgcaagttgctgtctgcccgagatatgttttataaaagagcttctgtagcaaagagattgctttgatttttcatcccaacatcatttgttaacaatatcaytgataaacagatggcggcttttcaggggccgctgatttaaactgcgcacaaaaaaaagcagcactgaaggcacgttactggggttatgaagtcaaggacctggaagttatgaaaggccaggactgcggctgcagccaccacctgaattcagccctcctgcacgcaggcgttacgatacaatctttaattacatgatggcatgccattatttccccctgcagaatggaaggtgctcggttaatgagcagccactcagcattttgttttcgcctttttgttcaacgtgtggatgtttactca

SEQ ID NO: 16192 - DNA, 600 bp, Chicken  19866894223341_1
tggacttttgaaagggacagatggagacatcaagtaacatgagcaacatgcactttttcttagttactaggaggaatctagtggaaaaaacaacaacaaaaaacagcctttgttctccttttgtatcatctgtcagaggagataactgcacaggtgatggaaatagaggcagtgcttcgcatatttaggatttaaaatctggtgtggtgaagggcagttgcagttatccattagcccaaggaacagaggcagccttgggcacaagtagacctttcctcatgagggttttttttcatagasagaataagagaaaacacatttttttttctaccactacatgagttcacatgagggccagtcatgtgagccactaaaacaagctgacctgactttttccttttccttatgttcgctgttccattggaagacttcctgtcctcccatcttgctctcatcactctttcaaacttagcaagcttcatggaaatgcatttttcatttgtgccatcatgaagacaaaatactgtctaaatcagtgtctttcctttcctctgaaaatgcacttatttgtaactggactaatctctgtaaaacttcaga

SEQ ID NO: 16193 - DNA, 600 bp, Chicken  19866894223341_2
gaaataaaaatgcctgcatctgttcttagtggatgtaggggtctatcagctccaagggaagcaatgggccctttatttgcctctgggctgagaacttctaaaagacttctctctgcacagttcagcccgggaaaggctagctctctgcacatctcctccttatggttagtatcctaccattactattcagagcatgagctaggaccacaggtcttgagatgcttgcttctctatgtcacctcccattactggggggaaaaaatgattgaggacaggcagagttaagaaaacaggcagagrgcttctgttgatcccaaggctgaactgagtagagaggatggaacgctattaagcatttcatagctactagatatgttgaatattcaataggaaaatattgtcctggcccacagtgggatttttaattataagggtgaatacaactgtgttattcatacaatgggtctcaggctgtttatgatgccagatattggatccaggcactaaggtagaacatcagtgctcctgagtgctcttacctagtaaccttcctcatatttatttatagtcctcaacagtgagtcagaagtgaagaagtgc

SEQ ID NO: 16194 - DNA, 599 bp, Chicken  19866894223344_1
  misc_feature (1)..(48): n is any nucleotide
nnnnnnnnnnnnnnnnnnnnnnnnnnnnnnnnnnnnnnnnnnnnnnnncgacctgtctctcaggcattaatctgacacacattcggcccagccccagggctccctgcagaagctggcctgcttgccaaggacacctgccccgactgcctcctttcaaggctttctatccaggccaacacaaaggggcaactcaggttgcgaccaaacaaccagcaggtgcttccaccagcgggtgtttctcctatgaaccaatcttaatgcaactctgggcaccgtgccttgctctctgctaggtaggartaacggtaaccagtccctcagcatcccaggggactttacccaggccaccagcacagctcagcccccaacaaagggacagacccctccagctgccagcacagccccacactggggtggctgagccccacctccgtgtctctctccccaggagcagccccactgtttgctgccagttttgcccagcgaggctccttcaggcagagagcaccagggtgagtgttccgtgatggaggatgaactcagcagagccaagcgcagcttcattttattgcaatcaagcagagtcccgccctgacaag

SEQ ID NO: 16195 - DNA, 599 bp, Chicken  19866894223345_1
  misc_feature (1)..(180): n is any nucleotide
nnnnnnnnnnnnnnnnnnnnnnnnnnnnnnnnnnnnnnnnnnnnnnnnnnnnnnnnnnnnnnnnnnnnnnnnnnnnnnnnnnnnnnnnnnnnnnnnnnnnnnnnnnnnnnnnnnnnnnnnnnnnnnnnnnnnnnnnnnnnnnnnnnnnnnnnnnnnnnnnnnnnnnnnnnnnnnnnnnnntctttttagtaggccaaagtaacaatgcattacagtagcacatcacagcagatttagttttgagcaatggaataggttcattgaagagaataagaacagagatcccaaccggtaacacaygatgagacttttcagtaatatttttatatcaaactatttcagtgtttggcaaaactatttctatttgatacttcaacagtgcaaaatacagcgtacaaaaacaaaaaatctggtgtgaattgtgcttagtaataaggcattacycataatgcagagcatcccagaaaccacacagtatcaaaaatgaaactatgacttatatgtatatgctttccctcaggaaagcattcctaattcaggacagcacttacagtcttgtatttaaatgacaacttcagaactgacagaactttaaaaaa

SEQ ID NO: 16196 - DNA, 599 bp, Chicken  19866894223345_2
  misc_feature (1)..(36): n is any nucleotide
nnnnnnnnnnnnnnnnnnnnnnnnnnnnnnnnnnnntctttttagtaggccaaagtaacaatgcattacagtagcacatcacagcagatttagttttgagcaatggaataggttcattgaagagaataagaacagagatcccaaccggtaacacaygatgagacttttcagtaatatttttatatcaaactatttcagtgtttggcaaaactatttctatttgatacttcaacagtgcaaaatacagcgtacaaaaacaaaaaatctggtgtgaattgtgcttagtaataaggcattacycataatgcagagcatcccagaaaccacacagtatcaaaaatgaaactatgacttatatgtatatgctttccctcaggaaagcattcctaattcaggacagcacttacagtcttgtatttaaatgacaacttcagaactgacagaactttaaaaaaattctttaaaagagtattctatagttttagttttaagggttggggttttggttttttttttttttttttcattttaaacagaaaaatcatttttattttctcttacataacagaatcccagacttgcaggggttggaagggacc

SEQ ID NO: 16197 - DNA, 600 bp, Chicken  19866894223353_1
gtagtcacagagaatgtgtatgttttagtcacagtttttctgccatggaggctgtgcttgtggagaacaaataaaaaaaaatggattataatacatttttctgtcttatattgtatctatcctgcttgcttctaggcctgccaattttacaacaacagggttaatacctgcagccagcgagacgactgcaacaagcttcatatttgccgatactttctccatggtggatgtaaattttttccatgcaagaagtcccataattttttggattcctgtgcactgagattgttgaaaaatggwggcattgatgagaagatggcttcaaacatccagaaagtatatgatcataaacatgtggagctccacaagagggaaaaacgtaagttgtaagaaaaagtaggtttaagttgaattttgagtttgacaraggtagaagcctgtgttgttgtttttttttccccttaaatcacagctaatggtccttcctacaaaccaaggcaaacttcagaggaagaccgaacaaataaaagtagcaaagaacagaagccatcttttgaaacacctgaggtctccacagtgcatgcaccaccttcagaaggt

SEQ ID NO: 16198 - DNA, 600 bp, Chicken  19866894223353_2
gcttctaggcctgccaattttacaacaacagggttaatacctgcagccagcgagacgactgcaacaagcttcatatttgccgatactttctccatggtggatgtaaattttttccatgcaagaagtcccataattttttggattcctgtgcactgagattgttgaaaaatggwggcattgatgagaagatggcttcaaacatccagaaagtatatgatcataaacatgtggagctccacaagagggaaaaacgtaagttgtaagaaaaagtaggtttaagttgaattttgagtttgacaraggtagaagcctgtgttgttgtttttttttccccttaaatcacagctaatggtccttcctacaaaccaaggcaaacttcagaggaagaccgaacaaataaaagtagcaaagaacagaagccatcttttgaaacacctgaggtctccacagtgcatgcaccaccttcagaaggtaactaaataagtaccaacttcttccacatggaatcagctttcctatttttccctcttgcaacagatgcatttttttttttccttttgctgttgatctgccttcaggaatggagtcttggctaagtca

SEQ ID NO: 16199 - DNA, 600 bp, Chicken  19866894223355_1
atgctatctaaagcagagcctttattttaagagtagaagaaggccaattactaggaagagttggcgaagtacatttgactactctgatttgcaactatttgaggctcaggattcagagatcccaaatactgggaatcacaggaacatacaaaggcactgaaactctaagcccaacccatccatccaagagtgttgtccaaatgctccctgaactctggtacgtggggccatgaccacagccctgggcagcctattccatgcccaccacactctgctgaagaacctttccctagcccccasctgcccctcccctgacacagctccatgccgttcccttgggccctgtcgctgtcacagagagcagagctcagtgctgtccttcacaccctgtgaggagctgcagttgccatgagggctcccctcagctcctctgctctaggcagaacaaaacaagatgcctcagccactcatcattcttttgcccctcgagacccttcaccatctttgtagccctcctttggatggtctctaatagctttatgtccctctcacattgcacccagtgctcaaggtgaggccacacagacgcagagcagaaca

SEQ ID NO: 16200 - DNA, 600 bp, Chicken  19866894223356_1
tttaaaagctttgctgcactgtaaaaggtaacagtgtgaatctgcaagctccaccctgcccagctatcttgcccacagcaaacagagaattgagaggaggtctgcaaaacaaagtttgccatcaaaactacattacagctagagtggaaaatgaagaaagttgtgttcctactgattttagtaattgctattgccacctaaattgcaaaatgtggatttgatttcctggagcagttttaggagcaggggaactgtgtagacaaaacaaatgcctgtgctggtttcttgacttggtttggytgggaagggcatgggaaggagaacagttgggcaggtgggtgggagatgggtttgtcctatgatgcaggtacagccatgggtcataggaacataggctcttttgggaacacagcacccagcacaacacctggttgtcagcagggtgcaattaggagagtgcagaaccgaaatgagacacccaaaagcagccaaaggattagtggaacttaattcttcctgatggccttgtaaaagtccccaggaggtcagtgatgtggctggatggacctgagtgaggagcatggctttgtgcagatgcag

SEQ ID NO: 16201 - DNA, 600 bp, Chicken  19866894223357_1
agagaaacaaatcaaatcctggccagctcagtaccattgttttttgcttaatcaaaagattatattcttgctgcagagccagttgccagctctaagaaaagctggaaagtgctgcctgtctctcagaagcgtttccctgcaggcctggtttttctggatgcatgaagagaattccatctgccttgggatggtggagggaactgtgtaacacagggttcccaatgggctacagagctgtaggacacttagaagtgctgaaagtcttttctgctgagaagcaggctcttgaagcaagatgcygatgcaatttgtcttctgtatttgctatcatctcagtacatcctggctattgccgctgaggattgttaccagactgtcatcttcttatccccacaagtcattaatgacttgtactatagcattctttacagcctccatgggcttagctggaatttagatcacggtacgaagataattggctgctttctcctgttgtctcttacaggctctatagatgtgcttgtcttttctccatgaattgcatattctacagtcctaaagacatacatytgtgaaggttctaacatgaawgtctgatct

SEQ ID NO: 16202 - DNA, 600 bp, Chicken  19866894223357_2
ctgagaagcaggctcttgaagcaagatgcygatgcaatttgtcttctgtatttgctatcatctcagtacatcctggctattgccgctgaggattgttaccagactgtcatcttcttatccccacaagtcattaatgacttgtactatagcattctttacagcctccatgggcttagctggaatttagatcacggtacgaagataattggctgctttctcctgttgtctcttacaggctctatagatgtgcttgtcttttctccatgaattgcatattctacagtcctaaagacatacatytgtgaaggttctaacatgaawgtctgatcttagaaaagctgtgtgttatccagataaattgatcgcatataggttgcagaactggttgatgtgatggagcctcctgaccatccagatctcatgggatttctgctggccctttctcatctcccctgggatgctctaaaagggcatttcagttccagtgatgtgcttgtctgtcttctatccaagagcatctgaagcttgaggtgcctctcagctgttccctgagaacagaactttattcatgtctgaaagaaaatctgactcaaattgtga

SEQ ID NO: 16203 - DNA, 600 bp, Chicken  19866894223357_3
caagatgcygatgcaatttgtcttctgtatttgctatcatctcagtacatcctggctattgccgctgaggattgttaccagactgtcatcttcttatccccacaagtcattaatgacttgtactatagcattctttacagcctccatgggcttagctggaatttagatcacggtacgaagataattggctgctttctcctgttgtctcttacaggctctatagatgtgcttgtcttttctccatgaattgcatattctacagtcctaaagacatacatytgtgaaggttctaacatgaawgtctgatcttagaaaagctgtgtgttatccagataaattgatcgcatataggttgcagaactggttgatgtgatggagcctcctgaccatccagatctcatgggatttctgctggccctttctcatctcccctgggatgctctaaaagggcatttcagttccagtgatgtgcttgtctgtcttctatccaagagcatctgaagcttgaggtgcctctcagctgttccctgagaacagaactttattcatgtctgaaagaaaatctgactcaaattgtgaactatgtaactggaaaaggat

SEQ ID NO: 16204 - DNA, 600 bp, Chicken  19866894223357_4
aagagcatctgaagcttgaggtgcctctcagctgttccctgagaacagaactttattcatgtctgaaagaaaatctgactcaaattgtgaactatgtaactggaaaaggataaatcagaccaaaagagttgttgcagacataatgcacttaagcacagatggtgtggagtaactaatattgttaatgctggcaatggtatttgtgttacagtataacaactcctaatcatgtgccatgttatttatctactggccaggaggtccaagctctatttcccactgttagtggaaatgggagcrgttgtgtttgggaggtggctttaagaaacagttgcttatttagaagcatgaagtgactgtgtgagggtacctgaagatcatgaagttgtgagcattcagggaaacattctgttgtgaggctctgacctctcataactagtgcccataaaagaatgatcatatactgtcactggacactatttgggactgtatttgaaggtctgtaactaaacttgactaatgatctcattggcagctatttcctatgcttcctttcctggaaataacacaaacagtaatgtttttgtttgtccgttgatg

SEQ ID NO: 16205 - DNA, 600 bp, Chicken  19866894223357_5
agctgttccctgagaacagaactttattcatgtctgaaagaaaatctgactcaaattgtgaactatgtaactggaaaaggataaatcagaccaaaagagttgttgcagacataatgcacttaagcacagatggtgtggagtaactaatattgttaatgctggcaatggtatttgtgttacagtataacaactcctaatcatgtgccatgttatttatctactggccaggaggtccaagctctatttcccactgttagtggaaatgggagcrgttgtgtttgggaggtggctttaagaaaragttgcttatttagaagcatgaagtgactgtgtgagggtacctgaagatcatgaagttgtgagcattcagggaaacattctgttgtgaggctctgacctctcataactagtgcccataaaagaatgatcatatactgtcactggacactatttgggactgtatttgaaggtctgtaactaaacttgactaatgatctcattggcagctatttcctatgcttcctttcctggaaataacacaaacagtaatgtttttgtttgtccgttgatggagctgttaagagaagagcttcctttgct

SEQ ID NO: 16206 - DNA, 600 bp, Chicken  19866894223362_1
tctgagaggcactgaggcgataaataatgggcaaaatcttgctccacatactttcataaatagctctatttggaggcaaaagtgcgatttagtcacataaagtcagtgcaactacacttaaaagggcttgtcgagcacttgggactaatatgataaacatagctgaaaagaagctttggactaagcgaatttggtctgtcctgtgattttttcttctacaactgttttataacaatgtttacgtttgttttttcacattaatcttgtttttctgcaggtaatacataagatgggaggttygatgttgtgttttgtttttatctctgagcaagctagctggttttcacaggtcactgccttcgaattttctaagtgttctgcacagctactgccttacaacagctattataataaagaaagtaaggaaactaagatctgagctgttaaaataagcagcagattgcaaggtgccttggaaactaagcacattaaatattcagataatagagaatgctcatccatccagttaagaagtgtgaaaacagggactaggattattatagtatcattcttgtacgcagtgttatacagtcttcagct

SEQ ID NO: 16207 - DNA, 600 bp, Chicken  19866894223370_1
agaataacttcggtgccagcgtacattcaagtactcacacaaatacagttttaaacgcactgcaaggacccacgtgttgatcaggttataaacctcagaaattacttaagaaatacacagaagtacacaggagacaaatatgggtcttctaatactcagacttggttttcagttagcagcactgtgatgttttctattgtttcctcacttttaacaaggacgtccattacaattttgttcctcaaatgcagttgttctgaacacagtatgtagtcccaaagcatatgctatttctaaaaratatatacatatagaaaatttattccagagtaggtacacagacaaacttactatgttatgctgagtgcagacttgcacccgtcacagctccgtttccccgatcacatcacacgttaacgttgtgcaggaatggacaacatgcaatcctagccccacagaaagcaaacctgaactctcaccaactgcagaatcaatttgcagtctatagtggaatacccagcttagcaataatctgtggaatacgactttttttaaaccatttagaaagacaggattgatattttcgtaagccaaacagat

SEQ ID NO: 16208 - DNA, 600 bp, Chicken  19866894223371_1
atgaaagcaatttgatggctgggagttctgtataatcctgttggatgtgaaggaggtctcattctgctcctcttctgttctgctgtttggtgagaggcagagtgagcctcttcatcagcctagcttgactgattcgttaattgttgcgctctaaagcttgtccctttgttgcagttgtctctaatgcaaacactcctacagggaacattcaggacgagtatcccaacacctgccatccgaaacaggcattccgttctgctctgcaaaaatagaaagaagagatacaaataagtagaaackctgggtaaaggaggcaggttgttgtgcaggtgaatgagatactccacagaggaacaggagaaacatgaagagatgccagagrgttgtggtcttttaccaaaccttagcacagaaaytgcatgggaagataggccagggaaaaaacaaacaaacaaacaaaaaaatacagcattgctttagttcaaatttagggttgatctgtagctgacaagggtctgtaccatactgcttgtatttggtggtatgactgactatacttatgggcttctctgacttacttcctctggtgttaggaactca

SEQ ID NO: 16209 - DNA, 600 bp, Chicken  19866894223371_2
ctgtttggtgagaggcagagtgagcctcttcatcagcctagcttgactgattcgttaattgttgcgctctaaagcttgtccctttgttgcagttgtctctaatgcaaacactcctacagggaacattcaggacgagtatcccaacacctgccatccgaaacaggcattccgttctgctctgcaaaaatagaaagaagagatacaaataagtagaaackctgggtaaaggaggcaggttgttgtgcaggtgaatgagatactccacagaggaacaggagaaacatgaagagatgccagagrgttgtggtcttttaccaaaccttagcacagaaaytgcatgggaagataggccagggaaaaaacaaacaaacaaacaaaaaaatacagcattgctttagttcaaatttagggttgatctgtagctgacaagggtctgtaccatactgcttgtatttggtggtatgactgactatacttatgggcttctctgacttacttcctctggtgttaggaactcatgctgcttgacaaaggtgaatctggataaaagctttttgttctttacatgctagtcaagagagtggaattgtgagcttcaca

SEQ ID NO: 16210 - DNA, 600 bp, Chicken  19866894223371_3
agcctagcttgactgattcgttaattgttgcgctctaaagcttgtccctttgttgcagttgtctctaatgcaaacactcctacagggaacattcaggacgagtatcccaacacctgccatccgaaacaggcattccgttctgctctgcaaaaatagaaagaagagatacaaataagtagaaackctgggtaaaggaggcaggttgttgtgcaggtgaatgagatactccacagaggaacaggagaaacatgaagagatgccagagrgttgtggtcttttaccaaaccttagcacagaaaytgcatgggaagataggccagggaaaaaacaaacaaacaaacaaaaaaatacagcattgctttagttcaaatttagggttgatctgtagctgacaagggtctgtaccatactgcttgtatttggtggtatgactgactatacttatgggcttctctgacttacttcctctggtgttaggaactcatgctgcttgacaaaggtgaatctggataaaagctttttgttctttacatgctagtcaagagagtggaattgtgagcttcacattatgagtagctgttcgtacgtgtatgttacgta

SEQ ID NO: 16211 - DNA, 600 bp, Chicken  19866894223374_1
taaaccacttctaccacttaagttctggccattagtaagccattgtctccaggtttaaaccggttttggtccgacacactgaaatgaatccatccctctctggacagctttgctcaaggaagcggcagcagaatcgtttccaatacacttaatacaaatggatggaataaagatcgcggctgcaacccagaagggctctcccagacctcaccgtgctgtcacaaagctcagaatgtcagcctaaagatgcaagaaagactccatgcgtccattggggactgatgtgtgctcctccccagygcatgcggggcccacagatgacagctgctgcccttagaacwgctsggcacaacctgggcacctcccacagacaccaatgaaagcaacaagttctgctctcaagcactcagaacacagaagttctccactacttgtgatgggctgccaacccagatggctttctgggtgcawgtgataagccttgaatataaaacttagcagcaaacaaagctgggagtgcacacacagcagcgtgcagcaggcgtaggaatagttttactggtgcacaacaaaccrgaacacagcagatcygtgctgtga

SEQ ID NO: 16212 - DNA, 600 bp, Chicken  19866894223374_2
attgtctccaggtttaaaccggttttggtccgacacactgaaatgaatccatccctctctggacagctttgctcaaggaagcggcagcagaatcgtttccaatacacttaatacaaatggatggaataaagatcgcggctgcaacccagaagggctctcccagacctcaccgtgctgtcacaaagctcagaatgtcagcctaaagatgcaagaaagactccatgcgtccattggggactgatgtgtgctcctccccagygcatgcggggcccacagatgacagctgctgcccttagaacwgctsggcacaacctgggcacctcccacagacaccaatgaaagcaacaagttctgctctcaagcactcagaacacagaagttctccactacttgtgatgggctgccaacccagatggctttctgggtgcawgtgataagccttgaatataaaacttagcagcaaacaaagctgggagtgcacacacagcagcgtgcagcaggcgtaggaatagttttactggtgcacaacaaaccrgaacacagcagatcygtgctgtgaatggacmcgaactgtggctcagcacatctgcaccagggaca

SEQ ID NO: 16213 - DNA, 600 bp, Chicken  19866894223374_3
tctccaggtttaaaccggttttggtccgacacactgaaatgaatccatccctctctggacagctttgctcaaggaagcggcagcagaatcgtttccaatacacttaatacaaatggatggaataaagatcgcggctgcaacccagaagggctctcccagacctcaccgtgctgtcacaaagctcagaatgtcagcctaaagatgcaagaaagactccatgcgtccattggggactgatgtgtgctcctccccagygcatgcggggcccacagatgacagctgctgcccttagaacwgctsggcacaacctgggcacctcccacagacaccaatgaaagcaacaagttctgctctcaagcactcagaacacagaagttctccactacttgtgatgggctgccaacccagatggctttctgggtgcawgtgataagccttgaatataaaacttagcagcaaacaaagctgggagtgcacacacagcagcgtgcagcaggcgtaggaatagttttactggtgcacaacaaaccrgaacacagcagatcygtgctgtgaatggacmcgaactgtggctcagcacatctgcaccagggacacgca

SEQ ID NO: 16214 - DNA, 600 bp, Chicken  19866894223374_4
gatcgcggctgcaacccagaagggctctcccagacctcaccgtgctgtcacaaagctcagaatgtcagcctaaagatgcaagaaagactccatgcgtccattggggactgatgtgtgctcctccccagygcatgcggggcccacagatgacagctgctgcccttagaacwgctsggcacaacctgggcacctcccacagacaccaatgaaagcaacaagttctgctctcaagcactcagaacacagaagttctccactacttgtgatgggctgccaacccagatggctttctgggtgcawgtgataagccttgaatataaaacttagcagcaaacaaagctgggagtgcacacacagcagcgtgcagcaggcgtaggaatagttttactggtgcacaacaaaccrgaacacagcagatcygtgctgtgaatggacmcgaactgtggctcagcacatctgcaccagggacacgcagaaccatgggacccaatgctgckgcagacgggatcttctgagatcccatgaaacatgaatgccttcagtttacttcctctaattcttgtgagcatttcaaagctcacaaccacgtggctgcgtcag

SEQ ID NO: 16215 - DNA, 600 bp, Chicken  19866894223374_5
gactgatgtgtgctcctccccagygcatgcggggcccacagatgacagctgctgcccttagaacwgctsggcacaacctgggcacctcccacagacaccaatgaaagcaacaagttctgctctcaagcactcagaacacagaagttctccactacttgtgatgggctgccaacccagatggctttctgggtgcawgtgataagccttgaatataaaacttagcagcaaacaaagctgggagtgcacacacagcagcgtgcagcaggcgtaggaatagttttactggtgcacaacaaaccrgaacacagcagatcygtgctgtgaatggacmcgaactgtggctcagcacatctgcaccagggacacgcagaaccatgggacccaatgctgckgcagacgggatcttctgagatcccatgaaacatgaatgccttcagtttacttcctctaattcttgtgagcatttcaaagctcacaaccacgtggctgcgtcagcaaatgagtggccaggcacagctgatgggctgcagcaaggaagtcctcctgcagcagtaggtaaataagaacgagtatgaaacctaaagatcccatttactgcct

SEQ ID NO: 16216 - DNA, 600 bp, Chicken  19866894223374_6
ctccccagygcatgcggggcccacagatgacagctgctgcccttagaacwgctsggcacaacctgggcacctcccacagacaccaatgaaagcaacaagttctgctctcaagcactcagaacacagaagttctccactacttgtgatgggctgccaacccagatggctttctgggtgcawgtgataagccttgaatataaaacttagcagcaaacaaagctgggagtgcacacacagcagcgtgcagcaggcgtaggaatagttttactggtgcacaacaaaccrgaacacagcagatcygtgctgtgaatggacmcgaactgtggctcagcacatctgcaccagggacacgcagaaccatgggacccaatgctgckgcagacgggatcttctgagatcccatgaaacatgaatgccttcagtttacttcctctaattcttgtgagcatttcaaagctcacaaccacgtggctgcgtcagcaaatgagtggccaggcacagctgatgggctgcagcaaggaagtcctcctgcagcagtaggtaaataagaacgagtatgaaacctaaagatcccatttactgcctaattacagcatctgc

SEQ ID NO: 16217 - DNA, 600 bp, Chicken  19866894223374_7
gggcccacagatgacagctgctgcccttagaacwgctsggcacaacctgggcacctcccacagacaccaatgaaagcaacaagttctgctctcaagcactcagaacacagaagttctccactacttgtgatgggctgccaacccagatggctttctgggtgcawgtgataagccttgaatataaaacttagcagcaaacaaagctgggagtgcacacacagcagcgtgcagcaggcgtaggaatagttttactggtgcacaacaaaccrgaacacagcagatcygtgctgtgaatggacmcgaactgtggctcagcacatctgcaccagggacacgcagaaccatgggacccaatgctgckgcagacgggatcttctgagatcccatgaaacatgaatgccttcagtttacttcctctaattcttgtgagcatttcaaagctcacaaccacgtggctgcgtcagcaaatgagtggccaggcacagctgatgggctgcagcaaggaagtcctcctgcagcagtaggtaaataagaacgagtatgaaacctaaagatcccatttactgcctaattacagcatctgcaaagagttccaggttt

SEQ ID NO: 16218 - DNA, 600 bp, Chicken  19866894223374_8
agacaccaatgaaagcaacaagttctgctctcaagcactcagaacacagaagttctccactacttgtgatgggctgccaacccagatggctttctgggtgcawgtgataagccttgaatataaaacttagcagcaaacaaagctgggagtgcacacacagcagcgtgcagcaggcgtaggaatagttttactggtgcacaacaaaccrgaacacagcagatcygtgctgtgaatggacmcgaactgtggctcagcacatctgcaccagggacacgcagaaccatgggacccaatgctgckgcagacgggatcttctgagatcccatgaaacatgaatgccttcagtttacttcctctaattcttgtgagcatttcaaagctcacaaccacgtggctgcgtcagcaaatgagtggccaggcacagctgatgggctgcagcaaggaagtcctcctgcagcagtaggtaaataagaacgagtatgaaacctaaagatcccatttactgcctaattacagcatctgcaaagagttccaggtttgcagcataaaccaaactgagcaagaaatcactactgttgatgtcgggatgcgtgcagcagc

SEQ ID NO: 16219 - DNA, 599 bp, Chicken  19866894223381_1
  misc_feature (1)..(132): n is any nucleotide
nnnnnnnnnnnnnnnnnnnnnnnnnnnnnnnnnnnnnnnnnnnnnnnnnnnnnnnnnnnnnnnnnnnnnnnnnnnnnnnnnnnnnnnnnnnnnnnnnnnnnnnnnnnnnnnnnnnnnnnnnnnnnnnnnnnncccatctttacctttcacactcctcactgcatcactgccagcctgctacacacatcaaagacagctgcatgaagatcttgttcctcatctcagacacaggcgtccctttctaccaacatcagccaggacagagctttgtaaaaacccatcttgtggtgcactgccctyctamcataaagcaattctctgctcacagacttacaatcaccaccctcctgtgtcccagtactacacatgcccgcttcctgagcgtctcacccacgggccataccatcaccccccacacatctgcctttgctcgcagacagcacagctccatggagccaatcagtgcaagttatgctttatctaacaagaaaggaaagctctcattgcacatttttcttcttctaccttacagtctcatctgaaggaagatactctgctcttcctaattaaagtcctgagtactttggatgtttctaatc

SEQ ID NO: 16220 - DNA, 599 bp, Chicken  19866894223381_2
  misc_feature (1)..(128): n is any nucleotide
nnnnnnnnnnnnnnnnnnnnnnnnnnnnnnnnnnnnnnnnnnnnnnnnnnnnnnnnnnnnnnnnnnnnnnnnnnnnnnnnnnnnnnnnnnnnnnnnnnnnnnnnnnnnnnnnnnnnnnnnnnnnnnnncccatctttacctttcacactcctcactgcatcactgccagcctgctacacacatcaaagacagctgcatgaagatcttgttcctcatctcagacacaggcgtccctttctaccaacatcagccaggacagagctttgtaaaaacccatcttgtggtgcactgccctyctamcataaagcaattctctgctcacagacttacaatcaccaccctcctgtgtcccagtactacacatgcccgcttcctgagcgtctcacccacgggccataccatcaccccccacacatctgcctttgctcgcagacagcacagctccatggagccaatcagtgcaagttatgctttatctaacaagaaaggaaagctctcattgcacatttttcttcttctaccttacagtctcatctgaaggaagatactctgctcttcctaattaaagtcctgagtactttggatgtttctaatccttc

SEQ ID NO: 16221 - DNA, 600 bp, Chicken  19866894223384_1
catcaggagagagggctgatgcaggctgaggcttttatttctcattgttgggtggatttttttttttttttttttctggctattcatcagaaagaggcagctgaagtagttcccttccccctctcccacatacatcagcctgcaccatttattcttccagtggagcagcgattcacaaccatggatgaagcaaagtgtcgctaaacctcaggttaattaatttcagtattccttactggatttcagtattaactgttttgaaaaaattagtcaagcaaacttctaacaaatgttttcctyggggactacaacccccatttactccctagcatgctgcaaacatctattgctttaagctgctcttcttttagacatcaatcaactaaatttggtcttagtacaatacagccaaacaattcagcttggtctttcatgcctgaactaattctgctgtcgcagctggtttttgtggcagtttacatgtgccctgtgtccacatgcaaagacaatgagcttctgtcacaacttattagtgttcaagcccagaacttgtgatgacagctacaaactgtctcagtgcaaaaccaagcgttaatgaaa

SEQ ID NO: 16222 - DNA, 596 bp, Chicken  19866894223385_1
ggtgttttcctggggtgctttccatcagctggcagaaaggtatcgtttttccagcagaaagaaaatgcaaaagtatgcacaaagtacaagtacccaggcccagctggagccagagatgttggtccatggctgaacgtctctggcccaagcctaaaatctaagtttctagactactttttattttgccttttttttcatgttacagtccgggtaggacattgttcttactaacaagcttattacatggtgaatccccatgaacatgctattcccaatttactaggaagagcaaaactgaartctgtctgtccattcctactaaggctgtgacccttaagctgcatttcttaggcataaggttattcgtgagtatctatttatttgcatctggaagtgtctgtgctggcaggtgactgctactcagtgccttttcactcgaatttggtagtccccatttgttcaggtttctttgtcaaaaggcacacagtgaaaattcccctctcagcgagtagctcaaggcataccttgtaaactggaggcgtgttgtgcacttagatgaggtgcctcttgccctcatttgcacagcactaaccagg

SEQ ID NO: 16223 - DNA, 600 bp, Chicken  19866894223386_1
catcctcaacaagccctgagcatagttacagacacatatcccacagagacccaaaggacaccaagaatggaaggagaaaatgaagacaactgctctcccttttttaaaaacattctgagcacatgaaaatgtgtacccttaaactagatttgtggtagctgcttgaaaaatgcatataaaattctccatgtgagagaaagcactttaataaagaaatattgcattgttgaactcactgtccccaaacgaacaacgtggagagttcttgcatttaaggaaaacagaaatgtggtgaccccrttgcccagtggtaaattcagcaattgaaggagttgaagcacatccctgattttgtacccaaatcccagaaggcagcgagcagagcagcacatcctgtggatatgtcttggagataggtatgtgactgctgctgtgctgtaagtcggggcacagcaatgcattgtgcttagcattttgctcctgggtctgctttccactcgactctggtcatatatacacacgtcaagaaagtatatgaatataaccatatcacattttatttctaatgtatactagagactttgtttcacgcattgcagt

SEQ ID NO: 16224 - DNA, 600 bp, Chicken  19866894223386_2
agcaagggattttctgtaacaaactgggggaggaggtattacacctagattatgttactgttcagggaggaagttgataactgcacaaggaaactttcttcttggtattgctagaaagatgcccaagatgcagtattacccctgaggaccgcaaactattcaggaccacgcgtagctctgctatgaattattctctgtaaatatctactatatttaaccaaaagaaaaacctgaaatgggaaaaaaaagagcagcatacaacatatttgccagcagccatgggaaataggaaccaaaaawaaaaaaattaacccagagccaagtaatagattgctaattaagttcttgtgtttatttaccgaatagatgataagttaaccaatatatgcctgacctttttagtcatatttctagctaggaaagtcatggctattaactgctaccagggtgccatgggattcgtgttcagaggcttccttttcactttgttgttgtagcctctcatcttttactgacattacacaccactcatcacgatcagtgtcagaagctataacagcatctgttgcagtggcagcttctgctggatgaagagtctcc

SEQ ID NO: 16225 - DNA, 600 bp, Chicken  19866894223386_3
ttgttgtagcctctcatcttttactgacattacacaccactcatcacgatcagtgtcagaagctataacagcatctgttgcagtggcagcttctgctggatgaagagtctccctctttaccttaaatagtgtcaatcatttttcattttcagcattcagacttgctcatcaggtagtaacaacacttccagctacaccaaacgtgatttttgaataaacactggactgagatcattggaaatgattgacagcttataaaccatgcttttcagaaaccagcaaggaaagggaaaaaaaaayaataaaaaaatatttccctccttctaatgtttcactgtcatttgaaagagcttctacctgagggggtggtggacagaaacttgatttgtgacatgtgaaggccttgcaggtggcttataggatcccctgcccccttcctgtgtgaagccacactggagagaagggtagcatcagcagttacataatgatcttcattttccttaattatcaggcacctaagtatccagttaagttagtccctatagagtagctgatattcattattcttagcacaactatcctctcgtaagcattgtctgt

SEQ ID NO: 16226 - DNA, 600 bp, Chicken  19866894223389_1
tatagcagaaagtcgctgcctcaggtcaggtcagaaaaatacagctctatttgttgccaagttccctgatcagtattggatatttcccctgtgtactagcaagccagtgcagcaggaaaggggagcgaagttgtagtgaacagctcactgctctgagagagttcatggcaaacaaacaaccctgagctgggaaggaagagaccattcccactctttcaccactccttttcccacccttctcaggcattcagggttggctctctgagaagacagctgcccaggaccaaggcactggcagtyagagatcactaagtaacagatgtagtcgagggaccatgctagcaagctaccagcaatatagtagaggtaagagcccatgttcctgtgcctgatggctcattttwtaagcaaagttaccgctgaatattggtacctaaaaaaatgaaaaacactaagggagaagggattactccaaggcacacacctctggtgatacagcaaggcactaactcaaatcgtatggaactgttgccatgtcctgttgccatggagagatagtaagcaggggagcaaaaccaagaattcagctccaggacctgg

SEQ ID NO: 16227 - DNA, 600 bp, Chicken  19866894223389_2
cagtgcagcaggaaaggggagcgaagttgtagtgaacagctcactgctctgagagagttcatggcaaacaaacaaccctgagctgggaaggaagagaccattcccactctttcaccactccttttcccacccttctcaggcattcagggttggctctctgagaagacagctgcccaggaccaaggcactggcagtyagagatcactaagtaacagatgtagtcgagggaccatgctagcaagctaccagcaatatagtagaggtaagagcccatgttcctgtgcctgatggctcattttwtaagcaaagttaccgctgaatattggtacctaaaaaaatgaaaaacactaagggagaagggattactccaaggcacacacctctggtgatacagcaaggcactaactcaaatcgtatggaactgttgccatgtcctgttgccatggagagatagtaagcaggggagcaaaaccaagaattcagctccaggacctggaggtagaattaagaatgcttacagtctcagtaaagaaaaaataagtgtattagcacattcatgaaggaagatgttaatggtctgctgagctctcacctcctttg

SEQ ID NO: 16228 - DNA, 600 bp, Chicken  19866894223389_3
tccaaggcacacacctctggtgatacagcaaggcactaactcaaatcgtatggaactgttgccatgtcctgttgccatggagagatagtaagcaggggagcaaaaccaagaattcagctccaggacctggaggtagaattaagaatgcttacagtctcagtaaagaaaaaataagtgtattagcacattcatgaaggaagatgttaatggtctgctgagctctcacctcctttgcacagaaattattttgaagggttatcctagtacaaagcaactgcagagatctgacttgggttgttyatagacattgttgatgttaccttatatgctggtgatagtacctatatgcatatgttcacgtcttgatgtgtacatatkcattccatggtgactttctgagcctggcaaccagtaccttaagcacagtgtacaaaaggattcctaaagaaatcctgggaggctttgctatgtggaagatctactgaaagctttacagtgctcgcagtataagcaaaaacatcaggggtatcagagactggtgggggagacagctgatggtctgcactatgattttctgcaaagcgatggaggatattaatg

SEQ ID NO: 16229 - DNA, 600 bp, Chicken  19866894223389_4
ggagagatagtaagcaggggagcaaaaccaagaattcagctccaggacctggaggtagaattaagaatgcttacagtctcagtaaagaaaaaataagtgtattagcacattcatgaaggaagatgttaatggtctgctgagctctcacctcctttgcacagaaattattttgaagggttatcctagtacaaagcaactgcagagatctgacttgggttgttyatagacattgttgatgttaccttatatgctggtgatagtacctatatgcatatgttcacgtcttgatgtgtacatatkcattccatggtgactttctgagcctggcaaccagtaccttaagcacagtgtacaaaaggattcctaaagaaatcctgggaggctttgctatgtggaagatctactgaaagctttacagtgctcgcagtataagcaaaaacatcaggggtatcagagactggtgggggagacagctgatggtctgcactatgattttctgcaaagcgatggaggatattaatgagcaagaaacattcctctgatgggtgaaactgaattgtagcctgagtgaaaaagtttgaactgagtttcattaaaatc

SEQ ID NO: 16230 - DNA, 600 bp, Chicken  19866894223397_1
gaaatgctttgcctctcagactgtcactgaccttggcttctctttcagcatctatgacgcctcctgtttgctcttgcagtagcgcataagctctctgcagggcctgatattcctttgtcagctgtcgaaaccgcagctccgattcttctgcagctaaactctgaggaaggagaaaggacacacctaaccactagacagcacagcactgccaaagcaaagaatacaagtgtaaggtattaaacacattagttagtttacagatcttgatttaaaacagcttttatggtgatcctgctgtartgagaagtaataaggatgtagaattaatagaatgtttatatatatttttagctaaaagttcattttcttgagagatgagagaaaaaagtcacctcagactgcaacgaagtcatagctgtacactctatggactagagtttgatataacttctcagtatttgagcatacgaaaatgaggccaaatttaatgaagaacttgccatccaatatacagcaataaaaccctggtcacttgctttagaagtcaaaatcatctgaaaatttgtccttgcctggggaaattgagtcagatcttacctc

SEQ ID NO: 16231 - DNA, 600 bp, Chicken  19866894223399_1
cactacagaacagaaaggtttgggctgtatctttgctagctgctgctcaggcatgtgcttttcccagctcaccagtccctttctgattagtaaacagagcagcaactggtaaacatggcttaagatactacctacatgtgccaaacaattttctgttattaaatatcaaaagcaaaagtttgttttctaacaagttgagggtatggtctgcatgaggagaaagaaactgaatcagaattattgattccacactgcattaaaaagacattacatggtttttaaatgtcatggacaacatcyctgcatctacctgatgcatttattcaactctttcaagtgagccctgctatatatagtatatactcgtatgttttctgtagccataaaagaaacacaacaaaatgccttgacatccccagatctgaggtgattgcttgtgtgaaaactcctttgcagagacctcagctgggaaactagctggaatttggctccctccaccttctgtgttgttgttgccttcctgtacaacagatgcagctgcagaagttggtttctctgaagagtcttttgaaataccaagacttaagtaggatttgacta

SEQ ID NO: 16232 - DNA, 600 bp, Chicken  19866894223401_1
atgtaagcagttccgtgtttcattttgctttattctttcagtactaatcttgctgtgggttattcacctgcactaaggcagctgtgcttgttcaaatgagaattgccagtgatgagacaacgtgggtgtgatgaaacaaacatcaaataggatcagagaggggccttacacaatcgtttacatcatttgtaagaatagaatacatttttagattttttttaattacaaaaagtatatattatttatattttgggtaactgggaattttatcactattttccactttgaacttcagcttcmcaactccaaccatccaaatagaaacatcgacagaactcgtaaatctccaaacagggattcagaactattttccccctcccttcttattgttgtgagaacaggacaacgaacaacacttttccttaagaagttcattaatttagaagtcattcagcaaagcaattagcatcaaggaagggggaaggaagctttcgccattgtgcccaagtaccaaataaacaaccaaaaagtgctcacttctctatctgcaaactaaaacgtctctttggctactctccttcactctgctatttcaacagg

SEQ ID NO: 16233 - DNA, 600 bp, Chicken  19866894223403_1
cgctgctgggaggggcatcttcgccacaggatctgcaactgcacagtggagcaccacctctgtgtgccaaacttcagcctgaagaagagctgaattactgattccctactgataaatgaaggggggattagagcattatgcctgaggagacaaattgctgtattatcaaaaatgcacacaacaatcaatttgtcattcaaagcaagttggtttggatttcgaccaaacatgccaggcaatcagagctctttaaggaggaagcagtcattgctcttgctcttaagaacaaaccactttggyatcatattagcccacggcctaagctttctatcacttaactctaacatgaacamagaatataaaactcctttttcatttgcagtaggagcttatctatgaaatgtacactgctccaactgataaacactttatgagaacaagacttcatcgttgtctttggaagattctcattgatttttgttacatcttgtcagctttttcactgaaaaacttctacatgccaatagaaacaaaatatgaaaacaaaactgaccatactgtatatattttttaatgtcttaagtaaaatcaagccaaaac

SEQ ID NO: 16234 - DNA, 600 bp, Chicken  19866894223403_2
ccacctctgtgtgccaaacttcagcctgaagaagagctgaattactgattccctactgataaatgaaggggggattagagcattatgcctgaggagacaaattgctgtattatcaaaaatgcacacaacaatcaatttgtcattcaaagcaagttggtttggatttcgaccaaacatgccaggcaatcagagctctttaaggaggaagcagtcattgctcttgctcttaagaacaaaccactttggyatcatattagcccacggcctaagctttctatcacttaactctaacatgaacamagaatataaaactcctttttcatttgcagtaggagcttatctatgaaatgtacactgctccaactgataaacactttatgagaacaagacttcatcgttgtctttggaagattctcattgatttttgttacatcttgtcagctttttcactgaaaaacttctacatgccaatagaaacaaaatatgaaaacaaaactgaccatactgtatatattttttaatgtcttaagtaaaatcaagccaaaacaagtcattttttcacacatgcttctatgtaaaaaatctagatccaacatgcct

SEQ ID NO: 16235 - DNA, 600 bp, Chicken  19866894223406_1
aactgtcatcttcctgtgtttccagacattttacaataggaaacaaagaacaaaaccccacaacaatagctcagaggtacgaattgcctcattcatcccagtggaatgtccaaaaacattaactattttttgactacttcagcagaaaagaggctgccagacagcaagcctggacctgagccaccagagattgagcacgggacagactccctgcttctcagcataggaaagtaatagctcccctgaaaggcagcagatatccatagtgatggcagaaggagaggaattctgacacagctyaatgcaagctgctgytttctgttccatatacaggcagttaggccttgctctgaaatagtaagtggtttattttgtccaattctttggctcgcaatggcctaggaggtggtaggtgctggacaacrctcttgccagcgtaatcaattaattagcaattactatacactcaaacctactgtgaactaacagagctactgtagtcctttgggtttgaacaggaaagacctgggacattagcgtgggttgctttaatttctagtttaacaccccgtgagcaggaaagacaaggtcagcaccaga

SEQ ID NO: 16236 - DNA, 600 bp, Chicken  19866894223406_2
gtgtttccagacattttacaataggaaacaaagaacaaaaccccacaacaatagctcagaggtacgaattgcctcattcatcccagtggaatgtccaaaaacattaactattttttgactacttcagcagaaaagaggctgccagacagcaagcctggacctgagccaccagagattgagcacgggacagactccctgcttctcagcataggaaagtaatagctcccctgaaaggcagcagatatccatagtgatggcagaaggagaggaattctgacacagctyaatgcaagctgctgytttctgttccatatacaggcagttaggccttgctctgaaatagtaagtggtttattttgtccaattctttggctcgcaatggcctaggaggtggtaggtgctggacaacrctcttgccagcgtaatcaattaattagcaattactatacactcaaacctactgtgaactaacagagctactgtagtcctttgggtttgaacaggaaagacctgggacattagcgtgggttgctttaatttctagtttaacaccccgtgagcaggaaagacaaggtcagcaccagaggctgaacttctgtt

SEQ ID NO: 16237 - DNA, 600 bp, Chicken  19866894223406_3
ttttttgactacttcagcagaaaagaggctgccagacagcaagcctggacctgagccaccagagattgagcacgggacagactccctgcttctcagcataggaaagtaatagctcccctgaaaggcagcagatatccatagtgatggcagaaggagaggaattctgacacagctyaatgcaagctgctgytttctgttccatatacaggcagttaggccttgctctgaaatagtaagtggtttattttgtccaattctttggctcgcaatggcctaggaggtggtaggtgctggacaacrctcttgccagcgtaatcaattaattagcaattactatacactcaaacctactgtgaactaacagagctactgtagtcctttgggtttgaacaggaaagacctgggacattagcgtgggttgctttaatttctagtttaacaccccgtgagcaggaaagacaaggtcagcaccagaggctgaacttctgttgagacaatgccatcattaacacagatctgaacaaactttgttttaaatgcaaagcatgttgatgtagcagagccagggcaaaaacagatggctccgctgtcattcagccc

SEQ ID NO: 16238 - DNA, 600 bp, Chicken  19866894223411_1
gaaaggattcacatcggggaaatgtcttatcaggatcaccttctgaatctgaattctatatccaacacttctgaagacaaataatatctttgtgttaaccatagggttcttgagtttcatgtagtagattccactttttttttcctcattcagtatttttttcaaaaaattctaggttttagccaacggacgcagctgtaaatactgcattgggaaaatacatcagaataacttctccagcatagcgaagatttccatttccaagttttaaggagtcaaatttcagcttcaaaatacccmaaaattatattctttaatcactgcagaaatatcaaaatatttaatcatgaccagaagatagtaaccttctttcaaaataggactgtaaatgaatttcagcaccttttgcagtactttcttctgtggtattcaaactgctgaaacattattattagtaatattaataattcacactatgttattgctgaatctacttcaaacttcaccactaaaccctcttcaatttttgaatgaagtcatagcctgagaactactttctccctaaaataaaaggtgcttaaaatattttaaagctaccaa

SEQ ID NO: 16239 - DNA, 600 bp, Chicken  19866894223415_1
gaagattaaaagtaaagcaaattgaaaaagtaccgaatgactttctgtaagcttggttaactgttagaacatgttcttgtggtgagagttcacaatgattgctgacaggctgagcattgccaagagcaatgttgataacgggcgtgaacctgaactggttctgagatgggactgtcagaagaagaaaaagtattgctctgaatttattttttaaacagaatgcagtcagtttgaggagcctttcctctcagaacttggaatggaaactgctcttcttccttgactttccttcagaagtayctayaattgaggcacattttctatcgctttcaatgatgtagggccagctgagagtacaaatcagtagtgcctggtgcataactttgaataggtcgtgtatgtcccatcaattgtcttgtgatttagttgtgaaacttaagtatttgtttttatttgagttaaaaaaaaaacaacgttcaaaaagctaatttgtttctttaatgttctgatctaaagatgcatctaaattctgaaaatatctacctcttcgtgagagaaattagtcttagagaaaataagctacatgggaataatggccct

SEQ ID NO: 16240 - DNA, 600 bp, Chicken  19866894223415_2
attaaaagtaaagcaaattgaaaaagtaccgaatgactttctgtaagcttggttaactgttagaacatgttcttgtggtgagagttcacaatgattgctgacaggctgagcattgccaagagcaatgttgataacgggcgtgaacctgaactggttctgagatgggactgtcagaagaagaaaaagtattgctctgaatttattttttaaacagaatgcagtcagtttgaggagcctttcctctcagaacttggaatggaaactgctcttcttccttgactttccttcagaagtayctayaattgaggcacattttctatcgctttcaatgatgtagggccagctgagagtacaaatcagtagtgcctggtgcataactttgaataggtcgtgtatgtcccatcaattgtcttgtgatttagttgtgaaacttaagtatttgtttttatttgagttaaaaaaaaaacaacgttcaaaaagctaatttgtttctttaatgttctgatctaaagatgcatctaaattctgaaaatatctacctcttcgtgagagaaattagtcttagagaaaataagctacatgggaataatggccctcatt

SEQ ID NO: 16241 - DNA, 600 bp, Chicken  19866894223415_3
tgagatgggactgtcagaagaagaaaaagtattgctctgaatttattttttaaacagaatgcagtcagtttgaggagcctttcctctcagaacttggaatggaaactgctcttcttccttgactttccttcagaagtayctayaattgaggcacattttctatcgctttcaatgatgtagggccagctgagagtacaaatcagtagtgcctggtgcataactttgaataggtcgtgtatgtcccatcaattgtcttgtgatttagttgtgaaacttaagtatttgtttttatttgagttyaaaaaaaaacaacgttcaaaaagctaatttgtttctttaatgttctgatctaaagatgcatctaaattctgaaaatatctacctcttcgtgagagaaattagtcttagagaaaataagctacatgggaataatggccctcattcacagggaccaaattggatagcagccagtcggtatgtgtgtacagaagtgtttagctcccagtgtaacagcactgtaagcactgtggtttcctcagctaagaggtaggacttctggcttgctgtgttttctcgctcatccttacagcaagttcagga

SEQ ID NO: 16242 - DNA, 600 bp, Chicken  19866894223422_1
aggccctaagagccgaggagaaatggagcatgctataaagaaaaaaaatgcatccagatgatgaatttagctacacagctttacaatcaattctcccattgaaggaaaaagctttccagatatgtctttgggattcctgggcagcccacaggaaagaacaaagcagaaactgtctctggatagtatcctgcaaatgctatgttaagtgcagtatctacaggacagtgccaggtggttactcctatcctctgttggtttttttttttcagatagaggactgggattatctcaagatcccartaarttgtacagtcacatatggaattatttttttccaagatactgatagacacctgcaaattgtccgtgttaaaagaactctggctctgaaagatgcaaaaaagtgcgtacctcagagatcactcttcaccaaacctgccatattttgtcatcttgtcactgttctgcatgcaaagcagtcttcctatatgaaaggaagactaccatcaatggtagatcagaggcaaaatgaagcacaggaagctggaagaactacaagamcaggaaagaagaatagtttcagaccaaattcacacttac

SEQ ID NO: 16243 - DNA, 600 bp, Chicken  19866894223422_2
cctaagagccgaggagaaatggagcatgctataaagaaaaaaaatgcatccagatgatgaatttagctacacagctttacaatcaattctcccattgaaggaaaaagctttccagatatgtctttgggattcctgggcagcccacaggaaagaacaaagcagaaactgtctctggatagtatcctgcaaatgctatgttaagtgcagtatctacaggacagtgccaggtggttactcctatcctctgttggtttttttttttcagatagaggactgggattatctcaagatcccartaarttgtacagtcacatatggaattatttttttccaagatactgatagacacctgcaaattgtccgtgttaaaagaactctggctctgaaagatgcaaaaaagtgcgtacctcagagatcactcttcaccaaacctgccatattttgtcatcttgtcactgttctgcatgcaaagcagtcttcctatatgaaaggaagactaccatcaatggtagatcagaggcaaaatgaagcacaggaagctggaagaactacaagamcaggaaagaagaatagtttcagaccaaattcacacttacataa

SEQ ID NO: 16244 - DNA, 600 bp, Chicken  19866894223422_3
tttttcagatagaggactgggattatctcaagatcccartaarttgtacagtcacatatggaattatttttttccaagatactgatagacacctgcaaattgtccgtgttaaaagaactctggctctgaaagatgcaaaaaagtgcgtacctcagagatcactcttcaccaaacctgccatattttgtcatcttgtcactgttctgcatgcaaagcagtcttcctatatgaaaggaagactaccatcaatggtagatcagaggcaaaatgaagcacaggaagctggaagaactacaagamcaggaaagaagaatagtttcagaccaaattcacacttacataaatctcagtacacactcccaagtcccagctcattaagatgaaaatgtagctcccaattctttccatatgttccaaacaaaatgttatgaatgaaacatggatcttcgtcccagttgttcccttccagtgcattccacccagctctggattaactygcttagctcttagttcagtctcatctgcttggtcaagagcaaagcagggagctgtgccagcaaaggcgttgtgcttttccttgctaaacgaatgggtgcgagg

SEQ ID NO: 16245 - DNA, 600 bp, Chicken  19866894223422_4
actgttctgcatgcaaagcagtcttcctatatgaaaggaagactaccatcaatggtagatcagaggcaaaatgaagcacaggaagctggaagaactacaagamcaggaaagaagaatagtttcagaccaaattcacacttacataaatctcagtacacactcccaagtcccagctcattaagatgaaaatgtagctcccaattctttccatatgttccaaacaaaatgttatgaatgaaacatggatcttcgtcccagttgttcccttccagtgcattccacccagctctggattaactygcttagctcttagttcagtctcatctgcttggtcaagagcaaagcagggagctgtgccagcaaaggcgttgtgcttttccttgctaaacgaatgggtgcgaggtcgacagcaacacgtgctgggaagctcagacaccaaacatgtgcttttctccagcagaaagacagagggaggggatgtgtggaatagagccgcgtggttcctttcctttatgagatgagggcttccagaagagaaatgcatttcaacagaagggaggcacagcagccttctggatgctctaatttatttctaatagt

SEQ ID NO: 16246 - DNA, 515 bp, Chicken  19866894223423_1
cttcatcttaattaaagcctgagagtctagcccgagataattgtttcgtctcttcctgtactccacagaggaggtaaacatctccagaagatgattcatgttaacagcctatctggaaagaatgacttcttggaggtcctccggctctaaataaagagatttagataaccaggtggtttgcatgcctggctctcaggtaactgaagctgaacctcacccctcatttcccttgtgctcttgccttacaggatttgtgccttcatgcgtcgaggcctctgtttctgtagcatgaagatgttsatgtacgcacagcgtgttgagtttggccacttaaacttcacgttccttgatcaccaccaaaaaaaaaaaaaaaaacctacaaaaaaaacaaacccacacaaaccaatagagtgtgaaataagatgaaacagggagaacaataagcaaaacggggactgggaagagtgagaggaacatggtaagaatgggaaagaagatggttagagcacgctcat

SEQ ID NO: 16247 - DNA, 600 bp, Chicken  19866894223426_1
gtctcattcttctttccccagtctgtcataaacgcacgcagagagccataaaatgggtcagatgacatgttgccccattctcttatcattaaaaagagtcatcctctatgatatttagactgcctcttagattccacttaaatcaccatttagactgctgatgagtggcattcctcagatgttggtgctggaaccagtgctatttaacatctttgtaggtgtcatggatagtgagattgagtgcatgctcagaaaggttgcagataacaccaagctgagtggaacagttgatgccctagrgggaagggataccatccacagggatctggacaggcttgagagaagggcagcaaagtcaagtgcaaggtcctccacctggrtcagagcaattccaagcacaaatacaggctgggtrgagaatggcttgagagcagctctgaggagaaggatttgggagtgctggttgatgaaatactcaacatgagatggctgagtgcgcttgcagcccagaaggtcaaccgtatcctgggttgcgtcaagaaaagcatggccagtaggtcgagggaagtgattctgcccctctgctctcatgagacccta

SEQ ID NO: 16248 - DNA, 579 bp, Chicken  19866894223426_2
tcttatcattaaaaagagtcatcctctatgatatttagactgcctcttagattccacttaaatcaccatttagactgctgatgagtggcattcctcagatgttggtgctggaaccagtgctatttaacatctttgtaggtgtcatggatagtgagattgagtgcatgctcagaaaggttgcagataacaccaagctgagtggaacagttgatgccctagrgggaagggataccatccacagggatctggacaggcttgagagaagggcagcaaagtcaagtgcaaggtcctccacctggrtcagagcaattccaagcacaaatacaggctgggtrgagaatggcttgagagcagctctgaggagaaggatttgggagtgctggttgatgaaatactcaacatgagatggctgagtgcgcttgcagcccagaaggtcaaccgtatcctgggttgcgtcaagaaaagcatggccagtaggtcgagggaagtgattctgcccctctgctctcatgagaccctacctggagtactgtgtccagttctggggctctcaacacaagaaggacatggagctgttga

SEQ ID NO: 16249 - DNA, 544 bp, Chicken  19866894223426_3
tagactgcctcttagattccacttaaatcaccatttagactgctgatgagtggcattcctcagatgttggtgctggaaccagtgctatttaacatctttgtaggtgtcatggatagtgagattgagtgcatgctcagaaaggttgcagataacaccaagctgagtggaacagttgatgccctagrgggaagggataccatccacagggatctggacaggcttgagagaagggcagcaaagtcaagtgcaaggtcctccacctggrtcagagcaattccaagcacaaatacaggctgggtrgagaatggcttgagagcagctctgaggagaaggatttgggagtgctggttgatgaaatactcaacatgagatggctgagtgcgcttgcagcccagaaggtcaaccgtatcctgggttgcgtcaagaaaagcatggccagtaggtcgagggaagtgattctgcccctctgctctcatgagaccctacctggagtactgtgtccagttctggggctctcaacacaagaaggacatggagctgttga

SEQ ID NO: 16250 - DNA, 600 bp, Chicken  19866894223442_1
ggaaaagggagagaggcaaaacaaaggaccaaaagcatctaagtttcagaaatggatctgcgaatatgtgacatctggtcactctctgcagcgtccctttctggctgaaaacaactgccttatgaaggatctggcacttgaatggatcttagatgattgtaatagctcctacaggatggttgcccagggaggctgtggatgccccatccctggaggcattcaaggccaggctggatgtggctctgggcagcctggtctggtggttggcgaccctgcacatagcaggggggttgaaactcratgatcattgtggtccttttcaacccaggccattctataattctacagaaacataggtgactgtttttccacataaacactacattatcactgcactgctcctgacatttttttagtggaatagaaacgttgtctttagacatgctgtgtgactgcctctgtgctgggagaacctcccatggttggtgatctgtcccgttggttcattgtcgctctcctgagtctaattgtcagagtgaaagagagtttgcttcccttcctgggcatggtgtgatacccgttgtctgctcatttccaggg

SEQ ID NO: 16251 - DNA, 599 bp, Chicken  19866894223446_1
ggaagttactaatatggcatcacatctgctttaataccggataagcccaggacaacactgccccaaaagaaggttctccactgaaccattaccccccaaggagtcctgtgtaagtagaaggctataaagactgcaagaacagcacaacatgcttttaagaacaatcgtactgcacatgaatccagcctatacagatgtgtaggagggaaagagcagttttcttctaatacattcaaaatacatcaggaaaaaagttccgaagttaaccaagtgaattggcacgtttgtttgcatacagcrttctacagaagggacacagatgaatgaagaccagtgtaatccctttggaatgagaagctggctgaaaacgaacaaaatacaaattgtttaggacaaatacagcattagagcagtgagcctaccaccaacccatggacacatgcgtctgtgacacacttctaacagttgcagctggtgcaatccagagggccagatgcttccgatgcaggcagacctcaggctgcctttgagcagattgttattcacatgggactgcaaagtggtgcgaaacccaacaaacaatagttgagggtaagaag

SEQ ID NO: 16252 - DNA, 600 bp, Chicken  19866894223468_1
gcagcattgaggaggagcaatgcagagtgacatgcttaagctgcacatattgagcagttagccaaagttgtgaagttactgtggtaagtaaaggaaaatggttgagattggtatttctactctgaatattttaaaatagaaaaataaagctttaatcagtgtgacagtttcagtcagattttgttttttatttttttttaaatatttcccaaacagatcagtctttcaagaggatagagagaatgcagaccaggggagaggttagatatgtacactaaggctttacttcagttacgtctrttcctacagagaaaaggcactaaagcacttccttaattcctctggtctaaaggctctcatcatctcttcaggcttaatccaggccctgacactgacttaaaatttcagcctcagttttcaatttttgaagattagttaatatttgtgaaacactttacttcaaatatatgatttggaaaatcttattgtaggtctrtttccctaacatgtaagtaaaataggattaaaaatttcatggctttagtttaaactgaaattatatatgcatatatatatatatactgaagaaaattcacgcat

SEQ ID NO: 16253 - DNA, 600 bp, Chicken  19866894223468_2
tttaaatatttcccaaacagatcagtctttcaagaggatagagagaatgcagaccaggggagaggttagatatgtacactaaggctttacttcagttacgtctrttcctacagagaaaaggcactaaagcacttccttaattcctctggtctaaaggctctcatcatctcttcaggcttaatccaggccctgacactgacttaaaatttcagcctcagttttcaatttttgaagattagttaatatttgtgaaacactttacttcaaatatatgatttggaaaatcttattgtaggtctrtttccctaacatgtaagtaaaataggattaaaaatttcatggctttagtttaaactgaaattatatatgcatatatatatatatactgaagaaaattcacgcatatgcttcagagcaaacaaagtttgtcatttttgtaaaataaattttcttatttatatgtgacatttttttgttaccgatctcataatagaactttttccccccctttgctcttgcaagtttttcttggaaaggcaaatcttttagtggaggggcacaggtgatgatcatctgtaacacagcaagaaactgtcaggg

SEQ ID NO: 16254 - DNA, 600 bp, Chicken  19866894223472_1
cccagggctgactgcatcctttctgtaggtgctcaatcagtggctcaggccgtgactcaacagttcccatacaacttaatgtaagtgctctgcaaggtttcccactgtagttcttaggctgagaggtcagcctccctgatgggcttgcggcagtgtttgcagaggacaaatcactccgttaccctctggtactttagtaggatgagctgcaagacttgcagaccgtttggagcctcagaaagcttggcatgagtgctacaggtgtttctggggatttgggtcattttaaaggcacgtggytgctctttactttgttatgccagttcatttggtctgttttgcttatcctcaacagtatatctgagctgcacttggtacaggttrgcaaagtacttcagagtttttctaggttctgagcatctttgctgggactttgcaagggtgttggtaataaaaaagtcccgtggtgtggatatgactttgggtggggtggtgctgcccgcagtagctcactggaaactcggatattccatgggtcaccttgtcttgggctgttgaatattgtaatgtatgtcatagactttctccaaacagaattga

SEQ ID NO: 16255 - DNA, 600 bp, Chicken  19866894223472_2
gtgctctgcaaggtttcccactgtagttcttaggctgagaggtcagcctccctgatgggcttgcggcagtgtttgcagaggacaaatcactccgttaccctctggtactttagtaggatgagctgcaagacttgcagaccgtttggagcctcagaaagcttggcatgagtgctacaggtgtttctggggatttgggtcattttaaaggcacgtggytgctctttactttgttatgccagttcatttggtctgttttgcttatcctcaacagtatatctgagctgcacttggtacaggttrgcaaagtacttcagagtttttctaggttctgagcatctttgctgggactttgcaagggtgttggtaataaaaaagtcccgtggtgtggatatgactttgggtggggtggtgctgcccgcagtagctcactggaaactcggatattccatgggtcaccttgtcttgggctgttgaatattgtaatgtatgtcatagactttctccaaacagaattgattttgagaagtgcttggcaccatggcacagttgcctcctggtgaggaagggagccctctcttcaggatggtgtttacacttcag

SEQ ID NO: 16256 - DNA, 599 bp, Chicken  19866894223474_1
  misc_feature (1)..(37): n is any nucleotide
nnnnnnnnnnnnnnnnnnnnnnnnnnnnnnnnnnnnnagctgtgtggggatggaggtggctggcgtgacccacaacaccttgcagggatgctcaggagccgctttattttctgagagctccagaatggaaactgtcagcccctgaccaatgcattggacaaagtggatgtttaacaatgagctattcccttctgccctcttacacagatctcagagttggtggcttagcctgcagcagtcaggagtcctagggcaacagaagagacttttgacccttactgcatatttagagtgtactgsaatgatgtaaascccctcttgtttctcagagcaaactgcctccttctttccccactctggctatctgtgacatccacaaaatccagatgaayatctgacagctgccttgcaccccagcgatcaggaggaaatggaggagaggggctgtcctatgttggccctttgcacaaagaaggtgggactagacaytgccaccaaggtgttgtatcgtgaggaccagaagcctctcgttatggcagccccaggatgctacaccgatggcggcctggttttacgacttctccactttacctcattaa

SEQ ID NO: 16257 - DNA, 599 bp, Chicken  19866894223474_2
  misc_feature (1)..(25): n is any nucleotide
nnnnnnnnnnnnnnnnnnnnnnnnnagctgtgtggggatggaggtggctggcgtgacccacaacaccttgcagggatgctcaggagccgctttattttctgagagctccagaatggaaactgtcagcccctgaccaatgcattggacaaagtggatgtttaacaatgagctattcccttctgccctcttacacagatctcagagttggtggcttagcctgcagcagtcaggagtcctagggcaacagaagagacttttgacccttactgcatatttagagtgtactgsaatgatgtaaascccctcttgtttctcagagcaaactgcctccttctttccccactctggctatctgtgacatccacaaaatccagatgaayatctgacagctgccttgcaccccagcgatcaggaggaaatggaggagaggggctgtcctatgttggccctttgcacaaagaaggtgggactagacaytgccaccaaggtgttgtatcgtgaggaccagaagcctctcgttatggcagccccaggatgctacaccgatggcggcctggttttacgacttctccactttacctcattaaaggcagaagaga

SEQ ID NO: 16258 - DNA, 600 bp, Chicken  19866894223474_3
caggagccgctttattttctgagagctccagaatggaaactgtcagcccctgaccaatgcattggacaaagtggatgtttaacaatgagctattcccttctgccctcttacacagatctcagagttggtggcttagcctgcagcagtcaggagtcctagggcaacagaagagacttttgacccttactgcatatttagagtgtactgsaatgatgtaaascccctcttgtttctcagagcaaactgcctccttctttccccactctggctatctgtgacatccacaaaatccagatgaayatctgacagctgccttgcaccccagcgatcaggaggaaatggaggagaggggctgtcctatgttggccctttgcacaaagaaggtgggactagacaytgccaccaaggtgttgtatcgtgaggaccagaagcctctcgttatggcagccccaggatgctacaccgatggcggcctggttttacgacttctccactttacctcattaaaggcagaagagagagagctgcagaacgtgcagctggatcgtaaacaccaggaaggaagaaaacaagtgcataaaaaagatggggcatggagca

SEQ ID NO: 16259 - DNA, 600 bp, Chicken  19866894223474_4
ttctgccctcttacacagatctcagagttggtggcttagcctgcagcagtcaggagtcctagggcaacagaagagacttttgacccttactgcatatttagagtgtactgsaatgatgtaaascccctcttgtttctcagagcaaactgcctccttctttccccactctggctatctgtgacatccacaaaatccagatgaayatctgacagctgccttgcaccccagcgatcaggaggaaatggaggagaggggctgtcctatgttggccctttgcacaaagaaggtgggactagacaytgccaccaaggtgttgtatcgtgaggaccagaagcctctcgttatggcagccccaggatgctacaccgatggcggcctggttttacgacttctccactttacctcattaaaggcagaagagagagagctgcagaacgtgcagctggatcgtaaacaccaggaaggaagaaaacaagtgcataaaaaagatggggcatggagcatagggattttactcttcgagcactgtgatagcgcatcccatctactacactgtctgggctcactgctgttaactccaggtacgtcacagaatcatag

SEQ ID NO: 16260 - DNA, 600 bp, Chicken  19866894223480_1
aggcctgcatacaggcctttgagcaccaccattaacagtattatatcactgtgaaagctggctttatgcaaggctttctgttgagtttccagaggcaccctaaggaccttgtgattcttgtgggaacgattagcatgggaataggtactagtggtgcagtttcctacagcgttgcttttcctttgtacttcagaaaagggcctgagaaggaaagcaaggactaataggtaatgtcagtgcccagtatttgtcgctttcttcagtggtggtgtagtttaatgaaaagtataaatctggagwacactgaatgatatgtgtttgggtacatcaagcttgtcactagttgcggtacaatttgaggcttaggaagaaaaatcttgttagtggtgttttgaagatagtatttctgtatgagactatcatacagtgtcttggctttcagacagcctggttattactgtttttttaagaagttttacttatagagcaagtggaaacgacaagttctggagagttttccttgttgctaccctgtgtgctattgagtagtcattgagaatcgcattagctcggtgcagactttatgagcggtgatactgg

SEQ ID NO: 16261 - DNA, 600 bp, Chicken  19866894223481_1
tttaattggtgactgcatatttttccccctcgtgttctatcgtttctgttttatttctgcagttgtttgttccttcctctttttctgcttggaaattaatcatgcaggaagcgattaaccgcagtgagctgtctgtctgcctgtgactcagtgcgtgcgaggggtgcctggaccgcctcgaaatggctgactgcagccgagccctgcagctgcagcccagttgttcgcactgtgcatcccgtgtaaaatgtccctctttggcacttgtcacgttcctgaggaggtctctgaggtaccacraaatgcccagaacttgtgttttggtgcagtgcctcttttacatgtgggttgcttggcagggcaagggctctttgccaaatgtgacacactctgtttctctcctgagctttttgtttgtttgttttttggatgcagttagttcttatcaagatgtgttgcatatcataacatgctccatctttggcgatagctaccttaattcttgctgctgcagtaccaggatataagcctaatctttacatacagcgatgataatggacactaccgactggaaaatgcacaggaaggcaaatactaggt

SEQ ID NO: 16262 - DNA, 599 bp, Chicken  19866894223482_1
  misc_feature (1)..(101): n is any nucleotide
nnnnnnnnnnnnnnnnnnnnnnnnnnnnnnnnnnnnnnnnnnnnnnnnnnnnnnnnnnnnnnnnnnnnnnnnnnnnnnnnnnnnnnnnnnnnnnnnnnnnnttaaaaaagagagaagtgttatgcactgtgaaaggagggtcagtgttagatcagtgactcctttaaggtatagtgtattgatgcagatactacgtgtggaatagaattgtgtgacatagcattacttatcccagttacttgattcttgagaaataaggggacagtttgttggtgtgagcttcttgtggggttaaaatarggaaatatatattttgttacgcagtaagttacaaaagaaaaacaaaagaagaaggtcggaaggatgatagaaagatggcagagggtatttagcctaatactttcatgcatctcataggaagagagcgctgaaacaggttgagaagtttagacgacttcttaggccgggaaaacccagcagagatgtgcattccatccatctgaatggttcttctagtaaaaacattgctagacgcragcacggtccaggaatggcaaatgatgaatgacttagcaagctaccttgctgggtatttaatc

SEQ ID NO: 16263 - DNA, 600 bp, Chicken  19866894223482_2
tacttgattcttgagaaataaggggacagtttgttggtgtgagcttcttgtggggttaaaatarggaaatatatattttgttacgcagtaagttacaaaagaaaaacaaaagaagaaggtcggaaggatgatagaaagatggcagagggtatttagcctaatactttcatgcatctcataggaagagagcgctgaaacaggttgagaagtttagacgacttcttaggccgggaaaacccagcagagatgtgcattccatccatctgaatggttcttctagtaaaaacattgctagacgcragcacggtccaggaatggcaaatgatgaatgacttagcaagctaccttgctgggtatttaatctgtgtggttatctaaataatttgaaatgcttctcttggcctgaggcagttctgggcaaaatgaagtgccatgcgttagaccttgtgctatttcagctctaaggtcccagcaggaacccaacaagatatggcttcatgaaaggtgatactatattaaactaacagtacaagttgtatcaaactcagttccaaattcaatacaaaaagtcatgtttttagaaggcattttgaatctagc

SEQ ID NO: 16264 - DNA, 600 bp, Chicken  19866894223495_1
tatttattacaagacttccaggccgctcagaattttccatgtaaggtcacaacactcatctttactcaaggtataatgaaaactacaatggcaattttagagggcaccttgtgaaaatattctgcgaatgacatgcatactaatcaagaaaggcagggtttaaagccatgtcacaacagtactgacatttttagtgttttaaccgctattgttaatagcactttcgaaaaaggcaaaaatacctcacttagtttaaagttttaccaaagcaaaaagacatagaaatatatagcacacaakgctgcatagcctgaagactgtaaaagctttctataacctgaaagtacacagcctaacataaaaatatctgcagtaatataatacgtaattgatatggcaaaaagacacaaaatgactcaacagagggaaaaaaaatggctaacataaaccttttgaatgagaaatctgtgtatttttttctctaccttagggctttaaatcactttaaataacattttctttcaaaaaaaatcagagcatttcatagaaaagtataagcaaaaatggggaaaaagaggagtacttgttgccagttttcca

SEQ ID NO: 16265 - DNA, 600 bp, Chicken  19866894223495_2
tgtccttgtttgctttcactgttctgactgctgctagctttgcgcacttcccagcttttcaccctgaataagctcacacactcttatcttaaaacaaaacaaagcaaaacccccacacattaatgttcatattaagcagtctaaacatagctgggcagaatcaggtcacacacctaaaagggtgttgaaaaaaaaaatcaggccatattctctctatgttgacaaaaaatgaagcagtctatgcaatttttacatctaagttaaacacagggctttaattgttcaaacgtaatgtccacyttctatgtcaaagaaacttttacagaaaacaaaatcagtatctttgagatggtcaggaattacggttcatgaatactgaagaatacaaatattcccatcttcagtacagtttcaatggtgactagtgaataagttgaaaagccacatgctcaatcgtttgcttataactatttgaccaaaaagcaacagaactagtgtatgttggttttcagttaatacattttctacagtatcataacctcagttttgcacagtaccctaaatatagtctagtgtgactcatacagatgtgagctgcca

SEQ ID NO: 16266 - DNA, 600 bp, Chicken  19866894223495_3
aaagattctacaacaggataataaatttaggctatacacgtaagacattttcttcaaattcctacattttctgtgcttgtctttgtacttacaaaccatgtaactcagtgcttgttcttttttttaatatcacacatataaaaatacatatatatgacaaaaaacttatcaaaagaaatttgaatgtgcatattgaaatgaaaatatgaaatagggtaaattattgcttatctacttggttctccaaaacaaaccttgaaagacaacaaaatttccaagtaaaagaaacaaaagaataayagaactttaaaatggatgtatgtcctataacaaaaacacctactgtttcaacaagctgaaattcatcacgtagaacatcgcaactttcacatgtttttgttcttttttttccagttggcatggcctgttgatgattatcatgtctgttcataattttagacacattctttcactgatgctctaaacatgccacaaagaacagtgatgatatcctcctaatttattaaggaagctttccagtttctgacacatgcttcattaagagagttgaatcccaatccagatagatatcctttctct

SEQ ID NO: 16267 - DNA, 600 bp, Chicken  19866894223497_1
ctcaatgaggttgattgtactgatttaaaaaaaaaccccaaaccaaaactttgaacatctattttttttttctaaactcaacaaatgagagcagttctgtgatgctgagagagataatatatatatacctgcatttgtgtatatttatttctaaatgaaggcaatactacaagctgcctgcacaagcagggctgtgtcatgctgtttggccagggcaggcagcagttgggaaccagaacctatgtacttgaacttttgcttctccacagtgacagcaacacagtgtaatactgcctgttsttatcacaggccattcaaaatgtaattagtgtgtttagtcaaagcttaaatataaaaagaaaataaccatctatataaaaatatttgttgagtgtaatttttcccctggagaaataaattagccagtaagagatttcatgtggttttgtgatgtttattagctactgtgctagattgtactttagaaaatttaactgtctgcagttttgtgaagctgtagagaaacctttgaaaaatttgtgggcatatatcccaaatgacgtgtcaggaaacaataattttaaatgtatttttagcttt

SEQ ID NO: 16268 - DNA, 600 bp, Chicken  19866894223498_1
ttgccaaaggttttctgatatttgtcatgtcactttctgggaaatccttatattttaatgtacatgcattcattaaaaaaaaaaaaaaaaaagactattatattcaagtcatttatttaagtgcttaaaggcatttcttatagtcaaaataatgagagcagcagtggctgttgctctgtttttgtataattcttcctttgctgaggtattctccttgatacctgcatcagtaacctacttaggtcacatttattccacttgagtaactatcttttaagttcacgatataatgttgcagaycactagatcaaggacatcatttttccacctaatcacagcagcatctttaaatcttgagcaaaacggacaactatgcatcagcaacagttttaataatagcaaaatcagcagaaagtctgagtggggggaggaaaatcctggtcatgataaatgtagtattcatacctttcttcatggttttaaatactggtattattctaactgtggcgggggggaaatagatcttaagtaaatatctgtattgaacacaaaggtggtattttattgtttggttgttttgcagggtttggtttgttgttg

SEQ ID NO: 16269 - DNA, 599 bp, Chicken  19866894223499_1
  misc_feature (1)..(4): n is any nucleotide
nnnnaaacagccaatccccctcctgtttatatgttcccttcacgtattggaaggccacaatgaggtctccccactgccttctcttctccaagctaaacaaaatggtgcgggcctttctccagcgtggatttagtagttgtgttctgtttcttttcagctggtgtgaagttcagagtcctcgagcagcaggatggaaaacctcttcgactccttatgcaggtgagctgcgtgtgcccttggtcacacttgtgctgtaagcacccctccagctgaccccggggtcctttcacttctgaactrgtcccacagcttagtgccctttctgtaaagaccccactaaactgcctgctgctttctcatcttctgagtgccctggctggctcctctgtttggagaaaaagcagcatcttgtgtgatgtgaaatgagatgggagaaacgtgagaaacacrtcagtatcgccgcgcttcacggctgcgtgcagctgcaccttaataactgcaggacagaaggagacagctgacccatccggaatgaaggatagtcaggggctagtgaaaggttttcacctccagatgcgttggaaagccatagctgttcc

SEQ ID NO: 16270 - DNA, 468 bp, Chicken  19866894223499_2
ttttcagctggtgtgaagttcagagtcctcgagcagcaggatggaaaacctcttcgactccttatgcaggtgagctgcgtgtgcccttggtcacacttgtgctgtaagcacccctccagctgaccccggggtcctttcacttctgaactrgtcccacagcttagtgccctttctgtaaagaccccactaaactgcctgctgctttctcatcttctgagtgccctggctggctcctctgtttggagaaaaagcagcatcttgtgtgatgtgaaatgagatgggagaaacgtgagaaacacrtcagtatcgccgcgcttcacggctgcgtgcagctgcaccttaataactgcaggacagaaggagacagctgacccatccggaatgaaggatagtcaggggctagtgaaaggttttcacctccagatgcgttggaaagccatagctgttccatgaggcagtcgggacagg

SEQ ID NO: 16271 - DNA, 600 bp, Chicken  19866894223501_1
gggggaggatgggtgttctctgtgcacccaaacagatgctcactgtagtgcaggagtggtgcaggctgtggaaggacagcaccggtctggctcactttctcatgctccttgtggctaaatcttgtgttatagagtcattaaggctggcaaagaccactaagatcatctaatccaaccatcaacccatcgccaccgtatgtcagcttgtgcgggaggtggggctgggagcctgcaccccgtgtcgttatagcagcgtgctctgcagggtggggagagctgctgcactgcagcatcccgacrggccacagtgtgtgagctgctgagctgccccgttatgagggcaggtgggagtgagcagctcagcgttgttggctgggtgctctccctcccrgcgccccttatcctacacagcaccccctgggtgccccgcgatggacctcgaaggcttctcctctttctgcgactttgactgaatctctccagctgcaattaattgaacgcatctgctctaaccctggggctgctttatggcacagttacttcaaaactgttcaattagcgaccgctaaaatctaggtcgagtggagctccatattgggg

SEQ ID NO: 16272 - DNA, 600 bp, Chicken  19866894223501_2
tcactttctcatgctccttgtggctaaatcttgtgttatagagtcattaaggctggcaaagaccactaagatcatctaatccaaccatcaacccatcgccaccgtatgtcagcttgtgcgggaggtggggctgggagcctgcaccccgtgtcgttatagcagcgtgctctgcagggtggggagagctgctgcactgcagcatcccgacrggccacagtgtgtgagctgctgagctgccccgttatgagggcaggtgggagtgagcagctcagcgttgttggctgggtgctctccctcccrgcgccccttatcctacacagcaccccctgggtgccccgcgatggacctcgaaggcttctcctctttctgcgactttgactgaatctctccagctgcaattaattgaacgcatctgctctaaccctggggctgctttatggcacagttacttcaaaactgttcaattagcgaccgctaaaatctaggtcgagtggagctccatattggggattttccaggtcaggacgttttcaaaatacagcatcagcccctcattgtttggtgaggccgttgggtgcgccgtggctgtttgttggagat

SEQ ID NO: 16273 - DNA, 470 bp, Chicken  19866894223501_3
gctgcagcttggtttgtagcatgccttgcgggcacgcagagctaagtgctacaaggctcgctgtgcagtgtgggttacacggagcggtgcatgggggtggttggaaacctcggattgggggagagggaggcagaaatggaagctctggggaaggtgaaggaaaagcagctgggcagaaacaccaaggagaggtgccggggagctgaaatcttgtgccaaaagcgaggatggaaccaacgtgcagaaataagatttatccgttaagttaattgaagggcattattatagatcgtgctgttkattaataccagctgtagcactggggagatcagtagctcacccaagagcggtagcagagcggtggcagattcagaacratcgtttgagagtctcgggtcccaaacttgagcctatgtgttgttgtaatttatactgctcatggaagagagcgttgtccttgatgaaaggct

SEQ ID NO: 16274 - DNA, 393 bp, Chicken  19866894223501_4
cacggagcggtgcatgggggtggttggaaacctcggattgggggagagggaggcagaaatggaagctctggggaaggtgaaggaaaagcagctgggcagaaacaccaaggagaggtgccggggagctgaaatcttgtgccaaaagcgaggatggaaccaacgtgcagaaataagatttatccgttaagttaattgaagggcattattatagatcgtgctgttkattaataccagctgtagcactggggagatcagtagctcacccaagagcggtagcagagcggtggcagattcagaacratcgtttgagagtctcgggtcccaaacttgagcctatgtgttgttgtaatttatactgctcatggaagagagcgttgtccttgatgaaaggct

SEQ ID NO: 16275 - DNA, 600 bp, Chicken  19866894223502_1
tggagacagttagggagctcctcctccatccggactgtcataagcccacgggaccggatgggcttcattctagggtgctgagggagctggcaggggtgattgctgagctgctcttggctgtctaccagcgctcctggatagctggagaggttccagaggattggaggctggctgatgtgactcccatctacaagaagggacgtaaggaggatccagggaactacaggcttgtcagcctgacctcagtgccagggaaggtcatggaacaaatcatcctgggagagatcacatggctcgtgygtggcgtccaggggatcaggcccagacagcacaggttcatgaaaggcaggtcgtgcttgaccaacctcatctccttctatgactgggtgaccagactggtagatgaaggaaaggctgttgaggtagtctacctagacttcagcaaagcctttgacacggtctctcacagtattcttctggggaaactggctgcccatggcctggacagttttaccctccattggtaaggaactggctggagggccgtgcccaacgggtggtggtcaatggaagtaagtccagctggcgactcattacaag

SEQ ID NO: 16276 - DNA, 599 bp, Chicken  19866894223505_1
  misc_feature (1)..(120): n is any nucleotide
nnnnnnnnnnnnnnnnnnnnnnnnnnnnnnnnnnnnnnnnnnnnnnnnnnnnnnnnnnnnnnnnnnnnnnnnnnnnnnnnnnnnnnnnnnnnnnnnnnnnnnnnnnnnnnnnnnnnnnnncatattaagcagatactcaacatgaatacaaaccaataacagacttccactgttgacttttgaaatttatgggtaatttcacaaacactgcatagcaattcaaacacttcctagcaataactgattatatttcatacataaagtgaaataagcattctgtttttattttaaagaccctayttatatacctttccttatcggattcttcattagacccttcctgctctrgaaagacctgaaagtgtggcaaaaggcagaaacataaagttagcacctgatttactctaactattttcaccgagaaaaggtactagtttttcaggcaatgttgccaatttgtcattcaaagaataccatttggtacacatggctcaatgaaggtggccaatctatcttatagcacaggcatttacgctctcttgtattgtgaaagattgttgtagaggtgtgactcaagtttgtaggagagcattcaaagt

SEQ ID NO: 16277 - DNA, 599 bp, Chicken  19866894223505_2
  misc_feature (1)..(72): n is any nucleotide
nnnnnnnnnnnnnnnnnnnnnnnnnnnnnnnnnnnnnnnnnnnnnnnnnnnnnnnnnnnnnnnnnnnnnnnncatattaagcagatactcaacatgaatacaaaccaataacagacttccactgttgacttttgaaatttatgggtaatttcacaaacactgcatagcaattcaaacacttcctagcaataactgattatatttcatacataaagtgaaataagcattctgtttttattttaaagaccctayttatatacctttccttatcggattcttcattagacccttcctgctctrgaaagacctgaaagtgtggcaaaaggcagaaacataaagttagcacctgatttactctaactattttcaccgagaaaaggtactagtttttcaggcaatgttgccaatttgtcattcaaagaataccatttggtacacatggctcaatgaaggtggccaatctatcttatagcacaggcatttacgctctcttgtattgtgaaagattgttgtagaggtgtgactcaagtttgtaggagagcattcaaagtacgtaatacatactctgtagtatttgtatttatctctgtagtttttat

SEQ ID NO: 16278 - DNA, 600 bp, Chicken  19866894223506_1
tcctttttgaaaggatactgacaatagcctatgatgacagcataaagaagcaaggccagacaatgaataaactgacttcctaaaactgtcagaatttgtaattaattagtattgtatccaatcccagataactgattcagaagactgtctcactacacctgagggagttgctgagaacaataactgacacaatttttgaaacatgataaaacatattttgatgaaaatatttgcataattagtgtatgaattattcagataaggaggtgattcaccctgggacagctggcaacttaccayttggatttatctaatctaatcctgctgcatacagtgagctgctcacagagtagtccattgtttaccttttgctacagcccaaccgtttaagagaacatcatttttgaactggtttcaagtccatttccctgtcccttttctatcttgaaatttcctcctactgttttagcagtgaacccctgaagacagcagaatactgacagttaggaaagcggacgtaaatgcttttttttgtttctggtgttgaatcctgaagtattgttcccattgagaaaactttaaaaaagaagcctgcctgaa

SEQ ID NO: 16279 - DNA, 600 bp, Chicken  19866894223506_2
ctaatcctgctgcatacagtgagctgctcacagagtagtccattgtttaccttttgctacagcccaaccgtttaagagaacatcatttttgaactggtttcaagtccatttccctgtcccttttctatcttgaaatttcctcctactgttttagcagtgaacccctgaagacagcagaatactgacagttaggaaagcggacgtaaatgcttttttttgtttctggtgttgaatcctgaagtattgttcccattgagaaaactttaaaaaagaagcctgcctgaacacaagactggctcrctttctcactgtacaattttggtaactggctgttgtyctatttatcattactacaaagatatttctgtgatatatgcagaattatgaccaaaatcacacatagcagtaattgccttttaatgactatgaaaaaattatttacctcagttccaaaagttctggaaaggtatcaggaacatcaggcatcttgtaagtaaatccgttctggccaacctaaatggaagttaaaaaatgataagcagatttttaaagagtgatttgttggtagatarcttgattaagccaaaactggaggtgaat

SEQ ID NO: 16280 - DNA, 600 bp, Chicken  19866894223506_3
gtccattgtttaccttttgctacagcccaaccgtttaagagaacatcatttttgaactggtttcaagtccatttccctgtcccttttctatcttgaaatttcctcctactgttttagcagtgaacccctgaagacagcagaatactgacagttaggaaagcggacgtaaatgcttttttttgtttctggtgttgaatcctgaagtattgttcccattgagaaaactttaaaaaagaagcctgcctgaacacaagactggctcrctttctcactgtacaattttggtaactggctgttgtyctatttatcattactacaaagatatttctgtgatatatgcagaattatgaccaaaatcacacatagcagtaattgccttttaatgactatgaaaaaattatttacctcagttccaaaagttctggaaaggtatcaggaacatcaggcatcttgtaagtaaatccgttctggccaacctaaatggaagttaaaaaatgataagcagatttttaaagagtgatttgttggtagatarcttgattaagccaaaactggaggtgaatgttcaccagtaacaggtaaaataggaaaagtagacag

SEQ ID NO: 16281 - DNA, 600 bp, Chicken  19866894223506_4
aagcctgcctgaacacaagactggctcrctttctcactgtacaattttggtaactggctgttgtyctatttatcattactacaaagatatttctgtgatatatgcagaattatgaccaaaatcacacatagcagtaattgccttttaatgactatgaaaaaattatttacctcagttccaaaagttctggaaaggtatcaggaacatcaggcatcttgtaagtaaatccgttctggccaacctaaatggaagttaaaaaatgataagcagatttttaaagagtgatttgttggtagatarcttgattaagccaaaactggaggtgaatgttcaccagtaacaggtaaaataggaaaagtagacagcgactgtaatgctgtctccaaacagagaaagtctcaactcaatcatcacaacaaaatacgaayggatgtctgaggtgacatgtcaaaaaagagtcaattatgtaagaaaaaaacattgcattttgctaagtcattaatttcataagagtcaaatgacccaggaaacacacaagaggagtatagctcagggaactgaaaacagagaaaagaaaccgacattctgatttcctgtatg

SEQ ID NO: 16282 - DNA, 600 bp, Chicken  19866894223506_5
tagcagtaattgccttttaatgactatgaaaaaattatttacctcagttccaaaagttctggaaaggtatcaggaacatcaggcatcttgtaagtaaatccgttctggccaacctaaatggaagttaaaaaatgataagcagatttttaaagagtgatttgttggtagatarcttgattaagccaaaactggaggtgaatgttcaccagtaacaggtaaaataggaaaagtagacagcgactgtaatgctgtctccaaacagagaaagtctcaactcaatcatcacaacaaaatacgaayggatgtctgaggtgacatgtcaaaaaagagtcaattatgtaagaaaaaaacattgcattttgctaagtcattaatttcataagagtcaaatgacccaggaaacacacaagaggagtatagctcagggaactgaaaacagagaaaagaaaccgacattctgatttcctgtatgtccttccctcctacccctcattaaaatattatagagaaggaaaaaaaatatatataaatgtcttcaaaggtagaaattttaatttctacggaactgggaactgtgtcttctgagatgagagaagcttt

SEQ ID NO: 16283 - DNA, 600 bp, Chicken  19866894223510_1
gactacatgaaaatgttgcggaggagtatataactgaatctatattatcgggatttctggcaaaccctttaattgcacagcactgcttttgctttcagcaatgcttgttctcaactgtttgctaccagaccacagtactgtgtttattaacagaccataagaatgtgcaatactgctgaaaacagaatttcagacagtccaccctacacctcctttcttctatcaacacagaaaggtccacagggactaaggatcctgaaggctgcatccagaatctagaacaccttagaagacattcakgacatagcgcagccctttcctatgatgtcccatcaaaaggggaaattgacatgtatttcagtgcccctctaggaccaaatatctggaaaaatcacaaacatcacagaaagcagaaatagagtagggtagcatcattctttagtgtaatccttcattccaggccatctctgtgtatactagaccttgatctatactagatcttacttcaatctatactagatcatacttcgatccatgctagatcaaagtactatagtagatcctgtactaaattcattctcatctctctttactgatgtg

SEQ ID NO: 16284 - DNA, 600 bp, Chicken  19866894223512_1
atcacaacaaatagctttcactttccaaataatgatctgcacctaagttacctgcaaaaggtatctccttttatgtacttccttaatatcttcatacgcaaaaatgctgcacgttcttttgagttgacttggaccttgccttgccccccttggtatgattggctcatgcatcctgtaaatgagcataaacaggaaagtgattaaaagagatgcattgaaagaatcattcctttcattcataagagagtgcaggcatagaaagaacttgtttcacaataaaccacaccacacttagtattwtgggaacacagaggcaattgctcctgagatcttcagcaattttgacattattttgtagctgacccctcaaaaaatctcattaaatatctgctgtttgcctgctgaagaccgatgaagctctttattcattcactcactttggaggcaacgtctcaatgtcccgtatttctctggtggcagtcatggtaaatccatcaattacgtagaagtgctctttgccaaagaggagcagcccttcactagtgtcaaggccctgaacccgagcacagcggtacatatgctgaatctgaaaagaaaaca

SEQ ID NO: 16285 - DNA, 600 bp, Chicken  19866894223513_1
tggcattctggtttcaccaggagtgcccgtggtgcagcctggtgctgagctgtgctgtgagcacggctgggcaggaggtgtgaaagctgctgtctccattgggcaaaataatctcagtatggcaaatgttgataagaaattcctcgaacttctgcctggtttgactggttgtaacagcagactgttaggtgcacttcctgatttctcttatttttcttactgtatctttagttgtagactaaatcctgctctcacgatagctcagagctgcacagccttcctggcagagctgtgtctgcrgggtttgggcacccagtgctctgccatccgccttgtgtgagctggtcacttgctttgggaatgaaagagttaagaataatctgatggcagggctgaggtctgtttgaacttgtggtctcttgaaagaaaatgccattcagcaccgttgcacagagttatttcattcttaattttaattgacgtgtcccacaatgcatcctgctcatatgaatccctacagcacggagatggtttgtgagtcagtgtgtctgtaaagtgttttaaatgcaggtcgtcattaatttcccttttggtactgac

SEQ ID NO: 16286 - DNA, 600 bp, Chicken  19866894223513_2
ggtctcttgaaagaaaatgccattcagcaccgttgcacagagttatttcattcttaattttaattgacgtgtcccacaatgcatcctgctcatatgaatccctacagcacggagatggtttgtgagtcagtgtgtctgtaaagtgttttaaatgcaggtcgtcattaatttcccttttggtactgacgttctttttagttattcactcacgaggtttataaaatctgaatgaatctttccctaaataagatgttggacacctgcagggattgtggctcggtgacctggagctgctcctcycccatccctgtgtgccccccgggcygccagccagcagagaggggtgctgctgygtgggtgctgcccctgccttcggtcrggggatcccatggracagtaggaacaggaatggagttattttattcctggttgtaaaagtggcatcratgtgtcacctttattaggggaagaaaaataattgagcagaaacttgtgctggtgtggcatcaatttttcattcgtcttctgggtttaattaaaatccaattatttctgaagccagtgatagcagcagagctgtgcagctcttcagatagttgt

SEQ ID NO: 16287 - DNA, 600 bp, Chicken  19866894223513_3
agcaccgttgcacagagttatttcattcttaattttaattgacgtgtcccacaatgcatcctgctcatatgaatccctacagcacggagatggtttgtgagtcagtgtgtctgtaaagtgttttaaatgcaggtcgtcattaatttcccttttggtactgacgttctttttagttattcactcacgaggtttataaaatctgaatgaatctttccctaaataagatgttggacacctgcagggattgtggctcggtgacctggagctgctcctcycccatccctgtgtgccccccgggcygccagccagcagagaggggtgctgctgygtgggtgctgcccctgccttcggtcrggggatcccatggracagtaggaacaggaatggagttattttattcctggttgtaaaagtggcatcratgtgtcacctttattaggggaagaaaaataattgagcagaaacttgtgctggtgtggcatcaatttttcattcgtcttctgggtttaattaaaatccaattatttctgaagccagtgatagcagcagagctgtgcagctcttcagatagttgtggagagtagagaaacttccatgaaa

SEQ ID NO: 16288 - DNA, 600 bp, Chicken  19866894223513_4
ttaattttaattgacgtgtcccacaatgcatcctgctcatatgaatccctacagcacggagatggtttgtgagtcagtgtgtctgtaaagtgttttaaatgcaggtcgtcattaatttcccttttggtactgacgttctttttagttattcactcacgaggtttataaaatctgaatgaatctttccctaaataagatgttggacacctgcagggattgtggctcggtgacctggagctgctcctcycccatccctgtgtgccccccgggcygccagccagcagagaggggtgctgctgygtgggtgctgcccctgccttcggtcrggggatcccatggracagtaggaacaggaatggagttattttattcctggttgtaaaagtggcatcratgtgtcacctttattaggggaagaaaaataattgagcagaaacttgtgctggtgtggcatcaatttttcattcgtcttctgggtttaattaaaatccaattatttctgaagccagtgatagcagcagagctgtgcagctcttcagatagttgtggagagtagagaaacttccatgaaacatttttgaatattttatatctgcagga

SEQ ID NO: 16289 - DNA, 600 bp, Chicken  19866894223513_5
tgcatcctgctcatatgaatccctacagcacggagatggtttgtgagtcagtgtgtctgtaaagtgttttaaatgcaggtcgtcattaatttcccttttggtactgacgttctttttagttattcactcacgaggtttataaaatctgaatgaatctttccctaaataagatgttggacacctgcagggattgtggctcggtgacctggagctgctcctcycccatccctgtgtgccccccgggcygccagccagcagagaggggtgctgctgygtgggtgctgcccctgccttcggtcrggggatcccatggracagtaggaacaggaatggagttattttattcctggttgtaaaagtggcatcratgtgtcacctttattaggggaagaaaaataattgagcagaaacttgtgctggtgtggcatcaatttttcattcgtcttctgggtttaattaaaatccaattatttctgaagccagtgatagcagcagagctgtgcagctcttcagatagttgtggagagtagagaaacttccatgaaacatttttgaatattttatatctgcaggattgataacatacttaaaataaattgc

SEQ ID NO: 16290 - DNA, 600 bp, Chicken  19866894223513_6
atgaatccctacagcacggagatggtttgtgagtcagtgtgtctgtaaagtgttttaaatgcaggtcgtcattaatttcccttttggtactgacgttctttttagttattcactcacgaggtttataaaatctgaatgaatctttccctaaataagatgttggacacctgcagggattgtggctcggtgacctggagctgctcctcycccatccctgtgtgccccccgggcygccagccagcagagaggggtgctgctgygtgggtgctgcccctgccttcggtcrggggatcccatggracagtaggaacaggaatggagttattttattcctggttgtaaaagtggcatcratgtgtcacctttattaggggaagaaaaataattgagcagaaacttgtgctggtgtggcatcaatttttcattcgtcttctgggtttaattaaaatccaattatttctgaagccagtgatagcagcagagctgtgcagctcttcagatagttgtggagagtagagaaacttccatgaaacatttttgaatattttatatctgcaggattgataacatacttaaaataaattgcacgatagtcccata

SEQ ID NO: 16291 - DNA, 600 bp, Chicken  19866894223513_7
tttaaatgcaggtcgtcattaatttcccttttggtactgacgttctttttagttattcactcacgaggtttataaaatctgaatgaatctttccctaaataagatgttggacacctgcagggattgtggctcggtgacctggagctgctcctcycccatccctgtgtgccccccgggcygccagccagcagagaggggtgctgctgygtgggtgctgcccctgccttcggtcrggggatcccatggracagtaggaacaggaatggagttattttattcctggttgtaaaagtggcatcratgtgtcacctttattaggggaagaaaaataattgagcagaaacttgtgctggtgtggcatcaatttttcattcgtcttctgggtttaattaaaatccaattatttctgaagccagtgatagcagcagagctgtgcagctcttcagatagttgtggagagtagagaaacttccatgaaacatttttgaatattttatatctgcaggattgataacatacttaaaataaattgcacgatagtcccatattgggtttatcccagaaattaattcctgcctaggctgatgttgacttcgtaag

SEQ ID NO: 16292 - DNA, 600 bp, Chicken  19866894223521_1
catggagcgagtctgcttaagagcagttcttcatgaatcttcctgcgatgctcaaaacaaacagcagcaggctgctcagcactcacatctgcagcaccagctcccagcagctccgggtgaagagctgggaacaacctgctaaatatccccagcaggcacacatagagctcatgggtgagaacaccaacacctgtgacatctcaggtgccttgggaacagttgaaaggaaaacatatccacatggtttggcaacactcaatgctaagcctgcagatctcagtgttcaaaggtgcaaaaagyrgcagccagtcactcaaaagctgaagcaatgtatacagctttaccagagaactagtggcaatttttcttttgtgtttttctcattycaataatatcctcagtaggaattacaactgcttactttggcttttcatatacctatcagaaagttttcatagctgggagggattttggagaaacaaaacagcaaaaaacacagctaccaccttataaacatacctgctgcaatccacagacctgaggacaaatgtcagcacagtccaccaagatgatagtttacattggcaatatagccccaga

SEQ ID NO: 16293 - DNA, 600 bp, Chicken  19866894223521_2
atggagcgagtctgcttaagagcagttcttcatgaatcttcctgcgatgctcaaaacaaacagcagcaggctgctcagcactcacatctgcagcaccagctcccagcagctccgggtgaagagctgggaacaacctgctaaatatccccagcaggcacacatagagctcatgggtgagaacaccaacacctgtgacatctcaggtgccttgggaacagttgaaaggaaaacatatccacatggtttggcaacactcaatgctaagcctgcagatctcagtgttcaaaggtgcaaaaagyrgcagccagtcactcaaaagctgaagcaatgtatacagctttaccagagaactagtggcaatttttcttttgtgtttttctcattycaataatatcctcagtaggaattacaactgcttactttggcttttcatatacctatcagaaagttttcatagctgggagggattttggagaaacaaaacagcaaaaaacacagctaccaccttataaacatacctgctgcaatccacagacctgaggacaaatgtcagcacagtccaccaagatgatagtttacattggcaatatagccccagat

SEQ ID NO: 16294 - DNA, 600 bp, Chicken  19866894223521_3
atctgcagcaccagctcccagcagctccgggtgaagagctgggaacaacctgctaaatatccccagcaggcacacatagagctcatgggtgagaacaccaacacctgtgacatctcaggtgccttgggaacagttgaaaggaaaacatatccacatggtttggcaacactcaatgctaagcctgcagatctcagtgttcaaaggtgcaaaaagyrgcagccagtcactcaaaagctgaagcaatgtatacagctttaccagagaactagtggcaatttttcttttgtgtttttctcattycaataatatcctcagtaggaattacaactgcttactttggcttttcatatacctatcagaaagttttcatagctgggagggattttggagaaacaaaacagcaaaaaacacagctaccaccttataaacatacctgctgcaatccacagacctgaggacaaatgtcagcacagtccaccaagatgatagtttacattggcaatatagccccagatacagtgcagagctacagcatgcctttccttcctgaaaaagggccaccatttacaagaagtctgagcagaaatttcaaatactgga

SEQ ID NO: 16295 - DNA, 599 bp, Chicken  19866894223524_1
  misc_feature (1)..(12): n is any nucleotide
nnnnnnnnnnnncagaagcatgaagtaattattgaccattagaatcccaaccagatcaatacacaattggaggagttaacagcacatacaggaactcctattaattgaactcagtttatctgaaactctcctgtgacatattttggtaataaaccttacagtcacattcagctagaatagtaggcagaaatagcagccagctatactaaaaagaaagccacaacaatttattattgtttccttgcactcaaatttgggactaacaacagcatgtgttattctactaaaaaaatcctgttmtacatatatttctcaagttcaaagcatagcacagtaactacctcacttagttgaagtcttttttcctgaagcccttcaactccatcaactatgattatcttactcctcactgtgtaacagtttttccagttttcaaataagaacagacaaacattttaaataatttttaaaacaaagattactggcagtttcctatcttatgtctaatccattgcttttgaatacccgtgacagacaattccacaaggagctaaagaactcatgaaaatcacttctattttctccatgatgctcaacat

SEQ ID NO: 16296 - DNA, 600 bp, Chicken  19866894223524_2
tatgattatcttactcctcactgtgtaacagtttttccagttttcaaataagaacagacaaacattttaaataatttttaaaacaaagattactggcagtttcctatcttatgtctaatccattgcttttgaatacccgtgacagacaattccacaaggagctaaagaactcatgaaaatcacttctattttctccatgatgctcaacatgtgctcttacatgcagctaacttctggaaactgagaaatactcatactctaaatttgtgcttctttgtgtcctttatttatctgtgcatktgcccttttatagaatgttatcaackaataaggtgcttaatttcttctatgtttcttcattccttcctcttcatttttcagatttgtcttcaatcaccatttttagcctctccttccattatttaaccaatacttcctcgttatcttaaaaacaacttacagtatacaggttggaaaactccattttccttattagacagtggggtcattatctaattcatattttgtcagaccatttcaaacagccttcttagaaaggaggattcttatgtctcacttcataggatcacaaaattgcaa

SEQ ID NO: 16297 - DNA, 600 bp, Chicken  19866894223524_3
aacagtttttccagttttcaaataagaacagacaaacattttaaataatttttaaaacaaagattactggcagtttcctatcttatgtctaatccattgcttttgaatacccgtgacagacaattccacaaggagctaaagaactcatgaaaatcacttctattttctccatgatgctcaacatgtgctcttacatgcagctaacttctggaaactgagaaatactcatactctaaatttgtgcttctttgtgtcctttatttatctgtgcatktgcccttttatagaatgttatcaackaataaggtgcttaatttcttctatgtttcttcattccttcctcttcatttttcagatttgtcttcaatcaccatttttagcctctccttccattatttaaccaatacttcctcgttatcttaaaaacaacttacagtatacaggttggaaaactccattttccttattagacagtggggtcattatctaattcatattttgtcagaccatttcaaacagccttcttagaaaggaggattcttatgtctcacttcataggatcacaaaattgcaagagttggaatgtacctctggagatca

SEQ ID NO: 16298 - DNA, 600 bp, Chicken  19866894223527_1
tagacaacagcactgtgttagtcctgagaggtggttgctttttagcagtttagcaaagctacagcaagcgatgctaaaattgcacaagttgttggattcatgaatatggctttccaaaaaaagacttctaaggaaactgtgtatagggattcttgttgaggtgaagtaccagaagagttatcttaattaatattatttctatctttctcttcattagtgttaatgacctcatttttttagatattaccggggttttccccaagaaaagataaaagctgcaatgctttcattacataagtktataacagtgtccctggtttcttagagcgtgtcagatatatctttatatgggtaattggcagtctcctgcattaacatcccactggaagtgtgtggtaggattctgctcaccgttgtatctcatgagctgtcgttcgtaagagctgaacacagctcaggttcggcagtcagacgctagaatcattcaaaggagatattttgtatatgaaaagatggttatagagatctgctatttagaggtgctgcagccgaacaatcccagtggaaatcaggagcagctcagtgcctctgaaagctgac

SEQ ID NO: 16299 - DNA, 600 bp, Chicken  19866894223527_2
atgaaccagtcacagtatgtaccacatcttgcttaagttggtgggaaggactatttttaaccacgctcactaatgcagctcttctactcttactgcaagagacaaataggttataccttaaaggtagaaatcaatagggaaaaaaaacattctcagagcccagatcatttgtttactcagaaaatattaacctgttagttaaatgatgcatgtttcattagctctgtgaaaagataaaattcatttcttcttcattcccctaacaacctctgcttccatgtatgtactgtgtagaaacartatggtatttgcacacatgtccatggtctcagtgacactggggatgttcctttctgaatgagaaaggtctgtcagtgcaattagcatgaagggtgctgtccagttcctttggarttcctccagtcctaacgtgacttctgtattttgagtcctggccacaaagtgttggcatgaatgaacgtgacctgcagaggaaagggtggtctctgtgtggcctcttcctctccctttcctgtgtggttgctttacgcaatgtgcaaactgtctaccttggactgtctcactcccaaataaacaggt

SEQ ID NO: 16300 - DNA, 600 bp, Chicken  19866894223527_3
accttaaaggtagaaatcaatagggaaaaaaaacattctcagagcccagatcatttgtttactcagaaaatattaacctgttagttaaatgatgcatgtttcattagctctgtgaaaagataaaattcatttcttcttcattcccctaacaacctctgcttccatgtatgtactgtgtagaaacartatggtatttgcacacatgtccatggtctcagtgacactggggatgttcctttctgaatgagaaaggtctgtcagtgcaattagcatgaagggtgctgtccagttcctttggarttcctccagtcctaacgtgacttctgtattttgagtcctggccacaaagtgttggcatgaatgaacgtgacctgcagaggaaagggtggtctctgtgtggcctcttcctctccctttcctgtgtggttgctttacgcaatgtgcaaactgtctaccttggactgtctcactcccaaataaacaggtcaactagatagctcttgtgtctgatgccaatgacaagcatcttaaaaggagtcagttgaccccacatatttggacaaagagacaacagtgagaaaaccgaaagggaaaagtagg

SEQ ID NO: 16301 - DNA, 600 bp, Chicken  19866894223528_1
ggagcccatggtgaggcaggagggctcgcagaaatgctactcatgggaatccgtgctggagcagttcctgaaggatggaccccatagtacggagttgtgttggagcagagcttggagtggtgaagcctcacagtggatcagttcaggaagaacggcatattatggaacggactcacatggagcagggaaagaaagtgaccatggaggagtggcagatgaaaagtgttatggactgactgtagccctcaatcccctgcactgctcagggggagaaggtaaaagaaggtggatggagggaargtgctggtattttgctcttagctctcactgctccagtctgttagtagttggcaacaaattacactcatctccctatgctgagactgttttgyccatgatgctaattggtgagtgacctccttgctctttacctcaaccctcaactttctttcttcattgcattttctgcttctgtccttttgaggaaaaagagtgagagagtactgtggcagtacttagctgcccatcagttgtgaatcaacacagttcaatgaatacagaatcatagaatcatagaattctttaagttggaagggacct

SEQ ID NO: 16302 - DNA, 600 bp, Chicken  19866894223528_2
agttgtgttggagcagagcttggagtggtgaagcctcacagtggatcagttcaggaagaacggcatattatggaacggactcacatggagcagggaaagaaagtgaccatggaggagtggcagatgaaaagtgttatggactgactgtagccctcaatcccctgcactgctcagggggagaaggtaaaagaaggtggatggagggaargtgctggtattttgctcttagctctcactgctccagtctgttagtagttggcaacaaattacactcatctccctatgctgagactgttttgyccatgatgctaattggtgagtgacctccttgctctttacctcaaccctcaactttctttcttcattgcattttctgcttctgtccttttgaggaaaaagagtgagagagtactgtggcagtacttagctgcccatcagttgtgaatcaacacagttcaatgaatacagaatcatagaatcatagaattctttaagttggaagggacctttacaggtcctccagtccaactcccctgcagtgaacagggaaacctacagctagctgagggtgctmaaaaccccrtccagcctgaccttgaa

SEQ ID NO: 16303 - DNA, 600 bp, Chicken  19866894223528_3
atctccctatgctgagactgttttgyccatgatgctaattggtgagtgacctccttgctctttacctcaaccctcaactttctttcttcattgcattttctgcttctgtccttttgaggaaaaagagtgagagagtactgtggcagtacttagctgcccatcagttgtgaatcaacacagttcaatgaatacagaatcatagaatcatagaattctttaagttggaagggacctttacaggtcctccagtccaactcccctgcagtgaacagggaaacctacagctagctgagggtgctmaaaaccccrtccagcctgaccttgaatgtctccaaagacatagtatccaccacatctttgggatacaaactcttttaaggaccaggaataaaggctgacaaccagatctgaggctaagcatgtatatgttttttgtgaaaatgctataaattgaacagtttagtagaactacacttcctcatttaaatgcagatttcgaattaaacttcggggagaaatgtaatccatgtaccaatatgccagtatgctcatctaatagaaggtctgtaaaagcaaatacaagaaatggaatcaatgctt

SEQ ID NO: 16304 - DNA, 600 bp, Chicken  19866894223528_4
tgctgagactgttttgyccatgatgctaattggtgagtgacctccttgctctttacctcaaccctcaactttctttcttcattgcattttctgcttctgtccttttgaggaaaaagagtgagagagtactgtggcagtacttagctgcccatcagttgtgaatcaacacagttcaatgaatacagaatcatagaatcatagaattctttaagttggaagggacctttacaggtcctccagtccaactcccctgcagtgaacagggaaacctacagctagctgagggtgctmaaaaccccrtccagcctgaccttgaatgtctccaaagacatagtatccaccacatctttgggatacaaactcttttaaggaccaggaataaaggctgacaaccagatctgaggctaagcatgtatatgttttttgtgaaaatgctataaattgaacagtttagtagaactacacttcctcatttaaatgcagatttcgaattaaacttcggggagaaatgtaatccatgtaccaatatgccagtatgctcatctaatagaaggtctgtaaaagcaaatacaagaaatggaatcaatgctttggaagata

SEQ ID NO: 16305 - DNA, 511 bp, Chicken  19866894223531_1
tttttggaggcacactgcagcaatttcaaggaaatgaggtcagaaagctggtttactaaagcatgagcatgcctccagtagaaatttccctcttctgttcacaataatccataccttctataacccctaccattatggtaaccaacatggcttcaccagggcaagtcatacctgacaaacttggtggccttttatgatggagttgcagtgtcagtggattaaggaagagcaactgatgtcatctacctggacttgtgcaaagtgtttgacactgtcctgcatgaaatcctggtcaccaawttggtgagaaacggatttgacagatggactgctctctggataaggaattggctggatggttgcactcagagagttgcggtcagcggctcaatgtgcaagtggagactggtgacaagtcttgttcctcagggatcagtgctgggaccagtgctatttaacatctttgtacgtgacaggacagtgggatcaagggaccttcagcaagtttgca

SEQ ID NO: 16306 - DNA, 600 bp, Chicken  19866894223534_1
tgccatgagcctgacccatggagcgcagactgctgttactttgggaattaaccacaactgaggaatttgaaaccatcccaggagaaaataaaacgtaaacaaggcaccctactcacatcctgggaatctctggaggaggtgtcatccaggtcagaagtctgaaataaaaccagtaagttcatcattcttcatgagcaaggaaatggcagtaatggaatatacaggagacctacactcatctgaccatttggagaaagtacataagatgccacactaattaaaagtcctcagatgtctaawttaattccatggactctcataccctgctcctatttcatccaaacggcttgtacagactccagagctcagtctttagtaggtgacaacacctttatgatctctggaagcactccacacatgtaaggcttcagcaaaccagggtgagctcataagaactgtcatgtcttccttttttctaaacagcatgtgcacagaaatggttacccaagcaggtggccactgcttgctgaaatcagactggttacgtctcaagggctcaaaacagtcttatttgagtcctagactcaactttccaactca

SEQ ID NO: 16307 - DNA, 600 bp, Chicken  19866894223535_1
ggtatgaagggaagggaaaaaaaaattagaagtttatcagcctgacagcaagggtcatgcacgtgtaattttttcaaacaccatatttgttatacttgctctactgtcagctccaaaggttagatttgcaaacaagcgtttttcacttctctttaaacattaccatgctttttggttcattagatgagctttataaattcagctaaactgctcagagagttttcagaagcatcagcagacctgaaaattttaagaattgatttctatttgtatctttgattaactgcaatctcaacaacrgaccagagctatttggcagcacacacaaaggaaccaacttgaggatagattgagatagctctccagacataaaaagactcaaaacaaggctgaagccatgatctacagaaatctagcaacacagtagcttttcaagcaaaaccagagaatattgcagccaaacaattaggtgcaaagcaaaatactccttagagctcactatttctctaaatcaactcaaataaaacattcacaatcttcctgtaatcaatgaatgtttcaggtttcatactaaagcccttctgggagcagagtcctctc

SEQ ID NO: 16308 - DNA, 600 bp, Chicken  19866894223536_1
aggatattagaagagggacattatgattgtacgtaactgctgtctcgaggtccacgattttttctctatcaacttcctggtatataactatttcaagcaactaagagaatctaagaatcgatgtagttacaatgccctagcttatctcttcaccaaattatatttacttgggcaataatagtttaatttgctcaagattcttccctcttcctcctcctccctttttggatcctttaagacagacaagaagaagttttgtctctgtctaagaatgagaacaggagtaatgctttttcttcrttacaaaggtgtttttccatttggatgggaagccatggctccaacagcctttgaaacaggggatagaaatttgtcaaaggatcagcttggtatggagagttatttctgtctttgtaaaartgtgaaaagatacatttttttcacaagctgagacattgttcaagatcaggggggatcggttttacgtcttgacagaacatgccccatccagacactgaacaaggacactcaatactgaagaaagaaaaactgaaggaagactactttaaaattgatcttcctttgtgtcttgctctctgg

SEQ ID NO: 16309 - DNA, 600 bp, Chicken  19866894223536_2
atgtagttacaatgccctagcttatctcttcaccaaattatatttacttgggcaataatagtttaatttgctcaagattcttccctcttcctcctcctccctttttggatcctttaagacagacaagaagaagttttgtctctgtctaagaatgagaacaggagtaatgctttttcttcrttacaaaggtgtttttccatttggatgggaagccatggctccaacagcctttgaaacaggggatagaaatttgtcaaaggatcagcttggtatggagagttatttctgtctttgtaaaartgtgaaaagatacatttttttcacaagctgagacattgttcaagatcaggggggatcggttttacgtcttgacagaacatgccccatccagacactgaacaaggacactcaatactgaagaaagaaaaactgaaggaagactactttaaaattgatcttcctttgtgtcttgctctctggtattgtggcgacagcagtcatggaaaatgagatagcaagtgttgcctattctgtctttagtcaatgttctcttcactaatgcccatcactgggaaaaggttcggctgaacctcagcacat

SEQ ID NO: 16310 - DNA, 600 bp, Chicken  19866894223536_3
tacgtcttgacagaacatgccccatccagacactgaacaaggacactcaatactgaagaaagaaaaactgaaggaagactactttaaaattgatcttcctttgtgtcttgctctctggtattgtggcgacagcagtcatggaaaatgagatagcaagtgttgcctattctgtctttagtcaatgttctcttcactaatgcccatcactgggaaaaggttcggctgaacctcagcacatgagtaaagataagagaagtcttaaatgtgagaacattgaaatgacattagagatgtccacarcagggggttggaacaagatcatctttaagttctctttcaatctaagtcattccataattctatgaatcatccagaaatcagttgccaaaatcactgcccactttagggtcaaaaaccaaagcaagcttttgctagtctgtttcattttccaacctactgtttcctgtagggctgtacaaagccaccatcttccaggtgaaaagcagttcttttttacagaacactccagtgtgacccggtaacactgtatgaacctaagagaaaaaaggtgacactcatgtttctaaacttcacattctg

SEQ ID NO: 16311 - DNA, 600 bp, Chicken  19866894223539_1
gggtgtttatgtttctctctttaatgactagattactagttgactgcatggtcagatgatactttttgacaagatacctaagttttagatggcttaatataattgagatgaatcctacacactgtaatacacagctgaatagtgcaaaatggggaggctttcatagtctaatagtgatgaagatggcataaatcttgaatggaatagaattaaaggagaatattaaatccagttttagttgaatgctttattaaattgtacttatcttacattttaacaaatgtttccaaatataacttmttatctctcttacaaaaggcagcacatatggtactatttgatagccagagaatgaaatgccagtttgcataaatatagacttagggaaattgtccttagaaccagtaacatatgaggtaaataattaataggattgatatttatttattatgtttaggaaaatattaggaaaatatacaatgtcttgtgtctttaatttatccattctgttctcacacttttattaagtcttataggtccactaatttcaggaacaaaaccagatttaatgctttttggttacagtgaaaataccctctt

SEQ ID NO: 16312 - DNA, 599 bp, Chicken  19866894223542_1
  misc_feature (1)..(25): n is any nucleotide
nnnnnnnnnnnnnnnnnnnnnnnnnaatatttacaccgtctccttcccaacctgctttgtgttggcagttggcatgggggggctctgcccaccctggcagcagagcggacgccctgggagcagagaggagccccgcacggggcagcacttactgaggatgatgaggagcccgaccacaaaagccacgatggcgaagatcagccccccgtagcggatggtctcatagtctgggggggaggagggaagctgcagcatcagcctgggtgtgtgggaggtgggctgccagcccccccagctcayggctccacacctcacgggcacccacttaccgtaggtgaacctgtccgggccctgctcgggtgcttgctctggaaaagagaaaacccagtgggagcctgagcctgggagctgggctcgtagtgggctcctggacagggagatgagatggaaaacctgagagctgtgaggaagaatgctctgatttccttcctgacccagtaaaggattcccaaactcctgtttttcacgccaactcaccgtgctctcgcaggacgcatttgcaggatgcacgagactcgagcttcaggtgaagctgcaca

SEQ ID NO: 16313 - DNA, 600 bp, Chicken  19866894223542_2
ggagctgggctcgtagtgggctcctggacagggagatgagatggaaaacctgagagctgtgaggaagaatgctctgatttccttcctgacccagtaaaggattcccaaactcctgtttttcacgccaactcaccgtgctctcgcaggacgcatttgcaggatgcacgagactcgagcttcaggtgaagctgcacacagggacccggagcaccaagcaccccatggactgtcactgtggctgtgccactgtgcgagccacctcacctgctggcacatccctcggcgaggagaactttggcrgcagaaatcccctccagaagctgagtgctgtccggtgycggtgccccagagggctgcagggctttgaggacccatccctgcatctcccccgatgagaactgcccccaccctgacagcaggagggtccagccccgctctccatgctgcaacgtgcccctgtgtgttcccctctgcccgcagctcccttaccgtcccccatcgtgtcggcgtgccgtccaacgggcgtctggcactgggagtgggcacccaggggaaagcacagtaattgggaggcaaacctcattaaacattaacagcctc

SEQ ID NO: 16314 - DNA, 600 bp, Chicken  19866894223542_3
agatggaaaacctgagagctgtgaggaagaatgctctgatttccttcctgacccagtaaaggattcccaaactcctgtttttcacgccaactcaccgtgctctcgcaggacgcatttgcaggatgcacgagactcgagcttcaggtgaagctgcacacagggacccggagcaccaagcaccccatggactgtcactgtggctgtgccactgtgcgagccacctcacctgctggcacatccctcggcgaggagaactttggcrgcagaaatcccctccagaagctgagtgctgtccggtgycggtgccccagagggctgcagggctttgaggacccatccctgcatctcccccgatgagaactgcccccaccctgacagcaggagggtccagccccgctctccatgctgcaacgtgcccctgtgtgttcccctctgcccgcagctcccttaccgtcccccatcgtgtcggcgtgccgtccaacgggcgtctggcactgggagtgggcacccaggggaaagcacagtaattgggaggcaaacctcattaaacattaacagcctcagtgtaatgtttatcgcagtcacgaggggaggcccagg

SEQ ID NO: 16315 - DNA, 508 bp, Chicken  19866894223544_1
taaggagccgatcattacccttttccctgtggacagtccatcacaagctatttttattctccctctctgcaattccctgactaacttccccatgccaaaatatcgctaaaagtcatcaaccttcagcaaggccaacagatgaatcaaacctgctgccaggtcatttaggagatgagccagtatagcgttcagaacatttttctaatgtccgtagcaggggagtatttaaatgccatggctttaaaaagtcgtactcaaacttcccagaataattcaattctaacaagctgtagacgaagytccagaggagtrgcttccttcaggaacattagggcttacaataggaaaacatttctctccccttcatagattagtccatccgcccattcttccgcctaccagtgcaacagcatatataaatgtggaaggcccccgaggaccagatgcactgagaataccccgtcttccgtgccacgctgaatgttccgcaccacaatttggaggaaca

SEQ ID NO: 16316 - DNA, 496 bp, Chicken  19866894223544_2
cattacccttttccctgtggacagtccatcacaagctatttttattctccctctctgcaattccctgactaacttccccatgccaaaatatcgctaaaagtcatcaaccttcagcaaggccaacagatgaatcaaacctgctgccaggtcatttaggagatgagccagtatagcgttcagaacatttttctaatgtccgtagcaggggagtatttaaatgccatggctttaaaaagtcgtactcaaacttcccagaataattcaattctaacaagctgtagacgaagytccagaggagtrgcttccttcaggaacattagggcttacaataggaaaacatttctctccccttcatagattagtccatccgcccattcttccgcctaccagtgcaacagcatatataaatgtggaaggcccccgaggaccagatgcactgagaataccccgtcttccgtgccacgctgaatgttccgcaccacaatttggaggaaca

SEQ ID NO: 16317 - DNA, 600 bp, Chicken  19866894223546_1
gtgctgaggcacttctggatgttcctcaactccataatttctctacagcctgtgtccatctatgagtctctcaggggtgctttgccagagaagcaaagaatgaaaactgagcaaaacatttcctcagtacacacttcataaaacatttaacatacgctcaataaaacccagaaatgtctaaagatgtcgagaaagaaacgttaggtagtacatcactgatccctagcctgtctaagaatatgagttgcatttcatttattacaacctttggaaacaaaagcgcacaaacccggtgcactstgcatagtctctttccttaggtgactattgccacactgtatgtgccctgactttgatggtatgcttgctgaaactgaagactctcatcaggaatgaaaatttgtcttgatctgtctgcacaaatgtgctctggcaaaatttgatcagagtaacgcaggaatgaaagtttgatctaagctgtttgtttttgtcagctctacagtcactcagtatgaaatgccacagattggtgactttcctcccccaaggcaaagcttacacgtgacagatatgcaatcacttggggacagctcaaaggca

SEQ ID NO: 16318 - DNA, 520 bp, Chicken  19866894223560_1
cttagtaacctgtgtgttgaacacttgattcagttcacttcccacttaataacggtcctaacaatacaaagaaccgcaatgccattattgctcactattttcatctgggactatgccaaaagaggcacctttcctcaatattgatccagctgaatactccctccattaatctctccttttaaaagtgaataatcttcccttcctgtgcgcttcacctttaaagaaatcctttatattcctaggactacatccattaactcaattcactttaatgcatcaccttatcactcaccaccatcrctgctggaaatttttgaagaagtgggatgctgcaatacagtaaacataaatctctttaaaagtcctgctagccccaagaagttatgcattcaagttcctcacactgctgaaaatgattatttcttgcagcctcaggcaaacaaagctgtgcatcatgctctacaaagggtgacacacccagggtaggttcactggaaggacttcctgccaaatccccagt

SEQ ID NO: 16319 - DNA, 600 bp, Chicken  19866894223562_1
cccagcagctatgcatggtttcccctcaaaggccatggcatatgacccaagcaaggcaggctgtgcagcccctgtacagtgctccctttcatatatagcagccctgtgaagagagctagttctgtgtagactgaggcagggatcacagaaagctgaattgttaaggacacatatctttttcacctgcagagagaggtaaggacagagcaagagtaaacaccaaagcaccagattttctctccaatttgcagctgaggcatcctcataaagcatgctgagcaagctcacatcactgctatytgcaggctggatagtaccaaatacaatgcattgtgttctgccctttgaaagctacaaagccttctggatttctgcagtgaagtgatactaagctttataaagtccagacaaatcaaaggaaatggacttttctcccctcctcaggatcagctctgaaatgaacctgatattccaattccagtaacacagttaaaagccagctaaataatccgagcctttcagacagtatgggtgacagctggatagaacttaattgcaacagagaatgcctagggttttctaattaaaaatttcctggag

SEQ ID NO: 16320 - DNA, 600 bp, Chicken  19866894223562_2
tcagctcagagataagcttcccatttctaacagaagcttaatttcataaaggaattaaaaaacgctggttgataagagttgtgcaaagtgctcgagacagtcaaataccttaatggagaggaaagattttaatagacattaataacttcgctactgagcactgcaatgaccctgcaaccaattagtgaaagtgtggaataactcctaatttagtgctcagagcagctagataactcaaacagttccaattccatccaacatcacatcttccatgaaaacatttttgtccatctacaaagmaaacttatactggtagtgatcatgtatccattaagacttctcagacatcccacactgccaacaccacaaagaaacagggttgttttgttttttgcatgggcagcattctatgaagtcctacttccattttctgagaaagcacaatatctcacacaaatattttacatacaaaatgtattctcatcagcttttcttcatggaacattgagagaactgcactgtaatcagtgtcataaacgttacctattactgattccttcccatgttcattgttgatgttcaaagaaaaagtgcagaatc

SEQ ID NO: 16321 - DNA, 599 bp, Chicken  19866894223563_1
  misc_feature (1)..(22): n is any nucleotide
nnnnnnnnnnnnnnnnnnnnnntgctcacatctcgcttctaaaggctccaaaaagagagatccaagaggtcgggcaacgtggccggcagtacaatgttctgcaaaggaccagcagagctcctcacagcccatgcgtgtgttgtttctgcgtttgctctcaaataaactgtatttattttcacgcagaaatctatcgtggcagcgcttaaacacgaccagattgcagcttcccaaaccaaaaaagctccttcagacaaacctcaaaagctaataaaaacctggacggtgcagcgtcatgcrctgcgtttttaagctccagtgctaagcaggcacggatagatttgctaaaattaaaaccaaacacacacggcttatgcaacgacacacacccagcacgagctgagcgcacggacaaggagcagcccacccttgggagctacaagtgaccaacacacacacacacacatgcaccctggggagtcagatccccggcatgtggctctgaagcatcggcacatcacccataaggcgtattaaatttatacccaaaaagcctttgcgttaaaagggcccccggtaattaattagcaatgccttca

SEQ ID NO: 16322 - DNA, 600 bp, Chicken  19866894223564_1
atataaatcactgcacacaattgaaaattgtagacaagataaatcaagattttcgatcaattcagtcttcaatcattctttccaacagcccagaaaatacagtccatgttgtacttacagtttgatagcaaggagatgtttaacatcaaggctagagattaacggcgacaagttatattgtggagaatgtgaaaggttgttgcgactgaaatattaatttcttgattgatgtagaactcaataattaaggccataaatcagtgttaaaataagctggattatgcaccatccaagccaatrcttttgttcaaagactagtccacagcttcatatcctggaaattgttgtagtaagatgaatctatttttccatagtgttttatattctcaaactttagtactgttcacaataatagatgaaatgttattttcctcttcattttcacaaactgtttctcttttgaaaacttacgaagtgttttattaaaagatctgtatctaatcaatgaaggaggtggtttatttgtaatgagcacactattgtacattttagtctcttttggtgtttgtgagttatctacgtatagtttttgaccttcaa

SEQ ID NO: 16323 - DNA, 599 bp, Chicken  19866894223572_1
  misc_feature (1)..(24): n is any nucleotide
nnnnnnnnnnnnnnnnnnnnnnnnattttggactgcctgtcttcgtaccctcagaggagtgcactgtgtagaacatgagctatccttgcagaccagggctggacagttggtgtggatggcccccatgggtccaacagcatgttcttaattaccttgatacgtaacaacattagtaacttcaaacttgagaaatctaagtctgccagaagggtcattaattgcttgtttgttactcattaggctgttgatgcaagaatggtgagggatgtatgcagtaaatacatctatgacaaatgcccrgcgcttgcagcagttggtaagtgaccagtcagttagtacgtggtagctcaaaaaatggggtgatcaggagctgagcagaagcgaagtgcaggcactttttacacatctgttttggcctcttaactgctgtggctctttgttattaccctcctgcctctgaatgttaggtgtgccaaggcacgtttgccaggagatcaaacatggaggtgatggagatgcactgacagtgagctgctggccatcctcccgcctctgcttgatgtggagctatgactaaggctgggagtcccatagctggg

SEQ ID NO: 16324 - DNA, 600 bp, Chicken  19866894223578_1
tggcaggggatacattgttgatcttctcgcatcacacagtttcttgtgcaatatgatttttgtgaagaattggcagcaagtgacaacccgtcataaaatgccttctcaggagccagtatacttgcaaaatattttattcattcttctatacatactgtgttgctgtgtcatctctctgataaggatcaggagatttgtttgggttttggtctggtttgttaagagctaattgttgagtgctccttactttttgtgtgtctggaaggagagaaagacaaaggaagggaaaaagataaagcytgaatgcctaagccccttcttatcttcccttcttccctcttcattgctgtaggcattggctgtctgaaacatgaatgttttcatgcataaagtaaaacaacaatcctcttgatcttaggagaggtagtttttctttcttctagaatgaaaacgtataagcctgatgtggcataaatagtgctatatgtaacacatttatcattcctgctctgttcatctatacagaccgaggcatgaaagaataaagcaggaaaacagcggtaagaaagaggaactactgagggttaaatctgatttagc

SEQ ID NO: 16325 - DNA, 599 bp, Chicken  19866894223585_1
  misc_feature (1)..(232): n is any nucleotide
nnnnnnnnnnnnnnnnnnnnnnnnnnnnnnnnnnnnnnnnnnnnnnnnnnnnnnnnnnnnnnnnnnnnnnnnnnnnnnnnnnnnnnnnnnnnnnnnnnnnnnnnnnnnnnnnnnnnnnnnnnnnnnnnnnnnnnnnnnnnnnnnnnnnnnnnnnnnnnnnnnnnnnnnnnnnnnnnnnnnnnnnnnnnnnnnnnnnnnnnnnnnnnnnnnnnnnnnnnnnnnnnnnnnnnnnacgagcagtagaacaattttgaaggaaaataatgtgcatatttttaaataaaaaaccatcagggcacrttgccaatggacatgtagatttttttcttccttcttgttgtcaagtaaaatggaacatgtccaaacatgcatgttaattcaagctgtaaatgactggcactggacatggaaattactgaaggatttttatgggttgttatatgcagaatggcagatcctgttgtgctttttgcctttaaaaataatactgtgggaataagatttttccataatctgtatgataacattagtcatatttaaactatttgacaaagatcgtcatactactatagtttgtactatagactactatagactgt

SEQ ID NO: 16326 - DNA, 599 bp, Chicken  19866894223592_1
  misc_feature (1)..(8): n is any nucleotide
nnnnnnnntgcttgaacactgtacgatggttaaacatccaagtccaaagcttacttttctttcttcttgactgatatattgcagcaaaacaaaatccaagattactgttgttaagtactgagccaaggagaatttcagcaaagactggaaggatgaatgaacaaaaacctcacaaatcactgcatcgtgtagagacataatgagtgaaatcattttttttaatgccctaaaatgaccaaaaaaaaaaaagttttagagggaaagaataaccttttttttagtatgactgagcagagccaytttgctcaattcaagcagtggaagtgctggcaaagcragagaacgctgcccgctgctcccgagcaagagtgtgagcagatcccttccctcagccctgctgctgtaagaaaaacagagggccattgggaaagtgttgagacagctcacagaggctgcttgaggtccctgagcctttatcagtggctggaccctgtgcaccactctagccactacacctgattttcatctcctggrgattaaccaaagaaaatgattactattaatcctctaatgcatcttctggcatggtcggtttggtg

SEQ ID NO: 16327 - DNA, 600 bp, Chicken  19866894223592_2
ccaagtccaaagcttacttttctttcttcttgactgatatattgcagcaaaacaaaatccaagattactgttgttaagtactgagccaaggagaatttcagcaaagactggaaggatgaatgaacaaaaacctcacaaatcactgcatcgtgtagagacataatgagtgaaatcattttttttaatgccctaaaatgaccaaaaaaaaaaaagttttagagggaaagaataaccttttttttagtatgactgagcagagccaytttgctcaattcaagcagtggaagtgctggcaaagcragagaacgctgcccgctgctcccgagcaagagtgtgagcagatcccttccctcagccctgctgctgtaagaaaaacagagggccattgggaaagtgttgagacagctcacagaggctgcttgaggtccctgagcctttatcagtggctggaccctgtgcaccactctagccactacacctgattttcatctcctggrgattaaccaaagaaaatgattactattaatcctctaatgcatcttctggcatggtcggtttggtggaggaagaattggagctgcctctctccagtagtttacc

SEQ ID NO: 16328 - DNA, 600 bp, Chicken  19866894223592_3
accaaaaaaaaaaaagttttagagggaaagaataaccttttttttagtatgactgagcagagccaytttgctcaattcaagcagtggaagtgctggcaaagcragagaacgctgcccgctgctcccgagcaagagtgtgagcagatcccttccctcagccctgctgctgtaagaaaaacagagggccattgggaaagtgttgagacagctcacagaggctgcttgaggtccctgagcctttatcagtggctggaccctgtgcaccactctagccactacacctgattttcatctcctggrgattaaccaaagaaaatgattactattaatcctctaatgcatcttctggcatggtcggtttggtggaggaagaattggagctgcctctctccagtagtttaccaaagtacagcagtgctgccccatatggaacaaratgcatttaccatgcacatcgatgacagtaagagctccgagagtcagccgggctccactggacagctttcctctcaccaggtcaacaatgtctccaatctgctgattgctctcctccaagaaatcctgtcacaraaacagaacgcagacatgacagcaatggca

SEQ ID NO: 16329 - DNA, 600 bp, Chicken  19866894223592_4
gtgagcagatcccttccctcagccctgctgctgtaagaaaaacagagggccattgggaaagtgttgagacagctcacagaggctgcttgaggtccctgagcctttatcagtggctggaccctgtgcaccactctagccactacacctgattttcatctcctggrgattaaccaaagaaaatgattactattaatcctctaatgcatcttctggcatggtcggtttggtggaggaagaattggagctgcctctctccagtagtttaccaaagtacagcagtgctgccccatatggaacaaratgcatttaccatgcacatcgatgacagtaagagctccgagagtcagccgggctccactggacagctttcctctcaccaggtcaacaatgtctccaatctgctgattgctctcctccaagaaatcctgtcacaraaacagaacgcagacatgacagcaatggcacagtgcttcctgagctccatgggtgcgtcagggagagcccctgtcagaacgaagtgatggaacgcccaacatcactcaaacatttaaaattctttcatacactggagttctatcacactatgagcattttagaaag

SEQ ID NO: 16330 - DNA, 516 bp, Chicken  19866894223592_5
agccactacacctgattttcatctcctggrgattaaccaaagaaaatgattactattaatcctctaatgcatcttctggcatggtcggtttggtggaggaagaattggagctgcctctctccagtagtttaccaaagtacagcagtgctgccccatatggaacaaratgcatttaccatgcacatcgatgacagtaagagctccgagagtcagccgggctccactggacagctttcctctcaccaggtcaacaatgtctccaatctgctgattgctctcctccaagaaatcctgtcacaraaacagaacgcagacatgacagcaatggcacagtgcttcctgagctccatgggtgcgtcagggagagcccctgtcagaacgaagtgatggaacgcccaacatcactcaaacatttaaaattctttcatacactggagttctatcacactatgagcattttagaaagccttatggcctgaaacataatgtaagcagaagtcttctttttcccaatag

SEQ ID NO: 16331 - DNA, 600 bp, Chicken  19866894223593_1
tatatccagttctttactctctaaactctgactcccaggctgtgcacttgaagcagacatcacactgcaggtagttttgaggtgcctccattagaggtacatttgtctgttgcatgcattaaattagttcttcaaaaaatattttgactgggtaagttacaaaatactggatgtggctatgcagtctgctctgatcaaagagcaatcaaggaagcatattgcctttcttagttccctagaaactaaaaacaataatctggtgtaatcttttcactgatttcaatgaaaagaaaagttaayagcagttagtaaagcctacctatgtctcctgtgataccactgaaagagaatgaagactgaatcaatttgctctcctttaccagggtaagattagcccacaacttgccaagccacctgctgcattcttttcattaccttggtgctaaaatgaatgatactagctagaattgattttctcattagtaacataactttgttactaaggagtataaggagacaaatagcctacttttaataaaaagcaacgttgcatctcaaaaattatgtaataagaccttacactgtttaaatgccccattt

SEQ ID NO: 16332 - DNA, 455 bp, Chicken  19866894223593_2
agggtaagattagcccacaacttgccaagccacctgctgcattcttttcattaccttggtgctaaaatgaatgatactagctagaattgattttctcattagtaacataactttgttactaaggagtataaggagacaaatagcctacttttaataaaaagcaacgttgcatctcaaaaattatgtaataagaccttacactgtttaaatgccccattttggtgctatgtgttaaatttcattgtgccattcttctatttctctaaattgactaaacttactttagcccattctgtatamtaaatttcaaaataatcacattttgctacagcatttagtgccaagtacttttctgcacagtacaggctctgtttttgtaaaaaccatgtccctagccacctggcagcccattcttaattcatgtgcatttagttacagctggcacaaaaagcaga

SEQ ID NO: 16333 - DNA, 600 bp, Chicken  19866894223595_1
cttctgtgcctcaagtgccctgtgtaaggactcatacaacaaagcaacaaggaataacttggaaaacaacatcaatgatggattaagcatctttgtcagatctttgtaccttctgtttcaagtgcaaggcaggttcctttgatctttccttatctaccatatttacacacaagcatgtaaactgaaagagcagacaaataaataaggtccctcaggtccactacaattagagaccttaataagcaagcttttcctcctagaaggagaatctgagaagtctcttgtatgccacagggttgrgtgtagtctagagtctaagtaaaatggaataatccttatgactgtgcatgccatcctcggacatgtattatgcatgtgtatgcatatgcctacatatgaatataaatgtttgttccttcctatttaatcattttaagtgtgatttttcaaaattgcctaagtgactttcccacctgaatttaattgaatcgcataattactggagatgacagcatggggtcaaattctacctttgagataattggcttctcygagaattgtgtgcattcagaagaccacaaattttgcagagtttgcata

SEQ ID NO: 16334 - DNA, 600 bp, Chicken  19866894223595_2
cctcctagaaggagaatctgagaagtctcttgtatgccacagggttgrgtgtagtctagagtctaagtaaaatggaataatccttatgactgtgcatgccatcctcggacatgtattatgcatgtgtatgcatatgcctacatatgaatataaatgtttgttccttcctatttaatcattttaagtgtgatttttcaaaattgcctaagtgactttcccacctgaatttaattgaatcgcataattactggagatgacagcatggggtcaaattctacctttgagataattggcttctcygagaattgtgtgcattcagaagaccacaaattttgcagagtttgcataactgtgcaacctggtatgacctcttgcagttggccatttgaatcactcttgactagggactgttgacaaagtctttgacatatgcaccatgtggaaaaaaaaaaatcacataaaaggtctgctcttccccagctatctgtgctggagtttttctagcatttctccgtagcttggagtgaaagccatgaataattttagggcaggagtttccctgcaaactagtcaaacctctcaatcactctgtctttcctg

SEQ ID NO: 16335 - DNA, 600 bp, Chicken  19866894223601_1
aggggaagatccctctgggctctgcagaggggggcggctgctgcagccccaaggtttgggtcaggtaggtgatgatctccagtgcttgctgcacctggggcagccctggggtaatgctgtgcatggccagagccccacagtgccctgctcgcagggttgggggttttgctccctgcccagtgctggttgggcaatgagagccaccaggagctgggaggtagttctgaccttgctctgtttccttatggaaaagcccttggggattgtttgtgggatggaagacactgcttggagccctcytcttgctgtgcagagctagwtgtgcatggacccaagcagcccagcccccwtggagccaccagcattgctttggggccacgcattgccatactcagagctcataaatgggatggaaatcactcagggcagctaccgagcactggaggattatggccttcagggcaggtttccatatctggcaatggattggmagcttctggctgctatgtcacrctcacagagctgcgggatgtgtctgagcccacgggtgctccctgcagggatgtgatgggatctgtgctgggatctgtgctcaccctg

SEQ ID NO: 16336 - DNA, 600 bp, Chicken  19866894223601_2
tctgcagaggggggcggctgctgcagccccaaggtttgggtcaggtaggtgatgatctccagtgcttgctgcacctggggcagccctggggtaatgctgtgcatggccagagccccacagtgccctgctcgcagggttgggggttttgctccctgcccagtgctggttgggcaatgagagccaccaggagctgggaggtagttctgaccttgctctgtttccttatggaaaagcccttggggattgtttgtgggatggaagacactgcttggagccctcytcttgctgtgcagagctagwtgtgcatggacccaagcagcccagcccccwtggagccaccagcattgctttggggccacgcattgccatactcagagctcataaatgggatggaaatcactcagggcagctaccgagcactggaggattatggccttcagggcaggtttccatatctggcaatggattggmagcttctggctgctatgtcacrctcacagagctgcgggatgtgtctgagcccacgggtgctccctgcagggatgtgatgggatctgtgctgggatctgtgctcaccctgctctgtctgcccgctgtgcc

SEQ ID NO: 16337 - DNA, 600 bp, Chicken  19866894223601_3
aaggtttgggtcaggtaggtgatgatctccagtgcttgctgcacctggggcagccctggggtaatgctgtgcatggccagagccccacagtgccctgctcgcagggttgggggttttgctccctgcccagtgctggttgggcaatgagagccaccaggagctgggaggtagttctgaccttgctctgtttccttatggaaaagcccttggggattgtttgtgggatggaagacactgcttggagccctcytcttgctgtgcagagctagwtgtgcatggacccaagcagcccagcccccwtggagccaccagcattgctttggggccacgcattgccatactcagagctcataaatgggatggaaatcactcagggcagctaccgagcactggaggattatggccttcagggcaggtttccatatctggcaatggattggmagcttctggctgctatgtcacrctcacagagctgcgggatgtgtctgagcccacgggtgctccctgcagggatgtgatgggatctgtgctgggatctgtgctcaccctgctctgtctgcccgctgtgccctcacggtgatgctttcctgtacaacatag

SEQ ID NO: 16338 - DNA, 600 bp, Chicken  19866894223601_4
caatgagagccaccaggagctgggaggtagttctgaccttgctctgtttccttatggaaaagcccttggggattgtttgtgggatggaagacactgcttggagccctcytcttgctgtgcagagctagwtgtgcatggacccaagcagcccagcccccwtggagccaccagcattgctttggggccacgcattgccatactcagagctcataaatgggatggaaatcactcagggcagctaccgagcactggaggattatggccttcagggcaggtttccatatctggcaatggattggmagcttctggctgctatgtcacrctcacagagctgcgggatgtgtctgagcccacgggtgctccctgcagggatgtgatgggatctgtgctgggatctgtgctcaccctgctctgtctgcccgctgtgccctcacggtgatgctttcctgtacaacataggagcgcagctctcacctgaggagggatttcattaagaagtgcaaagttttccactccagccctcgtttgccacctggtgtagcccagaaggtgtactgttgttgttttttcccccactctattattccccctgttgttttc

SEQ ID NO: 16339 - DNA, 600 bp, Chicken  19866894223601_5
ggaggtagttctgaccttgctctgtttccttatggaaaagcccttggggattgtttgtgggatggaagacactgcttggagccctcytcttgctgtgcagagctagwtgtgcatggacccaagcagcccagcccccwtggagccaccagcattgctttggggccacgcattgccatactcagagctcataaatgggatggaaatcactcagggcagctaccgagcactggaggattatggccttcagggcaggtttccatatctggcaatggattggmagcttctggctgctatgtcacrctcacagagctgcgggatgtgtctgagcccacgggtgctccctgcagggatgtgatgggatctgtgctgggatctgtgctcaccctgctctgtctgcccgctgtgccctcacggtgatgctttcctgtacaacataggagcgcagctctcacctgaggagggatttcattaagaagtgcaaagttttccactccagccctcgtttgccacctggtgtagcccagaaggtgtactgttgttgttttttcccccactctattattccccctgttgttttcagaccagacccagatccgtgga

SEQ ID NO: 16340 - DNA, 596 bp, Chicken  19866894223601_6
tgctctgtctgcccgctgtgccctcacggtgatgctttcctgtacaacataggagcgcagctctcacctgaggagggatttcattaagaagtgcaaagttttccactccagccctcgtttgccacctggtgtagcccagaaggtgtactgttgttgttttttcccccactctattattccccctgttgttttcagaccagacccagatccgtggagtgtttggtgtcagcatccgagtgtgtgctttcatgcacggcgtatgcaaatgcaaggtgatttattttattaaagtgtttttaytgcagctcccagcactgctgctaccagctsctctgagcatcacttggatgttaaagtgctgtcgacaaaattgttcccagcggcgtgcaggcacagatggatgtctcccttccagctgacgctcagcgcctcaggaggatgaaggcagggatgtggccgtgctgtcccaccagctctgtgggtatagaggacacggcaggaccaggggaagagcccagcccagccttcggggaggaaggctttagagggaagcggctcagctccttgcatttaagcacatggctaagtggggctgg

SEQ ID NO: 16341 - DNA, 566 bp, Chicken  19866894223601_7
gatgctttcctgtacaacataggagcgcagctctcacctgaggagggatttcattaagaagtgcaaagttttccactccagccctcgtttgccacctggtgtagcccagaaggtgtactgttgttgttttttcccccactctattattccccctgttgttttcagaccagacccagatccgtggagtgtttggtgtcagcatccgagtgtgtgctttcatgcacggcgtatgcaaatgcaaggtgatttattttattaaagtgtttttaytgcagctcccagcactgctgctaccagctsctctgagcatcacttggatgttaaagtgctgtcgacaaaattgttcccagcggcgtgcaggcacagatggatgtctcccttccagctgacgctcagcgcctcaggaggatgaaggcagggatgtggccgtgctgtcccaccagctctgtgggtatagaggacacggcaggaccaggggaagagcccagcccagccttcggggaggaaggctttagagggaagcggctcagctccttgcatttaagcacatggctaagtggggctgg

SEQ ID NO: 16342 - DNA, 599 bp, Chicken  19866894223603_1
  misc_feature (1)..(39): n is any nucleotide
nnnnnnnnnnnnnnnnnnnnnnnnnnnnnnnnnnnnnnnctgttctgtgctagcctatctgtgatatccagccatcctgtgctatcagttcaatccatactgcaaacagtgtctcttactagaccctcattggatggttttactaagcactgtaccctacagatgtgtaacaccactgcaacaatgcgacctattgcactgctgtaatgcttgcatacactctgttgctccttaggataggaacacagagataaactcagcttcagggatcttttcatactactgccagcatctgacaarctttatttgcyctatcattaaaaaacttgccataaaattctccaacagaaaacatgaaattttctttaaaataagtatgtatcaaatgatagrgttattatgattcaagttttgacagtgcaaaagaagcactctccaacttaggtttgcgttatgcatacaggcttttcttgaaacagttattttaaaaccttagctatcatgcaaaaaatgtatcaataattaaatgttaaaaggatgcaaaacttatacatctgcttaaaatatacagctttaacaatttttatctttatttcaga

SEQ ID NO: 16343 - DNA, 599 bp, Chicken  19866894223603_2
  misc_feature (1)..(28): n is any nucleotide
nnnnnnnnnnnnnnnnnnnnnnnnnnnnctgttctgtgctagcctatctgtgatatccagccatcctgtgctatcagttcaatccatactgcaaacagtgtctcttactagaccctcattggatggttttactaagcactgtaccctacagatgtgtaacaccactgcaacaatgcgacctattgcactgctgtaatgcttgcatacactctgttgctccttaggataggaacacagagataaactcagcttcagggatcttttcatactactgccagcatctgacaarctttatttgcyctatcattaaaaaacttgccataaaattctccaacagaaaacatgaaattttctttaaaataagtatgtatcaaatgatagrgttattatgattcaagttttgacagtgcaaaagaagcactctccaacttaggtttgcgttatgcatacaggcttttcttgaaacagttattttaaaaccttagctatcatgcaaaaaatgtatcaataattaaatgttaaaaggatgcaaaacttatacatctgcttaaaatatacagctttaacaatttttatctttatttcagatattaactgaa

SEQ ID NO: 16344 - DNA, 600 bp, Chicken  19866894223603_3
tccatactgcaaacagtgtctcttactagaccctcattggatggttttactaagcactgtaccctacagatgtgtaacaccactgcaacaatgcgacctattgcactgctgtaatgcttgcatacactctgttgctccttaggataggaacacagagataaactcagcttcagggatcttttcatactactgccagcatctgacaarctttatttgcyctatcattaaaaaacttgccataaaattctccaacagaaaacatgaaattttctttaaaataagtatgtatcaaatgatagrgttattatgattcaagttttgacagtgcaaaagaagcactctccaacttaggtttgcgttatgcatacaggcttttcttgaaacagttattttaaaaccttagctatcatgcaaaaaatgtatcaataattaaatgttaaaaggatgcaaaacttatacatctgcttaaaatatacagctttaacaatttttatctttatttcagatattaactgaaatcacaacattagttttaaaaccagcaactacttaaaaataatttaaaaaaacaggcaatttctactctattttaaacaaata

SEQ ID NO: 16345 - DNA, 599 bp, Chicken  19866894223605_1
  misc_feature (1)..(11): n is any nucleotide
nnnnnnnnnnncaatacatctgtaagcagatatttgaaaagcatggggttttatttgaataatattaagaatggtagccctaattttttttcagacatacaaaatataaagacaatgagtgtcttttactaacataatattcatgcaggtaagtttaaaggaaatgtaaatgaaattaagatatcaacaggatctcaactgtcctgttctactccactctaacctgaatatataaaaacatacaatgtgtatatatatatatgtaggttgctctgaaagtaatgcctctctttatttccrtggaaactacagcagatacaaatggcacaataacattattcgatagagaaaattctcaactacaaaacaccatttttcaacgtaatcaccaccagtcattgtgcattttcaccagtgatgaacaagaacctgcatgccacactcataaaagtccgcaccagtggaggtgacctactgttgctgccacaactgctgaaacacaccacccactgcctcactgcactcacatccactgtttggtctctatcaactttcagcaagcttcartggatgccagtgggtgcaattttttctgcatg

SEQ ID NO: 16346 - DNA, 484 bp, Chicken  19866894223605_2
ttgctctgaaagtaatgcctctctttatttccrtggaaactacagcagatacaaatggcacaataacattattcgatagagaaaattctcaactacaaaacaccatttttcaacgtaatcaccaccagtcattgtgcattttcaccagtgatgaacaagaacctgcatgccacactcataaaagtccgcaccagtggaggtgacctactgttgctgccacaactgctgaaacacaccacccactgcctcactgcactcacatccactgtttggtctctatcaactttcagcaagcttcartggatgccagtgggtgcaattttttctgcatggaggaatgcagtcccacacctttgcttcatatacactttcatgtcagatgccattcagtcagactgcccctcttctgccatctgtcacacagcaacaaaatataatggaacatcggttgaagggtcaacatctgctgctttaccatcaacat

SEQ ID NO: 16347 - DNA, 600 bp, Chicken  19866894223606_1
tgacgtgggaaaagcgtaacatttaagtgattcatttacaggtttattttagtcactgtagcttaaaattaaatctttagcaataagcgtacctttattacagatgacaaattaataaaggttccaatagtatggtcaaataattttaatcaaaccacaattattaggcgttcattagaattgccctgaagacatcagccaacaagtcagaagtgaagctgtcttcaactgtgcaactgtggctgtttgcagacaaatcgtacactaccgggccgatgggtgacatctgccatttactcsccatgacgttatgagttgtttgagcacaagccttcagaaatccgactcctttacctgggagtccctacgttacattcttgcttctggcctcagcccgagcacaggctgcggttggctggagatggggttactttcaatgagaatatggctccgagagacattgttactttccagggagacatctggagctggaagcggtaactctgtagctccctgccaacaaatacacccctgagagccctggcttcatgtagcactgtcaccrttcaccagcgtttcactacatactgtacattggcc

SEQ ID NO: 16348 - DNA, 508 bp, Chicken  19866894223606_2
taccgggccgatgggtgacatctgccatttactcsccatgacgttatgagttgtttgagcacaagccttcagaaatccgactcctttacctgggagtccctacgttacattcttgcttctggcctcagcccgagcacaggctgcggttggctggagatggggttactttcaatgagaatatggctccgagagacattgttactttccagggagacatctggagctggaagcggtaactctgtagctccctgccaacaaatacacccctgagagccctggcttcatgtagcactgtcaccrttcaccagcgtttcactacatactgtacattggccgaggtacacatattaacccagaattcattaacctaaatgcggcagctgggtcaggcctcagttcctccttaccccattgctttgggttgggttacagatggaaattgggatctcctctgcccagaccggaggtgggatgacaagaagtgtctgccaacccactgcagcggttt

SEQ ID NO: 16349 - DNA, 546 bp, Chicken  19866894223612_1
taagctcaatagactcagggattttttttaagtgttgcggtcacagagcttgtcagtgaacaaggcatgctggaaccagagccagagccagttgttcagcatacaaatgatttttatctggtaagtggtgttgtttggctgcttatacacgagtctctcctatagaataatgagaaaaatgttcagtaatataaattcattattatttatgtgatatgcactccacccacacagcaatttcacttcttcctttcttctttttttgacctgcataatggtgctcggtttgtttcactcacrcttggcaaagtgcattctgcaaggaggtgttcaccagggctgccatggtcctgcagcccttcagagcgacatcccagctactctctgactagtgccaaccatcygcaatatctaggacaatctgtaagccctaggtagagatagagatggtttgttccaccatgcttactctgtttccctcctcattactgcaccagggcccgggagcagatgttagcagcaaaattcaaacaactaggggccagg

SEQ ID NO: 16350 - DNA, 442 bp, Chicken  19866894223612_2
aaatgatttttatctggtaagtggtgttgtttggctgcttatacacgagtctctcctatagaataatgagaaaaatgttcagtaatataaattcattattatttatgtgatatgcactccacccacacagcaatttcacttcttcctttcttctttttttgacctgcataatggtgctcggtttgtttcactcacrcttggcaaagtgcattctgcaaggaggtgttcaccagggctgccatggtcctgcagcccttcagagcgacatcccagctactctctgactagtgccaaccatcygcaatatctaggacaatctgtaagccctaggtagagatagagatggtttgttccaccatgcttactctgtttccctcctcattactgcaccagggcccgggagcagatgttagcagcaaaattcaaacaactaggggccagg

SEQ ID NO: 16351 - DNA, 600 bp, Chicken  19866894223615_1
taaatgcatatgcattctgctaatagctttgcttgtggctctaacctttgtttttttcctctactacttagagttacactttagcaaaatatagaaatgattgtcagggggaaattttgtccacgatcttgccatggcaggaagtagaaagatatatttttaagtcatcgtctttcagctgtgaaccctgtgttgaagctgcactcaaagtatgtctcttacagccttcctttgttgcttatcagaacttgtgcccagttctcacagttactttgtggaattaatatcaaaaacattcaytgggggaaatttctctgaaccagtattgggttaaaaagagtgcagtatccatatsatccacgataaacatatggacactctaaattcatgatttatctgggtctcagatgcctttccactcccttttgaatgacagcttcatttccttcatttctcttgaggctggaatgttttggttcaccactacttcagtttcatagcaaacttttctatttttttttttttggcaaagtaacatgacaggcctgattctgtcacctgaaatattttttactagtgaacaattaagatgattcaaag

SEQ ID NO: 16352 - DNA, 600 bp, Chicken  19866894223615_2
ttcctctactacttagagttacactttagcaaaatatagaaatgattgtcagggggaaattttgtccacgatcttgccatggcaggaagtagaaagatatatttttaagtcatcgtctttcagctgtgaaccctgtgttgaagctgcactcaaagtatgtctcttacagccttcctttgttgcttatcagaacttgtgcccagttctcacagttactttgtggaattaatatcaaaaacattcaytgggggaaatttctctgaaccagtattgggttaaaaagagtgcagtatccatatsatccacgataaacatatggacactctaaattcatgatttatctgggtctcagatgcctttccactcccttttgaatgacagcttcatttccttcatttctcttgaggctggaatgttttggttcaccactacttcagtttcatagcaaacttttctatttttttttttttggcaaagtaacatgacaggcctgattctgtcacctgaaatattttttactagtgaacaattaagatgattcaaagctgcatttttaaagcaaaatatctgttattcctccaaacttcttaaccattaagc

SEQ ID NO: 16353 - DNA, 600 bp, Chicken  19866894223619_1
caaaaaatgactttcatttacctataatagcaactgtaaggacaaagcagtggttgaaagagatgagcaatgtttcttgcaaaataaaatgaggaataaacattagactctgtcattcacagctgtataagctttggtcattattgacagcctttaaatgtcagggcaaataagcattcacctatcgtatccacatttatatctttccctatgtatatccaggcatacatggaatagctttatcatgattctgcagcggggagaaaagctctagttagagaggttagagctaaaccacamatacagcagggccacgcatacctttgctttaacacagtttatatccctataatttagttaatataacaggtgtgaaaggagattaatttcatcttgtcaggaagaggctattttaagcagtgaagatggtcagattaaaatcagaatttcagacaaggggatgaggcaagaatgacattgtttgcattttgaagcattctgtagacactcatttctgcttctagcatgaatttggtctttttttttttttttttcctgcagagtcaatattacaagacagagctatattcaagggaaaaa

SEQ ID NO: 16354 - DNA, 600 bp, Chicken  19866894223631_1
aaatacatcagggaggatagatgttccaaactgagagagaggaagtaaaggaagtaaacttagaaaaaaagaaaaagaatattcaaatggtagcaaagtccaagtaattcacatacaccacagttcctatgtgtttctaagaaggcaccaattttcttgactcagggtggatttgtattgctttgccttcttacccttttataaaaatgtactttaaactggaatacaattatgtgtcaaggttttaaaccacatgcagggatgattgcagagagtaggtaaagaaaactgtaatcatckaagtggtgtataacagatctgaactattctgaatgggtaagacattactccctcttttatacctgctattctctttttatattcagtaagattgtcttatttatgaatatttgaatacaacactttcattaatcacttgactgtatacaattttgtacagtgtgagcagtaatcgcactagtagcccactgataaagtatttacagaacacctttcagttaaatatccaactcacccttcgttgctttctttttctttcccaagttgctaccactagaacagttaatacataccttctca

SEQ ID NO: 16355 - DNA, 599 bp, Chicken  19866894223633_1
  misc_feature (1)..(13): n is any nucleotide
nnnnnnnnnnnnngaaaatgacatctcagtacctgagcatccctgaccaaagcacgctcatctctggttgaagtggagctccgcatggttgggttggatgctccaaggtgagatgcaggcagcttcctggacgtgttcaggccctggcgctctgtgtgaggatggttccctgctggcagtgcaggatgtggcttcagcacacacctgagcatgtcccctgaggggggggagggctgtgcaattcagtcctgcagtcaattgatgctgagtgcgaggccagctgtggggttgtatggagamgatggtgtagtatggggcagcagaggttctgaagttagttacttcatgttagtcacacatctaatcgcatcgattaaattattaaattgcattaacgatccaatcccctttggcttcacatttacaattagcttggctcataaggaagctgacccttgagtaaggagcaagctggcatcacagkgcgatgtgtcccttctcacagagcatctgttcagccaccttgcagctccagagcaccagcttcattgcacttggagggacctccagaagcatttggcttagcccccactcagagc

SEQ ID NO: 16356 - DNA, 600 bp, Chicken  19866894223633_2
gatgtggcttcagcacacacctgagcatgtcccctgaggggggggagggctgtgcaattcagtcctgcagtcaattgatgctgagtgcgaggccagctgtggggttgtatggagamgatggtgtagtatggggcagcagaggttctgaagttagttacttcatgttagtcacacatctaatcgcatcgattaaattattaaattgcattaacgatccaatcccctttggcttcacatttacaattagcttggctcataaggaagctgacccttgagtaaggagcaagctggcatcacagkgcgatgtgtcccttctcacagagcatctgttcagccaccttgcagctccagagcaccagcttcattgcacttggagggacctccagaagcatttggcttagcccccactcagagcaagctgaaggctgcaggttgctcgcagcagtgcagagggatgccagggcagtgcagctgaccatgattctgatgcggagaccaggcgtgggagctgtgagaagatgaacttaaatgaagctctgtagcctgaggtaaatagtgctcatcgtggataacaatctcccagtctttctcatgctacgt

SEQ ID NO: 16357 - DNA, 600 bp, Chicken  19866894223637_1
agcaccaggagatgctttggaaagaaaggactcaagcatacggccttctcacctctgcgggtgccaagcgttgagtacgtcctgctcataccccgtcactgctggtgctggctgtgagctgcggctgcgggaagctgggcttccctatggcagtttgcagagcaggaaaggctccgtgggacggctgcgaccgctgggctggcaggaagatgtgcaaaactgacagtcaaatgtgacccaaaagcaacgttggggtttgcaaagtacaacaaatccaggagggctttttactccaacaayagcaaaaaagaaagaaatgcatgggctccatggctgctcatcaaaaagaaagagagaaaaaaacactccaaagccacctcaacagaccttccattaaagagcaacctcgtgacaaaaaagatgcagaaaggcattgcgctgtgcagcaatctgccacaggatcagggagcacagcatgaagaccagggcaaattcatatccgtaggaaggccggccctgagcacatgcgaaggaggaaaaaaacggggggagggggcagaacaaaacactattttgacaacgcctgtgaaactcgtcgtg

SEQ ID NO: 16358 - DNA, 600 bp, Chicken  19866894223637_2
gcatgcagatctgaggaagcttggagaggcacctgggcaaactcgacaaatcacagaccctctgaagcgatgcccagaatccagtgaagagagagatgcagtgaggtgaggtcagtccttgcacgtgcaagacaggaggagaaagaagtgacggggaggctcccggcctccgagtccacatctcttgcttctgagttcatatgagagtatctctgattcgctcactcgtcgagctctagcacaaaaggaatccaaaaatagacactttccaaagagttacaaaagggtctgtgtgtgcgkggctcacagccgcactgagaagtcagaggttaaggacaggcacatcgaagaggtcacagacgccttcgctctcatccaggttgtagatgtagtcrtgatctccaggaggaggggagaggcggagcaagggagcaaacactagaagagaaaagccagcagttggttacaaggctcagcactcccacagctatcctggagctgagccactgtggggcctcgtggcctgcgatccttgagattgcctctcatcagccttgaagcactgaagaggctcatctgctcctcatgcatcgctcacag

SEQ ID NO: 16359 - DNA, 600 bp, Chicken  19866894223637_3
atgcagtgaggtgaggtcagtccttgcacgtgcaagacaggaggagaaagaagtgacggggaggctcccggcctccgagtccacatctcttgcttctgagttcatatgagagtatctctgattcgctcactcgtcgagctctagcacaaaaggaatccaaaaatagacactttccaaagagttacaaaagggtctgtgtgtgcgkggctcacagccgcactgagaagtcagaggttaaggacaggcacatcgaagaggtcacagacgccttcgctctcatccaggttgtagatgtagtcrtgatctccaggaggaggggagaggcggagcaagggagcaaacactagaagagaaaagccagcagttggttacaaggctcagcactcccacagctatcctggagctgagccactgtggggcctcgtggcctgcgatccttgagattgcctctcatcagccttgaagcactgaagaggctcatctgctcctcatgcatcgctcacagcctggcacaacagtgagaactatgccctgagcccagaacaacgagggcaaggctgtgaatgcaaggctgtcacctgtaggaaggcacacaggact

SEQ ID NO: 16360 - DNA, 600 bp, Chicken  19866894223637_4
caagggagcaaacactagaagagaaaagccagcagttggttacaaggctcagcactcccacagctatcctggagctgagccactgtggggcctcgtggcctgcgatccttgagattgcctctcatcagccttgaagcactgaagaggctcatctgctcctcatgcatcgctcacagcctggcacaacagtgagaactatgccctgagcccagaacaacgagggcaaggctgtgaatgcaaggctgtcacctgtaggaaggcacacaggactggtcttctgctccagaaaggccacaccaygagggggaaactcttgagactcaccttcagatgacatcagctcctccagcagctcagagttcatacattctagggaagagaaacacagtaagcaacgcgctctgatttctgctctgtgtgtgtgtgtagtttcccacccttcccagttttttctggtcctccccatgccacccctttctgggctaaggcaaggtgagtgcaggcagtgccagcgggaagctcagcctcctgccctgggcagaggaccattcagtcagcaccaaaacattctgcaggaggttcctgcctgcttagctcagc

SEQ ID NO: 16361 - DNA, 600 bp, Chicken  19866894223643_1
tgccggaggaagccgaggccggcacggtggtggggcggctggcgcaggacctgggcctggaggcgggcgaggcggaggcgcggcggctgcgtctggtggcgcggggccggcgggcgagcgtggaggtgagcggggcgagcggggcgctggtggtgagctcgcggctggaccgggaggagctgtgcgggaagagcgcgccgtgcgccctgcgtctggaggtgctgctggaccggccgctgcgcgtcttccacgtggaggtggaggtgaccgacatcaacgacaatgccccgcgcttccccrmcgcctacaaaaacatcagcatcgcggaatcgtctctgcccgggtcgcgtttccctctggagggcgcgtcagatgcggatatcggttcgaacgcgcagctctcctatacactgagcccctccgagcacttcgcgctggatgtgcagcggggggaggagaatctggaatcattattcttggttctcacaaaacctctggaccgcgagtcgctgtccgagcaccgcttggtgctgacggcgagtgacgggggcaggccggcgctgacgggcacggtgcagctggtgatctcggtgctggatg

SEQ ID NO: 16362 - DNA, 600 bp, Chicken  19866894223643_2
gccggaggaagccgaggccggcacggtggtggggcggctggcgcaggacctgggcctggaggcgggcgaggcggaggcgcggcggctgcgtctggtggcgcggggccggcgggcgagcgtggaggtgagcggggcgagcggggcgctggtggtgagctcgcggctggaccgggaggagctgtgcgggaagagcgcgccgtgcgccctgcgtctggaggtgctgctggaccggccgctgcgcgtcttccacgtggaggtggaggtgaccgacatcaacgacaatgccccgcgcttccccrmcgcctacaaaaacatcagcatcgcggaatcgtctctgcccgggtcgcgtttccctctggagggcgcgtcagatgcggatatcggttcgaacgcgcagctctcctatacactgagcccctccgagcacttcgcgctggatgtgcagcggggggaggagaatctggaatcattattcttggttctcacaaaacctctggaccgcgagtcgctgtccgagcaccgcttggtgctgacggcgagtgacgggggcaggccggcgctgacgggcacggtgcagctggtgatctcggtgctggatgc

SEQ ID NO: 16363 - DNA, 600 bp, Chicken  19866894223648_1
agtggatcatccttagagtcccttccaacccaagctgttctacaattctttcatgatttttccaaagcagctgtcactgctgagagtgtttcccatcctcctgtgttcctcaggtgttgtccacaccatgagcactggaccattttgactcctcctaaaaccatacagaccccagcaccagtgtggtgcacaccactgctttgctcaatggtaccacggctcctattttcctgcacttgaggtgaaatccagcaaaatgagcaagcactacttgcagtgattgcctcaagctgggatggragagaaggatacattatctgccagaaccctttcagctgctcagaaactctctgcttgcctggaaccccactcctggggtgccacaactcgaagaatgtgaaagccatccctagtatccacatatcattgcactgagttttgttctgcaaagaatttgtcccagcatttttgaagagtaaagaccttttggaggaattgctgcctcttaaatctacttggctctttgctctcctaaatctcaaacatgaattctaacagtggtttaaatcatagcaaatttctctgaggggattaagcatt

SEQ ID NO: 16364 - DNA, 600 bp, Chicken  19866894223652_1
aattaaccgaataggctttgttgtagcctgtgccatatgcagtagctggttctttgaaacctcctgtttgtgtaatgtattgaaatggacgtttctcttatctttccaaccgcaggattgatctcaagttaaacaaaaagccgagagctgtaagtatcagtgctctgtcgctgtttttgttgctcatcctggaaagcctcctctgctgtgatataagatgtggtttttgtggttggggatgaagtgtgagcgttgtcttccagatgtaatagtgaatgagcccaggtaggctcgttacgragcagggttgcacttaagccgtgtgcacttcygatggacagaaaagctgtttggcatctttctgttctgttgtgaagtgcaccaataaaagcacctggtttgggctgaaaacagatctcttttctcttttgccttcagctcatggtgtgtagaatgagagaaggcgaggaatcccagcagctctgccaacagaggtggaagtagaaaggtcttaacgtgcccatcttctcctgtctctgcaggactactagacacatcagtgctgaagattctgggatccgggcctacatgaatccccac

SEQ ID NO: 16365 - DNA, 600 bp, Chicken  19866894223652_2
ccatatgcagtagctggttctttgaaacctcctgtttgtgtaatgtattgaaatggacgtttctcttatctttccaaccgcaggattgatctcaagttaaacaaaaagccgagagctgtaagtatcagtgctctgtcgctgtttttgttgctcatcctggaaagcctcctctgctgtgatataagatgtggtttttgtggttggggatgaagtgtgagcgttgtcttccagatgtaatagtgaatgagcccaggtaggctcgttacgragcagggttgcacttaagccgtgtgcacttcygatggacagaaaagctgtttggcatctttctgttctgttgtgaagtgcaccaataaaagcacctggtttgggctgaaaacagatctcttttctcttttgccttcagctcatggtgtgtagaatgagagaaggcgaggaatcccagcagctctgccaacagaggtggaagtagaaaggtcttaacgtgcccatcttctcctgtctctgcaggactactagacacatcagtgctgaagattctgggatccgggcctacatgaatccccaccaggaataactgcagtcatctgaacgagcaac

SEQ ID NO: 16366 - DNA, 600 bp, Chicken  19866894223654_1
ctatggagaatttaattgcttagctcctgcctctatggcaattgtaattactgtgcagtactatttgaaaaaaaaaactgtggtgttttttagaacatagcactgaataataccaaggttagattcatacaacagcatagctccaagaattagcttccagaattaaccctgtgttcttttgatgagagcccaggcaaaataaagcaacggttattgtaaatatcctcatgtaaagatttctatacacactcttcaaatgcatttatccaccaaatatatgtgggagttagcacagcatcytttttccccctccttttccagctgaggaaactaaggcacagaaatgtgctgcctaatttgtctttatgaaaaatccaaagaagggaaaattagtatgtgaaaaattttgaatttatagcattttcaagctccttttacttctcatggatgtagctttgaaagaaacataataggcaaaagatgtgcctttttaagctttaaaaccctaaaaatttctgtaaaatgaaacataataaataaatgaataaatgttgctgtgctctactctgctgataattcctgttgagcagaatcgaagat

SEQ ID NO: 16367 - DNA, 600 bp, Chicken  19866894223657_1
taaatgtttatattattttaaaataagagtacattaaaagatgaagaatttgcaacatagctgtttctactttgactccagcagtgtaatacagtaccattcattaacttattgtgtgaccaaaatagactttgagatttagggaccaagatttttaagcatttttatccactgcatggactagcacagggacaagagggacaagaaaagtttgatttgtatgtactttatttcactccccctgtattaaaccaatgcttcaggtaagcattattagcaaaaaataaaaataaaaatatraaaataaaaataaatagggggctygcaagtgagaagaaacaggttaatcctcagtccagaattaatagaagattgtactacagtgaaaattgccttatcctgctgtttattgttagactttctttcaacttgtctaaccaggaccttccccctttcctgagcaaaagtccacaggaaaggcattctaggtttcagcgtttgttccttaatagcaaagctttagaggagtgccaggaattaaagatcacaaaagagtttggtaaaacatatgtggagactttgaaatgggaagaaaggagg

SEQ ID NO: 16368 - DNA, 600 bp, Chicken  19866894223657_2
aagagtacattaaaagatgaagaatttgcaacatagctgtttctactttgactccagcagtgtaatacagtaccattcattaacttattgtgtgaccaaaatagactttgagatttagggaccaagatttttaagcatttttatccactgcatggactagcacagggacaagagggacaagaaaagtttgatttgtatgtactttatttcactccccctgtattaaaccaatgcttcaggtaagcattattagcaaaaaataaaaataaaaatatraaaataaaaataaatagggggctygcaagtgagaagaaacaggttaatcctcagtccagaattaatagaagattgtactacagtgaaaattgccttatcctgctgtttattgttagactttctttcaacttgtctaaccaggaccttccccctttcctgagcaaaagtccacaggaaaggcattctaggtttcagcgtttgttccttaatagcaaagctttagaggagtgccaggaattaaagatcacaaaagagtttggtaaaacatatgtggagactttgaaatgggaagaaaggaggaagattacctcattttagcttcta

SEQ ID NO: 16369 - DNA, 599 bp, Chicken  19866894223659_1
  misc_feature (1)..(8): n is any nucleotide
nnnnnnnntgaaataattttcatcagaacttaaagatctggatgagacctgaggtgtatttgtaggagtggaaacaacctgtcttctcctcttccattcagcctttcactgaaacacatagtgctggagtaggcacagtggagttttgactcttaacagcagtgtgtctacagagtataactgaatactatctagccattcccgtgactttgaattttaatctgtacacagtcaagtgtttacaagacaagcctcttatttgactgaaaaactttaaaagggagtttaactgcattgtarggatgcataatatgaaatatttatcagtgtttcaaagaacttcagatactacatcacctttatccttcagtactaaggtctttaaaatgcagcttttagcagtgatayaacacaaaagcataaggaaggatgtgagcggagtagtggctttgtgttctctttctgtagaattataattaagtggtacctaaacattttaacatctgtctgcctctttaaatctgttttgcgtgcggctattttgccaagaaataaggatgaattaaaacttgcaagtaggataaaagggtttactgtag

SEQ ID NO: 16370 - DNA, 600 bp, Chicken  19866894223659_2
ctgaaacacatagtgctggagtaggcacagtggagttttgactcttaacagcagtgtgtctacagagtataactgaatactatctagccattcccgtgactttgaattttaatctgtacacagtcaagtgtttacaagacaagcctcttatttgactgaaaaactttaaaagggagtttaactgcattgtarggatgcataatatgaaatatttatcagtgtttcaaagaacttcagatactacatcacctttatccttcagtactaaggtctttaaaatgcagcttttagcagtgatayaacacaaaagcataaggaaggatgtgagcggagtagtggctttgtgttctctttctgtagaattataattaagtggtacctaaacattttaacatctgtctgcctctttaaatctgttttgcgtgcggctattttgccaagaaataaggatgaattaaaacttgcaagtaggataaaagggtttactgtagcagagaatccttgtagtaaataagtacaggtctcaaagatgctttttgtctatgcttcataccttttgtaccctgttttatttgtataaattctgtaggctaacgatga

SEQ ID NO: 16371 - DNA, 600 bp, Chicken  19866894223660_1
ctgtttaactacatttagctatcaacttgtgagatgaattcaactcctgtagactgctccaaactctcactttctgtgccactttatctacacaaaatgccagtttttataatataatcgagcaatataatgctgccactatctaactcagttttggtattttgcatctctagaactgctgaacacaatccttttatgagttagtactgactctgatttactaattctcaatatctttagctacaatatcacctctacttctagctgttgttaagtaacttcatacactgatcttctccrtaactctggattcaccttatttcctcagaattaaagctggaaagtaagtacaagcaatctgctgtgaagaattaaaagaactacaaccccatgagcatgcacacaccatttatcagctgagatgtccactttcccttacaaaatgacacattagtttaaaccactccagctcacgtttacttcccactgagagcaaaacagaatccctccacaccatttcatttaattaagtgacagaagaaaaatctttacagaccacaagatgtcctgacaaaatcaagttctctctctcccattttg

SEQ ID NO: 16372 - DNA, 600 bp, Chicken  19866894223662_1
aacacagtgccttccatctgggaagccatctcctcaagcttcctgataccgctgctttcaaactaaccttgtttaaaggcacctcacagaaagcccacccagtgttcaatacaacaattcaagctgaagagggagcagcacattgactgttctattacttctgtgtcataaacaatcgctctgcctcactgggctgttgctgtttgtggttcagcactgccaagcttccacaaccccactcactcagtgcaagtttccccagcaattatcacccaattcctttaagtcccaccttcagaygaggcaagagcccagccaacaggcctgctgcaacagcagtgacttccacagatcatacacatcaccacagaaaggcattcccatcacctcacacctttttgaatgatccaccacatatctcagttacactaagcagtttttcattcagcctccggaacttcatttgctggaggtaagagggaggagaagaggaacaaccccatctccagagggcacagctggatttgcaaaacaccactgagctcacaaccaacatgacagtcaaatgcatttctacccatctggaagtgtaaactcact

SEQ ID NO: 16373 - DNA, 599 bp, Chicken  19866894223668_1
  misc_feature (1)..(13): n is any nucleotide
nnnnnnnnnnnnnaaactagctgaaatttatgttgtacttacagctttcaactaggctcaatataagcctagtacatcgtactgtgggagtcattaagctgctctgtgacagtgtcagccaaaatctgtgtatcccatgcagcatcctttgtatgacacataaagaggaaaaaaattcattcaagaaaaaaagaagaaaaaacacatcaatttcaaatgatctgacaactctgactcctatagttaaaatataataaagattttaagtattaccttttttatcttttaggatagaaccawatgttgacttaaaagtactgtgctgggtaattttgcaaattatgcatttttaccaacaatatgcatacttacacgatcttccagatgcagaccaatggattgatgcagygggagcagcagtgttaatgtgagccacccagttacaagagatgatgagcaaatatgaggactacacttccggagtgtaaaatgatgatagataatttgttttaaacacagcatggctctggaatggtatgtattctgaatgtatgcttgaaagtatttctggtatctgagtttgtagatattatcatgct

SEQ ID NO: 16374 - DNA, 600 bp, Chicken  19866894223668_2
cagtgtcagccaaaatctgtgtatcccatgcagcatcctttgtatgacacataaagaggaaaaaaattcattcaagaaaaaaagaagaaaaaacacatcaatttcaaatgatctgacaactctgactcctatagttaaaatataataaagattttaagtattaccttttttatcttttaggatagaaccawatgttgacttaaaagtactgtgctgggtaattttgcaaattatgcatttttaccaacaatatgcatacttacacgatcttccagatgcagaccaatggattgatgcagygggagcagcagtgttaatgtgagccacccagttacaagagatgatgagcaaatatgaggactacacttccggagtgtaaaatgatgatagataatttgttttaaacacagcatggctctggaatggtatgtattctgaatgtatgcttgaaagtatttctggtatctgagtttgtagatattatcatgcttcagggatattatcttcctgttccccattgctttgtaaaaatacatatggcagagtaaaatggatatactagcacagcagctaaactacacagagtaatgcattatgcgc

SEQ ID NO: 16375 - DNA, 600 bp, Chicken  19866894223669_1
tttttcatcagaaagagaactactgttgtcctctagacatctgggttgggaatttgtgctgtttaatatgttcacaactgaactaaaggaatggccaggattagtgcgttgatcagattttctggtgatttttgaagatcatagtcaaagtttaagctgaaaagagtgattttagagtcacttgtgaatagttgtctgaaaatgtcccctcaacattttgatccagcagagaatgctaacagtgcattcggaattattaggatgccaatggataataataaaaaaaattgctgtgagacwgtgtggtcagtggttcatatacattttgagtacaatgtgcayttttatgtctgctcctaaaatagtgacgtggaatttgaaagggcagggaaggtatcaggaatggacaaatatgaagggccatagaagagagactgacagcctcgaggtgctcagagggaaaagaaggtgtccagaagtcatggagcagaagttttgaatggcatgatggaggtggaaatgttcctcatttctctaaatgcagcacctatgaggcatcagacaayatggctgcacrgcagatttagagcaaacaaaagg

SEQ ID NO: 16376 - DNA, 600 bp, Chicken  19866894223669_2
gggttgggaatttgtgctgtttaatatgttcacaactgaactaaaggaatggccaggattagtgcgttgatcagattttctggtgatttttgaagatcatagtcaaagtttaagctgaaaagagtgattttagagtcacttgtgaatagttgtctgaaaatgtcccctcaacattttgatccagcagagaatgctaacagtgcattcggaattattaggatgccaatggataataataaaaaaaattgctgtgagacwgtgtggtcagtggttcatatacattttgagtacaatgtgcayttttatgtctgctcctaaaatagtgacgtggaatttgaaagggcagggaaggtatcaggaatggacaaatatgaagggccatagaagagagactgacagcctcgaggtgctcagagggaaaagaaggtgtccagaagtcatggagcagaagttttgaatggcatgatggaggtggaaatgttcctcatttctctaaatgcagcacctatgaggcatcagacaayatggctgcacrgcagatttagagcaaacaaaaggaagtactcattttcacagcacacaattaagtcatgggatcca

SEQ ID NO: 16377 - DNA, 600 bp, Chicken  19866894223669_3
aatggataataataaaaaaaattgctgtgagacwgtgtggtcagtggttcatatacattttgagtacaatgtgcayttttatgtctgctcctaaaatagtgacgtggaatttgaaagggcagggaaggtatcaggaatggacaaatatgaagggccatagaagagagactgacagcctcgaggtgctcagagggaaaagaaggtgtccagaagtcatggagcagaagttttgaatggcatgatggaggtggaaatgttcctcatttctctaaatgcagcacctatgaggcatcagacaayatggctgcacrgcagatttagagcaaacaaaaggaagtactcattttcacagcacacaattaagtcatgggatccacgctacaggatgtttcatatgccaaaagtaaatataggtttaaaaatgattagacaattcatgaaagaaaggtccattgagggctcctaaacaggaagatgctgatgtaacctccagctcaggaagtccccagactgcagattgccaggagctctgaaagtgtctgagggagtgctcctacagtctttcttttgcatctgttactggtcactgccctctgggga

SEQ ID NO: 16378 - DNA, 600 bp, Chicken  19866894223669_4
ataaaaaaaattgctgtgagacwgtgtggtcagtggttcatatacattttgagtacaatgtgcayttttatgtctgctcctaaaatagtgacgtggaatttgaaagggcagggaaggtatcaggaatggacaaatatgaagggccatagaagagagactgacagcctcgaggtgctcagagggaaaagaaggtgtccagaagtcatggagcagaagttttgaatggcatgatggaggtggaaatgttcctcatttctctaaatgcagcacctatgaggcatcagacaayatggctgcacrgcagatttagagcaaacaaaaggaagtactcattttcacagcacacaattaagtcatgggatccacgctacaggatgtttcatatgccaaaagtaaatataggtttaaaaatgattagacaattcatgaaagaaaggtccattgagggctcctaaacaggaagatgctgatgtaacctccagctcaggaagtccccagactgcagattgccaggagctctgaaagtgtctgagggagtgctcctacagtctttcttttgcatctgttactggtcactgccctctggggagcagggagcga

SEQ ID NO: 16379 - DNA, 600 bp, Chicken  19866894223675_1
aatttaagttcaaacagtctgaactgatgagttggtctatttgaagcagatcaatgtaatggaaaatgtaactgttcctataatttgcaaagtatttctccttgcagctaaatatgttaccttttctcagaattagttttgtgtggataataaggaatcactgtgaacttctttttaggtttctactagtcttcaggattgtctctttcacttctatggaagaatatttcacataccacttgagtcctcattttatatcagatatttcctatggaaaaaagaataaacaattaccttccrattattgcaatatatgatgttcaaataactgttggaacagcttacacttggagggttcttgttcttcagcactagcgttcagcctctttggttgtccttgtccatgtaaggagccactgtattccaccctacctttgcaaatattacggcactcagaagmtagatactgcttctggtgatggtgattttattggacttagatgaacaacaatctctttgcgatcacttaatctcatatgaaaattcatttattattttactcaggtctttctcaaagggtgacactccacctttctcrtg

SEQ ID NO: 16380 - DNA, 600 bp, Chicken  19866894223675_2
ctgtgaacttctttttaggtttctactagtcttcaggattgtctctttcacttctatggaagaatatttcacataccacttgagtcctcattttatatcagatatttcctatggaaaaaagaataaacaattaccttccrattattgcaatatatgatgttcaaataactgttggaacagcttacacttggagggttcttgttcttcagcactagcgttcagcctctttggttgtccttgtccatgtaaggagccactgtattccaccctacctttgcaaatattacggcactcagaagmtagatactgcttctggtgatggtgattttattggacttagatgaacaacaatctctttgcgatcacttaatctcatatgaaaattcatttattattttactcaggtctttctcaaagggtgacactccacctttctcrtgggacttttgtaggctctagttccacttctagtagtaaagcagaaaaaatctgtcttcagggagcatattttgtgagacttcttcctgaagtctgcagagaggtataaatcttgtgcttgtcctaactagaaatctgtcttaagttttataatacgttttc

SEQ ID NO: 16381 - DNA, 504 bp, Chicken  19866894223675_3
crattattgcaatatatgatgttcaaataactgttggaacagcttacacttggagggttcttgttcttcagcactagcgttcagcctctttggttgtccttgtccatgtaaggagccactgtattccaccctacctttgcaaatattacggcactcagaagmtagatactgcttctggtgatggtgattttattggacttagatgaacaacaatctctttgcgatcacttaatctcatatgaaaattcatttattattttactcaggtctttctcaaagggtgacactccacctttctcrtgggacttttgtaggctctagttccacttctagtagtaaagcagaaaaaatctgtcttcagggagcatattttgtgagacttcttcctgaagtctgcagagaggtataaatcttgtgcttgtcctaactagaaatctgtcttaagttttataatacgttttctgtattgctaatgcctcttctacaagtcaggacttttcttcc

SEQ ID NO: 16382 - DNA, 600 bp, Chicken  19866894223678_1
ttaagaatttgttttatcccaggcctcttatttatttccttatctatctatctatctatctatctatttatccatccacatattcattttcacagaattacagaactgtaggggttggaagggacctacatagatcatcgagtccaactcccctgccaaagcaggcccctacagcaggccgcataggtaggcatccagatggatcttgaatatctccagagaaggagattccacagcccccctggggcagcccattccagtgctccatcacccttgctgtggaaaatttccttcacataytggtgcagaacttcctatgttccaattcatggccatttccccttgtcctgtcccaacagaccactgaaaagaggttggccatgtctctttgactaccacaatttacctgagggctggcctggaaacctaaaatattttggatagttaggaatttatctttatcagtgttttcattgtttcattgttttgtagttaaaatccttcacatatatacacagtgatcactggcctattgaatagctcctttgaactttctacattccctaaaatttcaggttataattagtaaacacatcagat

SEQ ID NO: 16383 - DNA, 600 bp, Chicken  19866894223680_1
gggggaggaagcaaaaccgaaagcataagggactccttcacaaaggggcaagcccatacgacagcttcactgctgctaatttctcctacagtgttctatcgtctccagaacgatttccacccccaatgggttttaaggaagtgtagtctgccatagtggcttaccatcacgttcatttacggagcaaaaaaaaaggagttaatgattgagctgtgtgacggagcactgaaacaaccacgttgtaaattcaagtgcggggtacgaagaggcacatcacggggtacagaggagggacgatcrtccccagtgcaaagctccccaggaactcagaacgggattgcacaaacacatagggggaaaacgtcagcaattctgctgtaaaggcagcgaggcactggcaggggctccgtgctcctgcccatcaccaaggtgccggggttatggagtgtgcatttctacggcgatgagattagaggcttattcccacaatgacagcactttgttaaaatggaaaattaatctgatttgagaaggcaaacgagtgagctagtactgctgtggaggaggctacgatacggagtgggaagtgactcctgctcc

SEQ ID NO: 16384 - DNA, 600 bp, Chicken  19866894223681_1
ctcacagccactcagcgactccgctgtcaatccctggtcaggagaaaacaggaatattcccaagatcagatgctcaaaccacatcattacacaagcacagcctgggctgggcattgctgacaccagtgctggtgtatgcagcaggtatgcccaccacattcctgcagctgtgtgctgggatgtggcaggagcaccctgtgcatatcactgacctggtcctgcagctcctgcagcagtgagaacgctccgaagaagtttctcactgtgtcactcaaatgctgctgcaccatctcctgcccratccgcaggcagatcaaggcaattaggctgattgtcttaatgcacaggacaacacgggcytgggcaccactggggaaactgaagaggacatccattagcagcttgccctacacatatccctttttccctcctctgcctcctgcttttgtgttttctggcattatcagaaggtcttgagcagcacaggctctacaaatgaaccatatcccagagcaaggacacgttcatctgggtgcaaccaaacacacgtcaaactggggctgaaggcacagccaactgcagcactcacccgacagacag

SEQ ID NO: 16385 - DNA, 600 bp, Chicken  19866894223681_2
caagatcagatgctcaaaccacatcattacacaagcacagcctgggctgggcattgctgacaccagtgctggtgtatgcagcaggtatgcccaccacattcctgcagctgtgtgctgggatgtggcaggagcaccctgtgcatatcactgacctggtcctgcagctcctgcagcagtgagaacgctccgaagaagtttctcactgtgtcactcaaatgctgctgcaccatctcctgcccratccgcaggcagatcaaggcaattaggctgattgtcttaatgcacaggacaacacgggcytgggcaccactggggaaactgaagaggacatccattagcagcttgccctacacatatccctttttccctcctctgcctcctgcttttgtgttttctggcattatcagaaggtcttgagcagcacaggctctacaaatgaaccatatcccagagcaaggacacgttcatctgggtgcaaccaaacacacgtcaaactggggctgaaggcacagccaactgcagcactcacccgacagacagggaggtgaggaagcccagcaccgggagcagcacctcctggctgatcttggggagaatatc

SEQ ID NO: 16386 - DNA, 600 bp, Chicken  19866894223681_3
tcctttttttggttgagaacgtaccaccactgcttacagcgatgcccaacagttcacagcatcagcagcaagaccagaagatttatcttacgttgtcctctttcctaactcctcaacaaaccaaacacccaagaaaagagtgccaataacaaaagccacaaacaattccccatttcctctctgtttcttgtacacctgccatcttccagctcatcacagaggctcttcccctcacagaatatccacgctgccaaatgctccaaggactgactttatcctatctgtgatcctccagcttcrttgccttcgtatcaggttgccaaatgctattcacaagagcattaaccccccgtcacccccaaacaacaacttgaggacagcaaagcagaacagctgcagctgtgaytgtaactgagtggaaagtgattctgctgaaaaaatgggatttctccccaccccatcaaaagtctccccttccacgctggaaaaactgacagtgcttttcttgttttctttaaatgaacakctgtggcctttttccttctaagttttaagtgatcaaaatgctattgaagtgttttttttttccccatttaaaca

SEQ ID NO: 16387 - DNA, 600 bp, Chicken  19866894223681_4
aactcctcaacaaaccaaacacccaagaaaagagtgccaataacaaaagccacaaacaattccccatttcctctctgtttcttgtacacctgccatcttccagctcatcacagaggctcttcccctcacagaatatccacgctgccaaatgctccaaggactgactttatcctatctgtgatcctccagcttcrttgccttcgtatcaggttgccaaatgctattcacaagagcattaaccccccgtcacccccaaacaacaacttgaggacagcaaagcagaacagctgcagctgtgaytgtaactgagtggaaagtgattctgctgaaaaaatgggatttctccccaccccatcaaaagtctccccttccacgctggaaaaactgacagtgcttttcttgttttctttaaatgaacakctgtggcctttttccttctaagttttaagtgatcaaaatgctattgaagtgttttttttttccccatttaaacaagcatcagcaaccaaagcgtttgcaaccactaaaaaggagcaatgcaaaaaaaagcaaaaaaccaaccacgcctgttttaaacattcccccccaaaaatacttttt

SEQ ID NO: 16388 - DNA, 600 bp, Chicken  19866894223681_5
tcccctcacagaatatccacgctgccaaatgctccaaggactgactttatcctatctgtgatcctccagcttcrttgccttcgtatcaggttgccaaatgctattcacaagagcattaaccccccgtcacccccaaacaacaacttgaggacagcaaagcagaacagctgcagctgtgaytgtaactgagtggaaagtgattctgctgaaaaaatgggatttctccccaccccatcaaaagtctccccttccacgctggaaaaactgacagtgcttttcttgttttctttaaatgaacakctgtggcctttttccttctaagttttaagtgatcaaaatgctattgaagtgttttttttttccccatttaaacaagcatcagcaaccaaagcgtttgcaaccactaaaaaggagcaatgcaaaaaaaagcaaaaaaccaaccacgcctgttttaaacattcccccccaaaaatactttttttttaatgaaaaattggtttgtttttcaaccagctgcattacacacattttcttctcgctattcagcaaagaatttcaagctgaaaaaattgaaaaccttgccagtattttttttttaat

SEQ ID NO: 16389 - DNA, 600 bp, Chicken  19866894223688_1
ttgggctcagacctctgggctagctgctgccgagcagcaggaggtctctgacagacatgcaaacccagcagtgaaaggcaaccttttgtaaatctcacctgtaatactgatcgctccattcaccttccagtcaccagtaagcagtggtaattgtccatcaatgcaacagaacagcacagggctgtttgcctgtatctcagggctgttgcagtgaactttatagtcgtttgaatatgagatgatacgtagtggagagacttgtatttctttggtgccttcgtatatcagatttaaagaccrgtatctgtttgcaaaagtgcatttgtaggtacctgtaagacaaagacaacatctgcacacagagcacattttgctgttggctccctgcatttggagctgtgaactggaagccactttgcgttgagttttaacacatcctggcacaatgccacccatttcccttcctctgattttcagaaagctctcaacaggarcacgtgaaaaactaaactctgtgggctcctctactatttgggttccgtttgcaaaggggacaaaggcctttgaggcaaaatgcagtcacagcctcagttacctcac

SEQ ID NO: 16390 - DNA, 600 bp, Chicken  19866894223688_2
tctcagggctgttgcagtgaactttatagtcgtttgaatatgagatgatacgtagtggagagacttgtatttctttggtgccttcgtatatcagatttaaagaccrgtatctgtttgcaaaagtgcatttgtaggtacctgtaagacaaagacaacatctgcacacagagcacattttgctgttggctccctgcatttggagctgtgaactggaagccactttgcgttgagttttaacacatcctggcacaatgccacccatttcccttcctctgattttcagaaagctctcaacaggarcacgtgaaaaactaaactctgtgggctcctctactatttgggttccgtttgcaaaggggacaaaggcctttgaggcaaaatgcagtcacagcctcagttacctcacacagaggacgaggcggccccactgctgaacagccactcctgtgatgtgatagggaatcctggcactgaaaatatccatgtcagtcttccacgtggtactggcactgcaggtcagtgggtggttcattacagaaaacaatcagaccaagaarcggccaaaagctgacagggaaatgatgagggatgctctgtttt

SEQ ID NO: 16391 - DNA, 600 bp, Chicken  19866894223688_3
cccatttcccttcctctgattttcagaaagctctcaacaggarcacgtgaaaaactaaactctgtgggctcctctactatttgggttccgtttgcaaaggggacaaaggcctttgaggcaaaatgcagtcacagcctcagttacctcacacagaggacgaggcggccccactgctgaacagccactcctgtgatgtgatagggaatcctggcactgaaaatatccatgtcagtcttccacgtggtactggcactgcaggtcagtgggtggttcattacagaaaacaatcagaccaagaarcggccaaaagctgacagggaaatgatgagggatgctctgtttttctgtcttactccagggagtcgcagtcactgcatgcctctgcttctcatagaattagctgcactagagatttgcatctgctcttttaatgataggaaatcataccagaatcctcctgcgtaacgttggtaattgtaagaamtgcctgtgacatcgcagtgttgttgtctgtcctcacggagtgccgtgagctgttgaggatgatctgactgtcacgataccaggtcatgttctcagacgtggtgtttatctcacaca

SEQ ID NO: 16392 - DNA, 600 bp, Chicken  19866894223688_4
ctcctgtgatgtgatagggaatcctggcactgaaaatatccatgtcagtcttccacgtggtactggcactgcaggtcagtgggtggttcattacagaaaacaatcagaccaagaarcggccaaaagctgacagggaaatgatgagggatgctctgtttttctgtcttactccagggagtcgcagtcactgcatgcctctgcttctcatagaattagctgcactagagatttgcatctgctcttttaatgataggaaatcataccagaatcctcctgcgtaacgttggtaattgtaagaamtgcctgtgacatcgcagtgttgttgtctgtcctcacggagtgccgtgagctgttgaggatgatctgactgtcacgataccaggtcatgttctcagacgtggtgtttatctcacacaccatctggatggtatccccttcaaaaatgtgggcagggctcactgtgaagtttgtgcgatctgggaagacaaagtgcagcgttctgcatcatttcatggcgcctttcattgtggcagtcgcagctgccctgcagctgcacacactcagctttggctgcagggaactgcctctgatagcagatac

SEQ ID NO: 16393 - DNA, 600 bp, Chicken  19866894223689_1
tgtgttgaaaaagctttttccatttcctgcatctgagtcataccagcatcatgaagttgttcggattgtcctttcatagcaaaattctggctttcttcttgcggtgtctggcatttttgattgagaccattttcctcactcattgccaaggcagtgctctgaatgcccactgcacgctctgacacagagttgcagggttcagaggctgacagtccacctgctgtgttttgactcactaagtgtgcttcagctaattctggtgaacaacctgcttctacaggcaatacaatttcagtatgyagcaaagatgcatcagctgaaatacctggtccctgtctgtctacaggttgggaatactctatcctcatttccacggtctgagagaaggtacctgaattttcatcattgattctaacttctgaatcaacaagtaaattacgttcctcctctgcaggtaacatgcttccagttgtgcagcaagtgacacgtctgtcttctggaagcaggatttctccatttaatggattaagacctgtaaagttgaaagaaataccgttttgtygggtaggctaatactgcacatccaraacaytatttttt

SEQ ID NO: 16394 - DNA, 600 bp, Chicken  19866894223689_2
aacaacctgcttctacaggcaatacaatttcagtatgyagcaaagatgcatcagctgaaatacctggtccctgtctgtctacaggttgggaatactctatcctcatttccacggtctgagagaaggtacctgaattttcatcattgattctaacttctgaatcaacaagtaaattacgttcctcctctgcaggtaacatgcttccagttgtgcagcaagtgacacgtctgtcttctggaagcaggatttctccatttaatggattaagacctgtaaagttgaaagaaataccgttttgtygggtaggctaatactgcacatccaraacaytattttttcatgtgataattttggaggaaatgctagcctgctttcctctctcaaattagcaagcctgaagcattttctgtggagtttcagagcactttggagtgagggggccagcataactatactgaaggtattttttgaatagtgaaatattattgtgtatttcaatatgaaaggaccttacattagaagtagcattcttttcctgttaatcttgaaaacaacctgggctgaaagtcagatttatctttttyccccccatctggcata

SEQ ID NO: 16395 - DNA, 600 bp, Chicken  19866894223689_3
aatttcagtatgyagcaaagatgcatcagctgaaatacctggtccctgtctgtctacaggttgggaatactctatcctcatttccacggtctgagagaaggtacctgaattttcatcattgattctaacttctgaatcaacaagtaaattacgttcctcctctgcaggtaacatgcttccagttgtgcagcaagtgacacgtctgtcttctggaagcaggatttctccatttaatggattaagacctgtaaagttgaaagaaataccgttttgtygggtaggctaatactgcacatccaraacaytattttttcatgtgataattttggaggaaatgctagcctgctttcctctctcaaattagcaagcctgaagcattttctgtggagtttcagagcactttggagtgagggggccagcataactatactgaaggtattttttgaatagtgaaatattattgtgtatttcaatatgaaaggaccttacattagaagtagcattcttttcctgttaatcttgaaaacaacctgggctgaaagtcagatttatctttttyccccccatctggcatacagccagtaacattaagcgataaag

SEQ ID NO: 16396 - DNA, 600 bp, Chicken  19866894223689_4
cagtatgyagcaaagatgcatcagctgaaatacctggtccctgtctgtctacaggttgggaatactctatcctcatttccacggtctgagagaaggtacctgaattttcatcattgattctaacttctgaatcaacaagtaaattacgttcctcctctgcaggtaacatgcttccagttgtgcagcaagtgacacgtctgtcttctggaagcaggatttctccatttaatggattaagacctgtaaagttgaaagaaataccgttttgtygggtaggctaatactgcacatccaraacaytattttttcatgtgataattttggaggaaatgctagcctgctttcctctctcaaattagcaagcctgaagcattttctgtggagtttcagagcactttggagtgagggggccagcataactatactgaaggtattttttgaatagtgaaatattattgtgtatttcaatatgaaaggaccttacattagaagtagcattcttttcctgttaatcttgaaaacaacctgggctgaaagtcagatttatctttttyccccccatctggcatacagccagtaacattaagcgataaagagcat

SEQ ID NO: 16397 - DNA, 600 bp, Chicken  19866894223689_5
gaaataccgttttgtygggtaggctaatactgcacatccaraacaytattttttcatgtgataattttggaggaaatgctagcctgctttcctctctcaaattagcaagcctgaagcattttctgtggagtttcagagcactttggagtgagggggccagcataactatactgaaggtattttttgaatagtgaaatattattgtgtatttcaatatgaaaggaccttacattagaagtagcattcttttcctgttaatcttgaaaacaacctgggctgaaagtcagatttatctttttyccccccatctggcatacagccagtaacattaagcgataaagagcatggcacaaggttgtcagttgctcatcctcattagcatcaatacattgacagaagcttttaaacttcgtaaaaattctgttgaccagtcaagcttattgaaaattcagagaagttaaattactgtgtgacttatgagctgtgttagcagacccaggaccacattttggcctgagacagaatgggcaaaacaacaggaatttagtttgttttgccacttgtatgacttggactaagggctctcataaacccagcagg

SEQ ID NO: 16398 - DNA, 600 bp, Chicken  19866894223690_1
taaaatctagaaaactgctgatttttaaggcagtggttactatacctttgctcatcaaaatgagtcaaataatgaattcggtcaagttggaggagaaaattttgacaacagtaaacatattttattttcaggaattgtaatgatatttcagtcgttacttcaatatatgtttcataatgtctgccaaaggtaaaatcactcatgattacatgctcattagtatgggttcaaattttagttttgtaagataaagctttaaaaagatctcaatgtttatttgtgtactctgattatatttgrattcccgcttaattgaaatcttgaccttagcatttaattgtaacaattatttctttttccttcttttttttgtttttgttttgttttttgtttggtggtttgtttaagtgtatgcatggttggtttttgttttgttttgtaattataataagtgtgggaaatgtaattgtttttttttttattattattatgttctccttgtgacatgtacaaaaagttgatttacagactcgcttttgaattgccataaatgatgaccttgctttaatatattcactgctaaatatccctctaaatttt

SEQ ID NO: 16399 - DNA, 600 bp, Chicken  19866894223690_2
ggtggtttgtttaagtgtatgcatggttggtttttgttttgttttgtaattataataagtgtgggaaatgtaattgtttttttttttattattattatgttctccttgtgacatgtacaaaaagttgatttacagactcgcttttgaattgccataaatgatgaccttgctttaatatattcactgctaaatatccctctaaatttttatttgtttcttactttagtctagccaagagtaacacctctgccagagtcagaagtcatccatgcattatcacaaatatgagaaagtgctgawtttttttttcctcaycrtgttactgctttcattcaaagatggtgaaatgttctttcttctggtttacatgcaaagagcaaaaatccctttaatatttaaacttttgacattactgtgctttcactgggaaaatatgtaaagctttctgcatatatctattcctttttgttggtgatcataaatagcttttgtatgatttgacagctcggatattccctcctgaattaggttcaggccatttgttgggtagcaaggggaaactcatatgacagatgcctatgctggcaagcctagaaaagt

SEQ ID NO: 16400 - DNA, 600 bp, Chicken  19866894223690_3
tgtatgcatggttggtttttgttttgttttgtaattataataagtgtgggaaatgtaattgtttttttttttattattattatgttctccttgtgacatgtacaaaaagttgatttacagactcgcttttgaattgccataaatgatgaccttgctttaatatattcactgctaaatatccctctaaatttttatttgtttcttactttagtctagccaagagtaacacctctgccagagtcagaagtcatccatgcattatcacaaatatgagaaagtgctgawtttttttttcctcaycrtgttactgctttcattcaaagatggtgaaatgttctttcttctggtttacatgcaaagagcaaaaatccctttaatatttaaacttttgacattactgtgctttcactgggaaaatatgtaaagctttctgcatatatctattcctttttgttggtgatcataaatagcttttgtatgatttgacagctcggatattccctcctgaattaggttcaggccatttgttgggtagcaaggggaaactcatatgacagatgcctatgctggcaagcctagaaaagttctaacagcacagta

SEQ ID NO: 16401 - DNA, 600 bp, Chicken  19866894223690_4
tatgcatggttggtttttgttttgttttgtaattataataagtgtgggaaatgtaattgtttttttttttattattattatgttctccttgtgacatgtacaaaaagttgatttacagactcgcttttgaattgccataaatgatgaccttgctttaatatattcactgctaaatatccctctaaatttttatttgtttcttactttagtctagccaagagtaacacctctgccagagtcagaagtcatccatgcattatcacaaatatgagaaagtgctgawtttttttttcctcaycrtgttactgctttcattcaaagatggtgaaatgttctttcttctggtttacatgcaaagagcaaaaatccctttaatatttaaacttttgacattactgtgctttcactgggaaaatatgtaaagctttctgcatatatctattcctttttgttggtgatcataaatagcttttgtatgatttgacagctcggatattccctcctgaattaggttcaggccatttgttgggtagcaaggggaaactcatatgacagatgcctatgctggcaagcctagaaaagttctaacagcacagtagt

SEQ ID NO: 16402 - DNA, 600 bp, Chicken  19866894223690_5
atgaatatgtatatcaagcagcaagatatatttaatagaatataattttgtttgtggttgtaagtggcttttaagcatgtgacagagttgtccacctcaaattttgtttctcagttaaaatgaaaatgcaaacatttaaaaataaatttgcaagaaaaatgcaaatgcttgcaccacatccttgcatgctttttttctcatgaatagaaaataatttttgtaatgctcatctttcctgctgtcatacaattggatagcaaaactaataaatgaccttccctttttggacttggaattagyaatgtgtcaaccaaaacaacattcccgtgcctatagctgcatcactccctgattccattattatcatgctgaaggctagactgtgatttgatactacaaggtacccgataaaggaacaggcagtgaaaatggctacatggctaaagcatctaaaactttaaaaaagagaggaggtttgtctgggtcacatgagtagttttgggaaacaacaggctacctgtgagacacagagagtaaacttcagcaatggaaggaacaaagccataagcatatgaggtttgccatattaaatcacaacaa

SEQ ID NO: 16403 - DNA, 600 bp, Chicken  19866894223692_1
aggatggctgtgtgctcagtgatgcagagggcttctgctcacagcaaactcatctgctccatgtatgcaccctctgtgggtcttggctgttgtccctgcatcagtgaaaattcaggagaatgaaatagtactgacttagatcctacatgcagggtgtaggtaaaaatcatcgctaagatacccagggacactggctgtctgggtgagagttttacagatctcgcttctcggaaggacttaatgcatcatttcttttatggttaatgggaatctcaatatctccttttttgagaaggcacrttacagacttttaatatcacctgaaggtactgaggagtcttctgtggttcataggacatgaaatggataacggtttcatggacccttctttggagtggttgatgaccacttatggttagtgtctccatgagacaggaggccttccacagatccagtcccattcagatagttcttattctgggtcagagcagttttgtttcagtagatcaaatgctacccataaggccaaagtattgttcaagtctacttcacgcatgtaagatgattctatgattctgtgattctatgaagatgtgctaa

SEQ ID NO: 16404 - DNA, 599 bp, Chicken  19866894223693_1
  misc_feature (1)..(122): n is any nucleotide
nnnnnnnnnnnnnnnnnnnnnnnnnnnnnnnnnnnnnnnnnnnnnnnnnnnnnnnnnnnnnnnnnnnnnnnnnnnnnnnnnnnnnnnnnnnnnnnnnnnnnnnnnnnnnnnnnnnnnnnnnntacaaaggctcattcactgaatttatttactgagtcaaatcagagctgaaaatgaagtttatggcaaaataaaccaattctatatttagaaagtagaagtcgtctcttttaatgagatgataaaattttaacaagtttatatccctttaattgtttgtaggatcttaacaatgactayttacattgttgtcagactgaaaattactgaactagataattagaaaaagtaaggtaagaaaccatgaaaggaaaaactctgctctgtccaaaggctaaaggtagcttttttccccatcctattgaatgacactgatattttactcgaaaggcttttattttcttctagaagttacgcatatgatattcataactacctgaaataacctcatcactaaatagaattgacactttccttccaggttcacaaagcttgacgcaacacttcagttgtattcaaaaattatcatgaaatcattt

SEQ ID NO: 16405 - DNA, 600 bp, Chicken  19866894223693_2
actgaaaattactgaactagataattagaaaaagtaaggtaagaaaccatgaaaggaaaaactctgctctgtccaaaggctaaaggtagcttttttccccatcctattgaatgacactgatattttactcgaaaggcttttattttcttctagaagttacgcatatgatattcataactacctgaaataacctcatcactaaatagaattgacactttccttccaggttcacaaagcttgacgcaacacttcagttgtattcaaaaattatcatgaaatcatttttaagtattttgtttygtagatggttttctaagttgccctggctgattgcataaaagtggtgtctggaattcccactagaagctaccctctattaacagagatgaaaaacagtctgaaatgttatgctttctttctccctggtacagttcaaacaatagatagtactgtatgaaacacataaaagattgttatggaaaaataagtaggtatgctctgccaaacaaatcacagcgggcacttcaagcaaatttaacaagtaggtggaataaatatggtgccatatcataaatatttgatgacaccacagggccccta

SEQ ID NO: 16406 - DNA, 600 bp, Chicken  19866894223697_1
tacgtgctgagaagggtgtcacattttaatcctctgaacagccacagtaaatcacagtagatgatctttacttagcaagtgtttaagtcaattaagaaaaaaaagcaagagacgatggcattatgttctaaaatactgaaggaattaattgccatgttcaggctctatttccagttaattatccactttttccagttatttggactccacatagtttcctgctttacttatgtttctgctttgcctatttcctcattttcaagttcttcaataactttaagcaggtttcagaggatttgrgtggttcaaaagtcacatggaaattctagcaacagctgtttttctgcaggactatgacagcatctctttgttacagaaggcccatgaaatccagatccaacagcatactattaacactgtgatacatgtggacttgcactttttcacatggcaagcattagcttcaggtcagtgacagaacggacatcagtggcatgaagcgtttcttttctttaaaggattcatttgtttccagactgcaaatagtccattaaaaatttcaatcgttcctttgaaggaagaaagtaacagaacagtgcg

SEQ ID NO: 16407 - DNA, 600 bp, Chicken  19866894223699_1
gggtggccagcactgggtttgcgataaagtttatctgggttatatactgggtttggtatacagtcagaggggagagttcattgtgacctgtaccagtaatactgggctacttacgggctgtgcataacgtgaggttagaaatgggaaggtttctagtcgtgagagaagtgcagctttccactaaaagtgctaggtgaggatttcatctttgtctctctaccgccagtgctagatcagtgtatgaaagttatttgtcagctttggttacaaaagacaagctgcccacatgttatttttttwaaattttattttattttttccccttttgctccataacatgcttaaagcatttggggttcctcccaaatgaagattttaggagcttttggcttagtcaagagttctctatgccaggtgtgtctgatgaaagcacacagatgtgttttgcagagcatactcaagcttatttgactggaaaatgctgttgttgcctcctggataggtatggtctttcaaagccaacagttcataggttttggagttcatgttaagagaagaaaagaatggcttttttcttgagtacatgaaatgaatccatga

SEQ ID NO: 16408 - DNA, 600 bp, Chicken  19866894223722_1
gcacgcatctggagctctggagaacctggggatgacagcaagcaatgcgattttggtcagacaaagagcaggtgaaagagtaatctctttcacacgtccgtatgtttacagtagtttgattatgacatgaaattctgtagattgcaaggttaagaatgttgcatatctatatgtaataaagtgcatttgaaagatatctaggtgtgagagaagctcttggatattgtgaatcaccttatacaaggggtatgcatggacacgatggcctaacctggtgctcacttcagtcaggcagcgcgwgtggattctggatttattctgtttatgactgacttttctagcaccatgggctgtcawattatgaatctgggtttytcctttcatcgtatcacgctccataaaatctgatcctgctttctcccatttttcctccaacaaaacattcagagattgcagccaaatcctgccccagtagaacaaattccattatggtgaattctgcatagtctggtgtcagaaagtcagaygttgtcatcccatacaactaaaaacatggggtcacataatttcatacagggtcagatttgttctcctccctcc

SEQ ID NO: 16409 - DNA, 600 bp, Chicken  19866894223722_2
cagacaaagagcaggtgaaagagtaatctctttcacacgtccgtatgtttacagtagtttgattatgacatgaaattctgtagattgcaaggttaagaatgttgcatatctatatgtaataaagtgcatttgaaagatatctaggtgtgagagaagctcttggatattgtgaatcaccttatacaaggggtatgcatggacacgatggcctaacctggtgctcacttcagtcaggcagcgcgwgtggattctggatttattctgtttatgactgacttttctagcaccatgggctgtcawattatgaatctgggtttytcctttcatcgtatcacgctccataaaatctgatcctgctttctcccatttttcctccaacaaaacattcagagattgcagccaaatcctgccccagtagaacaaattccattatggtgaattctgcatagtctggtgtcagaaagtcagaygttgtcatcccatacaactaaaaacatggggtcacataatttcatacagggtcagatttgttctcctccctccacacaggcaaaatgatcaccaggagtgaaaaacacaaatgggagggcaatattagat

SEQ ID NO: 16410 - DNA, 600 bp, Chicken  19866894223722_3
aagagtaatctctttcacacgtccgtatgtttacagtagtttgattatgacatgaaattctgtagattgcaaggttaagaatgttgcatatctatatgtaataaagtgcatttgaaagatatctaggtgtgagagaagctcttggatattgtgaatcaccttatacaaggggtatgcatggacacgatggcctaacctggtgctcacttcagtcaggcagcgcgwgtggattctggatttattctgtttatgactgacttttctagcaccatgggctgtcawattatgaatctgggtttytcctttcatcgtatcacgctccataaaatctgatcctgctttctcccatttttcctccaacaaaacattcagagattgcagccaaatcctgccccagtagaacaaattccattatggtgaattctgcatagtctggtgtcagaaagtcagaygttgtcatcccatacaactaaaaacatggggtcacataatttcatacagggtcagatttgttctcctccctccacacaggcaaaatgatcaccaggagtgaaaaacacaaatgggagggcaatattagataggctgtagttcagcagc

SEQ ID NO: 16411 - DNA, 528 bp, Chicken  19866894223722_4
gaatcaccttatacaaggggtatgcatggacacgatggcctaacctggtgctcacttcagtcaggcagcgcgwgtggattctggatttattctgtttatgactgacttttctagcaccatgggctgtcawattatgaatctgggtttytcctttcatcgtatcacgctccataaaatctgatcctgctttctcccatttttcctccaacaaaacattcagagattgcagccaaatcctgccccagtagaacaaattccattatggtgaattctgcatagtctggtgtcagaaagtcagaygttgtcatcccatacaactaaaaacatggggtcacataatttcatacagggtcagatttgttctcctccctccacacaggcaaaatgatcaccaggagtgaaaaacacaaatgggagggcaatattagataggctgtagttcagcagccacacctttttatatgagtctgtttttgctcctagtgataaggaaggtcggggaaaataaactccgtagagaggacaata

SEQ ID NO: 16412 - DNA, 600 bp, Chicken  19866894223723_1
tgatataaaaatagacggaattggttagagagactgactagaaaagtgccaaacaccatcaccagaagtcttgcactaactaagtacagacagcaggagatccagggtgttgtaaggccaggaggtccaacaagtcattgtgattctggatcatttttctctttctgtttcctctgatcaagatacaaccttggcaaaagctaaatgccacagagggctgcttcatcagatagtcaaatgcttttgacagcatgtagacatagacagctacagcacataagagaacaaatgttcttcttytatacatgtcttatcagccgaaatttgcatttggcacactattggatgaatagcagacatgtctataaagtgtataacgttaatctaagcagtgcctacaaaagttttctatcatattatgacagaatgcaatttatgtgtcccacatgtcttgcagacagctcagagaaaaacatggatatttttaattcctgtgcaagtactaccagacaattgctggtcgaagcctttttttacaaatttttacttgttttctyccagttatagaaaggaaaactcamaagactgtgttcagacctg

SEQ ID NO: 16413 - DNA, 600 bp, Chicken  19866894223723_2
acatagacagctacagcacataagagaacaaatgttcttcttytatacatgtcttatcagccgaaatttgcatttggcacactattggatgaatagcagacatgtctataaagtgtataacgttaatctaagcagtgcctacaaaagttttctatcatattatgacagaatgcaatttatgtgtcccacatgtcttgcagacagctcagagaaaaacatggatatttttaattcctgtgcaagtactaccagacaattgctggtcgaagcctttttttacaaatttttacttgttttctyccagttatagaaaggaaaactcamaagactgtgttcagacctgacataaaacacatgatccttagtttccattaattgtgacatggtaatttatcattacatattcatgagttttatttgttattaagtaagcatttctaaccaggtgttacatgctgcagttttttatagcattttttgttttcagatgctgtatttctgctgttcgaacagccttggatgattaaaataaccacaataacttcatcatggcacattttattgtcctatttgttaaggaaacgcgtagcagaactggcg

SEQ ID NO: 16414 - DNA, 600 bp, Chicken  19866894223723_3
agaacaaatgttcttcttytatacatgtcttatcagccgaaatttgcatttggcacactattggatgaatagcagacatgtctataaagtgtataacgttaatctaagcagtgcctacaaaagttttctatcatattatgacagaatgcaatttatgtgtcccacatgtcttgcagacagctcagagaaaaacatggatatttttaattcctgtgcaagtactaccagacaattgctggtcgaagcctttttttacaaatttttacttgttttctyccagttatagaaaggaaaactcamaagactgtgttcagacctgacataaaacacatgatccttagtttccattaattgtgacatggtaatttatcattacatattcatgagttttatttgttattaagtaagcatttctaaccaggtgttacatgctgcagttttttatagcattttttgttttcagatgctgtatttctgctgttcgaacagccttggatgattaaaataaccacaataacttcatcatggcacattttattgtcctatttgttaaggaaacgcgtagcagaactggcggaagaaattattacaacaaatccc

SEQ ID NO: 16415 - DNA, 600 bp, Chicken  19866894223723_4
tcattacatattcatgagttttatttgttattaagtaagcatttctaaccaggtgttacatgctgcagttttttatagcattttttgttttcagatgctgtatttctgctgttcgaacagccttggatgattaaaataaccacaataacttcatcatggcacattttattgtcctatttgttaaggaaacgcgtagcagaactggcggaagaaattattacaacaaatcccacttagggattagttgcatcacccgaatacatcacctatatagttcctatcatttcacctaggacactrtatgtctttttataataatctttttataataccgttgaacatataagtacttaattttcctttaatggaaaagattgttgtcctgagatcaatgtctcccactgagaaagtaaacatctgttttgcaaagcatttctaaagcagcaggagaccattatcctgtgacaacattctattacaattactttattgcagtcaggcaaaatgagtgatgtgtagcaaacttattcttttttcacattctgccaaacctttctgttctttatccaatgacttccatctggagtactgcctggaagg

SEQ ID NO: 16416 - DNA, 599 bp, Chicken  19866894223726_1
  misc_feature (1)..(149): n is any nucleotide
nnnnnnnnnnnnnnnnnnnnnnnnnnnnnnnnnnnnnnnnnnnnnnnnnnnnnnnnnnnnnnnnnnnnnnnnnnnnnnnnnnnnnnnnnnnnnnnnnnnnnnnnnnnnnnnnnnnnnnnnnnnnnnnnnnnnnnnnnnnnnnnnnnnnnacacacaggcaagctaaaatatcagtgcaaacggtaagtcatattttatgtgaaactacatcaagtcaaagcttagccaaagtactgtacgcattgcaggcttgattgcagtgctcatttcagagcagtgttagaattatgaaattcaccyraatcaaaacaatcatgtaatttgtcctaagcaagaaagtccatcaaacagagccagcccaggttcagcacttactctgctctgcttccagatgctgtgagctgagcaaaagccttcactttctcacggatcacttgtattccacgctcatcggaggcatttaactccaggactctttgtcggaatagctcaggcctggaaaatgtttattgcagyatgttagctgttaatgcttgtaacggtgtgtgacaaagcataccatcaacccttccagcccttctgaactacaggtattattt

SEQ ID NO: 16417 - DNA, 599 bp, Chicken  19866894223726_2
  misc_feature (1)..(148): n is any nucleotide
nnnnnnnnnnnnnnnnnnnnnnnnnnnnnnnnnnnnnnnnnnnnnnnnnnnnnnnnnnnnnnnnnnnnnnnnnnnnnnnnnnnnnnnnnnnnnnnnnnnnnnnnnnnnnnnnnnnnnnnnnnnnnnnnnnnnnnnnnnnnnnnnnnnnacacacaggcaagctaaaatatcagtgcaaacggtaagtcatattttatgtgaaactacatcaagtcaaagcttagccaaagtactgtacgcattgcaggcttgattgcagtgctcatttcagagcagtgttagaattatgaaattcaccyraatcaaaacaatcatgtaatttgtcctaagcaagaaagtccatcaaacagagccagcccaggttcagcacttactctgctctgcttccagatgctgtgagctgagcaaaagccttcactttctcacggatcacttgtattccacgctcatcggaggcatttaactccaggactctttgtcggaatagctcaggcctggaaaatgtttattgcagyatgttagctgttaatgcttgtaacggtgtgtgacaaagcataccatcaacccttccagcccttctgaactacaggtattatttc

SEQ ID NO: 16418 - DNA, 600 bp, Chicken  19866894223726_3
aaagcttagccaaagtactgtacgcattgcaggcttgattgcagtgctcatttcagagcagtgttagaattatgaaattcaccyraatcaaaacaatcatgtaatttgtcctaagcaagaaagtccatcaaacagagccagcccaggttcagcacttactctgctctgcttccagatgctgtgagctgagcaaaagccttcactttctcacggatcacttgtattccacgctcatcggaggcatttaactccaggactctttgtcggaatagctcaggcctggaaaatgtttattgcagyatgttagctgttaatgcttgtaacggtgtgtgacaaagcataccatcaacccttccagcccttctgaactacaggtattatttctgctagcattactgaataacacacttcggtaaaccacaattaagttgagatcrttamtgttatgtatgaatttcaattaggtattttttaaaattgattcccagactgcaaaaaacaatgaagcataaaattacagcagttacccaggaaaaagcaataggaagctgccttgataagcacagagcactgtattgtgtgtcctacttatatgctgtg

SEQ ID NO: 16419 - DNA, 600 bp, Chicken  19866894223726_4
ccagcccaggttcagcacttactctgctctgcttccagatgctgtgagctgagcaaaagccttcactttctcacggatcacttgtattccacgctcatcggaggcatttaactccaggactctttgtcggaatagctcaggcctggaaaatgtttattgcagyatgttagctgttaatgcttgtaacggtgtgtgacaaagcataccatcaacccttccagcccttctgaactacaggtattatttctgctagcattactgaataacacacttcggtaaaccacaattaagttgagatcrttamtgttatgtatgaatttcaattaggtattttttaaaattgattcccagactgcaaaaaacaatgaagcataaaattacagcagttacccaggaaaaagcaataggaagctgccttgataagcacagagcactgtattgtgtgtcctacttatatgctgtgagcagtgcagaggaaacagttaaatctccagatctgatccattggggggtggtctgcactgcaataataccagaacaataatatctagaaaatataatacaggtggaatttagcagcactaccatacagctgcacct

SEQ ID NO: 16420 - DNA, 600 bp, Chicken  19866894223726_5
cccaggttcagcacttactctgctctgcttccagatgctgtgagctgagcaaaagccttcactttctcacggatcacttgtattccacgctcatcggaggcatttaactccaggactctttgtcggaatagctcaggcctggaaaatgtttattgcagyatgttagctgttaatgcttgtaacggtgtgtgacaaagcataccatcaacccttccagcccttctgaactacaggtattatttctgctagcattactgaataacacacttcggtaaaccacaattaagttgagatcrttamtgttatgtatgaatttcaattaggtattttttaaaattgattcccagactgcaaaaaacaatgaagcataaaattacagcagttacccaggaaaaagcaataggaagctgccttgataagcacagagcactgtattgtgtgtcctacttatatgctgtgagcagtgcagaggaaacagttaaatctccagatctgatccattggggggtggtctgcactgcaataataccagaacaataatatctagaaaatataatacaggtggaatttagcagcactaccatacagctgcacctctga

SEQ ID NO: 16421 - DNA, 600 bp, Chicken  19866894223736_1
gacccagcgctgcgctccctgtctgcttctggaactttctgtcattttattgcattatcaggaacagaacaaaagcactgaaaatgccactcagagcagcagccactgagctcccagcactgaacctttatttgtatgctagtgatacacagaggaatctatgaaggcacagagtgtaactacatacctccgagtctctgtatatctgtacatctctgtatctgcatattgacacatccatatatatgtatatctatacatctatgccttattggtgataagctgagatgatatgtcttrcaaaagaagggaagggaaaggaagggaagagaagagcaataaatatgagtgttctaattataatgcctttagttttgtttaatgaagagtgagtaaatgaagggcattataacttgagcttccatgagaaaaagaaaggacaaacttcttatcgtcatccaacgagcatcaaacagcacagaagtctggggctgagttcttctggtcacttcgatgtctgttgtggtctcttttcatacttagttcgaagtgctcctggttgtatcctacttgcagtgctctgaactgcagctcaggcac

SEQ ID NO: 16422 - DNA, 600 bp, Chicken  19866894223736_2
ctggggcagggctgcagccgttggtgcagtgcagtcctaagaaatgcaagcatgcagcatgggagcggtacaggagctccgaagcaatgggctgtgtcacctggggagacaacgtcgtgcaataaggaatgcattttgctgtgccacccattgggcgctgctgcagcatctgtgcaaaggggtgaagccaacggagcactgaaaagggcagtacaatcacacagggctgtttgcagatgttgggtggcatccctgcttgccctgtgtcctgcagccagagaggggagctctgcccatccyctcctatgccatgcacagcaggatggagaaattcggaaccagagccaaatggctgtgctgggagtgaggggttctcccgtttcagtttggtggatgggtcccttctgtccctgatggtcattatgtcaaggggggagcacacgggctctggtggcccttcacatccagcagagacacrcaaaaataacccaacaggagtgctccaatgggtttgccctgcrrtgcaggagctgcaggtacacagctgccctcacagctcctctttcagcccagccctgcagagccctctgacaatcagag

SEQ ID NO: 16423 - DNA, 600 bp, Chicken  19866894223736_3
ggggtgaagccaacggagcactgaaaagggcagtacaatcacacagggctgtttgcagatgttgggtggcatccctgcttgccctgtgtcctgcagccagagaggggagctctgcccatccyctcctatgccatgcacagcaggatggagaaattcggaaccagagccaaatggctgtgctgggagtgaggggttctcccgtttcagtttggtggatgggtcccttctgtccctgatggtcattatgtcaaggggggagcacacgggctctggtggcccttcacatccagcagagacacrcaaaaataacccaacaggagtgctccaatgggtttgccctgcrrtgcaggagctgcaggtacacagctgccctcacagctcctctttcagcccagccctgcagagccctctgacaatcagaggctgccacaaaaaggctcagatgctacagatgaaaccaagtgttttgcattttcctttggactcaccgctgctcagtagctgcctcagggcccactccttgctcacgtgcagcactgtttctcatgcacaaagcatgctcatgtgtgggttatatgtgcacggggcattgcagggtca

SEQ ID NO: 16424 - DNA, 600 bp, Chicken  19866894223736_4
cagggctgtttgcagatgttgggtggcatccctgcttgccctgtgtcctgcagccagagaggggagctctgcccatccyctcctatgccatgcacagcaggatggagaaattcggaaccagagccaaatggctgtgctgggagtgaggggttctcccgtttcagtttggtggatgggtcccttctgtccctgatggtcattatgtcaaggggggagcacacgggctctggtggcccttcacatccagcagagacacrcaaaaataacccaacaggagtgctccaatgggtttgccctgcrrtgcaggagctgcaggtacacagctgccctcacagctcctctttcagcccagccctgcagagccctctgacaatcagaggctgccacaaaaaggctcagatgctacagatgaaaccaagtgttttgcattttcctttggactcaccgctgctcagtagctgcctcagggcccactccttgctcacgtgcagcactgtttctcatgcacaaagcatgctcatgtgtgggttatatgtgcacggggcattgcagggtcatgggtgcagcacgagctacagactgcagctcaccacagctcag

SEQ ID NO: 16425 - DNA, 600 bp, Chicken  19866894223736_5
agggctgtttgcagatgttgggtggcatccctgcttgccctgtgtcctgcagccagagaggggagctctgcccatccyctcctatgccatgcacagcaggatggagaaattcggaaccagagccaaatggctgtgctgggagtgaggggttctcccgtttcagtttggtggatgggtcccttctgtccctgatggtcattatgtcaaggggggagcacacgggctctggtggcccttcacatccagcagagacacrcaaaaataacccaacaggagtgctccaatgggtttgccctgcrrtgcaggagctgcaggtacacagctgccctcacagctcctctttcagcccagccctgcagagccctctgacaatcagaggctgccacaaaaaggctcagatgctacagatgaaaccaagtgttttgcattttcctttggactcaccgctgctcagtagctgcctcagggcccactccttgctcacgtgcagcactgtttctcatgcacaaagcatgctcatgtgtgggttatatgtgcacggggcattgcagggtcatgggtgcagcacgagctacagactgcagctcaccacagctcagg

SEQ ID NO: 16426 - DNA, 600 bp, Chicken  19866894223736_6
cccactccttgctcacgtgcagcactgtttctcatgcacaaagcatgctcatgtgtgggttatatgtgcacggggcattgcagggtcatgggtgcagcacgagctacagactgcagctcaccacagctcaggtctgtcagggtaggagcagaagaaagctgctccaaaaacacgtggctggaatggtggctgttcagtttgtcattagcctcacatctgtcaaaacaaacgacagtcaccatactgggctcttacacatcatagccctcaccaatctgaactagagcacctccatcactrtcccttttccttaggagtgcaacatcacccttactctgctggaaaagtatgctcagcccattcctctgagccagagctctgagacggtgggtattaggaaccatttcttctgagaagcagcagtcaggcactgacacagctgcccagggagcggtggggtcaccacccttggaggtgttccaggaccatagagatgtgacactgatggatgtggtcagtgggcacagtgagggtggactggggttgggcttggggatctgagaggtctttggttattgagttgtgagcaggttttgcacc

SEQ ID NO: 16427 - DNA, 600 bp, Chicken  19866894223740_1
tctttacaaacaaaataacaagttcttgctcttcattttttttttttttcctaatccttgctcgattttaatatctttaccagtttttactagaatttacttggaacgctccatgattatcttgtaatattgtatctttggatatagaccataaaaactactacatgccttttgaattaataatgtccgatttaagatggaaattaaggaaacaatatattttccagtgtgtttttttctactgtgtttgacacttggctacaccttcccttaaaatccctcagcatctttctgttaatyttattatttctcagattctagaatcccttttagggttcagtagttctcatgattcagaaaaaggaacttggtttctgtggggtactgacagctgtactgttcctgtactgtttcttaaggtccttttagactattttaatcatttttattctgcaaagataatttttgtaggaatcgctctattccatattattttgctcttcactgagtcattgcaatttgataacatgctctagccttgtcagttgcttgtcccattctatttactgaatttctgctttaagaagatatttgactcaa

SEQ ID NO: 16428 - DNA, 600 bp, Chicken  19866894223741_1
agtcagtgtggaatccaaacaggaaagctggtcattagtgtatcggaatgcacagggtagagaaaagcaaatgaagatgacagcatatctataaatgcaagagaaaagagagtaattctgtcattcagctgtctagactgtttgctttataatgtaaagctgtgaatgagccagcgggttgcgattatggcatagtagctttgcagacattcagagacagcggtgtggagacggaggggatttactgagttcctgtcatgttgggatgtcatacgtggtgcctttaaaaaaaaaaaaaarggaggggaaaatgccctgcaaaaataaattagctcagctcttgcagcttataactaatgaacaaggaattcaaacaaaaagaaagctcctacatgtataatgatccttagacttttctgtgcttagcagagaaggaagagaaatacrtgtcatacaaaaagcaatattttccccctctgtgaaaatgttgaaggctgtagtattctttcagatctttaactccttctgtgaatcactagcaaacattttcakttcagcttgcttaagctgcttctgcggagttttgctccttgataataa

SEQ ID NO: 16429 - DNA, 600 bp, Chicken  19866894223741_2
tataatgtaaagctgtgaatgagccagcgggttgcgattatggcatagtagctttgcagacattcagagacagcggtgtggagacggaggggatttactgagttcctgtcatgttgggatgtcatacgtggtgcctttaaaaaaaaaaaaaarggaggggaaaatgccctgcaaaaataaattagctcagctcttgcagcttataactaatgaacaaggaattcaaacaaaaagaaagctcctacatgtataatgatccttagacttttctgtgcttagcagagaaggaagagaaatacrtgtcatacaaaaagcaatattttccccctctgtgaaaatgttgaaggctgtagtattctttcagatctttaactccttctgtgaatcactagcaaacattttcakttcagcttgcttaagctgcttctgcggagttttgctccttgataataaagctgatatttttttcatttggaatctgcagcagtgcacagcctttattatctgtatatgtgaaaacagtaggagctgggaaggtaattccagctggcataccgatctagcatcaaccgcaataaattacttagcagagagcatgtt

SEQ ID NO: 16430 - DNA, 600 bp, Chicken  19866894223741_3
ctgtcatgttgggatgtcatacgtggtgcctttaaaaaaaaaaaaaarggaggggaaaatgccctgcaaaaataaattagctcagctcttgcagcttataactaatgaacaaggaattcaaacaaaaagaaagctcctacatgtataatgatccttagacttttctgtgcttagcagagaaggaagagaaatacrtgtcatacaaaaagcaatattttccccctctgtgaaaatgttgaaggctgtagtattctttcagatctttaactccttctgtgaatcactagcaaacattttcakttcagcttgcttaagctgcttctgcggagttttgctccttgataataaagctgatatttttttcatttggaatctgcagcagtgcacagcctttattatctgtatatgtgaaaacagtaggagctgggaaggtaattccagctggcataccgatctagcatcaaccgcaataaattacttagcagagagcatgttctgttactttttatggtcatgttctatatttgggtgtgcagtggaagaggtcacatggcaaaaccaccgtttgatattcctggttgggtacgtcccagttaacgg

SEQ ID NO: 16431 - DNA, 599 bp, Chicken  19866894223742_1
  misc_feature (1)..(31): n is any nucleotide
nnnnnnnnnnnnnnnnnnnnnnnnnnnnnnnagaaagctatggggagacctctttatggcctttcaatattttaaggaagattataaacaggagggaaatatttttacatgggtaggtgctgatagagcaaaggggagtggttttgaactaatggaggaaagatttagattagatttgaggggaagatgagagggtggtgaggtgctgaaacaggctacccagacaggttgtggatgccctatccttggaggtgttccaaggacaggttggatggggccctgggcaatctgatctagtayttaatctagaggttggcagccctgcctgcagcagggggctggaacttgatgatgtttgaattcccttccaacacaagccattatatgattccattrttctatgattcagatactacaaaaagccactccaaaaaagaaactctctcattgagacaccagtggtggtgagtttatggctgtaagtgcagctgacatcagaaaagaagtctccaggaaaaacagagttgtctcaagtactgtgcctttaaacgtgctcctctcttccagatgattttaataagcccaggcacatgtgttgt

SEQ ID NO: 16432 - DNA, 600 bp, Chicken  19866894223742_2
aaatatttttacatgggtaggtgctgatagagcaaaggggagtggttttgaactaatggaggaaagatttagattagatttgaggggaagatgagagggtggtgaggtgctgaaacaggctacccagacaggttgtggatgccctatccttggaggtgttccaaggacaggttggatggggccctgggcaatctgatctagtayttaatctagaggttggcagccctgcctgcagcagggggctggaacttgatgatgtttgaattcccttccaacacaagccattatatgattccattrttctatgattcagatactacaaaaagccactccaaaaaagaaactctctcattgagacaccagtggtggtgagtttatggctgtaagtgcagctgacatcagaaaagaagtctccaggaaaaacagagttgtctcaagtactgtgcctttaaacgtgctcctctcttccagatgattttaataagcccaggcacatgtgttgtaaccccttggtgcagtacaatatgaataaccaaataaaagatctctccagattttaagatttactgtttgcgatgggaaaaggccaaccagatgaca

SEQ ID NO: 16433 - DNA, 600 bp, Chicken  19866894223748_1
tgtgcttctactcacaccttcagaatgctaactgtgaaaccaagcacctgtctgcctcacattctgatctaatggccttggttcttactacaggtttggccgtcttcagctgcccaggttgctacttaacaaatgcaggagtaacaccatggctgctgtacctgatgcaaatgtaaccacgtatattaacaaggctttatcatattgcacacaaaggagatgtttgaatggtagggtaggcagccgtgttgcagccttctcctctgtgtaaggaagtcagagagcagacgtgacagtccygagatagctgtgatcatcatcatccttcatgattatgctgccagtcggtacgtctgttcagaaggagcacgaatcatttggtgaaaatagagtgctggcatgtcagcatgtatgagactgcagaagatgaaaaagtgaactccaaggtaaagcatagcgtgtgtattccttaaaggtatccacggtgatccactcatcacctgattttccagcaaggtcattagctgaagcagagaagttctatggctgtgagatggattatttgaacagaagattgctttgacctaattcaaccagaag

SEQ ID NO: 16434 - DNA, 441 bp, Chicken  19866894223750_1
tatctgttggggttttccagtgttttcttccccacatcctattaataattaacatcactgcaacgagactggcttttaagaggcttctctgctacgggctgcattagtacctctttcaggcgcaaaggtttatctgtaaccactggaaaccaggaaggttctgatcttggccaagactgccagcctcatgggaacacatctccgtatccccaccagaatgagtcaaaccaactgtcacactgctagagctgagatgacatagccctgccagggcagcccatccttggctccttccccagmtcccacctttagctggagatggctcatcactccagcttaaaatcaccatcctygtctcctctagagtgcccagggcatgagttaactgggaaggaggataagccagtgctcacactcatcatgagatgtggaactggataa

SEQ ID NO: 16435 - DNA, 388 bp, Chicken  19866894223750_2
atcactgcaacgagactggcttttaagaggcttctctgctacgggctgcattagtacctctttcaggcgcaaaggtttatctgtaaccactggaaaccaggaaggttctgatcttggccaagactgccagcctcatgggaacacatctccgtatccccaccagaatgagtcaaaccaactgtcacactgctagagctgagatgacatagccctgccagggcagcccatccttggctccttccccagmtcccacctttagctggagatggctcatcactccagcttaaaatcaccatcctygtctcctctagagtgcccagggcatgagttaactgggaaggaggataagccagtgctcacactcatcatgagatgtggaactggataa

SEQ ID NO: 16436 - DNA, 600 bp, Chicken  19866894223760_1
actcttttagtttgtttattttaaagaaaaatatttgtctgtaagcaattttttattcaatagttcaattgttactagtcttctctgtcatctttctcaaaactttgtctggaatgggccaaaatggcccactgactagttgaactgctttgtctttacttgtggaaaacaaacaagcaaaacccaccaataactcaataaaataagaagtaaaaaaggacaatacaaaatactgacctttgccatcaagatatctaataaaaggttggttgatcaagcatgtgatgttctgtgctacartgtcacttacagagattctgaaaaaaattccttgaaaggaggtctcaaaatgggagtgtttttcttcagtttctgacagggaacactaaaaaccaccatgggaataatttcctaagaagtaatgacaacagtgcttgaggaaagaagtcttgatcaaactgctctctaataaaccagtcaagtcccttactccttggaaatgaatcctagcataaatacttgccagtatgtatgtcaaaataaagtaaataactacaaaaaaaaagtggtgtcagaaaatgccagtaagcctgtagccat

SEQ ID NO: 16437 - DNA, 600 bp, Chicken  19866894223760_2
aaaatgccagtaagcctgtagccataatcctatgcaacagtatttccaaaggagcagagtgccagtattagcaggaaatgtctgtagtcttcacctgtacagagcctgtgggaaatgatgcctccccaggaggaacagtctagaaaattaaaatgctccaaataatcacacagtacaagtgtgtcaagaaaatgagtgatttagtccagtttatctcaatgaaaagcactattaatatttttggaagtcagataaacttagctggctgacaatagtattcaatatgatcgtacttacgtycccgagaacatgttacaaggtccaggaccttgaaattggtgccatggataaatccgcagtttgccagaacactgagacactgaaatttcagcttgagtgaaagccaagtttgtttaaacttgtccccaggaccattgtttcagtgtatgccctcaaaagcaagatatgcactggctatactaaatatattcgtgactttatttacaattagttgtgaagagtcatgctttgcctactgcctctcattagcctaagcagatgcagccaaaattttctgagttgtaygcttgactttatact

SEQ ID NO: 16438 - DNA, 600 bp, Chicken  19866894223760_3
gatcgtacttacgtycccgagaacatgttacaaggtccaggaccttgaaattggtgccatggataaatccgcagtttgccagaacactgagacactgaaatttcagcttgagtgaaagccaagtttgtttaaacttgtccccaggaccattgtttcagtgtatgccctcaaaagcaagatatgcactggctatactaaatatattcgtgactttatttacaattagttgtgaagagtcatgctttgcctactgcctctcattagcctaagcagatgcagccaaaattttctgagttgtaygcttgactttatactgtttagttaattctgcttctcttcagttctcaagatgctcctgttgctgcatagctttgagtgtcctgtgtgcctctctgactcagatcactagaaaatattgttcaccttttcaagttagtaagtaaataaatgctaccaaaattttcagttggatgccttscatagcacatacacrcttcatatacatgtattttccagatgtggaaaagtggtcatatcagtatcatgtaaatgcattttttccttttattcttcaaaacaagcagaaagagtacttgggga

SEQ ID NO: 16439 - DNA, 600 bp, Chicken  19866894223760_4
atatgcactggctatactaaatatattcgtgactttatttacaattagttgtgaagagtcatgctttgcctactgcctctcattagcctaagcagatgcagccaaaattttctgagttgtaygcttgactttatactgtttagttaattctgcttctcttcagttctcaagatgctcctgttgctgcatagctttgagtgtcctgtgtgcctctctgactcagatcactagaaaatattgttcaccttttcaagttagtaagtaaataaatgctaccaaaattttcagttggatgccttscatagcacatacacrcttcatatacatgtattttccagatgtggaaaagtggtcatatcagtatcatgtaaatgcattttttccttttattcttcaaaacaagcagaaagagtacttggggaatatttgacatagtttccttatccgttttgagtgatggtttttcaactctactccattcttcttcttaaaagaggtatgcttgccttctgatttgttaaatgaacaaaagctggaaatagtatttaaaaaaaaaaaaagtttagttttggatagcattgattagaaattcattattgc

SEQ ID NO: 16440 - DNA, 600 bp, Chicken  19866894223760_5
actaaatatattcgtgactttatttacaattagttgtgaagagtcatgctttgcctactgcctctcattagcctaagcagatgcagccaaaattttctgagttgtaygcttgactttatactgtttagttaattctgcttctcttcagttctcaagatgctcctgttgctgcatagctttgagtgtcctgtgtgcctctctgactcagatcactagaaaatattgttcaccttttcaagttagtaagtaaataaatgctaccaaaattttcagttggatgccttscatagcacatacacrcttcatatacatgtattttccagatgtggaaaagtggtcatatcagtatcatgtaaatgcattttttccttttattcttcaaaacaagcagaaagagtacttggggaatatttgacatagtttccttatccgttttgagtgatggtttttcaactctactccattcttcttcttaaaagaggtatgcttgccttctgatttgttaaatgaacaaaagctggaaatagtatttaaaaaaaaaaaaagtttagttttggatagcattgattagaaattcattattgctgaatgtctttcatc

SEQ ID NO: 16441 - DNA, 600 bp, Chicken  19866894223760_6
attgttctgtaaagcaatatgaacctagattagcctttgttttcttttcctttgggtttctgtgtggtgatagaaaggcccttacctctgctgaagaggccctccaaggcctggctgggagcagacaactgaatgtaacagccacattctccagcaaggttgctcctccagaaatttcccttgtttttcaacctgataaaactggcaggaatgcatcagcagacaaggacaggaggaaggtttcgccactttaatgtgttctctctttacaaatacaccaaatgtataaggcatacgttyggtgcaaccctctcctgtactgagtattgcataaaaagtcttgcaatatctctmtttctaattatacctaacaaaggcagtaacagtagctctggctgatgggtcagaaccacagttcagagtttctcttagtgatttaaacaaaggtctgactccagagatttgagttcaatggtttgtagcttccttcttgttttcagacattyccttgaaaaaagaaagccatggaggctagataaacaaataattaaaacagttgttttgtaaagcagccagcagtttgagtagaaaagcttgctt

SEQ ID NO: 16442 - DNA, 600 bp, Chicken  19866894223760_7
ggtttctgtgtggtgatagaaaggcccttacctctgctgaagaggccctccaaggcctggctgggagcagacaactgaatgtaacagccacattctccagcaaggttgctcctccagaaatttcccttgtttttcaacctgataaaactggcaggaatgcatcagcagacaaggacaggaggaaggtttcgccactttaatgtgttctctctttacaaatacaccaaatgtataaggcatacgttyggtgcaaccctctcctgtactgagtattgcataaaaagtcttgcaatatctctmtttctaattatacctaacaaaggcagtaacagtagctctggctgatgggtcagaaccacagttcagagtttctcttagtgatttaaacaaaggtctgactccagagatttgagttcaatggtttgtagcttccttcttgttttcagacattyccttgaaaaaagaaagccatggaggctagataaacaaataattaaaacagttgttttgtaaagcagccagcagtttgagtagaaaagcttgctttctttttattttgccagattcctacctactgcagaaagaataaagtgactacct

SEQ ID NO: 16443 - DNA, 600 bp, Chicken  19866894223760_8
aggaatgcatcagcagacaaggacaggaggaaggtttcgccactttaatgtgttctctctttacaaatacaccaaatgtataaggcatacgttyggtgcaaccctctcctgtactgagtattgcataaaaagtcttgcaatatctctmtttctaattatacctaacaaaggcagtaacagtagctctggctgatgggtcagaaccacagttcagagtttctcttagtgatttaaacaaaggtctgactccagagatttgagttcaatggtttgtagcttccttcttgttttcagacattyccttgaaaaaagaaagccatggaggctagataaacaaataattaaaacagttgttttgtaaagcagccagcagtttgagtagaaaagcttgctttctttttattttgccagattcctacctactgcagaaagaataaagtgactacctagaaagcaaataatgagacaagtatctcaatttgcatgatagttttgagtgcattttatggactcatcttatgtgaatattagttctatgctactcttccagagcagacactgcaaaaaataataataaaaaaaagtctttattatcaagga

SEQ ID NO: 16444 - DNA, 600 bp, Chicken  19866894223763_1
gttgagcttcaatgagtatgttgtaagatgaacaacacagaagattcacaggcaaacatcacagcaaatccctttttaaactcagcagtggctgcttatatctccctttgcagagatcatgtggtatgtatgccttccttcaaaaatgattgctgaaacccattcttgaactttggagcagaaggtactttttatgatggacaaactagacaatagctatctgcttagcttgaatatcttggttcaaatgaatattgaacttgaaatccaaccatttccactaagaaaattaaaataaargaactgaaagtagtgtcttagtttatacatttgccttgagtcctctactgattcctgatctcttctacataaactggtaaaagctaaagagggaacagactgccagaacctatggggtcaaagtaacagctccaagtatccaaaacatcctgtgaaatctgtatggcagctaaaacacgcaccaactgaaaaatgcagacacagtttctgtttctgtgattcttcaacaggaagagtgcccccagatcttctagaggaagcaaatgaaggtcagccattcacgtcacttgcaatttggag

SEQ ID NO: 16445 - DNA, 600 bp, Chicken  19866894223767_1
tttacaaaggtaatgagaaatgagttttgtgtcaaaagactaaagagaggtctgtcagctataattgcttcaagctaggtttgacctacaacctaaccagctaagtgaatagcaacttaatttactggtaggaccatctgcaagcctcagggacttctagttgctaactgaatccagggactattctctttttatgcaaattgcattctataattttctgacttctgctcattatattttgagatgaaaatgctatttatggttactgtttggcaaatgaatgtgctaatctccctcctsctgcagcaagagtagctattttaattagggtgcaggtatatttcacaaatattctattgctttcattgaaactcatggagatgacatcaaagttatactatctctttacgcacataacttgaaatataatcagtttgaaacagcttctaaaaagcaacttttagaattttgaaatagtattttaaaatttatagattatgtttatacagtgatatcaagatccatttatgttaatctaatgcaaaatgaaacaattcggatatgaaacatgcacacagactacaatttatcaattattta

SEQ ID NO: 16446 - DNA, 600 bp, Chicken  19866894223768_1
tcaatctttcattggcccgaacatctgttagtcagaaggcaccaagttcagactatatggtggacgtggtagaacagtccagctgagattggcaacgtggtccatggttcaacctgatatgaggcctggcattatcatgttgcaggaaaaagattgtcttctctggcctaactctgaaagaccaagttgacttcagcttagtcagcattgcaatgtagttaacaagttgatggtttgtccaggttgtaagatatccagaaggataatcttttccctatccacaaagacagtgcacatccytttacttgctaagggctgagtcttgaactttttctttgcttggaaattcacatgttgtcactctgcagactgtcatttttcatccggcttgtactagtgacaccatgtctcgtcactgataatattatgattcaggaaacagtcactttcaaccttgtatcagtccaatagttcctgccaatttgcatacgttttttctttctgttcctgtgtaagcatttgcaggacccatctgacacaaactttgtgataatccaacactgctgccattgtttccaacccactgaaaccaatattcag

SEQ ID NO: 16447 - DNA, 600 bp, Chicken  19866894223768_2
tcactctgcagactgtcatttttcatccggcttgtactagtgacaccatgtctcgtcactgataatattatgattcaggaaacagtcactttcaaccttgtatcagtccaatagttcctgccaatttgcatacgttttttctttctgttcctgtgtaagcatttgcaggacccatctgacacaaactttgtgataatccaacactgctgccattgtttccaacccactgaaaccaatattcagctttgtacaccattctgtaggtgtaatccactgatttgcatggatgcaaatctagaygttcttcattttgttgtgtaactgctatgcatggctgtccataatatggcttgccatattgctctcaccactgctggagcgcaccactcactacctcactgtgttaacacccactgtctgatttccacaaactttcatcaagaattaatgaatgacagcgggtgccattttttccacactgaggaattcaatgacacacctttgcttcatcaacacctgcatgacagatgccatcgtgtcagactgcccctctgctgccctctgttgaatgacattaaaatgtaatgagataatggcagg

SEQ ID NO: 16448 - DNA, 600 bp, Chicken  19866894223774_1
cagtggtttgggcttgtgcagtacctgcttccttagcttgtgtgcttagaaggtggtttgtgaggctgccacagcctgcagctgggtgggttttgtgttttggggtttgttttatgtagctatatgtaagcttactgcttattttcatacgttgcgttccacagtgagtgcaagctgctccatcaggaagctccagagggaagctttgcagtggcgtaggtgaccagatgcagtgcaaagcctcctggttgcttgagctttctggtcctggccaatctctgccctgcaaaacgcagctcmytcaccctgcccagatggaaaacaagccttctagggcctcttgcaagtcaaacaccatctctcaaccatagcccagaaggcaaacatacctgggctagcaaggagaacaaacagaaagcctttgggtaaagcctccatccccctgagggtttgggttgaaatgcatttcagctgctgcagagggtttggtggcaaagagatgccccatgcagcaraaaggaccatagcagcagcagatcctgatgcatagggacctgcyctggatgtggagccctctgcctcgctcagctcggtgcagtt

SEQ ID NO: 16449 - DNA, 600 bp, Chicken  19866894223774_2
agtggtttgggcttgtgcagtacctgcttccttagcttgtgtgcttagaaggtggtttgtgaggctgccacagcctgcagctgggtgggttttgtgttttggggtttgttttatgtagctatatgtaagcttactgcttattttcatacgttgcgttccacagtgagtgcaagctgctccatcaggaagctccagagggaagctttgcagtggcgtaggtgaccagatgcagtgcaaagcctcctggttgcttgagctttctggtcctggccaatctctgccctgcaaaacgcagctcmytcaccctgcccagatggaaaacaagccttctagggcctcttgcaagtcaaacaccatctctcaaccatagcccagaaggcaaacatacctgggctagcaaggagaacaaacagaaagcctttgggtaaagcctccatccccctgagggtttgggttgaaatgcatttcagctgctgcagagggtttggtggcaaagagatgccccatgcagcaraaaggaccatagcagcagcagatcctgatgcatagggacctgcyctggatgtggagccctctgcctcgctcagctcggtgcagttt

SEQ ID NO: 16450 - DNA, 600 bp, Chicken  19866894223774_3
gtaggtgaccagatgcagtgcaaagcctcctggttgcttgagctttctggtcctggccaatctctgccctgcaaaacgcagctcmytcaccctgcccagatggaaaacaagccttctagggcctcttgcaagtcaaacaccatctctcaaccatagcccagaaggcaaacatacctgggctagcaaggagaacaaacagaaagcctttgggtaaagcctccatccccctgagggtttgggttgaaatgcatttcagctgctgcagagggtttggtggcaaagagatgccccatgcagcaraaaggaccatagcagcagcagatcctgatgcatagggacctgcyctggatgtggagccctctgcctcgctcagctcggtgcagttttaccccgtgataggttattaattagatttgccctgcagctgtttccaccagctgtgggattcgaggtgctccctggaaagtcaatcattccctgggctgatcgagtgttactgggtttgccacgtgagaggctgcggagctcaccgaaatgctattgcgtgctggggaaaggcatccaggatgaaaacataacagtgggtggagaaatctgctc

SEQ ID NO: 16451 - DNA, 600 bp, Chicken  19866894223774_4
ttctggtcctggccaatctctgccctgcaaaacgcagctcmytcaccctgcccagatggaaaacaagccttctagggcctcttgcaagtcaaacaccatctctcaaccatagcccagaaggcaaacatacctgggctagcaaggagaacaaacagaaagcctttgggtaaagcctccatccccctgagggtttgggttgaaatgcatttcagctgctgcagagggtttggtggcaaagagatgccccatgcagcaraaaggaccatagcagcagcagatcctgatgcatagggacctgcyctggatgtggagccctctgcctcgctcagctcggtgcagttttaccccgtgataggttattaattagatttgccctgcagctgtttccaccagctgtgggattcgaggtgctccctggaaagtcaatcattccctgggctgatcgagtgttactgggtttgccacgtgagaggctgcggagctcaccgaaatgctattgcgtgctggggaaaggcatccaggatgaaaacataacagtgggtggagaaatctgctcgcggatggagcgatgcaaaaaccagagtggtagcactgaatttc

SEQ ID NO: 16452 - DNA, 600 bp, Chicken  19866894223779_1
tgatcagtgatgtagatgaagaggaataagcctgctgaacaaaaattgcaccactctggtaaaaatagtcctggaacagggaattttctttttatgccttcttgttttagcacttagaatggcgctggagatggctgcctactggagaggctgagaggagacaggcttttctagactaagtattgcctgttcttctgcagtagtaataaacattggagcatctatttcaccagccatttgatagagaaacttgcttttcttcccttcctcccctccttgaacaggaaaaaaacaaaatasaaggacagtaattaattccggaacagcacatgcagccacaccggctccttcacagcagttctatggtgagggagctggggctggaggcacggtctgcatctctatggttactggtacagcgagggagaagggtgaggaagagatagcagaaggttgcagactgaaggagcagcttctgtggcagcaaggggcaaaggatttcaaagcagggcagaaggtctctggatgtggagttaagtttagtttccttgctgttttctccccctccaaggaatgagtatgcaacagaagacctatccc

SEQ ID NO: 16453 - DNA, 600 bp, Chicken  19866894223779_2
cctctgcctttgcaccacagcacattccatcaccttcctgggacaacctggccttcctcccagcccagaaacacatcctggtgatgctgtactcccccagcagccattcaggggcctgctgtgccgcatagcacggccagctgacacgactacagctcctgagcagcatcagtacagaaaggagccttcagaacccaagcaacctatgtccactcttaccccttatatctcagcttatttgtttttgaaatgtcaggcggatattttcaggcacaacctctcctttgtgaatccaaaccractcctcaactaaataatagatttgaagaatacctaggaagggagctctcatttccatttcactccatgccagcatgttgctgaaatcaccctgaaggatgtgggatatgcaaatccttccaggcctgcttttgagaaatgccaaggctacacagaaccctttgaagctgccacataaacacgttcccaggttttcttagaaaatccttggttttcagttaagtgatcaatgagaacaaaagaataagaaagcaagaatcgtgacaggtgctggttagctcctagatcttgtatgtagat

SEQ ID NO: 16454 - DNA, 600 bp, Chicken  19866894223779_3
aatcaccctgaaggatgtgggatatgcaaatccttccaggcctgcttttgagaaatgccaaggctacacagaaccctttgaagctgccacataaacacgttcccaggttttcttagaaaatccttggttttcagttaagtgatcaatgagaacaaaagaataagaaagcaagaatcgtgacaggtgctggttagctcctagatcttgtatgtagatgcagtataattgctaataactgctgcagtatgaagttttgtatagctgcctcctaataaagcagcaacagccagctggagggarcagcccagactcagcacttgtttggcccactcgggatgcccggtatcactggtggcccagcagaactccctgagctcraagcccawccacacaaaggaaaagcaaaccaaccttcaatgtggcagaggcaaacctcagtctcagaaccacagaaacatcaggaaagtcatctgatgtgatcccatcgacaaagcctgagagtgccctgtcacaaacacatcagcccagagacttcctcaccgcccctggaagttggtttcaacttccagtcgattcctgaagcctgtgatatcacaaata

SEQ ID NO: 16455 - DNA, 600 bp, Chicken  19866894223779_4
tgaagctgccacataaacacgttcccaggttttcttagaaaatccttggttttcagttaagtgatcaatgagaacaaaagaataagaaagcaagaatcgtgacaggtgctggttagctcctagatcttgtatgtagatgcagtataattgctaataactgctgcagtatgaagttttgtatagctgcctcctaataaagcagcaacagccagctggagggarcagcccagactcagcacttgtttggcccactcgggatgcccggtatcactggtggcccagcagaactccctgagctcraagcccawccacacaaaggaaaagcaaaccaaccttcaatgtggcagaggcaaacctcagtctcagaaccacagaaacatcaggaaagtcatctgatgtgatcccatcgacaaagcctgagagtgccctgtcacaaacacatcagcccagagacttcctcaccgcccctggaagttggtttcaacttccagtcgattcctgaagcctgtgatatcacaaataatcaacagcaccaacactgctacataaagcaatgccacttcagcatcgtggctctctacaaaaggaagttcctgagct

SEQ ID NO: 16456 - DNA, 600 bp, Chicken  19866894223779_5
ccacataaacacgttcccaggttttcttagaaaatccttggttttcagttaagtgatcaatgagaacaaaagaataagaaagcaagaatcgtgacaggtgctggttagctcctagatcttgtatgtagatgcagtataattgctaataactgctgcagtatgaagttttgtatagctgcctcctaataaagcagcaacagccagctggagggarcagcccagactcagcacttgtttggcccactcgggatgcccggtatcactggtggcccagcagaactccctgagctcraagcccawccacacaaaggaaaagcaaaccaaccttcaatgtggcagaggcaaacctcagtctcagaaccacagaaacatcaggaaagtcatctgatgtgatcccatcgacaaagcctgagagtgccctgtcacaaacacatcagcccagagacttcctcaccgcccctggaagttggtttcaacttccagtcgattcctgaagcctgtgatatcacaaataatcaacagcaccaacactgctacataaagcaatgccacttcagcatcgtggctctctacaaaaggaagttcctgagctgtgcacac

SEQ ID NO: 16457 - DNA, 600 bp, Chicken  19866894223780_1
ggaaatctgattacaatgcagctcatgagcaacatttgtgcactttcacttgtggctttgctcctcacaacgtcttacactgcagaatagttgctgcttacattaattcctcttcgtgtgacccagcctgccctctgtgctgggcgcagctccttcacagagcagtgccagctgtcacagctcaccactgctgccaggcctggctggacccgtgtgagtggctgctggagccggcaccccttgccctgtctctccaaatttcaaacacttccaagcttctatgagcagaagtgtataaargaccatttctataactcaggatgaattgtgactgctgtttctgttgctgctgttactacaagcatcatttgacctcaaggagagtgttaactgctattctgctcaacccttggtcaggaaacaatytcaataaatactccagtagaaaccaagaaaagtgatcccagagatggcttgtcagattcctcagcgctagcaggatggcactgcaagtgaattctgcaacagctttcaccatccttgctctctttctcacccaaacaatgaactaactggagctactcaactgcctgagttyct

SEQ ID NO: 16458 - DNA, 600 bp, Chicken  19866894223780_2
cctgccctctgtgctgggcgcagctccttcacagagcagtgccagctgtcacagctcaccactgctgccaggcctggctggacccgtgtgagtggctgctggagccggcaccccttgccctgtctctccaaatttcaaacacttccaagcttctatgagcagaagtgtataaargaccatttctataactcaggatgaattgtgactgctgtttctgttgctgctgttactacaagcatcatttgacctcaaggagagtgttaactgctattctgctcaacccttggtcaggaaacaatytcaataaatactccagtagaaaccaagaaaagtgatcccagagatggcttgtcagattcctcagcgctagcaggatggcactgcaagtgaattctgcaacagctttcaccatccttgctctctttctcacccaaacaatgaactaactggagctactcaactgcctgagttyctaggacacttatgtttgaactttacgctgcagaagctacatttctattgcttccagttccaacaaaaaaatcttccactgtgcctttaaaaacacgagcacagactgtctttcaaattgcacaaagc

SEQ ID NO: 16459 - DNA, 600 bp, Chicken  19866894223780_3
argaccatttctataactcaggatgaattgtgactgctgtttctgttgctgctgttactacaagcatcatttgacctcaaggagagtgttaactgctattctgctcaacccttggtcaggaaacaatytcaataaatactccagtagaaaccaagaaaagtgatcccagagatggcttgtcagattcctcagcgctagcaggatggcactgcaagtgaattctgcaacagctttcaccatccttgctctctttctcacccaaacaatgaactaactggagctactcaactgcctgagttyctaggacacttatgtttgaactttacgctgcagaagctacatttctattgcttccagttccaacaaaaaaatcttccactgtgcctttaaaaacacgagcacagactgtctttcaaattgcacaaagccttaggagtcgggcactagaccactcttcctctaccatctcagtaggcagagaacaacgttacagccaggccagatttggaagatgaacgtaactgcacttcccaggccagtaactgtttgagtattgagaataaccagcaatgtgtttttactgcagcagacattctgcac

SEQ ID NO: 16460 - DNA, 600 bp, Chicken  19866894223780_4
gcagacattctgcacccgtactcacaaaaaattaagactatttctagtactgaaatgctttaattagctgaggcttgatattttagatactcaggagatgctccatctggctataattaagacttattagaaaagttttaagtagatttgaaattaatttctaatttgaagtcctttttctccctaaaagcagaaaattatttctgtgaggaaagaaaccacacccatcaaacacatctcaggtagtcttacgtagcatactgtgttttctttttttgcaagggagagaaatggagaggmsctctcggtacaaatactgctaccatagaagctattggaaggtgaatttctgattgtttttctcctttcccatctctcttacccggtagagtggaagcaggtaactgcacaccccagatccactgcaacaaactatacttagggtatgtgagaaacagcaacttgcaatggttactttactgtacaaaatatagagttaattttcaaagcggtcagtggataatcaattcattttcagaattacacaaatgtttgttgttaatacttgaaaaaaatggcagagggatagaagaacttttt

SEQ ID NO: 16461 - DNA, 600 bp, Chicken  19866894223780_5
cagacattctgcacccgtactcacaaaaaattaagactatttctagtactgaaatgctttaattagctgaggcttgatattttagatactcaggagatgctccatctggctataattaagacttattagaaaagttttaagtagatttgaaattaatttctaatttgaagtcctttttctccctaaaagcagaaaattatttctgtgaggaaagaaaccacacccatcaaacacatctcaggtagtcttacgtagcatactgtgttttctttttttgcaagggagagaaatggagaggmsctctcggtacaaatactgctaccatagaagctattggaaggtgaatttctgattgtttttctcctttcccatctctcttacccggtagagtggaagcaggtaactgcacaccccagatccactgcaacaaactatacttagggtatgtgagaaacagcaacttgcaatggttactttactgtacaaaatatagagttaattttcaaagcggtcagtggataatcaattcattttcagaattacacaaatgtttgttgttaatacttgaaaaaaatggcagagggatagaagaactttttt

SEQ ID NO: 16462 - DNA, 600 bp, Chicken  19866894223780_6
gtggataatcaattcattttcagaattacacaaatgtttgttgttaatacttgaaaaaaatggcagagggatagaagaacttttttaaactcaagaattcagcaccaagataagtagatataaatgcagttgtggaaaccagtcacatcaaaggttagttttacaatagatcaactgagcacatgaatggagtaacatttgtgaagaacgttcactatattgttttgtactgaagctgtcagtagggattagttttctgtgcaggtcaactgcacggtatttctgttacagctgacagaygtcagcaggatttagcagagcattccatgcactaaaacttctactagagaaaggtgggccacaagcaggcctgactagttgtagtgtttgggcacagaacaacttttagaagagagagacaggtgagcaactcagagaaggaaagctctgagaggtgccaagtccaaggagaaggttcaagtgggcttcttttcattcttgctatctcctttggtggtagcagtgcaaactgtgggaagggctgaggtacgacgagctgagaagaacctacagccctggcacgcaaacttataatcaact

SEQ ID NO: 16463 - DNA, 599 bp, Chicken  19866894223792_1
  misc_feature (1)..(91): n is any nucleotide
nnnnnnnnnnnnnnnnnnnnnnnnnnnnnnnnnnnnnnnnnnnnnnnnnnnnnnnnnnnnnnnnnnnnnnnnnnnnnnnnnnnnnnnnnnntttgtataaatggtagcttgatttttatccaggttttctcatccagaactctcaaattctaccaagaaatttaatgctttttccagtgcgcaggcaggaaagcagagggataggaaggcatacagactgattagcccaataatgggagtaggtttctgttctctttctgtagtcttatgctgtggtatctataaaaggtgtatagagakaaaccatttcacttctgtagcagtagataatccaaatgttttttgtctcctacgtttactgttcttttaccacctctcttaattctctgaatttactgtttcagtacaaattaagaattcatattcttaatatgaattctgcagtaaatatgcttctctgtgactgtatggatagcagatagtagtacacatactactaacatagcagattagtatacatactaattcataacatgtgaaaaactaatacattctaactattatgttattttgaaccacttgaagatcatgacttatca

SEQ ID NO: 16464 - DNA, 600 bp, Chicken  19866894223803_1
agaaactattgaatgtcactgttaggccatgtctaactttttaattacaacagcagaaaatgacataattgaaaatcccagtctgtagtaacatctcctgtgtgttatcaaaagctcttcttactcttcaggaaaatgggactttggaggctgtgctcgtggttgggaacacatagtaagctcatgtttcccagcaaatgcaaggagtgatgtgagcacccaacagaaaaagctgatttatttttttaattaactttaatttcagccattagttctgggttggaagcatttctgtaggtrgagggacaaattctttcttttggatgtactaacacatagctgacagcatgaaaatacatctatgtgccgagcttgtaccttttgaacaatcaaatccatgcgtgggttttcttccttgagggtctgcacaagttgtatttaaaaaaaagcagtggtggggaaagtggtggtacccagtgaactactggtttgcctcatcttcggtttgacatgtggtagtttctacttacctggaaaagagtattgcaagaattatgatgattctacctcagaaatttgtggtttgaagctgaaaagatg

SEQ ID NO: 16465 - DNA, 600 bp, Chicken  19866894223807_1
gcgcattatcagcactgctttagtaaaaaataaataaaacatagcaccgtacaggtttttatgaaaatgaaaattaattgtatgccagtcatacatgagaagactgtattttacttacaattgcagtgcacatagtaggatattccactgtgctttgtgtaatgttaattatgctgataaacttgcagagaaatcaaaaagatgaagcctttatgcagcaactaaatatttatgcaattattatttgctctatgaattatttttcactctttctcattttgactgtacagttttttcttygacctgattttcttctttcccttatcccttttccatttttctgcttcctgatctattcacagttctcctgcatttcattctctaaagcaatttttattacttattcctaaccccttcaatgaactcaagatattgaaatgaccgtaatgagcttttgttccctttctttttctttaactggtcttctaagattcacttatcttagtctgtgtgcatatgtatatatttctttcagacaatattttaggctacttacttgagaaattgcgttagaaattctctttcatatctgaagaaact

SEQ ID NO: 16466 - DNA, 600 bp, Chicken  19866894223812_1
tgataataatgattattatttaagatctgccaaatcttgctagtacagctccctccctggaaaacctgggtctgtatttttataggaaatcatagaactgtttgagttggaacccacgtaggatttccaaataaaagtgcttcccaccaaaatccttctgcttcaatagacagaaatactcatcacctctcctctccttgttggacttgccattccaacaggtacccaacctgtctgtgttgtgtcagatggacctttttgtttgcttgtggttttttggatttggatagagtgaaaggrttggtaaaactcctggtgttgacctgagtgctttgagccttcatcaacaaaggcactaaggctgatgagaggagagggtccatgcaaccaatacatcagcatcctgaggtggtatgtaatttactttactgagcactcattagcctcagcaataaaataagcagttaataggtgccataactcactccgtactgaaggctaggcacaccactgtgcagcaaaccacaaggcaaagctgcagcatttggcaccaatcaagagtttcctatggacccagcataactggtgcttcctgtaaaa

SEQ ID NO: 16467 - DNA, 600 bp, Chicken  19866894223812_2
aaactcctggtgttgacctgagtgctttgagccttcatcaacaaaggcactaaggctgatgagaggagagggtccatgcaaccaatacatcagcatcctgaggtggtatgtaatttactttactgagcactcattagcctcagcaataaaataagcagttaataggtgccataactcactccgtactgaaggctaggcacaccactgtgcagcaaaccacaaggcaaagctgcagcatttggcaccaatcaagagtttcctatggacccagcataactggtgcttcctgtaaaaaaactyatgtgttctgcatatccaaaatatctgagtaaactcttcctaaattgaattggtgttgtctatactcattcttgacattatgtgggcaaggtgaggggatagacctgatattccttacttttcagttctcctgtgcctgtaccagttgatggcttccttgtgttttcattgtctcccttgcgctctatgtctgaggatgatattaggacctgactctaaatggaccatgcgcaccatttgaagtcctgcactgagtatgaggaaggcagcatgaaatgactctgatgtgccatcagamtc

SEQ ID NO: 16468 - DNA, 600 bp, Chicken  19866894223812_3
tyatgtgttctgcatatccaaaatatctgagtaaactcttcctaaattgaattggtgttgtctatactcattcttgacattatgtgggcaaggtgaggggatagacctgatattccttacttttcagttctcctgtgcctgtaccagttgatggcttccttgtgttttcattgtctcccttgcgctctatgtctgaggatgatattaggacctgactctaaatggaccatgcgcaccatttgaagtcctgcactgagtatgaggaaggcagcatgaaatgactctgatgtgccatcagamtctcttccttcttttgtggcagtgtgatgggttgatgattggactaagcagtcctagtggtcttttccaagcttactgattttatgattctatggttctgtgctcaacacatgcaaggatgctattcatcactttgtattttacacaatcttaaawataatcttcaattacttacattgtatataagattttccagcttgctttataagaaatatcacccaggtcttgccctggaagtagygtttctccagasgtagctgtctcagtgatctgggagaaggatccctgaatgcaatgtat

SEQ ID NO: 16469 - DNA, 600 bp, Chicken  19866894223812_4
tccttgtgttttcattgtctcccttgcgctctatgtctgaggatgatattaggacctgactctaaatggaccatgcgcaccatttgaagtcctgcactgagtatgaggaaggcagcatgaaatgactctgatgtgccatcagamtctcttccttcttttgtggcagtgtgatgggttgatgattggactaagcagtcctagtggtcttttccaagcttactgattttatgattctatggttctgtgctcaacacatgcaaggatgctattcatcactttgtattttacacaatcttaaawataatcttcaattacttacattgtatataagattttccagcttgctttataagaaatatcacccaggtcttgccctggaagtagygtttctccagasgtagctgtctcagtgatctgggagaaggatccctgaatgcaatgtatagacayggttaacaacattaaattatgatatatccacataagattaagtcctctagaagacagagaggcctaaatccacctcatcgccctttaccacctctttaggtgaaccacccagtctaagacaccactctcagtgtatcatcaggatcccag

SEQ ID NO: 16470 - DNA, 600 bp, Chicken  19866894223812_5
gaagtcctgcactgagtatgaggaaggcagcatgaaatgactctgatgtgccatcagamtctcttccttcttttgtggcagtgtgatgggttgatgattggactaagcagtcctagtggtcttttccaagcttactgattttatgattctatggttctgtgctcaacacatgcaaggatgctattcatcactttgtattttacacaatcttaaawataatcttcaattacttacattgtatataagattttccagcttgctttataagaaatatcacccaggtcttgccctggaagtagygtttctccagasgtagctgtctcagtgatctgggagaaggatccctgaatgcaatgtatagacayggttaacaacattaaattatgatatatccacataagattaagtcctctagaagacagagaggcctaaatccacctcatcgccctttaccacctctttaggtgaaccacccagtctaagacaccactctcagtgtatcatcaggatcccagcaccttgtgcctttgagcattcacaatgattttgctccaaggacattccaggccagtggtgactggagaaggaagaggaaggtaa

SEQ ID NO: 16471 - DNA, 597 bp, Chicken  19866894223812_6
tgagtatgaggaaggcagcatgaaatgactctgatgtgccatcagamtctcttccttcttttgtggcagtgtgatgggttgatgattggactaagcagtcctagtggtcttttccaagcttactgattttatgattctatggttctgtgctcaacacatgcaaggatgctattcatcactttgtattttacacaatcttaaawataatcttcaattacttacattgtatataagattttccagcttgctttataagaaatatcacccaggtcttgccctggaagtagygtttctccagasgtagctgtctcagtgatctgggagaaggatccctgaatgcaatgtatagacayggttaacaacattaaattatgatatatccacataagattaagtcctctagaagacagagaggcctaaatccacctcatcgccctttaccacctctttaggtgaaccacccagtctaagacaccactctcagtgtatcatcaggatcccagcaccttgtgcctttgagcattcacaatgattttgctccaaggacattccaggccagtggtgactggagaaggaagaggaaggtaaaggaggagg

SEQ ID NO: 16472 - DNA, 544 bp, Chicken  19866894223812_7
ccttcttttgtggcagtgtgatgggttgatgattggactaagcagtcctagtggtcttttccaagcttactgattttatgattctatggttctgtgctcaacacatgcaaggatgctattcatcactttgtattttacacaatcttaaawataatcttcaattacttacattgtatataagattttccagcttgctttataagaaatatcacccaggtcttgccctggaagtagygtttctccagasgtagctgtctcagtgatctgggagaaggatccctgaatgcaatgtatagacayggttaacaacattaaattatgatatatccacataagattaagtcctctagaagacagagaggcctaaatccacctcatcgccctttaccacctctttaggtgaaccacccagtctaagacaccactctcagtgtatcatcaggatcccagcaccttgtgcctttgagcattcacaatgattttgctccaaggacattccaggccagtggtgactggagaaggaagaggaaggtaaaggaggagg

SEQ ID NO: 16473 - DNA, 600 bp, Chicken  19866894223813_1
tatgggcagggcagactttcccgaaggaaaaagcaagaccacattattcaaagtagttgtgtgtaattgaataaagaagcttggcgccttgcaggggaagtacagccaccattttgtgtcttgcctttccacatagaagctgcagaagacttcagacatgggaaagcctcccagaataaatactcaccaaatacaaatgtgcactgagacttgaaagtctggtgagagataattatattgcattagctgtgttattacccacgaggcaaccagtgtatatccgcactgcagtctccaaaragctgcgagaagaagggatgcaaggaaggtagaatatttctatatggctgtatatagggcaaacatatcctctaaaaccaygtgatcttctagagaaatcttaattcctccaaaaaacttgagatgtagagagaaaaacaactttattctagttggaagcataaaagtactggtgataacacaaaatatttcctgtgtactttatgtagaggaactaaacaccgtatagtttgggaagtgtttggatgttctgttctaatatatgactgcgatagcagtaactgcagaagaatatatcct

SEQ ID NO: 16474 - DNA, 600 bp, Chicken  19866894223813_2
tggcgccttgcaggggaagtacagccaccattttgtgtcttgcctttccacatagaagctgcagaagacttcagacatgggaaagcctcccagaataaatactcaccaaatacaaatgtgcactgagacttgaaagtctggtgagagataattatattgcattagctgtgttattacccacgaggcaaccagtgtatatccgcactgcagtctccaaaragctgcgagaagaagggatgcaaggaaggtagaatatttctatatggctgtatatagggcaaacatatcctctaaaaccaygtgatcttctagagaaatcttaattcctccaaaaaacttgagatgtagagagaaaaacaactttattctagttggaagcataaaagtactggtgataacacaaaatatttcctgtgtactttatgtagaggaactaaacaccgtatagtttgggaagtgtttggatgttctgttctaatatatgactgcgatagcagtaactgcagaagaatatatcctgagtcagcatccattttcatttgctctgctcagtttcttcattgaagatttgaaatgctacactgaagtccattgtagtag

SEQ ID NO: 16475 - DNA, 599 bp, Chicken  19866894223817_1
  misc_feature (1)..(37): n is any nucleotide
nnnnnnnnnnnnnnnnnnnnnnnnnnnnnnnnnnnnncctgagggctgcgtgtccgaggatggctgcaggctgtgcagctgggggtgcagccgggtgcccagggctgtggtgcagagcagggtccctgctgtgccccaggggctgtgtgccggggcagggactctgccgcctgccaggctcagcactcagcctgcccggggagctgcccagggcgctgcggggagacgtgtggggggaaggagccccccggcagggcaggggccttctgctgccacagctgctgtttagggcagggggakcacagatacgctgcaccccagaatgtttccaagagcactctgtatgaggagaggcaaggcagggattgtcttctttctaatcttagggatgggaaaaagactggaggcagaaatctaaaaggggctgtcaacagcagagagattctacatgcaaggaaatgctgtggggttgttgaaatgaatattaggtattgattgcatgttgtatgttaatgaggcattgctgaagtatgttgagaaatgctgactacttagtgatgggaagtagattcctctgctctcatcagggtctttttttc

SEQ ID NO: 16476 - DNA, 600 bp, Chicken  19866894223828_1
ggggaaatggacttgggtgtattggttggtgtttggctgaacatgagccagcagtgtgcccaggtggccaagaagaccaatggcatcctggcttgaaatagtgtttctagcaggagcagggaagtaattgtccccatgtactcaacactggtgaggctgtgcctcgagtactgtgtccagttttgggcacctcactgcaagaaagacatcaaggctgtgcagtatgtccagagaagggcaacagagcagtgaggggtctggagcacaagtcttacggggaagtctggctgagggaactgrcatgggtcagtctggagaagaggaggctcagggcagaccttatcactctgtagaactacctgaagagaggttgtagtgagctgggggtcagcctcttctmwwgtgtaggtactgataagagaaatgggattggcctcaagttgtgccagggagattcaggctggacattaggaaatactactgctccaaaagagtggtcaggcactggaatgggctgtccagggaggtggtggagtcaccgaccctggaggtgttcaaggaatgtttagacattgtgttgagggccatggtttagtgaga

SEQ ID NO: 16477 - DNA, 600 bp, Chicken  19866894223828_2
gtgtttctagcaggagcagggaagtaattgtccccatgtactcaacactggtgaggctgtgcctcgagtactgtgtccagttttgggcacctcactgcaagaaagacatcaaggctgtgcagtatgtccagagaagggcaacagagcagtgaggggtctggagcacaagtcttacggggaagtctggctgagggaactgrcatgggtcagtctggagaagaggaggctcagggcagaccttatcactctgtagaactacctgaagagaggttgtagtgagctgggggtcagcctcttctmwwgtgtaggtactgataagagaaatgggattggcctcaagttgtgccagggagattcaggctggacattaggaaatactactgctccaaaagagtggtcaggcactggaatgggctgtccagggaggtggtggagtcaccgaccctggaggtgttcaaggaatgtttagacattgtgttgagggccatggtttagtgagaactatcagtgatagatggacaattggactggatgatcttgtaggtcttttccacgttggtgattctgtgattctatgaatattctctgccctaatttgaa

SEQ ID NO: 16478 - DNA, 600 bp, Chicken  19866894223828_3
tgtttctagcaggagcagggaagtaattgtccccatgtactcaacactggtgaggctgtgcctcgagtactgtgtccagttttgggcacctcactgcaagaaagacatcaaggctgtgcagtatgtccagagaagggcaacagagcagtgaggggtctggagcacaagtcttacggggaagtctggctgagggaactgrcatgggtcagtctggagaagaggaggctcagggcagaccttatcactctgtagaactacctgaagagaggttgtagtgagctgggggtcagcctcttctmwwgtgtaggtactgataagagaaatgggattggcctcaagttgtgccagggagattcaggctggacattaggaaatactactgctccaaaagagtggtcaggcactggaatgggctgtccagggaggtggtggagtcaccgaccctggaggtgttcaaggaatgtttagacattgtgttgagggccatggtttagtgagaactatcagtgatagatggacaattggactggatgatcttgtaggtcttttccacgttggtgattctgtgattctatgaatattctctgccctaatttgaat

SEQ ID NO: 16479 - DNA, 600 bp, Chicken  19866894223828_4
gtttctagcaggagcagggaagtaattgtccccatgtactcaacactggtgaggctgtgcctcgagtactgtgtccagttttgggcacctcactgcaagaaagacatcaaggctgtgcagtatgtccagagaagggcaacagagcagtgaggggtctggagcacaagtcttacggggaagtctggctgagggaactgrcatgggtcagtctggagaagaggaggctcagggcagaccttatcactctgtagaactacctgaagagaggttgtagtgagctgggggtcagcctcttctmwwgtgtaggtactgataagagaaatgggattggcctcaagttgtgccagggagattcaggctggacattaggaaatactactgctccaaaagagtggtcaggcactggaatgggctgtccagggaggtggtggagtcaccgaccctggaggtgttcaaggaatgtttagacattgtgttgagggccatggtttagtgagaactatcagtgatagatggacaattggactggatgatcttgtaggtcttttccacgttggtgattctgtgattctatgaatattctctgccctaatttgaatc

SEQ ID NO: 16480 - DNA, 600 bp, Chicken  19866894223829_1
tttctcctcttcctccaaaatgttgctgcctgtaactgattgatgagatacaacatgcagataagtgctcctaacaccttcccaaaggtagctttctacagcaagaaaattatcctccaagtttatccaggacagagccaaccacagaaagaagcttttcctcttaagctaggagaaagaaatcccacagtatgacatcagtgcttctttgacaaagaggcagaagccaacatcttacacacagacacagcaggaagggagaggaaagaaaaaaaaggaaaaaacccaaagtggtgctckgaacagcaaataaacataaaaatgcagaatccttaccaggatcaatgtttctgctttctaaaatcaccatgcaagtctcctgaaatttcttgagcttttcaacttcttgcagcaggccttcattctcctcctttaactcctttatagtgccctgtcgttaacacagtgacgttttaaatgaaccaagtttctcaggagagtttcttcccattagtcagtaacaccgagtgctcagcaggtgctcctctggcatcaagagtcacaccttgcctttctatccttaactctccagagaaagag

SEQ ID NO: 16481 - DNA, 600 bp, Chicken  19866894223832_1
acctgttcaagtctgagctgtaatgttcctgtagactgtaactgtctacagaagtaggagcctgcaatatatcggtgtatgaaatcattcctattcctccacagtagtttgtaaagtttccaaagagctttccaggctttctggatgaaagccactatataaatgtaagatgccattattatttattgtttcagtttgacagaaagatggagggtttcattttgacttgatatttccatctcctctccactttgcctttgtttcataactttctgacatgcaggattttcctttgtattycttccaagctattaagacggagaggttggaaatgctgtagacacaaataagttttttattatagcaatttttaattattatttgtgttctcatcacataggagattagactaaaggcctcaagcaccagcatcctgtgtctgagggtagctggtcaggattttcctaaaaggaaatttatgtcccattcacaaggaccttacagacagggaagcttttcttaccaccctacatttctgctcaccttggccctttggaatgctttttaatattttaaacatggttctttgcaatcttctgt

SEQ ID NO: 16482 - DNA, 576 bp, Chicken  19866894223833_1
tttatgcctgacagaggcaatgagaggcaatgtttagcaaatagatctgaatatagatacttgttcattacctgtgcactcccccagcatccagacactgtattcaagatgccagagggtacttttctgcacgtttcttgtcagtgtctgttcatagtccatgaatttgcctaatgcctttttgatactgcttatattatcggcatctacgatgcagattaaaaatttgtggtgaatcaaacagcacataacttgctctagacaagaatgaacccgcttgccatctacttttttctattmtttattttatcttaataatcaaagggaagggtttatttcaaagcaaatagctcagaacctctgcaaaacaagattgaaaactactcactggagactttgccctgctctaacagctctcccaccctttctaagcttatctacaatgatgtaatgggatacagtatcaaaagctagatgaagtcaaggtagacaacatccactgcttttccctcatctatccagagagtcaggacctcatagaaagctactagattggtcaagcatgttttccccttg

SEQ ID NO: 16483 - DNA, 600 bp, Chicken  19866894223835_1
ttctaatcgactctttactacgctaacctttgtgaatgactttaagatgcacgttctgttccggagatgtttaatgctgttgcattctgaataaaggatggctgcttcctaagcaaattaagtctgtaagaacgagtgttaacgtttgggaaccctagcatcatttaactcttcacaacagaaagaagttaaatttttagttcattcccaaagcacttttgaagattccaatacatctctagaaggattaggagattcagtttgatgtattcaggcaaacctcagttccagagcactcaygagctgcctttacagattttcagcagcagctggtacatcagcacaggaactaatgaatgcatgtggaagactgctccaattcccatttttggcacagcactgaggcacagctgattgctacctgtacaaattgctaagtgtcatgaacaggtcaactacagcagtgtttgaaggtgaaggtggcataatgcctatggcttgttagacaacgttaacgttcacttcggaaaggcaaggtctgaagtcaagcaagaaagggaagtttttatttgcagtcatacccaagaacgctagataggg

SEQ ID NO: 16484 - DNA, 600 bp, Chicken  19866894223835_2
ttgttagacaacgttaacgttcacttcggaaaggcaaggtctgaagtcaagcaagaaagggaagtttttatttgcagtcatacccaagaacgctagatagggctcatgtcagattggtcagtgacaaaaagcagaatcagttagctaggaacttcagcatttaggtggaaggctgttactaatacgttggaggttgttactaacatgcaccacgagatgcaatgtaacagtaaagaaacagaacaactcatcgatcaatgagtaagcacaattccaaatcatcacaactatcatcagaarcgatcaaaatgaagacttgatatgctctttccaacagggcttgctagctttcactgagcagcagcacaggatgcaagctggcttcttgcttttagacagtgctctaacagtgggcattcagttccactgaaacagaacatcccccataacttgctccaattggctggtgtgcctgactggactccaaatgacctcttcctgaaccacccatgtgcatttaagccacaggtcacgctgctcccaatgcaagagctacaaagctgagacacggagatgggtcaactccaggaacacccaaag

SEQ ID NO: 16485 - DNA, 600 bp, Chicken  19866894223843_1
tcagtggcagttatctgtgccaaatgtgtttttgccaaaaaaatgcatcatttttacagaacaataccatgtaactgttaaaatgcaggtttacactctctcagttactttactgctggagctagatatctgcaccttatacgtgcgatcagcaacttaatttgtgtagctacaattatatgtgtgtatatatatatatatgtatatatatgagacacatttttcagttgccttacctgtcattctttgttgaatctttagttacccaactcggggaaagagaatcaggccttaacttckaaaggtccatttgtttcttgaatcttttgctagatctattaatacatgggttataaggctgatttaataacagttgaaaatatggtttttctgattgattttggcaagtgaagatgctgagaggtggtgctgagggtccctagcttgttttttttttttttcctttttaaagcaaaagatcatgttctataacatcatctgtaaactcagtgtctgactgagggaaggatgagccacatcaaaaactgcctaaccgatagatgtagttataagttatacactggcgatgaataaaaaact

SEQ ID NO: 16486 - DNA, 600 bp, Chicken  19866894223843_2
aataacagttgaaaatatggtttttctgattgattttggcaagtgaagatgctgagaggtggtgctgagggtccctagcttgttttttttttttttcctttttaaagcaaaagatcatgttctataacatcatctgtaaactcagtgtctgactgagggaaggatgagccacatcaaaaactgcctaaccgatagatgtagttataagttatacactggcgatgaataaaaaactgggctggaattgaaaaaaagctcctctgtcagaggagctgagaccacagataacctttcaaatcraggtcttcgggctaatttgaacatggaatctgatgtgtctgtgagagcaataagctgaaagtttggtgtattgggaagttttttatatctacatactgattctatgtatgcacggatascaagactatacacaggtgataatataaactattcactgtcatgaatcagtacaaataggaaatagtgatcataaaggacagcatcatctattcgctgcactgggacaaagaaattcagattccctggttataaacagagtctgggaatctataccaggatttagattttgagctgtatgta

SEQ ID NO: 16487 - DNA, 600 bp, Chicken  19866894223843_3
ttctataacatcatctgtaaactcagtgtctgactgagggaaggatgagccacatcaaaaactgcctaaccgatagatgtagttataagttatacactggcgatgaataaaaaactgggctggaattgaaaaaaagctcctctgtcagaggagctgagaccacagataacctttcaaatcraggtcttcgggctaatttgaacatggaatctgatgtgtctgtgagagcaataagctgaaagtttggtgtattgggaagttttttatatctacatactgattctatgtatgcacggatascaagactatacacaggtgataatataaactattcactgtcatgaatcagtacaaataggaaatagtgatcataaaggacagcatcatctattcgctgcactgggacaaagaaattcagattccctggttataaacagagtctgggaatctataccaggatttagattttgagctgtatgtaacactttagcagaaacattagcaacatttagcatgctaacaacaatttttgtatgctgcacatcaagaaaatacatgaaaagaataatttattttttaaacctgtctttctggtcaaat

SEQ ID NO: 16488 - DNA, 599 bp, Chicken  19866894223846_1
  misc_feature (1)..(45): n is any nucleotide
nnnnnnnnnnnnnnnnnnnnnnnnnnnnnnnnnnnnnnnnnnnnntccctggcttatttgagacttgagccgtgactcagtaaggctctgacagtcctgtattttcttttatataaactggagatgacaaattaaggagcagtcaccactggggaaaaaacacatgaagcaacccaagtcagacacttgtgcctgactctactgcctgtaaggaggtgggttctgctttgctgcatgtcacaaacattccaaacacctgccaggatgtcagctccacatctacaagaaaaaccacagggrgctacatatrcaggcaggggtatcccagcgtgctctaacaggcactctgtgctcagccacaatttgggccatccttctgaattgtctgaagacattcaaatccctgccttggtacctaaaggagcacacacataatatcccttcacaatcaagtttgattggacactgtacaggaaaggctcatgagactaagggaatgtggatgctttaacatattggttgtggctccaatatctttaaaaccagtacttctactttgcatacaatgttaataaaatgctatgatcacataagttccc

SEQ ID NO: 16489 - DNA, 599 bp, Chicken  19866894223846_2
  misc_feature (1)..(35): n is any nucleotide
nnnnnnnnnnnnnnnnnnnnnnnnnnnnnnnnnnntccctggcttatttgagacttgagccgtgactcagtaaggctctgacagtcctgtattttcttttatataaactggagatgacaaattaaggagcagtcaccactggggaaaaaacacatgaagcaacccaagtcagacacttgtgcctgactctactgcctgtaaggaggtgggttctgctttgctgcatgtcacaaacattccaaacacctgccaggatgtcagctccacatctacaagaaaaaccacagggrgctacatatrcaggcaggggtatcccagcgtgctctaacaggcactctgtgctcagccacaatttgggccatccttctgaattgtctgaagacattcaaatccctgccttggtacctaaaggagcacacacataatatcccttcacaatcaagtttgattggacactgtacaggaaaggctcatgagactaagggaatgtggatgctttaacatattggttgtggctccaatatctttaaaaccagtacttctactttgcatacaatgttaataaaatgctatgatcacataagttccctaaagaaacg

SEQ ID NO: 16490 - DNA, 600 bp, Chicken  19866894223853_1
aaatgttaggaaatggaagaaaaccaaattccggggaaacaaagacacatactctgtttgttggccaaagccaaagctttatactatcctacatctaattctgtcaacatattaatggtaacacaggtatatctacaagcgctaagcgctaccataaatgtagtaagaattcatgtatcagtacagagcagcgtattgagttttcaggcagagaaaactcaataaagatcacaaattgtcaggatgtaacaaaactatgaacattgtatgctcacatagagaaatctaaggcccatactstctgctaagtttgatagaggagcaacgtatatttttaaggtataggaagaagttaactgagacactgcctgccttgttttactgccctaaaacagaaagtgtgtgaacgtctttcactgccttgactaaaacagagaacataaagggctctgctattccattcggtaaggaaataaaatgaacactaaatgcagcaaagagaaagttcctgtggttgacctctgtaagagagttagatgattgaatttcagaactttctcaaagacataagccttattcaaagtaatttgccaatagtta

SEQ ID NO: 16491 - DNA, 600 bp, Chicken  19866894223859_1
ctttgtctgttttttgcattcttcagtgtcccatgagcactggtagatttgtctaagcaataaatcatttgaaaccgtcccataccaaatcatataactttcagcatgtcttatatttgcctattatgatatgttgagctaacaaaaatctgtttttatcgagcataataaaaaactaagacatttcttaaggcttcttttaataccaaatgtcttatccattctttaataaagtaatcatctacaggatgtggagctgtagatcctatattcacaactgaaacaacaaggaatataatwtaaywtgtgtgattaggtaaaggtgataatacagattgagagagtttttctaatgatattcttacactgcaaaatcaacagcaaaggtttagagagaatattaaagcagagaaacataaatgaagttctcatacaaaacaaatgcttaattaaacagggaaggacagtacgcattacttgaacattgagttacagatattttctcaatttgcacaagtgcatattttctgaaatgcacctctaaataatgaaattcaggtatgaaatcagataatttagaccttatttgctatagtgaaa

SEQ ID NO: 16492 - DNA, 600 bp, Chicken  19866894223859_2
gtctgttttttgcattcttcagtgtcccatgagcactggtagatttgtctaagcaataaatcatttgaaaccgtcccataccaaatcatataactttcagcatgtcttatatttgcctattatgatatgttgagctaacaaaaatctgtttttatcgagcataataaaaaactaagacatttcttaaggcttcttttaataccaaatgtcttatccattctttaataaagtaatcatctacaggatgtggagctgtagatcctatattcacaactgaaacaacaaggaatataatwtaaywtgtgtgattaggtaaaggtgataatacagattgagagagtttttctaatgatattcttacactgcaaaatcaacagcaaaggtttagagagaatattaaagcagagaaacataaatgaagttctcatacaaaacaaatgcttaattaaacagggaaggacagtacgcattacttgaacattgagttacagatattttctcaatttgcacaagtgcatattttctgaaatgcacctctaaataatgaaattcaggtatgaaatcagataatttagaccttatttgctatagtgaaaacct

SEQ ID NO: 16493 - DNA, 600 bp, Chicken  19866894223859_3
tctgttttttgcattcttcagtgtcccatgagcactggtagatttgtctaagcaataaatcatttgaaaccgtcccataccaaatcatataactttcagcatgtcttatatttgcctattatgatatgttgagctaacaaaaatctgtttttatcgagcataataaaaaactaagacatttcttaaggcttcttttaataccaaatgtcttatccattctttaataaagtaatcatctacaggatgtggagctgtagatcctatattcacaactgaaacaacaaggaatataatwtaaywtgtgtgattaggtaaaggtgataatacagattgagagagtttttctaatgatattcttacactgcaaaatcaacagcaaaggtttagagagaatattaaagcagagaaacataaatgaagttctcatacaaaacaaatgcttaattaaacagggaaggacagtacgcattacttgaacattgagttacagatattttctcaatttgcacaagtgcatattttctgaaatgcacctctaaataatgaaattcaggtatgaaatcagataatttagaccttatttgctatagtgaaaaccta

SEQ ID NO: 16494 - DNA, 599 bp, Chicken  19866894223865_1
  misc_feature (1)..(269): n is any nucleotide
nnnnnnnnnnnnnnnnnnnnnnnnnnnnnnnnnnnnnnnnnnnnnnnnnnnnnnnnnnnnnnnnnnnnnnnnnnnnnnnnnnnnnnnnnnnnnnnnnnnnnnnnnnnnnnnnnnnnnnnnnnnnnnnnnnnnnnnnnnnnnnnnnnnnnnnnnnnnnnnnnnnnnnnnnnnnnnnnnnnnnnnnnnnnnnnnnnnnnnnnnnnnnnnnnnnnnnnnnnnnnnnnnnnnnnnnnnnnnnnnnnnnnnnnnnnnnnnnnnnnnnnnnnnnnatgctatatgtataaatagataaatagagtytgattggaatggcttggttcagtgatgagctatggtgagctgcgtagtgtcttatggagattcttgagggtgactgttcttccatcatgacatgaacagaggaaatgagagaaaggcaggggtttgtcccatactaggtgctttagagtcacttggagagccacacctgccttgaggtatagcagaagatgggttcaaggcctttacaaaaggaggcagccgtgggcaggccttgtcagctctgtgggtgctgcttgtcacagaggctgctgctcatggtagaagtgaccttgtgttgg

SEQ ID NO: 16495 - DNA, 600 bp, Chicken  19866894223865_2
tytgattggaatggcttggttcagtgatgagctatggtgagctgcgtagtgtcttatggagattcttgagggtgactgttcttccatcatgacatgaacagaggaaatgagagaaaggcaggggtttgtcccatactaggtgctttagagtcacttggagagccacacctgccttgaggtatagcagaagatgggttcaaggcctttacaaaaggaggcagccgtgggcaggccttgtcagctctgtgggtgctgcttgtcacagaggctgctgctcatggtagaagtgaccttgtgttyggagtgagcawggtgacttctgagtccagcttctttctcttttcttctgttctccaaaggtatgaaaacaacyggaaatagactgtaacaagaaacactgtagtagtggtcttaytgctwatatttccttgacagcctctgcgtgttcacatcagggcacttagctctygttaactggagcatcctgtcctgcgtacgtgtatgcccttgcccacctttcactgacaaccctcgggtagcaaagagctcttgggcaattcccactcctaccaggctgtgaggccccctaaaaagcatttc

SEQ ID NO: 16496 - DNA, 600 bp, Chicken  19866894223865_3
tggcttggttcagtgatgagctatggtgagctgcgtagtgtcttatggagattcttgagggtgactgttcttccatcatgacatgaacagaggaaatgagagaaaggcaggggtttgtcccatactaggtgctttagagtcacttggagagccacacctgccttgaggtatagcagaagatgggttcaaggcctttacaaaaggaggcagccgtgggcaggccttgtcagctctgtgggtgctgcttgtcacagaggctgctgctcatggtagaagtgaccttgtgttgggagtgagcawggtgacttctgagtccagcttctttctcttttcttctgttctccaaaggtatgaaaacaacyggaaatagactgtaacaagaaacactgtagtagtggtcttaytgctwatatttccttgacagcctctgcgtgttcacatcagggcacttagctctygttaactggagcatcctgtcctgcgtacgtgtatgcccttgcccacctttcactgacaaccctcgggtagcaaagagctcttgggcaattcccactcctaccaggctgtgaggccccctaaaaagcatttcatatcacagtc

SEQ ID NO: 16497 - DNA, 600 bp, Chicken  19866894223865_4
gactgttcttccatcatgacatgaacagaggaaatgagagaaaggcaggggtttgtcccatactaggtgctttagagtcacttggagagccacacctgccttgaggtatagcagaagatgggttcaaggcctttacaaaaggaggcagccgtgggcaggccttgtcagctctgtgggtgctgcttgtcacagaggctgctgctcatggtagaagtgaccttgtgttgggagtgagcawggtgacttctgagtccagcttctttctcttttcttctgttctccaaaggtatgaaaacaacyggaaatagactgtaacaagaaacactgtagtagtggtcttaytgctwatatttccttgacagcctctgcgtgttcacatcagggcacttagctctygttaactggagcatcctgtcctgcgtacgtgtatgcccttgcccacctttcactgacaaccctcgggtagcaaagagctcttgggcaattcccactcctaccaggctgtgaggccccctaaaaagcatttcatatcacagtcatctttttttggaggtatgcgctttcagtgctcgatataattttgttgcttaagatcagttt

SEQ ID NO: 16498 - DNA, 600 bp, Chicken  19866894223865_5
aggcaggggtttgtcccatactaggtgctttagagtcacttggagagccacacctgccttgaggtatagcagaagatgggttcaaggcctttacaaaaggaggcagccgtgggcaggccttgtcagctctgtgggtgctgcttgtcacagaggctgctgctcatggtagaagtgaccttgtgttgggagtgagcawggtgacttctgagtccagcttctttctcttttcttctgttctccaaaggtatgaaaacaacyggaaatagactgtaacaagaaacactgtagtagtggtcttaytgctwatatttccttgacagcctctgcgtgttcacatcagggcacttagctctygttaactggagcatcctgtcctgcgtacgtgtatgcccttgcccacctttcactgacaaccctcgggtagcaaagagctcttgggcaattcccactcctaccaggctgtgaggccccctaaaaagcatttcatatcacagtcatctttttttggaggtatgcgctttcagtgctcgatataattttgttgcttaagatcagtttacagtctagactgtcttgatgtctcactatactcagaacatc

SEQ ID NO: 16499 - DNA, 600 bp, Chicken  19866894223865_6
ggggtttgtcccatactaggtgctttagagtcacttggagagccacacctgccttgaggtatagcagaagatgggttcaaggcctttacaaaaggaggcagccgtgggcaggccttgtcagctctgtgggtgctgcttgtcacagaggctgctgctcatggtagaagtgaccttgtgttgggagtgagcawggtgacttctgagtccagcttctttctcttttcttctgttctccaaaggtatgaaaacaacyggaaatagactgtaacaagaaacactgtagtagtggtcttaytgctwatatttccttgacagcctctgcgtgttcacatcagggcacttagctctygttaactggagcatcctgtcctgcgtacgtgtatgcccttgcccacctttcactgacaaccctcgggtagcaaagagctcttgggcaattcccactcctaccaggctgtgaggccccctaaaaagcatttcatatcacagtcatctttttttggaggtatgcgctttcagtgctcgatataattttgttgcttaagatcagtttacagtctagactgtcttgatgtctcactatactcagaacatctcttt

SEQ ID NO: 16500 - DNA, 600 bp, Chicken  19866894223865_7
tgccttgaggtatagcagaagatgggttcaaggcctttacaaaaggaggcagccgtgggcaggccttgtcagctctgtgggtgctgcttgtcacagaggctgctgctcatggtagaagtgaccttgtgttgggagtgagcawggtgacttctgagtccagcttctttctcttttcttctgttctccaaaggtatgaaaacaacyggaaatagactgtaacaagaaacactgtagtagtggtcttaytgctwatatttccttgacagcctctgcgtgttcacatcagggcacttagctctygttaactggagcatcctgtcctgcgtacgtgtatgcccttgcccacctttcactgacaaccctcgggtagcaaagagctcttgggcaattcccactcctaccaggctgtgaggccccctaaaaagcatttcatatcacagtcatctttttttggaggtatgcgctttcagtgctcgatataattttgttgcttaagatcagtttacagtctagactgtcttgatgtctcactatactcagaacatctctttgtgaactgccaccttctgctttccttaagaattatcctaaatccatgta

SEQ ID NO: 16501 - DNA, 600 bp, Chicken  19866894223872_1
ttatatttaaaaccaaagaataaatatgagtatatctttagctagggatttggatttcagaaaagcaaatttagacaagctaagaaagctgattagcagaatcatctggactgaaatgatacagtaacttgacagtcgaatgagaaagggattttctactgcctaaaaagctaaaagtaacagaaaaatttaccccacttttttatctaattaaatatccatctttaaaaagatactaaaaatatatcatccaaagctatataaatagaggagattaggacataagtaaaaaaaaaaaamaaaaaaccttgcaagaactagaaagggaaaaggacagatcagtaagtaaagctagatttcacagrtcaagacacgcaaaggtaaaagakgaaactgccaacactgatctgagttagattctgcaaacagcaaaatgccctttggcacagcagaaagaaacaaggggaaaactatctgctcatctaggtgttgggttaacctgtagattaaagatcagcttggtgtggtgccaaaattaaaggaataatgtacataggttttcaatatggatggatgcattgacagcaatggcaataaatg

SEQ ID NO: 16502 - DNA, 600 bp, Chicken  19866894223872_2
caaatttagacaagctaagaaagctgattagcagaatcatctggactgaaatgatacagtaacttgacagtcgaatgagaaagggattttctactgcctaaaaagctaaaagtaacagaaaaatttaccccacttttttatctaattaaatatccatctttaaaaagatactaaaaatatatcatccaaagctatataaatagaggagattaggacataagtaaaaaaaaaaaamaaaaaaccttgcaagaactagaaagggaaaaggacagatcagtaagtaaagctagatttcacagrtcaagacacgcaaaggtaaaagakgaaactgccaacactgatctgagttagattctgcaaacagcaaaatgccctttggcacagcagaaagaaacaaggggaaaactatctgctcatctaggtgttgggttaacctgtagattaaagatcagcttggtgtggtgccaaaattaaaggaataatgtacataggttttcaatatggatggatgcattgacagcaatggcaataaatggtctcaaaataaagacacagaaattaaagatactaccctggagaggaaagcaaaacccaaggagg

SEQ ID NO: 16503 - DNA, 600 bp, Chicken  19866894223872_3
tgattagcagaatcatctggactgaaatgatacagtaacttgacagtcgaatgagaaagggattttctactgcctaaaaagctaaaagtaacagaaaaatttaccccacttttttatctaattaaatatccatctttaaaaagatactaaaaatatatcatccaaagctatataaatagaggagattaggacataagtaaaaaaaaaaaamaaaaaaccttgcaagaactagaaagggaaaaggacagatcagtaagtaaagctagatttcacagrtcaagacacgcaaaggtaaaagakgaaactgccaacactgatctgagttagattctgcaaacagcaaaatgccctttggcacagcagaaagaaacaaggggaaaactatctgctcatctaggtgttgggttaacctgtagattaaagatcagcttggtgtggtgccaaaattaaaggaataatgtacataggttttcaatatggatggatgcattgacagcaatggcaataaatggtctcaaaataaagacacagaaattaaagatactaccctggagaggaaagcaaaacccaaggagggtagcactttcaaatgagtatggg

SEQ ID NO: 16504 - DNA, 559 bp, Chicken  19866894223872_4
gtgccaaaattaaaggaataatgtacataggttttcaatatggatggatgcattgacagcaatggcaataaatggtctcaaaataaagacacagaaattaaagatactaccctggagaggaaagcaaaacccaaggagggtagcactttcaaatgagtatgggaagggaggaagtgaaagtagtctgcttgatagaagtaatatctggcacacagcttaagagtttttgtgacccaattttaggaagcattccaaatcaaatgtggtaacttataaatggaaactacttacaaggaaaakggaaaggggaaacaggatcaggaaacttctccaaaaatgatccaatcaaaaagccttaggtcagctttggaagaaaaagagaacaaaagacatggagataaatacaaagtagctacaaagggtaatagcttaatttcagtgggaattaactattaaatgtgagtgctgcttctggctctgccctagtccagctagttccctgaaaagtgcagaaacaagaggagcatgggaaggaaaagcaggtagccatgccaagtat

SEQ ID NO: 16505 - DNA, 599 bp, Chicken  19866894223873_1
  misc_feature (1)..(77): n is any nucleotide
nnnnnnnnnnnnnnnnnnnnnnnnnnnnnnnnnnnnnnnnnnnnnnnnnnnnnnnnnnnnnnnnnnnnnnnnnnnnnaatgttgggaatgggtgaatgactcacttcttttcatgccgtgcacactggtgctccaataacttgatggtctgagggctaaataagaatgcataaatgtatcacagaaatgaagcaaacaaagtgcatcataaacaaaaacaaatcagcagaaagcactgagggaaactccaaccagtggctggtttctaattagctgtatctgcagggtgtgtctgaaacrgttacgaacacaaacgtggatttcacagtgattcaaaataaaaaaagtaattgtactaggaacaagaattttaaataaataggctcaaaacttgactacggaattcatgcatatgttctgttctctctttttctcttttcacaggagttcaagactgccttgcatacccaagtagatataatatcaggaaaaagtgaaatgagaaaatgctcataatattcattagttamaaccatcctaaactaagaaataatcagaaaaatgattcttagtatcttaaatgacggccagtaagttga

SEQ ID NO: 16506 - DNA, 600 bp, Chicken  19866894223873_2
aagcactgagggaaactccaaccagtggctggtttctaattagctgtatctgcagggtgtgtctgaaacrgttacgaacacaaacgtggatttcacagtgattcaaaataaaaaaagtaattgtactaggaacaagaattttaaataaataggctcaaaacttgactacggaattcatgcatatgttctgttctctctttttctcttttcacaggagttcaagactgccttgcatacccaagtagatataatatcaggaaaaagtgaaatgagaaaatgctcataatattcattagttamaaccatcctaaactaagaaataatcagaaaaatgattcttagtatcttaaatgacggccagtaagttgaaagaagtgtaggtagttcttactgatacctaggaatgaaagtgcaaccattaatataggccctcttacgaactcagctattaatatgcagtcttctatatgattttaaatatactaatgccatggggtgagctgtaaatacygttgccatcaatgcatttgcactgtatacttgtaaaatgaagcttaccctcctttcagcctctatcaaagagcactttaagaaaaataa

SEQ ID NO: 16507 - DNA, 455 bp, Chicken  19866894223873_3
caggagttcaagactgccttgcatacccaagtagatataatatcaggaaaaagtgaaatgagaaaatgctcataatattcattagttamaaccatcctaaactaagaaataatcagaaaaatgattcttagtatcttaaatgacggccagtaagttgaaagaagtgtaggtagttcttactgatacctaggaatgaaagtgcaaccattaatataggccctcttacgaactcagctattaatatgcagtcttctatatgattttaaatatactaatgccatggggtgagctgtaaatacygttgccatcaatgcatttgcactgtatacttgtaaaatgaagcttaccctcctttcagcctctatcaaagagcactttaagaaaaataactatgcaagagtttgcattttcttttgaaattattcccattccttaatgtatcccaatcttctttg

SEQ ID NO: 16508 - DNA, 600 bp, Chicken  19866894223887_1
gttctgagcacctcagccccggagacacaaaagctcctttgaggactgattttacaccgctccctcctcctgcgggatgccccaatttgcatcagcaataggagctgctgccacgggcggtgctcggctctgctgggatgttggcgtcgcgttaatggggtccccaccccgtgctcggggacagcgtgccaggcccggccgtgtccccagtgctgccggggccacactgtgcccattccagagctgatcccagggatgtggcagctgagcgcccatccatcccacggcagagaaccccaygggtcttggggaccgtaggggtgttaaggaccctatgggtrgtggggactctrtgmgygttggggaccctmtgaatgctggggaccgtaggggtgttatggaccctatgggtgttggggtcccaatgggtgttgggttccccagggggtgcgtgttggggaccctctcagggactttgccctctggggcagctgtaggttcagagctgccgtcctgtttccccccgccgaagttttccatctcgcacaaaggcggtggggctgcggcgggcattgtctgggctgcattgcattacccaga

SEQ ID NO: 16509 - DNA, 600 bp, Chicken  19866894223887_2
aggactgattttacaccgctccctcctcctgcgggatgccccaatttgcatcagcaataggagctgctgccacgggcggtgctcggctctgctgggatgttggcgtcgcgttaatggggtccccaccccgtgctcggggacagcgtgccaggcccggccgtgtccccagtgctgccggggccacactgtgcccattccagagctgatcccagggatgtggcagctgagcgcccatccatcccacggcagagaaccccaygggtcttggggaccgtaggggtgttaaggaccctatgggtrgtggggactctrtgmgygttggggaccctmtgaatgctggggaccgtaggggtgttatggaccctatgggtgttggggtcccaatgggtgttgggttccccagggggtgcgtgttggggaccctctcagggactttgccctctggggcagctgtaggttcagagctgccgtcctgtttccccccgccgaagttttccatctcgcacaaaggcggtggggctgcggcgggcattgtctgggctgcattgcattacccagagctcccggagaaatcacttgtatttcacgctccattgagca

SEQ ID NO: 16510 - DNA, 600 bp, Chicken  19866894223887_3
acaccgctccctcctcctgcgggatgccccaatttgcatcagcaataggagctgctgccacgggcggtgctcggctctgctgggatgttggcgtcgcgttaatggggtccccaccccgtgctcggggacagcgtgccaggcccggccgtgtccccagtgctgccggggccacactgtgcccattccagagctgatcccagggatgtggcagctgagcgcccatccatcccacggcagagaaccccaygggtcttggggaccgtaggggtgttaaggaccctatgggtrgtggggactctrtgmgygttggggaccctmtgaatgctggggaccgtaggggtgttatggaccctatgggtgttggggtcccaatgggtgttgggttccccagggggtgcgtgttggggaccctctcagggactttgccctctggggcagctgtaggttcagagctgccgtcctgtttccccccgccgaagttttccatctcgcacaaaggcggtggggctgcggcgggcattgtctgggctgcattgcattacccagagctcccggagaaatcacttgtatttcacgctccattgagcagctgcctgtata

SEQ ID NO: 16511 - DNA, 600 bp, Chicken  19866894223887_4
ccgctccctcctcctgcgggatgccccaatttgcatcagcaataggagctgctgccacgggcggtgctcggctctgctgggatgttggcgtcgcgttaatggggtccccaccccgtgctcggggacagcgtgccaggcccggccgtgtccccagtgctgccggggccacactgtgcccattccagagctgatcccagggatgtggcagctgagcgcccatccatcccacggcagagaaccccaygggtcttggggaccgtaggggtgttaaggaccctatgggtrgtggggactctrtgmgygttggggaccctmtgaatgctggggaccgtaggggtgttatggaccctatgggtgttggggtcccaatgggtgttgggttccccagggggtgcgtgttggggaccctctcagggactttgccctctggggcagctgtaggttcagagctgccgtcctgtttccccccgccgaagttttccatctcgcacaaaggcggtggggctgcggcgggcattgtctgggctgcattgcattacccagagctcccggagaaatcacttgtatttcacgctccattgagcagctgcctgtatatat

SEQ ID NO: 16512 - DNA, 600 bp, Chicken  19866894223887_5
gctccctcctcctgcgggatgccccaatttgcatcagcaataggagctgctgccacgggcggtgctcggctctgctgggatgttggcgtcgcgttaatggggtccccaccccgtgctcggggacagcgtgccaggcccggccgtgtccccagtgctgccggggccacactgtgcccattccagagctgatcccagggatgtggcagctgagcgcccatccatcccacggcagagaaccccaygggtcttggggaccgtaggggtgttaaggaccctatgggtrgtggggactctrtgmgygttggggaccctmtgaatgctggggaccgtaggggtgttatggaccctatgggtgttggggtcccaatgggtgttgggttccccagggggtgcgtgttggggaccctctcagggactttgccctctggggcagctgtaggttcagagctgccgtcctgtttccccccgccgaagttttccatctcgcacaaaggcggtggggctgcggcgggcattgtctgggctgcattgcattacccagagctcccggagaaatcacttgtatttcacgctccattgagcagctgcctgtatatattt

SEQ ID NO: 16513 - DNA, 600 bp, Chicken  19866894223887_6
gcgggatgccccaatttgcatcagcaataggagctgctgccacgggcggtgctcggctctgctgggatgttggcgtcgcgttaatggggtccccaccccgtgctcggggacagcgtgccaggcccggccgtgtccccagtgctgccggggccacactgtgcccattccagagctgatcccagggatgtggcagctgagcgcccatccatcccacggcagagaaccccaygggtcttggggaccgtaggggtgttaaggaccctatgggtrgtggggactctrtgmgygttggggaccctmtgaatgctggggaccgtaggggtgttatggaccctatgggtgttggggtcccaatgggtgttgggttccccagggggtgcgtgttggggaccctctcagggactttgccctctggggcagctgtaggttcagagctgccgtcctgtttccccccgccgaagttttccatctcgcacaaaggcggtggggctgcggcgggcattgtctgggctgcattgcattacccagagctcccggagaaatcacttgtatttcacgctccattgagcagctgcctgtatatattttctgtgttgcact

SEQ ID NO: 16514 - DNA, 600 bp, Chicken  19866894223889_1
tcaaggagcaaaatattttgaaatttttatactcttttcaggtaattttttttaaagattgcctacttgagcggctggatagaaactgtaacaggcctttggaggtcactggtagtagctatcctggcagcacacttgaagtattttgagctcgtgaaatggcagcttggccacatgcattacatgtcttattacagtgtgtgttttctgaagtcaattcagatcaatctttgaaaagtctggagaataaatgatctggatttctcattatgtatcccatcttgatcccattgatgtccrtgcatccaatccccgtctacagaatagtcctattgaatcaaattgatccttgatgaagtcactggagttatgccagtgattaatttggcttgttaacttcgatgaaatttttctaatgagtagggtagttagagtttgacctgatgatgaaattctggwtgtgttcacttgagagtaaggcttaacctgatgatgtgctcactaacagcgactaaacaaaaggaggaagggttgagccaaacttacaggtgtgggatgagcctggaatacgtgtagcacaggttggtgggcagaggagtt

SEQ ID NO: 16515 - DNA, 600 bp, Chicken  19866894223889_2
tggcagcttggccacatgcattacatgtcttattacagtgtgtgttttctgaagtcaattcagatcaatctttgaaaagtctggagaataaatgatctggatttctcattatgtatcccatcttgatcccattgatgtccrtgcatccaatccccgtctacagaatagtcctattgaatcaaattgatccttgatgaagtcactggagttatgccagtgattaatttggcttgttaacttcgatgaaatttttctaatgagtagggtagttagagtttgacctgatgatgaaattctggwtgtgttcacttgagagtaaggcttaacctgatgatgtgctcactaacagcgactaaacaaaaggaggaagggttgagccaaacttacaggtgtgggatgagcctggaatacgtgtagcacaggttggtgggcagaggagttggatgaagctgtttccctcttaatggctttcagttaaacctagtttttagatgctggaaaataaagttgataaattagttttttagtggaatcatctaaaacctctgtctttctgagcattaactatgaagctgatagctgaagcctagttctacaact

SEQ ID NO: 16516 - DNA, 600 bp, Chicken  19866894223891_1
ctggtcgggcagacagaggaggactgaaaaagcaagacagagtaacagctggaagcttagcagagataacaggagcgcgggcagaaacacagaattgttctttacagagaggctcaaaccctacgctgtagcaaaacgtctgctgagcggtgcgtgtgcctgtaaaattcaagtcatgcttcctccccaggagagcactcttgagaaggactcgaggagaagaaccccaaaccgttctgcagcagctcacaaattcccacagcattattgatgtgcttttgggccgtgcgatgcagctcrttacttcttagggaaggtgctttgccttaattacttccacaagctgcaaagtcgttccatgtatttttctagcctagtttatataaattcttttgcccaagggactctcacgtaggtctttgctcactgcatttttctgaaagtttattcttgatctattcaggagagcatcaataaggaaactaaaaatatctgcgaggtaattagcaggagagatttgtttgcaataaatgcaagagcatgttatgttttgaacgctacttagcacatagagcagcaatccaaacctacctggaaacc

SEQ ID NO: 16517 - DNA, 600 bp, Chicken  19866894223891_2
tgcgaggtaattagcaggagagatttgtttgcaataaatgcaagagcatgttatgttttgaacgctacttagcacatagagcagcaatccaaacctacctggaaaccagagccaccagcctagaacaacagcgatttctgatcctcgtgaaaagggggacagtgaattaaaacagcagcctaaaaacccagcacaaagcagctgtattctggtttagcaatttcagagtcatgttaaaagggattgcatagaagagttgaattacacccaagggctcttaaaaccacattacaaaacttyactttccctgctgtgatctgcacagaccttgctctatactcaagctttgggtttgagctttttccaggcttccataccattctcttccctggataaagtagtgttttggtttcaccggacagtgtgcttgttaagaggaaaasagaatacctacagcgtgtggttaaaagtacgtttgttccttacctgcacctcccatgtgttctgtgtaggcagtcatgcttcagcatgcacagcatccaaygtccctataaagtgaccgagaatggattagggaacatcctggatgctcacagcaaa

SEQ ID NO: 16518 - DNA, 539 bp, Chicken  19866894223891_3
ctcgtgaaaagggggacagtgaattaaaacagcagcctaaaaacccagcacaaagcagctgtattctggtttagcaatttcagagtcatgttaaaagggattgcatagaagagttgaattacacccaagggctcttaaaaccacattacaaaacttyactttccctgctgtgatctgcacagaccttgctctatactcaagctttgggtttgagctttttccaggcttccataccattctcttccctggataaagtagtgttttggtttcaccggacagtgtgcttgttaagaggaaaasagaatacctacagcgtgtggttaaaagtacgtttgttccttacctgcacctcccatgtgttctgtgtaggcagtcatgcttcagcatgcacagcatccaaygtccctataaagtgaccgagaatggattagggaacatcctggatgctcacagcaaatagttgatatctatttactctcaagttaatcaataattatttcaaaattggtttgattacttctctagcctttgatcttata

SEQ ID NO: 16519 - DNA, 438 bp, Chicken  19866894223891_4
tgcatagaagagttgaattacacccaagggctcttaaaaccacattacaaaacttyactttccctgctgtgatctgcacagaccttgctctatactcaagctttgggtttgagctttttccaggcttccataccattctcttccctggataaagtagtgttttggtttcaccggacagtgtgcttgttaagaggaaaasagaatacctacagcgtgtggttaaaagtacgtttgttccttacctgcacctcccatgtgttctgtgtaggcagtcatgcttcagcatgcacagcatccaaygtccctataaagtgaccgagaatggattagggaacatcctggatgctcacagcaaatagttgatatctatttactctcaagttaatcaataattatttcaaaattggtttgattacttctctagcctttgatcttata

SEQ ID NO: 16520 - DNA, 600 bp, Chicken  19866894223892_1
acatccttagttcctataaacagaaacgtatggtagctatctacttccattttcattacttgtttctatagactctaagaaattaatatctgtgtattaatagagaaatcccagaggtgtgttacatatatggttgatttggtatgcttttaggtgcagtgcatcactctctgactgatatgctgaaagaaacaccagaggctcagtggtatttactttgccaacagtaacatatgagccttcagtattgcatatgaaattgtatttttgctgcttagttgtttttatgttgttgtgggktttttttgttttggtttggttttttgtacttctgttaatttctttaactgtatattcccataaactgggatttattgctggcattttcattttacagaattcattttagttgtgtggcaaatgcttaaaaaaatatttagatagatttcattgagcagatgtattagtgcaggctcagttttcagtgattgacgttatgtgacattttctctgagaatttctatagaacttgttcagaagaatcatgtaatgagcctcttaatcatatttcatgcagttggtgttgatggatctgttttt

SEQ ID NO: 16521 - DNA, 469 bp, Chicken  19866894223898_1
ttgtatgtgagagctaggcttacatttgaaatgcttggcatagtaagcaaggaaaatcctcagctttataatataccctttttttgttgttgttgttttctatagcctaacttgggcaggctgctgtttgctgtgctaatatttcttagttctatcaccagtacgagtcagagagtttctctctctcagatcgttgagagctgggcttatagcggtctcgcctttcagtgcttacatccctacgtggacttggtgcattgcttctacctgtaaaaagaggataagatgagagcactgtcytatgccatggatgctttggaggtgttggtagaagtaggatctgcacagtgacagccatcagaaaagtacactatacagcttgtagtggaaaaactgatataatttaagtgtgaagggaaagcgactgcttcagttaatagaagctgctcagtgagttcttgaataactg

SEQ ID NO: 16522 - DNA, 599 bp, Chicken  19866894223915_1
  misc_feature (1)..(202): n is any nucleotide
nnnnnnnnnnnnnnnnnnnnnnnnnnnnnnnnnnnnnnnnnnnnnnnnnnnnnnnnnnnnnnnnnnnnnnnnnnnnnnnnnnnnnnnnnnnnnnnnnnnnnnnnnnnnnnnnnnnnnnnnnnnnnnnnnnnnnnnnnnnnnnnnnnnnnnnnnnnnnnnnnnnnnnnnnnnnnnnnnnnnnnnnnnnnnnnnnnnnnnnnnnagtcctcagagaacacacgaggctgaagcatggaagtaattctccaagcacacctgaatgacctccatggtgccccttgcctccagggggccaccttyggaggggatgtgagacaaytgctccatctccatccatgctgggccaccaggagaaaccattcttcaaggcagccaacgaagagaccggtcactagtcatgagtggatgtgcatatatttttaaacttctatcattgcagtaaggtcagtgaggctagtgaccatttcatcgttccgcttccccctgttttttaagcatctctcagtgttacctcctaggccacagtcttgccaacgctggtasacatgcctcaccttccagcttgtgactgcatgactgtcgcccaaggagtgaattag

SEQ ID NO: 16523 - DNA, 599 bp, Chicken  19866894223915_2
  misc_feature (1)..(183): n is any nucleotide
nnnnnnnnnnnnnnnnnnnnnnnnnnnnnnnnnnnnnnnnnnnnnnnnnnnnnnnnnnnnnnnnnnnnnnnnnnnnnnnnnnnnnnnnnnnnnnnnnnnnnnnnnnnnnnnnnnnnnnnnnnnnnnnnnnnnnnnnnnnnnnnnnnnnnnnnnnnnnnnnnnnnnnnnnnnnnnnnnnnnnnnagtcctcagagaacacacgaggctgaagcatggaagtaattctccaagcacacctgaatgacctccatggtgccccttgcctccagggggccaccttyggaggggatgtgagacaaytgctccatctccatccatgctgggccaccaggagaaaccattcttcaaggcagccaacgaagagaccggtcactagtcatgagtggatgtgcatatatttttaaacttctatcattgcagtaaggtcagtgaggctagtgaccatttcatcgttccgcttccccctgttttttaagcatctctcagtgttacctcctaggccacagtcttgccaacgctggtasacatgcctcaccttccagcttgtgactgcatgactgtcgcccaaggagtgaattaggcaggcaaaggcaatgggg

SEQ ID NO: 16524 - DNA, 600 bp, Chicken  19866894223915_3
ctccaagcacacctgaatgacctccatggtgccccttgcctccagggggccaccttyggaggggatgtgagacaaytgctccatctccatccatgctgggccaccaggagaaaccattcttcaaggcagccaacgaagagaccggtcactagtcatgagtggatgtgcatatatttttaaacttctatcattgcagtaaggtcagtgaggctagtgaccatttcatcgttccgcttccccctgttttttaagcatctctcagtgttacctcctaggccacagtcttgccaacgctggtasacatgcctcaccttccagcttgtgactgcatgactgtcgcccaaggagtgaattaggcaggcaaaggcaatggggaaaggcacaaggccggtttctttctcctggaggacccaggccagcgaattcagcttttccaggttaagacagtgcctgcattagaaaatatcctataaattcttcatttaactgctcccgaaggcagccggctagaccctcctgcttcaggcacgtggcgctgtgtctgagttgaagcacatgaattgtcttgaccgactgcagcaggacagctcatgcatttaa

SEQ ID NO: 16525 - DNA, 599 bp, Chicken  19866894223916_1
  misc_feature (1)..(105): n is any nucleotide
nnnnnnnnnnnnnnnnnnnnnnnnnnnnnnnnnnnnnnnnnnnnnnnnnnnnnnnnnnnnnnnnnnnnnnnnnnnnnnnnnnnnnnnnnnnnnnnnnnnnnnnnnaaattaatacccaaaaatactcattgaccagcacatgaaaggctgttgtcagccaccatgatgcctttaccatgcagctggtgggcacagagacctggtgcattcagcacatgtagggacagtaataagcaatgaagattatctgctgacaaacgctcagattggtactgataaaatatctgcaagtttgactcytattgttaaagttgatttgtcaaattctttacactttaaaaataagaactttcaagacttttgaaataaataggagttgttcaatttgtgaatgaaagtaagcaatctggattaacatgggtgatatctcaaaatatatttgtttcggagtaggaacattgttattgcaactctaatttctgcagtacaggacagaaagttttgaatgtgaagacccatattctaggtgaatctatcaagcaatttatagaaasaggctctttataattatttgtggctgtttcctgatcatccaaggg

SEQ ID NO: 16526 - DNA, 600 bp, Chicken  19866894223916_2
caaacgctcagattggtactgataaaatatctgcaagtttgactcytattgttaaagttgatttgtcaaattctttacactttaaaaataagaactttcaagacttttgaaataaataggagttgttcaatttgtgaatgaaagtaagcaatctggattaacatgggtgatatctcaaaatatatttgtttcggagtaggaacattgttattgcaactctaatttctgcagtacaggacagaaagttttgaatgtgaagacccatattctaggtgaatctatcaagcaatttatagaaasaggctctttataattatttgtggctgtttcctgatcatccaagggtaaaactggtcctgggaatttctgtaatggaggaaaacattttaaatggcatgaaagttctttcagtgacaggtagaaacatgaatctggggagaaggtggtgatggtgataaggaagggggctttgatgtgcaagtagaggatataaggccatgcattcaggcctgccatgggaatcctattcctggcaaaaatttctgcttcttgtcacctacaaatttccatatattagaaaaaggcaggcagtgaaagtaa

SEQ ID NO: 16527 - DNA, 599 bp, Chicken  19866894223917_1
  misc_feature (1)..(24): n is any nucleotide
nnnnnnnnnnnnnnnnnnnnnnnntgaagctggtgaataagctacatcttaagttttacattcacagttctatgatgttctcctttttacattttgctgaatgttcagtctgcaaggaggcatttcttctgagttttatgctctgagattgacatcaccagaatcacgtcacagagtggcttaggttggatgggaccttaaagatcatctagttccaacccctttcccctggacagggttgccaaccaccaaatcaggctgaccaggatctcatacagcccagccttgaatgactcaagrgatggctcatccacaacttctctgggcagcctgttccagtgcctcaccacactatgagtaaaaaatttcttcctaacatctaaccatctatcaggaccaccaaatctttctcatcagggctgctcttgatgagtttttgcctggtccgtattcatatctggggttgcctcaacygaggtgcagcaccttgcagttggccttgttagattttgttagaatcctgtgtgcccacttttcaaatgtgtccagcttcctctggatggcgtccctcccttctgttatgtcaactgcaccactaa

SEQ ID NO: 16528 - DNA, 520 bp, Chicken  19866894223917_2
agtggcttaggttggatgggaccttaaagatcatctagttccaacccctttcccctggacagggttgccaaccaccaaatcaggctgaccaggatctcatacagcccagccttgaatgactcaagrgatggctcatccacaacttctctgggcagcctgttccagtgcctcaccacactatgagtaaaaaatttcttcctaacatctaaccatctatcaggaccaccaaatctttctcatcagggctgctcttgatgagtttttgcctggtccgtattcatatctggggttgcctcaacygaggtgcagcaccttgcagttggccttgttagattttgttagaatcctgtgtgcccacttttcaaatgtgtccagcttcctctggatggcgtccctcccttctgttatgtcaactgcaccactaagcttggtgtcacctgcaaatttgctgagggtgtacttgatcccactatctatgtccttggtaaacatgttggagagtaccagttccaagacagac

SEQ ID NO: 16529 - DNA, 600 bp, Chicken  19866894223920_1
agttctgctgctttactcagtccagataagcaaatagggacactgcttttcaacctcaccgctgtcacctgcgctttgtctccaagtaactggttaaccagggaggaagaggctgcgcacttcaaaacatgctcagcgtggtagagagcctcagtggctgtaactcagccagcagtcctttttctgaagctgctttctgcattatgctgccacaggaaagggcagagagtcgagatggggcaggggatgcccaagaggagccctccccagcacccacccagcagaggcagaagctggccrcatccaggctgtcccagccccaccaccagccccgctgttcagctgatggcagaggggtggcaatgagaagtccaggctccttccctgggaccaaaatagtttttgtgaagcatagcttgaaattttcagccctcagtgacgttgtttcccactgcttttttcttgaggaggggaaaatgatagccacaggtccagcaggcacttcttcccagcagcagagctgtggccaagccaacatgtggtaacgccaaaggctatctgcatggttattttgtatgactgctgtttcatacccaggcc

SEQ ID NO: 16530 - DNA, 600 bp, Chicken  19866894223920_2
cctgagccgctgaggtggaggggaataaagagatagaattgccctattagagatggcattacctgcttcagtagagtcagggtctattctgtccctctggtgcttccagcttttgggcacccttcagttcagctcttctctcagagccagcacagggcagggtgggggatcagctgttacacgtttgacgagacgtctccagcacggctggcatgtcggggtgctgcagggacacccgccaggcttctcgctgttggcagcgctgctcttgttttccttcggctcgtgtgtgcaaacagracctttggtaagggctcaagaggagacgccgtgctccagaccaggctgaaggcagagtgcagacagtaataggatcccccaaacgtgggatcaagagggtaagagtctgttcttgttttagcgtcttgtaccatgtgggtaccaaaaatacagcaggtgcctggcctctggtcacatcatcaagcagacagcattgtcccaaagctgctaatgctagttgcttaccagcataaccttgatggaaatctcaagacaccctactcttcggggtgctatttgttttctctccaaatgacagca

SEQ ID NO: 16531 - DNA, 600 bp, Chicken  19866894223921_1
gatttagattccttacatgcctgcaaggcactcagctcagctcaagagcctcatcacaaagttattatagcctgtgtgctcctcagtgggtgtgaagtggttaatgactgacttgtaaaactgctctgtgcatgggtgaactgtgtaggtgttttcagaaacagctgtgccagtttcccctgtcaggatgggcttgggtgctggccaactttcctgtcactctctgtttgcaaagctttgtgtgattgagttttggtttttgaaatccgtcaggtacaactgaaattcaaaagctgaaarcttgaaaagctgaaagtttttagtattatttcagagcttgcttggttttgcaggattcatcactgtgaataccagtgttctggaactctgtcacatgatgaaatcaacctactactgctaagaagcaccagtttgtaacttaaacactgattatgccaggaggagaagcccaaatccatttagatgatgctcatcaaagatctctgtggtctaggtctatggtctatatatggtgcctggaaagctgggcttgggtatgtgtaggaactactaaataggccattttgacaccctagtttt

SEQ ID NO: 16532 - DNA, 527 bp, Chicken  19866894223922_1
atcaacacctagtgtttaggaatagctgtttttaatgtaagtaacaaaaagtcatgcataacctcattcccttaagaacagcaaatattactgggattgacaatgaaattacagaatggaatactgaaatgatggtctagatccactccacaataacacctctgtatgcctgtgacatgtaaaaaaaaattaaccttttaatcttaagcttcacccatcttgattcatgctagaaaacagcctaatatatatatttactaaacaaagaatttctttgtttagatgaaaaataaatacaasagtttcatgtttttgaataaaggagatgaccaatatcttccatttacrgctcttgaaatcagagacatttgaagcctactacgtaaaagatgcacacaaagaagaattgaacctcaaacacctttcgtgcatttcacttataattccttgactttcagagatctggaaagatttatcatactaaattccctgtagatgataggcagccaaacatttaaatgtgacat

SEQ ID NO: 16533 - DNA, 479 bp, Chicken  19866894223922_2
aagtcatgcataacctcattcccttaagaacagcaaatattactgggattgacaatgaaattacagaatggaatactgaaatgatggtctagatccactccacaataacacctctgtatgcctgtgacatgtaaaaaaaaattaaccttttaatcttaagcttcacccatcttgattcatgctagaaaacagcctaatatatatatttactaaacaaagaatttctttgtttagatgaaaaataaatacaasagtttcatgtttttgaataaaggagatgaccaatatcttccatttacrgctcttgaaatcagagacatttgaagcctactacgtaaaagatgcacacaaagaagaattgaacctcaaacacctttcgtgcatttcacttataattccttgactttcagagatctggaaagatttatcatactaaattccctgtagatgataggcagccaaacatttaaatgtgacat

SEQ ID NO: 16534 - DNA, 599 bp, Chicken  19866894223923_1
  misc_feature (1)..(13): n is any nucleotide
nnnnnnnnnnnnntagtggagaaaaatgtgggatttcttctggtgactcagctgacttatatgtggtgcaactgaaatgaatttaagtaataacaacagaaaggcaaggggtcatcacagccaacctgggaagctggtgtttgtttgtggagcttctttatctcatttaagttttgtgcatgatttgtagccatctgctgaaccagaaagcaaatgagattgaagggggatgtgagcaaatcattcttgtctgtgaaatggtgcccctcaaccctcttctgaaagaaccgcttgctgggrttggggaagttacaattgcaagactccctgagtacacgagccctttgataatgctgtcacataaatgccacatattgactcattctgtggattcttttctcactggaacactattaaaacttctaagaggtttctgaaactgctattagacagaaatatgtttttttctaaatgggattaagccctagattcagtccttaaagatttcctacattcttcacactatcgcggtccatttcctgggtgtctgcgcacacatttattttcatagcattctactttaaaattattagtgaaas

SEQ ID NO: 16535 - DNA, 600 bp, Chicken  19866894223923_2
rttggggaagttacaattgcaagactccctgagtacacgagccctttgataatgctgtcacataaatgccacatattgactcattctgtggattcttttctcactggaacactattaaaacttctaagaggtttctgaaactgctattagacagaaatatgtttttttctaaatgggattaagccctagattcagtccttaaagatttcctacattcttcacactatcgcggtccatttcctgggtgtctgcgcacacatttattttcatagcattctactttaaaattattagtgaaastttttcttttttatctctttttttaaatctttctggcgtacttcacccttctatgcttgacttctctactttttctcatgcagaaattaaatacggatgaagactattccaacggagcatagcagaactgtattttgatgtgattatattcctgagtgcatttgacccaacactggaaataaatctttgatttcatgttggatgactcatatcaggaaacaaagttttgcgatgaacatgttgttttttttgtgtgtgtgttttaaatgtcacttctgtattgaagatatcagttgtgta

SEQ ID NO: 16536 - DNA, 600 bp, Chicken  19866894223928_1
caattcctgtcagaggggggtggctaaacctgacatcaccaggacatcatttatttatattagaaatggcttcaaagttgcattgatccctaccacagcctactaaaatccatatttgttatgcttctcacacatatggtccacttttgcagactaagaggtttgaataattcacttaagcagcaaaaacatgaagtgctctttaaagcgagacacaaaactgctgggccttgtgtgtagctgctttaataaaagaaaaatggccttgggggtgcagctgtcattcagcaggatgtttargcacatgcttacacctattgtgatttaagatggcactgagtaaacttcagagacacaaaataaaagctaaccttttgttgaatgcggatcttaattgcatgttgaattaacagcattcatatttgcaatttctcagaggctcctgtttaggcatgcttggtgcctagatagtttgggatgacaaataatgcttcatgtaattagttggcaatagcttaaatatttgatttcttaattatatcgttaagtatgttttaagcaaatatgttctttatttaaagaaaagggaaaaaaaaaaaa

SEQ ID NO: 16537 - DNA, 600 bp, Chicken  19866894223932_1
taggaacaacagtatgagtgacagtagccacttcccttaagcattacctagactgtagcatggtgtgaattgctaaagctcttgcatgtactgtgtgtgtcccatcctttctacttttgtgtctttctgctttctcttcccttatcacccaatcccattagttcaagaagcaaattcaaagcaaattacttcaaaccaaatgcattcttcttttacaaatagttcaaggcttcttcacagtgataggaataaaacactgctggcatgtctaatcagcactctcttcagttggtgcttttytctctaccctgaaatcctgaaatacaagagaaaatgagttgtacttgttttatgaaaacatatgattaatgttggtcatgctgttttctgctggcaaggaagttcagtacaagatactttgcatgaagtcaggttccaagttacaaagggtcagagttagtctgagagaggaaactgttttctaaagatgtcttattccccagttacctaaaaatctggaaacaaagctgcttttattcttgaaactccagaacctggatagttctgctagagttcatggtgtcagttccaggaaaggtt

SEQ ID NO: 16538 - DNA, 600 bp, Chicken  19866894223932_2
agaccaagtgccaggacttgtgttttagtgacaacaaccccccattcacaggcttggggcagaggggctggaaaactgtgcagaggaaaaggacttgggagttctggtcgatggtcagctgaacataatccagcagtgtgcccaggtggccaggtgttcactgttcgggtcctgactgtaagagggacactaaggccctggagcatgtccagagaagggcagtgaagctgctgaggggtctggagcacaagtctgatggggagtgactgagggaactgggattgttaggctggagaagtrgaggctcaagggtgaccttattgccctctacaactacctgaaagcaggttgtggtgagatgggggttcagcctcttctcccaggtaattagcactaagatgagagggaatgtcctccagttgcaccagaggaggttcatgctggatattaggagaaacttcaccaaaagaatggtcaggcgctggaatgggctgccatgggaggtggttgagtcaccatcactgaaggtattcaagaaacgtagtgtttcatgtgagaatgtagataatgacatatttttatgtagtgtttgcaaggggt

SEQ ID NO: 16539 - DNA, 599 bp, Chicken  19866894223934_1
  misc_feature (1)..(10): n is any nucleotide
nnnnnnnnnnacatagctgtgcctgatgtctgcttatggttttaagtgagtccacgcacatggtgagattcagcttatatacaaggcaaaattcagcaagtaagttcctgctgcaaagcaaggcatccaggcaagagaacatagggagctgctgagttgaccagatgtaaatgccatctgtaccttatagtcttctgcactgccctcaaggctgtactgaccagcctggctagatcttgtaattgtttataagagctgtgataagaaagtcacatagacacgcagacagggtgacatttrtttgccttgctgcgcaatactactgcatggacagcgcccaaggcacgcctgctcagcagtcccctacctagcagaaaccctcatcaccttgcagttacttctgaagaaaggtcacgctgtctcctgccaagtcactgggaatcactgctgcaggcttagcactcaagctgtgtgcatcacccatcttcgtgctctgcaatcactgtttcatctgtgcctcatctcatattcctgcaaccagaagtgccaaatcccagacaccacccaagtcctgttccccagcatcacactggaatagg

SEQ ID NO: 16540 - DNA, 600 bp, Chicken  19866894223941_1
aaaaaacacttttttgagtttggcttggatgacagtgaggttctgtgagagaactgctttggagatattttgtttcggagtgagcaccctgccacaaggtcattgcttaccgcctgccaatacacggactttgtttccattagcaacagtatagacccttaataaaccgcctacccatctgcaaggctctggggcacctgtgggttgcatgaaccaaactgcttagctaacattaacagcaaacgaaccttgagctacccctgcccttccatacccaatgcagccagacagcagcacaaycaacaatggtactgcagtactgctgagagaaaacatgagcttgtgtctgctccagaagctgcatccgcagagcagagtaaatcagcrgtgccggcagctctgggtccatcgggctgtgcaccccacgcagatcaaaggctggaggcatcctggaggctcatctttgttatatgccctctataaaattaatggctacacaaagaggggctgcacagtcttgtataaacacgcatctgtgagctgggacatggctttggctgcagtaactcaatcacaaagaccatccaggaccgggcttca

SEQ ID NO: 16541 - DNA, 600 bp, Chicken  19866894223941_2
cctgccacaaggtcattgcttaccgcctgccaatacacggactttgtttccattagcaacagtatagacccttaataaaccgcctacccatctgcaaggctctggggcacctgtgggttgcatgaaccaaactgcttagctaacattaacagcaaacgaaccttgagctacccctgcccttccatacccaatgcagccagacagcagcacaaycaacaatggtactgcagtactgctgagagaaaacatgagcttgtgtctgctccagaagctgcatccgcagagcagagtaaatcagcrgtgccggcagctctgggtccatcgggctgtgcaccccacgcagatcaaaggctggaggcatcctggaggctcatctttgttatatgccctctataaaattaatggctacacaaagaggggctgcacagtcttgtataaacacgcatctgtgagctgggacatggctttggctgcagtaactcaatcacaaagaccatccaggaccgggcttcaaatgctgtgtgatccaaaagaaagcaaagccctgcagtcactcctaaaggaaacgttacttcgcacagggtagagaaggaggaagga

SEQ ID NO: 16542 - DNA, 600 bp, Chicken  19866894223942_1
acttgtggttttgcttgctgggacaagttacctccctaattagatttttctcagtcttccacctagaggactaaagaagcatttacacatttgtccaaaccctctgctgctttgtcccagctgtgtgcaatgaaaactggggctgcaaatgtactgtaatagagacagtgcattattgatgggctaatgctcagcttgtgccatctgagaaatggcacataacattttggggctagtctgactgaatcttatgagcagaaatagaaacatttgcttcattatgtggtcttgaactctctrtaaagtaatttctcccaacttctaatgtttagagcaaacgtcagtctcatgtacatcttccaagactttctttgccaccctgcagtgacaccgcacgatgatgtgctgttgaaatgaagggaaaaccagtgtgtgcaacagctccttaagaaacatcagcagcattaacctgacagtggttggccctaacttcttgcatgggtacctccagtccctgtgctscaagctgagactgccaccccacacacagcacccacactggttgcacccacagagcccagcactccccagaaggacccg

SEQ ID NO: 16543 - DNA, 600 bp, Chicken  19866894223942_2
cattttggggctagtctgactgaatcttatgagcagaaatagaaacatttgcttcattatgtggtcttgaactctctrtaaagtaatttctcccaacttctaatgtttagagcaaacgtcagtctcatgtacatcttccaagactttctttgccaccctgcagtgacaccgcacgatgatgtgctgttgaaatgaagggaaaaccagtgtgtgcaacagctccttaagaaacatcagcagcattaacctgacagtggttggccctaacttcttgcatgggtacctccagtccctgtgctscaagctgagactgccaccccacacacagcacccacactggttgcacccacagagcccagcactccccagaaggacccgggggcactttgatgggaggagaggtgcaggagcagagatgggcatcaaatggaggtcacccctcgtcgcggcctttggggagggccacaagcagtggattcgtgttcgcagtctcccacctagagggctgctctgggtgctgcactcctccactgccgctgcagctttggccaagactcagctcagctgtgtgctggcaaagggcatcagtgggtgacagag

SEQ ID NO: 16544 - DNA, 600 bp, Chicken  19866894223944_1
aggggtagatgaaggaggtgtttccaaagaattttttcaactggttgtggaagaaatcttcaatccagatattggtatgttgtctaataacttactgagtattcagaagtgaaggtatttgtagtgcctttctacatctgctgcttcttttccctgaagccacacggattgatttcttggtgtcgtgagagtacttaactcattgagggttcagcattttgccgtcagtcgtccttctgagaagcagtgatgagaggcataactgtgcagttactgagagccatcatttgcttaaatatraatcagtaggatagggttcctcygcagggttcctttgtttgttctctcacctttttcctcactttgctttgtgattagcttctagaattagtaagcaaaccaaagaggaagaacttctgcaataaaaccagagtaggactatggtgagttcttgagttrtttcctccctttccctcagcttaagaaaaatctcattctaaaaagtctcagtwcttctaatgggttaatataaaatggctrcagcataccagtagtgtcagatttgcttgtagttgattaagaagaactacaaataatttg

SEQ ID NO: 16545 - DNA, 600 bp, Chicken  19866894223944_2
ccaaagaattttttcaactggttgtggaagaaatcttcaatccagatattggtatgttgtctaataacttactgagtattcagaagtgaaggtatttgtagtgcctttctacatctgctgcttcttttccctgaagccacacggattgatttcttggtgtcgtgagagtacttaactcattgagggttcagcattttgccgtcagtcgtccttctgagaagcagtgatgagaggcataactgtgcagttactgagagccatcatttgcttaaatatraatcagtaggatagggttcctcygcagggttcctttgtttgttctctcacctttttcctcactttgctttgtgattagcttctagaattagtaagcaaaccaaagaggaagaacttctgcaataaaaccagagtaggactatggtgagttcttgagttrtttcctccctttccctcagcttaagaaaaatctcattctaaaaagtctcagtwcttctaatgggttaatataaaatggctrcagcataccagtagtgtcagatttgcttgtagttgattaagaagaactacaaataatttgtcatagtcaaagtttttacattt

SEQ ID NO: 16546 - DNA, 572 bp, Chicken  19866894223944_3
ccacacggattgatttcttggtgtcgtgagagtacttaactcattgagggttcagcattttgccgtcagtcgtccttctgagaagcagtgatgagaggcataactgtgcagttactgagagccatcatttgcttaaatatraatcagtaggatagggttcctcygcagggttcctttgtttgttctctcacctttttcctcactttgctttgtgattagcttctagaattagtaagcaaaccaaagaggaagaacttctgcaataaaaccagagtaggactatggtgagttcttgagttrtttcctccctttccctcagcttaagaaaaatctcattctaaaaagtctcagtwcttctaatgggttaatataaaatggctrcagcataccagtagtgtcagatttgcttgtagttgattaagaagaactacaaataatttgtcatagtcaaagtttttacatttgtgtgttaatcacatttactgtttttccatttttttttaatgctactatattctgcttttaatacgcagcttgcttgcagcttttaaaggattaaaaggtttaaatgt

SEQ ID NO: 16547 - DNA, 519 bp, Chicken  19866894223944_4
agcattttgccgtcagtcgtccttctgagaagcagtgatgagaggcataactgtgcagttactgagagccatcatttgcttaaatatraatcagtaggatagggttcctcygcagggttcctttgtttgttctctcacctttttcctcactttgctttgtgattagcttctagaattagtaagcaaaccaaagaggaagaacttctgcaataaaaccagagtaggactatggtgagttcttgagttrtttcctccctttccctcagcttaagaaaaatctcattctaaaaagtctcagtwcttctaatgggttaatataaaatggctrcagcataccagtagtgtcagatttgcttgtagttgattaagaagaactacaaataatttgtcatagtcaaagtttttacatttgtgtgttaatcacatttactgtttttccatttttttttaatgctactatattctgcttttaatacgcagcttgcttgcagcttttaaaggattaaaaggtttaaatgt

SEQ ID NO: 16548 - DNA, 491 bp, Chicken  19866894223944_5
gaagcagtgatgagaggcataactgtgcagttactgagagccatcatttgcttaaatatraatcagtaggatagggttcctcygcagggttcctttgtttgttctctcacctttttcctcactttgctttgtgattagcttctagaattagtaagcaaaccaaagaggaagaacttctgcaataaaaccagagtaggactatggtgagttcttgagttrtttcctccctttccctcagcttaagaaaaatctcattctaaaaagtctcagtwcttctaatgggttaatataaaatggctrcagcataccagtagtgtcagatttgcttgtagttgattaagaagaactacaaataatttgtcatagtcaaagtttttacatttgtgtgttaatcacatttactgtttttccatttttttttaatgctactatattctgcttttaatacgcagcttgcttgcagcttttaaaggattaaaaggtttaaatgt

SEQ ID NO: 16549 - DNA, 600 bp, Chicken  19866894223945_1
ttgccatgtataaaatgcgtacaattagttgccatcacttcagtcagcactgcccagcactgccctccctgtgccctgctcttagtcagcacagcactaacagtgcactgagggtttggctgatgctgagctatgggtgcgtgcctggggccgctctgcagggaagagctgccaccttttaattgtggggagggagtgggacacgttgcgaactgtggtgggcctcatgcggcccataggctgtggtttaggcaaactttccaccagctctttgtggtggtgagtaatgtaaatgctcaraatggcagttaatatatgctcttaactttcaagaagatatgcaargatagagaacatctgcaacagatccattgtatgcatgagatgcatcctaggtgttagatgattgcttgtttgtgataagttgactatattttatttacagtatgaatgctaaagcaacaatactcatatagaatatcatagaatattttacttatgtggctgaacaccatattttcttatgcattatccagttttggtgaatcaaaagtacaataccttggactgcrcatgccaatgttaggatactgtattatc

SEQ ID NO: 16550 - DNA, 600 bp, Chicken  19866894223945_2
agcactgcccagcactgccctccctgtgccctgctcttagtcagcacagcactaacagtgcactgagggtttggctgatgctgagctatgggtgcgtgcctggggccgctctgcagggaagagctgccaccttttaattgtggggagggagtgggacacgttgcgaactgtggtgggcctcatgcggcccataggctgtggtttaggcaaactttccaccagctctttgtggtggtgagtaatgtaaatgctcaraatggcagttaatatatgctcttaactttcaagaagatatgcaargatagagaacatctgcaacagatccattgtatgcatgagatgcatcctaggtgttagatgattgcttgtttgtgataagttgactatattttatttacagtatgaatgctaaagcaacaatactcatatagaatatcatagaatattttacttatgtggctgaacaccatattttcttatgcattatccagttttggtgaatcaaaagtacaataccttggactgcrcatgccaatgttaggatactgtattatcagaggccagtttgaaatgtatgaaccccagagaaaagcagggaga

SEQ ID NO: 16551 - DNA, 557 bp, Chicken  19866894223945_3
tgtggtggtgagtaatgtaaatgctcaraatggcagttaatatatgctcttaactttcaagaagatatgcaargatagagaacatctgcaacagatccattgtatgcatgagatgcatcctaggtgttagatgattgcttgtttgtgataagttgactatattttatttacagtatgaatgctaaagcaacaatactcatatagaatatcatagaatattttacttatgtggctgaacaccatattttcttatgcattatccagttttggtgaatcaaaagtacaataccttggactgcrcatgccaatgttaggatactgtattatcagaggccagtttgaaatgtatgaaccccagagaaaagcagggagacctttcctactcacaataaagcctgcgcataagaaattaggcagtagattcaacactgtataaagcgacagtgtacaagaaaagaagaaaaaattgacatctcagcattattatttctgtgttagagaacaagaattaaatttctatgtcaaatttcctttgggattccttacagagggagatt

SEQ ID NO: 16552 - DNA, 600 bp, Chicken  19866894223949_1
atggttttaactggagtcatagtgaaaggcatggaggaaagaaaaacagatgttaggttcttatgtgttgtatgaacattttgcctgttttcttaaggaaatgaggctcttggcagtgttaatgtgttggttgtctgtctcagatccatctgtctttctgcctccaaaaacattttgatcccatggctaattgctggaagccaaagatgggcggctccaaagacttcatgagaattaagcagctgggaagaggaaagaaacaataaatatttctgctaaaggagaaatgagcctcagagwctttgtgaaattacaagaagggcacagtcagacactgggaatatctcagggaggtgctgggattgtgtgccactttgaacaccaaaaatttccatcatgaaacatgaagagacagaaagttgaactggttgtatatttgttgtatatggttacgtgtgctgcaaggagcttctgcactagagatgggcagcattttttgattccgagtccttcagaaatgttttggtggtgactgagaacttcagtgtagtgtggtgtaatgcatctttgtggagaactygttgaatccaacttatttca

SEQ ID NO: 16553 - DNA, 600 bp, Chicken  19866894223949_2
ggagaaatgagcctcagagwctttgtgaaattacaagaagggcacagtcagacactgggaatatctcagggaggtgctgggattgtgtgccactttgaacaccaaaaatttccatcatgaaacatgaagagacagaaagttgaactggttgtatatttgttgtatatggttacgtgtgctgcaaggagcttctgcactagagatgggcagcattttttgattccgagtccttcagaaatgttttggtggtgactgagaacttcagtgtagtgtggtgtaatgcatctttgtggagaactygttgaatccaacttatttcaggatttatgtggtgggtaaaaaggtttgaaaggactgtcattcatggtctcaggwgatcattttctgtctgtctgtagagccaagttgggcaatcctttaaaaaacagcgcaagtaaatctgtttgctgatgaactgtaggtcaaataaaatgtgacatccagtcagaagcgatgcgtcctggcttggtgtaacctgcacctgcttttcattatggcattaaaactggaacgcgatggcaggagctaattggagtaaagcgttgagattatgtggcttgc

SEQ ID NO: 16554 - DNA, 583 bp, Chicken  19866894223949_3
gctgggattgtgtgccactttgaacaccaaaaatttccatcatgaaacatgaagagacagaaagttgaactggttgtatatttgttgtatatggttacgtgtgctgcaaggagcttctgcactagagatgggcagcattttttgattccgagtccttcagaaatgttttggtggtgactgagaacttcagtgtagtgtggtgtaatgcatctttgtggagaactygttgaatccaacttatttcaggatttatgtggtgggtaaaaaggtttgaaaggactgtcattcatggtctcaggwgatcattttctgtctgtctgtagagccaagttgggcaatcctttaaaaaacagcgcaagtaaatctgtttgctgatgaactgtaggtcaaataaaatgtgacatccagtcagaagcgatgcgtcctggcttggtgtaacctgcacctgcttttcattatggcattaaaactggaacgcgatggcaggagctaattggagtaaagcgttgagattatgtggcttgcatgtgtgcagatatatgttcctgaatagtgcataattgctgtgctctcgtcgggtatt

SEQ ID NO: 16555 - DNA, 600 bp, Chicken  19866894223951_1
ggagcagagtagcagcactggtctgtaggaaggcttgggccaagccacacgtgtcctttggggccatgtggggagcagagcggcctgcaggtcctgcagtcaccttagccaccggtggcttacatcccagccccactgctcttcagttcttatggttttgtgtgatgaacagcaactccattttatagacagggagccgagatgcagaagggtgaaccagcacactcaggatgatgtagcaagttagcagcaggcatctggggcttgacttctttcttctttcctacttgtgcatcttgygtcatgttgcagccctgctaagaggccccagatacacaagtgcagtaaatctgctctcctgccgtgtgggaactggctgcctccaacctgtaaatctccatttcctggtaatttccagtggagtttggcagaagtggttaaatatttcactgcatcaatttcaaaaagattttaaggtgcatgaggatggaaagataaggaatgatgagagtatcttattaggaatagccttttgcctttattagctgagatcattgcagttttcctatcctgatgctggagttctaaatatctgcaata

SEQ ID NO: 16556 - DNA, 600 bp, Chicken  19866894223953_1
gtgaaaccatgaaagagatttctttctgcctcttgcaaagtcacgagccctacacccagcccagggagccaccttttcccacccagttatggccatagaggaccagtgcttggcatcctcttgcctggcaccatgactgcccaatatgaagcactggcagaggagaagtcatgagaagcagaagcagtgtgtgctcatattaataggtcccagtggaatttttctgctgtaaattttctgaatgctgtctgggctcatctctgacatactcaatgaccttgtttagagtttggcagctayttcattygatgtcccgtgttaggacagctcctgctgagggcgagccttactcaacaccagtctgctgcaggctttttggctggaagttgcactggtgttctccttttgtgctaaaattgtaggatcatttgggttggaaaagacctctgagatcatcaagtccaatgagaattactgctcagggggtgaggcaggcagggcagttaaaatgaacccgctcctcaaagagaaggtgttacatgctccagctgggctgtaatcccagccaggaaagcttacactgttcccaatctcagcctt

SEQ ID NO: 16557 - DNA, 600 bp, Chicken  19866894223953_2
catgaaagagatttctttctgcctcttgcaaagtcacgagccctacacccagcccagggagccaccttttcccacccagttatggccatagaggaccagtgcttggcatcctcttgcctggcaccatgactgcccaatatgaagcactggcagaggagaagtcatgagaagcagaagcagtgtgtgctcatattaataggtcccagtggaatttttctgctgtaaattttctgaatgctgtctgggctcatctctgacatactcaatgaccttgtttagagtttggcagctayttcattygatgtcccgtgttaggacagctcctgctgagggcgagccttactcaacaccagtctgctgcaggctttttggctggaagttgcactggtgttctccttttgtgctaaaattgtaggatcatttgggttggaaaagacctctgagatcatcaagtccaatgagaattactgctcagggggtgaggcaggcagggcagttaaaatgaacccgctcctcaaagagaaggtgttacatgctccagctgggctgtaatcccagccaggaaagcttacactgttcccaatctcagcctttgatcac

SEQ ID NO: 16558 - DNA, 600 bp, Chicken  19866894223960_1
gacacagcaaaaatttctgtggggatttcttctagatgagaaggctgatgctgatccgtttcctaagcggttgatggttcctcagttcagcagtgaaacctggcatgccaagctgtccgtgcatctcaaagccagggcactgctgtctcctccatcaggctgatgaatgaaattaagggacaagtgtaagcttcttttcagactagaggagatataacaaggctgcaaagggcatcgcacctgtcattctcctctaaataagttttggttcttcatttgaagatctggagggagtcagcwggagtgggagagcagccctggggtgggacaggaaggacatgtgtgtgacaaatccaccacttatctacagtaagttcatcttcattcatttgtctcataattgaacagccagagttgttctcccagcattgtctcttttgtttttgtttgtttcttagagcataatattcttcaggagaaacatccagatgactttatcaatcacttgtaataaccccttgcatacttttgttttgacttaggggttttgttttgcttcgtaacctagatgaaattgtgtgttaattccttgcacagaga

SEQ ID NO: 16559 - DNA, 599 bp, Chicken  19866894223962_1
  misc_feature (1)..(62): n is any nucleotide
nnnnnnnnnnnnnnnnnnnnnnnnnnnnnnnnnnnnnnnnnnnnnnnnnnnnnnnnnnnnnncataaatataagcctttctcaggttcttgaatttgtggaactccccggttcccttaaacttttcctacatacgtgcagtttttctggaagacatttttcgtggcaatgggaaatggttgagcagattctaccgcccagtggctgcaatacctggtggagagctgccatcagcctcttcgaggcctgtatctgcccatagcacaggtagctgtgggtgtagagtgagtagttggtgccrtacagcctgaagagtacagatgtgtttttgtcttcaatggtgactccaggctggaaggtaatttgtgtygaggctcctccaaggtccagagctcccaggacttcagtgttttgtggatgttcccattttcctgcgaaggaaaactggccccataaggcagtcagtgttagtctgtcccttccctaaaggttctgtgatctcaaaagcccsggggagacctcccacatcctatgttcctgtttaaccccttgttgcccacatcttcctcaacccacatagatctctgtgtagtgctgaca

SEQ ID NO: 16560 - DNA, 600 bp, Chicken  19866894223962_2
ataagcctttctcaggttcttgaatttgtggaactccccggttcccttaaacttttcctacatacgtgcagtttttctggaagacatttttcgtggcaatgggaaatggttgagcagattctaccgcccagtggctgcaatacctggtggagagctgccatcagcctcttcgaggcctgtatctgcccatagcacaggtagctgtgggtgtagagtgagtagttggtgccrtacagcctgaagagtacagatgtgtttttgtcttcaatggtgactccaggctggaaggtaatttgtgtygaggctcctccaaggtccagagctcccaggacttcagtgttttgtggatgttcccattttcctgcgaaggaaaactggccccataaggcagtcagtgttagtctgtcccttccctaaaggttctgtgatctcaaaagcccsggggagacctcccacatcctatgttcctgtttaaccccttgttgcccacatcttcctcaacccacatagatctctgtgtagtgctgacatttgggtccttggctgctgcacatcagcttggatccagggactttgaggaggaaaagtgtaatgttctgg

SEQ ID NO: 16561 - DNA, 600 bp, Chicken  19866894223962_3
acctggtggagagctgccatcagcctcttcgaggcctgtatctgcccatagcacaggtagctgtgggtgtagagtgagtagttggtgccrtacagcctgaagagtacagatgtgtttttgtcttcaatggtgactccaggctggaaggtaatttgtgtygaggctcctccaaggtccagagctcccaggacttcagtgttttgtggatgttcccattttcctgcgaaggaaaactggccccataaggcagtcagtgttagtctgtcccttccctaaaggttctgtgatctcaaaagcccsggggagacctcccacatcctatgttcctgtttaaccccttgttgcccacatcttcctcaacccacatagatctctgtgtagtgctgacatttgggtccttggctgctgcacatcagcttggatccagggactttgaggaggaaaagtgtaatgttctggactctgatactgctgcatccccatgayaccaaaatcaacccatacataaacagagagcacaggaccaggatgagctggacacaaaggtcctcctgcccttgactctcttaatcacacctgtaaagtcaaaggtgcagttca

SEQ ID NO: 16562 - DNA, 576 bp, Chicken  19866894223962_4
aggacttcagtgttttgtggatgttcccattttcctgcgaaggaaaactggccccataaggcagtcagtgttagtctgtcccttccctaaaggttctgtgatctcaaaagcccsggggagacctcccacatcctatgttcctgtttaaccccttgttgcccacatcttcctcaacccacatagatctctgtgtagtgctgacatttgggtccttggctgctgcacatcagcttggatccagggactttgaggaggaaaagtgtaatgttctggactctgatactgctgcatccccatgayaccaaaatcaacccatacataaacagagagcacaggaccaggatgagctggacacaaaggtcctcctgcccttgactctcttaatcacacctgtaaagtcaaaggtgcagttcacaacaacatgctacatttgtttgggtgactatcactctaaaatgacatttcactcctcagtgggaataaagaaatctggtctttactcaggcaggaagatacatacgcgatgcatatcctcaggcccccatgccctttcctctggcccacaccttgataagt

SEQ ID NO: 16563 - DNA, 599 bp, Chicken  19866894223963_1
  misc_feature (1)..(229): n is any nucleotide
nnnnnnnnnnnnnnnnnnnnnnnnnnnnnnnnnnnnnnnnnnnnnnnnnnnnnnnnnnnnnnnnnnnnnnnnnnnnnnnnnnnnnnnnnnnnnnnnnnnnnnnnnnnnnnnnnnnnnnnnnnnnnnnnnnnnnnnnnnnnnnnnnnnnnnnnnnnnnnnnnnnnnnnnnnnnnnnnnnnnnnnnnnnnnnnnnnnnnnnnnnnnnnnnnnnnnnnnnnnnnnnnnnnnnctgtgggtggcagagaaaaccagcttgaaagaattgcttgaattaggcaaagaggcaagttgttattgtgyttccttgaatatttctagagattgcatttcaatatttctgttgctattctagcattaggaatatctcatatattggtttaaatgtgtactttatatagatattagcattttaaatagcttttaagttgccagtctgagtaacttttgttctatatatgtgaggaaaccctgttacgtgatactgtagggttttccttttctctggaagagatgactttattgacctytctaaatcatcgtctataagatccttgccattaagtaggtatgctctatcccagtcagtggtggtctacttg

SEQ ID NO: 16564 - DNA, 599 bp, Chicken  19866894223963_2
  misc_feature (1)..(2): n is any nucleotide
nnctgtgggtggcagagaaaaccagcttgaaagaattgcttgaattaggcaaagaggcaagttgttattgtgyttccttgaatatttctagagattgcatttcaatatttctgttgctattctagcattaggaatatctcatatattggtttaaatgtgtactttatatagatattagcattttaaatagcttttaagttgccagtctgagtaacttttgttctatatatgtgaggaaaccctgttacgtgatactgtagggttttccttttctctggaagagatgactttattgacctytctaaatcatcgtctataagatccttgccattaagtaggtatgctctatcccagtcagtggtggtctacttgtaaagctggctctgcagcatctcactgccatctctataaaaacctcgacaactgttgtctttcttccaaagctgcagtagaattttagaaaaagtcctaatttactaagagaacaaatattgaaagttctctccaaatactttccttttgcacgttggctgagtttgattgaattaggatccctmgtatagcttcccaaagtatatctggtcttctctgtggctgtg

SEQ ID NO: 16565 - DNA, 600 bp, Chicken  19866894223963_3
tagggttttccttttctctggaagagatgactttattgacctytctaaatcatcgtctataagatccttgccattaagtaggtatgctctatcccagtcagtggtggtctacttgtaaagctggctctgcagcatctcactgccatctctataaaaacctcgacaactgttgtctttcttccaaagctgcagtagaattttagaaaaagtcctaatttactaagagaacaaatattgaaagttctctccaaatactttccttttgcacgttggctgagtttgattgaattaggatccctmgtatagcttcccaaagtatatctggtcttctctgtggctgtgggaaataaaaaatgaaatactgagactgtgcagttcctgtcatccagctcaataggtgcaactaaccctggctgatccctccaatgcttgacagtgttcctgcatgtggctcagagaaaactggacaattttggcttgctatgtcatgtacagtttgaaggcatgctccaatactgagaatattagagggaagggagaggaaggtgggagagaagaacatgcacatctaattttaatagctctcagaagtgctttcct

SEQ ID NO: 16566 - DNA, 600 bp, Chicken  19866894223967_1
gtttctgttgtaaaataccatcagatcaccacattagaagacccaagtattactcacttttaaaaactcctacacttctataccaccacgcaaatgagaccaaatgtatttgcaatactcaaaatgtcatcaaggccacttaagcagctgacagtaacaaggctgtggataacctttgcttatcagtctcctaaacagtcagttcgacatgtatcacatgtcacatgctttcaacacatgtagagaaatgcatgattatggtactactgctacagcacagaaacaggtaaagcaccacaycctcagacacagttctgttcttcagaacccaaaagagacaggcacggtattcttctttgcatcacatcatttaagaacaagctgaaaagtaattaaagtgtttccaacaaaaacaaactctgtagamaaaatgagtgcacttttgaacgtgctgtttcacacaaggatctgcttggtataattggagaagcacagttgtagtggaaatgctaagtcmaggcctgaagcagtgattgagcacctggtggaaggcagggccaacccaagggagctcaggtgcacgcaatgcaatgcacctga

SEQ ID NO: 16567 - DNA, 600 bp, Chicken  19866894223967_2
catcaaggccacttaagcagctgacagtaacaaggctgtggataacctttgcttatcagtctcctaaacagtcagttcgacatgtatcacatgtcacatgctttcaacacatgtagagaaatgcatgattatggtactactgctacagcacagaaacaggtaaagcaccacaycctcagacacagttctgttcttcagaacccaaaagagacaggcacggtattcttctttgcatcacatcatttaagaacaagctgaaaagtaattaaagtgtttccaacaaaaacaaactctgtagamaaaatgagtgcacttttgaacgtgctgtttcacacaaggatctgcttggtataattggagaagcacagttgtagtggaaatgctaagtcmaggcctgaagcagtgattgagcacctggtggaaggcagggccaacccaagggagctcaggtgcacgcaatgcaatgcacctgagtgaccggaagggatggagtgaggatccaccccttcccagacctcatttaagggttggcagtggaggtgaaggcatctctggctggagatccctgcctatctgaggccttccaaaggtaagcggttc

SEQ ID NO: 16568 - DNA, 600 bp, Chicken  19866894223967_3
atgtcacatgctttcaacacatgtagagaaatgcatgattatggtactactgctacagcacagaaacaggtaaagcaccacaycctcagacacagttctgttcttcagaacccaaaagagacaggcacggtattcttctttgcatcacatcatttaagaacaagctgaaaagtaattaaagtgtttccaacaaaaacaaactctgtagamaaaatgagtgcacttttgaacgtgctgtttcacacaaggatctgcttggtataattggagaagcacagttgtagtggaaatgctaagtcmaggcctgaagcagtgattgagcacctggtggaaggcagggccaacccaagggagctcaggtgcacgcaatgcaatgcacctgagtgaccggaagggatggagtgaggatccaccccttcccagacctcatttaagggttggcagtggaggtgaaggcatctctggctggagatccctgcctatctgaggccttccaaaggtaagcggttccttccctgcgtttctgtggctgctatgtttgggcttgttctcatttgctgtagctaaggactttgctaccctgctattattgtcccatta

SEQ ID NO: 16569 - DNA, 599 bp, Chicken  19866894223974_1
  misc_feature (1)..(230): n is any nucleotide
nnnnnnnnnnnnnnnnnnnnnnnnnnnnnnnnnnnnnnnnnnnnnnnnnnnnnnnnnnnnnnnnnnnnnnnnnnnnnnnnnnnnnnnnnnnnnnnnnnnnnnnnnnnnnnnnnnnnnnnnnnnnnnnnnnnnnnnnnnnnnnnnnnnnnnnnnnnnnnnnnnnnnnnnnnnnnnnnnnnnnnnnnnnnnnnnnnnnnnnnnnnnnnnnnnnnnnnnnnnnnnnnnnnnnncatttacaggtaaggatttgtacacccccacccccatcctgacatatcatgcacttttactgagtctgartgcttctgcagttgtatacgagggcgactgatagaagtgaatgaaaacattcttagcaatccagcacttctgcaagaaaaggtaagaagccttttagcttttagcctttattttactacttcagtgctaacatcattcctccattttagccatcaactgagggatacattgcagtggttctrcccaaatttgaagagagcaagagcgtaacacaggggcttctgacaccagaggaatacaaggaagttttattgaaacgtcagaattcttcttcaggaagttaattatacaggctgcag

SEQ ID NO: 16570 - DNA, 599 bp, Chicken  19866894223974_2
  misc_feature (1)..(48): n is any nucleotide
nnnnnnnnnnnnnnnnnnnnnnnnnnnnnnnnnnnnnnnnnnnnnnnncatttacaggtaaggatttgtacacccccacccccatcctgacatatcatgcacttttactgagtctgartgcttctgcagttgtatacgagggcgactgatagaagtgaatgaaaacattcttagcaatccagcacttctgcaagaaaaggtaagaagccttttagcttttagcctttattttactacttcagtgctaacatcattcctccattttagccatcaactgagggatacattgcagtggttctrcccaaatttgaagagagcaagagcgtaacacaggggcttctgacaccagaggaatacaaggaagttttattgaaacgtcagaattcttcttcaggaagttaattatacaggctgcagctgtgcttgatgctaaatawgctscttgtgcattgtaacattcatggcattgaaaggtcgggggtgtctgcttataaaagtggaacttcacatatttgttttattcttgtatgaaacaggcaaaatagtttgtatattaaaatctgttttctctcacagtcgtagtactacaaatttttaca

SEQ ID NO: 16571 - DNA, 600 bp, Chicken  19866894223974_3
gagggcgactgatagaagtgaatgaaaacattcttagcaatccagcacttctgcaagaaaaggtaagaagccttttagcttttagcctttattttactacttcagtgctaacatcattcctccattttagccatcaactgagggatacattgcagtggttctrcccaaatttgaagagagcaagagcgtaacacaggggcttctgacaccagaggaatacaaggaagttttattgaaacgtcagaattcttcttcaggaagttaattatacaggctgcagctgtgcttgatgctaaatawgctscttgtgcattgtaacattcatggcattgaaaggtcgggggtgtctgcttataaaagtggaacttcacatatttgttttattcttgtatgaaacaggcaaaatagtttgtatattaaaatctgttttctctcacagtcgtagtactacaaatttttacataagcacagatcaattttggagagtgggacctctttgctcctggctcaatgcaaagtgtgcacagagaaaaagcacaattgagctgttgggtaatttagccaaactaataaacatggggtttcacaaaggtgaaatga

SEQ ID NO: 16572 - DNA, 600 bp, Chicken  19866894223974_4
gcgactgatagaagtgaatgaaaacattcttagcaatccagcacttctgcaagaaaaggtaagaagccttttagcttttagcctttattttactacttcagtgctaacatcattcctccattttagccatcaactgagggatacattgcagtggttctrcccaaatttgaagagagcaagagcgtaacacaggggcttctgacaccagaggaatacaaggaagttttattgaaacgtcagaattcttcttcaggaagttaattatacaggctgcagctgtgcttgatgctaaatawgctscttgtgcattgtaacattcatggcattgaaaggtcgggggtgtctgcttataaaagtggaacttcacatatttgttttattcttgtatgaaacaggcaaaatagtttgtatattaaaatctgttttctctcacagtcgtagtactacaaatttttacataagcacagatcaattttggagagtgggacctctttgctcctggctcaatgcaaagtgtgcacagagaaaaagcacaattgagctgttgggtaatttagccaaactaataaacatggggtttcacaaaggtgaaatgaaaac

SEQ ID NO: 16573 - DNA, 600 bp, Chicken  19866894223978_1
ccccatcaccatagcaacagatggcttcacaatctttaaagcctttattttcacaagtcctctgagaaatagaggaggacagctgtccccgtttcacaactgtgtaactgccaggcagagaggcaaagtaatttgccccaaatcctgcaggaaatgtatggagagcaggatgtcagggcatcaggtttcccagccttcctacatatgctccaacctaccccatccttactgctgaaagtacttcctgcatctatggatacatgagcacggcctttaaaaatatggcttttatatataaargcttgggtctcctaaaaggctggcctatctcagcagggggatgacctacagaggaggtccaaagggcagtggaaaatggacttggccaattcattatgccagaaagcagcaatgccgtgtgtaaatctcatasgtttcataatgttttaagaggctgcaaaggattctaattctgtaattcctttctgttgtatttggcaagcatctggcttttactctgtccacagtgtgcactccagggaacaacacattaaggaagccagcaaaaccaatacttgtccagttgttctggatttgttg

SEQ ID NO: 16574 - DNA, 533 bp, Chicken  19866894223978_2
tgccccaaatcctgcaggaaatgtatggagagcaggatgtcagggcatcaggtttcccagccttcctacatatgctccaacctaccccatccttactgctgaaagtacttcctgcatctatggatacatgagcacggcctttaaaaatatggcttttatatataaargcttgggtctcctaaaaggctggcctatctcagcagggggatgacctacagaggaggtccaaagggcagtggaaaatggacttggccaattcattatgccagaaagcagcaatgccgtgtgtaaatctcatasgtttcataatgttttaagaggctgcaaaggattctaattctgtaattcctttctgttgtatttggcaagcatctggcttttactctgtccacagtgtgcactccagggaacaacacattaaggaagccagcaaaaccaatacttgtccagttgttctggatttgttggatcacagcagattttcccaggcaggcatgagctctgcagaaagccatatctcccctttcaatata

SEQ ID NO: 16575 - DNA, 600 bp, Chicken  19866894223979_1
tttcccatggacctcatacttggaatctaaaaagtggcaatcttaaatgcactgtgtataacctcctgtagtataaatcacgactcaagtctgcattaaacaccacattcttaactagccatctattatgagcaaggagacatttgtatcctcaaggatatagagcacagagatgttggagctgataacactgcagttcagtctgtttagctcaggcagaactaactgcaaagcactgctgacagattgccctgccctcccttccagcccagccacacacgcctgcaccaggctggatgygggagatgagccagcctattcctattccagcctgtttaatcatytcacttccaaactgattccagcacaaagaaattcagaataaaaaggttgcaagagagtttgttggcacaaagcaatgcacttgcattgtcacctctcgaaacagaaatgctttcttgagttgatggtaatcatttccttcacaatgataatcaaccctcacaattctcacttccccctcgctatgtaattagaagcccaattatcacggggaaccaaatacttctcatgaaatgcgacacagatttaaaagcatag

SEQ ID NO: 16576 - DNA, 594 bp, Chicken  19866894223979_2
aaatgcactgtgtataacctcctgtagtataaatcacgactcaagtctgcattaaacaccacattcttaactagccatctattatgagcaaggagacatttgtatcctcaaggatatagagcacagagatgttggagctgataacactgcagttcagtctgtttagctcaggcagaactaactgcaaagcactgctgacagattgccctgccctcccttccagcccagccacacacgcctgcaccaggctggatgygggagatgagccagcctattcctattccagcctgtttaatcatytcacttccaaactgattccagcacaaagaaattcagaataaaaaggttgcaagagagtttgttggcacaaagcaatgcacttgcattgtcacctctcgaaacagaaatgctttcttgagttgatggtaatcatttccttcacaatgataatcaaccctcacaattctcacttccccctcgctatgtaattagaagcccaattatcacggggaaccaaatacttctcatgaaatgcgacacagatttaaaagcatagagggataaaactgtgatttccaactccgtatcacagcg

SEQ ID NO: 16577 - DNA, 599 bp, Chicken  19866894223980_1
  misc_feature (1)..(43): n is any nucleotide
nnnnnnnnnnnnnnnnnnnnnnnnnnnnnnnnnnnnnnnnnnnaagactctccttcctgttcctccttgcccttggactctgcatcatgctatgctctccctgagagagcacagaaaactgacagctgtgcacaagttcagcagtggaacaaagatcagtgtaatgggaaggaaagtatagtcaaggcgatgtgtcaatctttgcttatcagtaaacaaagacaacaagcatcaattatttcacatggacagaaaggaattgccaagaattcctgaaaagctctgcaattaagatagccygatttttggcttctaacaggtccaattactgtacagagataaggcaggtctgcrctgygattaacaaaatgaatgttcttctacacccagtgcctaaaagacagcctgatatcagtatgagtttgccagaacaaaagtcatcatgccactaaactaggggcaatttatgcaataaccaatgccaacgacttaaccagtacaggtcaggacaatttgtaatgtatgacccacaggcatctcactagatgaaaagaaaaggtcttattcagggaatagtgatttccaaaaagccatctgga

SEQ ID NO: 16578 - DNA, 600 bp, Chicken  19866894223980_2
tcctgttcctccttgcccttggactctgcatcatgctatgctctccctgagagagcacagaaaactgacagctgtgcacaagttcagcagtggaacaaagatcagtgtaatgggaaggaaagtatagtcaaggcgatgtgtcaatctttgcttatcagtaaacaaagacaacaagcatcaattatttcacatggacagaaaggaattgccaagaattcctgaaaagctctgcaattaagatagccygatttttggcttctaacaggtccaattactgtacagagataaggcaggtctgcrctgygattaacaaaatgaatgttcttctacacccagtgcctaaaagacagcctgatatcagtatgagtttgccagaacaaaagtcatcatgccactaaactaggggcaatttatgcaataaccaatgccaacgacttaaccagtacaggtcaggacaatttgtaatgtatgacccacaggcatctcactagatgaaaagaaaaggtcttattcagggaatagtgatttccaaaaagccatctggacagaaggagaaggmacagctccttcacagtgactaattgcaggcagtgtcaggaa

SEQ ID NO: 16579 - DNA, 600 bp, Chicken  19866894223980_3
gttcctccttgcccttggactctgcatcatgctatgctctccctgagagagcacagaaaactgacagctgtgcacaagttcagcagtggaacaaagatcagtgtaatgggaaggaaagtatagtcaaggcgatgtgtcaatctttgcttatcagtaaacaaagacaacaagcatcaattatttcacatggacagaaaggaattgccaagaattcctgaaaagctctgcaattaagatagccygatttttggcttctaacaggtccaattactgtacagagataaggcaggtctgcrctgygattaacaaaatgaatgttcttctacacccagtgcctaaaagacagcctgatatcagtatgagtttgccagaacaaaagtcatcatgccactaaactaggggcaatttatgcaataaccaatgccaacgacttaaccagtacaggtcaggacaatttgtaatgtatgacccacaggcatctcactagatgaaaagaaaaggtcttattcagggaatagtgatttccaaaaagccatctggacagaaggagaaggmacagctccttcacagtgactaattgcaggcagtgtcaggaaaaag

SEQ ID NO: 16580 - DNA, 471 bp, Chicken  19866894223980_4
taacaggtccaattactgtacagagataaggcaggtctgcrctgygattaacaaaatgaatgttcttctacacccagtgcctaaaagacagcctgatatcagtatgagtttgccagaacaaaagtcatcatgccactaaactaggggcaatttatgcaataaccaatgccaacgacttaaccagtacaggtcaggacaatttgtaatgtatgacccacaggcatctcactagatgaaaagaaaaggtcttattcagggaatagtgatttccaaaaagccatctggacagaaggagaaggmacagctccttcacagtgactaattgcaggcagtgtcaggaaaaagaagtcacgcagctggaaaggtaaatgctgaaatccaacctggaagggtaaaggctgaaatccatcttgatgtgttaagccttcacttgacagcgaccaggcaaagaggaaaaatatggcattgctc

SEQ ID NO: 16581 - DNA, 457 bp, Chicken  19866894223988_1
ctggccctattggtatccccccccttaaggacctgtgtcacctccagggacaaccccccccccagcccgtgccccctcccatgtcctcaacccctggcagtggaacggtgacctctttcttccagcctcccccccacgcacaatttggggttgcacaccgcaatgtggggccctacaccccatgcaacgactgcaaccccacccaacgccccccccccccacacgcccccttacccaaacttgacgggggtgacatcggagctcacagcacccggcgggggctgcccgggggagggggcsagctccgtccctctccgcgtgcctccgctctccgtctccgagcgcgtctcccaatacgccgcccgccgcacttcgggggggctgcgggtgctgacagccggggggggcacagctgtgccttccagagcccccgcgctgcatgaggaggaggaggagg

SEQ ID NO: 16582 - DNA, 600 bp, Chicken  19866894223990_1
gcatagcgagagctgcacgagctctgctcgctctgggcttcctttgtagttaaaacagagaagtcagcaggtctggggcgtgtttcatgtgacctgttttagggaggaattaaatcccatttccattgcctatatggcaacctagatgatgagctcagatgtggatgtctgtgctatggatgttagcatttaattagaggacatgctctcatgtgggatttgggccacgattcatttgtgataactggagattgaaacttgtcaaataacacctggttggcagcagtgtggctaacagawacctgccttctgtgtcccggtgtccatgagtgtgctgaaacacagcatgggacctcccagcccccccrcccggtttgcttctgtggagcgcctggctctacagggcttatttgcaataatttgtttaaatttcttgctgtaagtagacaaacaagaaacagcatgcatgcttttctccaggaaaaagaatccagacggtgaagcttcctgttgacaagacaacttcctgctgctttggaggaaaggattattcagagatgtatgtgacttctgccagcgacgggatggatagagagtggc

SEQ ID NO: 16583 - DNA, 600 bp, Chicken  19866894223990_2
aggtctggggcgtgtttcatgtgacctgttttagggaggaattaaatcccatttccattgcctatatggcaacctagatgatgagctcagatgtggatgtctgtgctatggatgttagcatttaattagaggacatgctctcatgtgggatttgggccacgattcatttgtgataactggagattgaaacttgtcaaataacacctggttggcagcagtgtggctaacagawacctgccttctgtgtcccggtgtccatgagtgtgctgaaacacagcatgggacctcccagcccccccrcccggtttgcttctgtggagcgcctggctctacagggcttatttgcaataatttgtttaaatttcttgctgtaagtagacaaacaagaaacagcatgcatgcttttctccaggaaaaagaatccagacggtgaagcttcctgttgacaagacaacttcctgctgctttggaggaaaggattattcagagatgtatgtgacttctgccagcgacgggatggatagagagtggctctcccggcagccgcaggctggtggggttttcaaggtgaatgagcctttttcctttcattttagaagg

SEQ ID NO: 16584 - DNA, 600 bp, Chicken  19866894223990_3
cggtttgcttctgtggagcgcctggctctacagggcttatttgcaataatttgtttaaatttcttgctgtaagtagacaaacaagaaacagcatgcatgcttttctccaggaaaaagaatccagacggtgaagcttcctgttgacaagacaacttcctgctgctttggaggaaaggattattcagagatgtatgtgacttctgccagcgacgggatggatagagagtggctctcccggcagccgcaggctggtggggttttcaaggtgaatgagcctttttcctttcattttagaaggcygtatwttttttcctcctgygcttaagacaacacaactgttggagtggtgggatgcaggaggagggcggttgttagaatgtcattcatacacgtgaagttcgtatttttggttcctgttgcaggaggagaaacttaaatgtattcagagatttggaaatgtttttttttatttaaagtttgttaccagtgacatccatgctagcaaataaaatgggtcaggaaatgtcctgtaggccctgtaatacatggcgtattgtagctgacagtgcagatttcctgtgccctcacctcttcttactg

SEQ ID NO: 16585 - DNA, 600 bp, Chicken  19866894223990_4
tgcttctgtggagcgcctggctctacagggcttatttgcaataatttgtttaaatttcttgctgtaagtagacaaacaagaaacagcatgcatgcttttctccaggaaaaagaatccagacggtgaagcttcctgttgacaagacaacttcctgctgctttggaggaaaggattattcagagatgtatgtgacttctgccagcgacgggatggatagagagtggctctcccggcagccgcaggctggtggggttttcaaggtgaatgagcctttttcctttcattttagaaggcygtatwttttttcctcctgygcttaagacaacacaactgttggagtggtgggatgcaggaggagggcggttgttagaatgtcattcatacacgtgaagttcgtatttttggttcctgttgcaggaggagaaacttaaatgtattcagagatttggaaatgtttttttttatttaaagtttgttaccagtgacatccatgctagcaaataaaatgggtcaggaaatgtcctgtaggccctgtaatacatggcgtattgtagctgacagtgcagatttcctgtgccctcacctcttcttactgctccc

SEQ ID NO: 16586 - DNA, 600 bp, Chicken  19866894223990_5
gcctggctctacagggcttatttgcaataatttgtttaaatttcttgctgtaagtagacaaacaagaaacagcatgcatgcttttctccaggaaaaagaatccagacggtgaagcttcctgttgacaagacaacttcctgctgctttggaggaaaggattattcagagatgtatgtgacttctgccagcgacgggatggatagagagtggctctcccggcagccgcaggctggtggggttttcaaggtgaatgagcctttttcctttcattttagaaggcygtatwttttttcctcctgygcttaagacaacacaactgttggagtggtgggatgcaggaggagggcggttgttagaatgtcattcatacacgtgaagttcgtatttttggttcctgttgcaggaggagaaacttaaatgtattcagagatttggaaatgtttttttttatttaaagtttgttaccagtgacatccatgctagcaaataaaatgggtcaggaaatgtcctgtaggccctgtaatacatggcgtattgtagctgacagtgcagatttcctgtgccctcacctcttcttactgctcccctcccaggagggag

SEQ ID NO: 16587 - DNA, 600 bp, Chicken  19866894223996_1
agctgatcaacctgcaggacttcactgccattctgctgtactccactattcctgtagctaagagagtgaaatctttgctgaagtagagtaaatctttgcataagttatctgtagaggttcatgtggcagtgcagctgggtgtagtgtaaagtctcaagcacatgttgttgtttctccttaccttacagctggtggtggttttatttgttcaagtctgtctgtttacatccatgactgtgacaccatattggtgtatttgaggctgttctgtcacttccaagaagtcactgcagctatatytgtgctttctgaaaactgcatttgaccaaagtagtacagcaaatrcacagatttcctctcatagctcatctaaatgagaaacttatgtattgcatttagaatgtttcaacaccttaggatgattctctttggtctctttagatacagcgctataacactcagctaaaaaatctatttagtgttttaaactatgaacgaactgtaaacaccagtatcattggctcttcagtattcgggagagatgatatctacaggaagtggaaggagtttgttacaaaggtttttgaatcaggtggtgaa

SEQ ID NO: 16588 - DNA, 600 bp, Chicken  19866894223996_2
ctattcctgtagctaagagagtgaaatctttgctgaagtagagtaaatctttgcataagttatctgtagaggttcatgtggcagtgcagctgggtgtagtgtaaagtctcaagcacatgttgttgtttctccttaccttacagctggtggtggttttatttgttcaagtctgtctgtttacatccatgactgtgacaccatattggtgtatttgaggctgttctgtcacttccaagaagtcactgcagctatatytgtgctttctgaaaactgcatttgaccaaagtagtacagcaaatrcacagatttcctctcatagctcatctaaatgagaaacttatgtattgcatttagaatgtttcaacaccttaggatgattctctttggtctctttagatacagcgctataacactcagctaaaaaatctatttagtgttttaaactatgaacgaactgtaaacaccagtatcattggctcttcagtattcgggagagatgatatctacaggaagtggaaggagtttgttacaaaggtttttgaatcaggtggtgaaatgcctcatttctactttgtaaaggtatgcctattctaatcctgc

SEQ ID NO: 16589 - DNA, 600 bp, Chicken  19866894223996_3
acagatttcctctcatagctcatctaaatgagaaacttatgtattgcatttagaatgtttcaacaccttaggatgattctctttggtctctttagatacagcgctataacactcagctaaaaaatctatttagtgttttaaactatgaacgaactgtaaacaccagtatcattggctcttcagtattcgggagagatgatatctacaggaagtggaaggagtttgttacaaaggtttttgaatcaggtggtgaaatgcctcatttctactttgtaaaggtatgcctattctaatcctgcrttcagactaacttctcaaaggtggctactgcagattttttttatagctgtgatccatgtgcataactacttctttctcatagttggtttttgtgcatacctaatatatgctggcttgtttgtttgcttttctttgtgtatggcttcctttactttgatatttttattcatttctctgtcatgcaacagctcttgcttctagacatgcgctgtgcttctgcagttacatttacttggctatgatgatgggacatacatacgaacttaaataggcttttagggtcattttcctaagttaaaa

SEQ ID NO: 16590 - DNA, 600 bp, Chicken  19866894224002_1
taaatcggcctctaggaagactctgcatgtgggaaagaggaatgtgaaagagaaacaagagaagggctgcacgcagccggccggggccgatggtacccgccaagggctgcctcacccccagcagctgctggggagaagaatttaactttaacaagccacgtttgggggaaatttaggcaccgtccattagataactgttctcagatgtgcaataataaacaccacttacatagctttaattcatgagcttaatcacgagacacgctgaatacgctctgggtgatactccagtgagcgggragcgcaggtgaaatctcgtgtttgcatgagttcgtgatgctggtccaaaccaacattctgccctcccactccttcctcctgcyrcaaactgtcagggcacgtgcaggcagatgtgcggccagatgcctcatgcctctcttccagctaagcatgtttattttgatacatgtctgggaatataacacctgtaccattaataaacacagccatccctttcaaatacattttatacctactgtacatttctattctgagataataaatcacacgcataaaccttattaatcatttaaacagctc

SEQ ID NO: 16591 - DNA, 600 bp, Chicken  19866894224002_10
acttatagcacagcctcctacgtgcacacacactaattcagatgaattcaaacttttcagtccatagaagacaactctacagtgcagggacatgcatgctgctggcagggatcagagcagakctgaatgtgcctggtcctccaatatccaatgggggactataagaaagaagtggacagactctttagcagggtctgttgtgataggacaagaaraaatggttccatttagactagattagatttagactagatgtaaggaagargctgtttacaataagggtggcaytggcacaggttrcccagagaggtggtgggtgccccaaccatgaagacagccaaggtcaggctggacggggctctgagcacctgatggagctgtaggtgtccccgttcactgcatggggttggaccagatggcctttaagggtcccttccaactcaaacggttctatgattctctgattcttcacgaccacccctacagtctcaagcacacaaaagcccatgtcaagctctggtatggtccagctgcagcccctgcaaaatttttcctcctcaaaagacaccctggcacacgttaagccaattactgtggaga

SEQ ID NO: 16592 - DNA, 600 bp, Chicken  19866894224002_2
gggccgatggtacccgccaagggctgcctcacccccagcagctgctggggagaagaatttaactttaacaagccacgtttgggggaaatttaggcaccgtccattagataactgttctcagatgtgcaataataaacaccacttacatagctttaattcatgagcttaatcacgagacacgctgaatacgctctgggtgatactccagtgagcgggragcgcaggtgaaatctcgtgtttgcatgagttcgtgatgctggtccaaaccaacattctgccctcccactccttcctcctgcyrcaaactgtcagggcacgtgcaggcagatgtgcggccagatgcctcatgcctctcttccagctaagcatgtttattttgatacatgtctgggaatataacacctgtaccattaataaacacagccatccctttcaaatacattttatacctactgtacatttctattctgagataataaatcacacgcataaaccttattaatcatttaaacagctccttaaaacaccacagaaaagattttccaactcaaacaccttttaagacgcgatgacatcatgtctgtcgggacattgttgtgc

SEQ ID NO: 16593 - DNA, 600 bp, Chicken  19866894224002_3
ggccgatggtacccgccaagggctgcctcacccccagcagctgctggggagaagaatttaactttaacaagccacgtttgggggaaatttaggcaccgtccattagataactgttctcagatgtgcaataataaacaccacttacatagctttaattcatgagcttaatcacgagacacgctgaatacgctctgggtgatactccagtgagcgggragcgcaggtgaaatctcgtgtttgcatgagttcgtgatgctggtccaaaccaacattctgccctcccactccttcctcctgcyrcaaactgtcagggcacgtgcaggcagatgtgcggccagatgcctcatgcctctcttccagctaagcatgtttattttgatacatgtctgggaatataacacctgtaccattaataaacacagccatccctttcaaatacattttatacctactgtacatttctattctgagataataaatcacacgcataaaccttattaatcatttaaacagctccttaaaacaccacagaaaagattttccaactcaaacaccttttaagacgcgatgacatcatgtctgtcgggacattgttgtgca

SEQ ID NO: 16594 - DNA, 600 bp, Chicken  19866894224002_4
tggagctacctatcatcggggagaaagagaaagcacgcctcagtgaaacatctgggggtctaatggcatctgctacagcgcaaagtacccagtgatttcagcaggagtcatcttcactctttcttgcgttaacacttggggtacttgtcctgggcacccatggatgggtgctgcatgccctgtcctcaccctccaatggtctgtgaacccaaaatctcggtggtgccatcactgcaaaagccttgggactcagccttgctgtgtttgttccctgctcctacttggaggtgcagtgtttgygctgggtttggctacctccagaaatgcctatcctggtggatggccccagwggggacaggagcacaacgatgcaatgagggctccttgcagagcagttttggactcagtttcatagacttatagcacagcctcctacgtgcacacacactaattcagatgaattcaaacttttcagtccatagaagacaactctacagtgcagggacatgcatgctgctggcagggatcagagcagakctgaatgtgcctggtcctccaatatccaatgggggactataagaaagaagtggacagactctt

SEQ ID NO: 16595 - DNA, 600 bp, Chicken  19866894224002_5
tctgggggtctaatggcatctgctacagcgcaaagtacccagtgatttcagcaggagtcatcttcactctttcttgcgttaacacttggggtacttgtcctgggcacccatggatgggtgctgcatgccctgtcctcaccctccaatggtctgtgaacccaaaatctcggtggtgccatcactgcaaaagccttgggactcagccttgctgtgtttgttccctgctcctacttggaggtgcagtgtttgygctgggtttggctacctccagaaatgcctatcctggtggatggccccagwggggacaggagcacaacgatgcaatgagggctccttgcagagcagttttggactcagtttcatagacttatagcacagcctcctacgtgcacacacactaattcagatgaattcaaacttttcagtccatagaagacaactctacagtgcagggacatgcatgctgctggcagggatcagagcagakctgaatgtgcctggtcctccaatatccaatgggggactataagaaagaagtggacagactctttagcagggtctgttgtgataggacaagaaraaatggttccatttagacta

SEQ ID NO: 16596 - DNA, 600 bp, Chicken  19866894224002_6
aagccttgggactcagccttgctgtgtttgttccctgctcctacttggaggtgcagtgtttgygctgggtttggctacctccagaaatgcctatcctggtggatggccccagwggggacaggagcacaacgatgcaatgagggctccttgcagagcagttttggactcagtttcatagacttatagcacagcctcctacgtgcacacacactaattcagatgaattcaaacttttcagtccatagaagacaactctacagtgcagggacatgcatgctgctggcagggatcagagcagakctgaatgtgcctggtcctccaatatccaatgggggactataagaaagaagtggacagactctttagcagggtctgttgtgataggacaagaaraaatggttccatttagactagattagatttagactagatgtaaggaagargctgtttacaataagggtggcaytggcacaggttrcccagagaggtggtgggtgccccaaccatgaagacagccaaggtcaggctggacggggctctgagcacctgatggagctgtaggtgtccccgttcactgcatggggttggaccagatggcct

SEQ ID NO: 16597 - DNA, 600 bp, Chicken  19866894224002_7
tcctggtggatggccccagwggggacaggagcacaacgatgcaatgagggctccttgcagagcagttttggactcagtttcatagacttatagcacagcctcctacgtgcacacacactaattcagatgaattcaaacttttcagtccatagaagacaactctacagtgcagggacatgcatgctgctggcagggatcagagcagakctgaatgtgcctggtcctccaatatccaatgggggactataagaaagaagtggacagactctttagcagggtctgttgtgataggacaagaaraaatggttccatttagactagattagatttagactagatgtaaggaagargctgtttacaataagggtggcaytggcacaggttrcccagagaggtggtgggtgccccaaccatgaagacagccaaggtcaggctggacggggctctgagcacctgatggagctgtaggtgtccccgttcactgcatggggttggaccagatggcctttaagggtcccttccaactcaaacggttctatgattctctgattcttcacgaccacccctacagtctcaagcacacaaaagcccatgtcaagc

SEQ ID NO: 16598 - DNA, 600 bp, Chicken  19866894224002_8
ctccttgcagagcagttttggactcagtttcatagacttatagcacagcctcctacgtgcacacacactaattcagatgaattcaaacttttcagtccatagaagacaactctacagtgcagggacatgcatgctgctggcagggatcagagcagakctgaatgtgcctggtcctccaatatccaatgggggactataagaaagaagtggacagactctttagcagggtctgttgtgataggacaagaaraaatggttccatttagactagattagatttagactagatgtaaggaagargctgtttacaataagggtggcaytggcacaggttrcccagagaggtggtgggtgccccaaccatgaagacagccaaggtcaggctggacggggctctgagcacctgatggagctgtaggtgtccccgttcactgcatggggttggaccagatggcctttaagggtcccttccaactcaaacggttctatgattctctgattcttcacgaccacccctacagtctcaagcacacaaaagcccatgtcaagctctggtatggtccagctgcagcccctgcaaaatttttcctcctcaaaaga

SEQ ID NO: 16599 - DNA, 600 bp, Chicken  19866894224002_9
tcagtttcatagacttatagcacagcctcctacgtgcacacacactaattcagatgaattcaaacttttcagtccatagaagacaactctacagtgcagggacatgcatgctgctggcagggatcagagcagakctgaatgtgcctggtcctccaatatccaatgggggactataagaaagaagtggacagactctttagcagggtctgttgtgataggacaagaaraaatggttccatttagactagattagatttagactagatgtaaggaagargctgtttacaataagggtggcaytggcacaggttrcccagagaggtggtgggtgccccaaccatgaagacagccaaggtcaggctggacggggctctgagcacctgatggagctgtaggtgtccccgttcactgcatggggttggaccagatggcctttaagggtcccttccaactcaaacggttctatgattctctgattcttcacgaccacccctacagtctcaagcacacaaaagcccatgtcaagctctggtatggtccagctgcagcccctgcaaaatttttcctcctcaaaagacaccctggcacacgttaagccaa

SEQ ID NO: 16600 - DNA, 600 bp, Chicken  19866894224008_1
gtaggttagttgtattttctgcaacaattaacagtgaaaactgtaatttggagcgggctggcaattcaaaagcaagaggagaagtcaatcctttatgtaggccgttcaagtcagaaacatctttttgctgttattagtggacagcatatacagttgaagcccagttttttcttgtaggactgatgtgagtatactcgtggtttacttttcttgttcctgctaatgttgtgatttttgttgagctgcctgctgttttattcttttgaagtgttctgtatttaattccagtactttcacatwggtaagagagatgatgcatagtatgcaataaagttctttttcttagatgccttaaataatcattagagggctttgaactatttctttttaggcattcaagaggggctgagtgacttgttcggattatgaagttgaggcagaaactctttcttaatctgtcctcctctggcaatactgaccacggaggaagaatgggaactgatgctctttcaawgtgtataacaaattcaaaatcaaggatcaaaaaacattttgcatttcttccactttaccttctgaaagcttacagattgtcttcag

SEQ ID NO: 16601 - DNA, 600 bp, Chicken  19866894224008_2
tcctgctaatgttgtgatttttgttgagctgcctgctgttttattcttttgaagtgttctgtatttaattccagtactttcacatwggtaagagagatgatgcatagtatgcaataaagttctttttcttagatgccttaaataatcattagagggctttgaactatttctttttaggcattcaagaggggctgagtgacttgttcggattatgaagttgaggcagaaactctttcttaatctgtcctcctctggcaatactgaccacggaggaagaatgggaactgatgctctttcaawgtgtataacaaattcaaaatcaaggatcaaaaaacattttgcatttcttccactttaccttctgaaagcttacagattgtcttcagtttgcaatgctgtcaagcctgattagtaagacagctttaatttttttgcaaaacaaacagtttctgtggctctttgatagaggacatgctgctttcttgatttaggactgaagcgttktctcaccagaaatgtgaggtactctgatttgtactgtaaaccttttaggcccaaacagatgygatcatgaaatatcctttggtgcctttcataaag

SEQ ID NO: 16602 - DNA, 600 bp, Chicken  19866894224008_3
tcggattatgaagttgaggcagaaactctttcttaatctgtcctcctctggcaatactgaccacggaggaagaatgggaactgatgctctttcaawgtgtataacaaattcaaaatcaaggatcaaaaaacattttgcatttcttccactttaccttctgaaagcttacagattgtcttcagtttgcaatgctgtcaagcctgattagtaagacagctttaatttttttgcaaaacaaacagtttctgtggctctttgatagaggacatgctgctttcttgatttaggactgaagcgttktctcaccagaaatgtgaggtactctgatttgtactgtaaaccttttaggcccaaacagatgygatcatgaaatatcctttggtgcctttcataaagaaccattatcgctgttgtcctggccaaattccaacttggctaattatattctgttcctctgtatttccccaaccattgccrattgatgctgcaggattcttcacttgctgtcactaactgttgtgtagtgtttgcggttcattggtaagcagctgttctacttcatgccacagacgatttccattttgccattgggcaaagtgt

SEQ ID NO: 16603 - DNA, 600 bp, Chicken  19866894224008_4
acggaggaagaatgggaactgatgctctttcaawgtgtataacaaattcaaaatcaaggatcaaaaaacattttgcatttcttccactttaccttctgaaagcttacagattgtcttcagtttgcaatgctgtcaagcctgattagtaagacagctttaatttttttgcaaaacaaacagtttctgtggctctttgatagaggacatgctgctttcttgatttaggactgaagcgttktctcaccagaaatgtgaggtactctgatttgtactgtaaaccttttaggcccaaacagatgygatcatgaaatatcctttggtgcctttcataaagaaccattatcgctgttgtcctggccaaattccaacttggctaattatattctgttcctctgtatttccccaaccattgccrattgatgctgcaggattcttcacttgctgtcactaactgttgtgtagtgtttgcggttcattggtaagcagctgttctacttcatgccacagacgatttccattttgccattgggcaaagtgtttttttttctccatgttttaagtttcttgtgtattagaatcttccttctcagtgtagaggca

SEQ ID NO: 16604 - DNA, 600 bp, Chicken  19866894224008_5
ttcagtttgcaatgctgtcaagcctgattagtaagacagctttaatttttttgcaaaacaaacagtttctgtggctctttgatagaggacatgctgctttcttgatttaggactgaagcgttktctcaccagaaatgtgaggtactctgatttgtactgtaaaccttttaggcccaaacagatgygatcatgaaatatcctttggtgcctttcataaagaaccattatcgctgttgtcctggccaaattccaacttggctaattatattctgttcctctgtatttccccaaccattgccrattgatgctgcaggattcttcacttgctgtcactaactgttgtgtagtgtttgcggttcattggtaagcagctgttctacttcatgccacagacgatttccattttgccattgggcaaagtgtttttttttctccatgttttaagtttcttgtgtattagaatcttccttctcagtgtagaggcaaaaagatgtgccaaaggcagcagtctcctttgaaataatagatgtattaagagccctacaagaaaattgttgagacttttgactctcaaatatatttaacaaaaaaaaaataaaa

SEQ ID NO: 16605 - DNA, 600 bp, Chicken  19866894224008_6
ttctccatgttttaagtttcttgtgtattagaatcttccttctcagtgtagaggcaaaaagatgtgccaaaggcagcagtctcctttgaaataatagatgtattaagagccctacaagaaaattgttgagacttttgactctcaaatatatttaacaaaaaaaaaataaaaatcctcaaataactgtgtagctgctctattaatgtgcttcctcttactaggtgagaaggctatggtgcagtgttaaagatttagtccagcttggaagtgccatcttgggaagaacagcagcatgatttsttcctaagaggccttttggcaatgcttgagatatacttgggtttattgtcaaaaaaccccacaaaccaccttatggaaagaaaatgayacaagactgtatcctgaagcagcttatgtttatgagttgtctagaagaattaaggcctaaagtcttaattacagatatttctttaagtttttgtgaagctcggttactacatacaaaaagaaaacccaamttaatgttccatttaagagatggctatgaaaaaatgtcattaggttgtggcaaatcaagatagggcagtgcaatataaaaca

SEQ ID NO: 16606 - DNA, 600 bp, Chicken  19866894224008_7
aaataatagatgtattaagagccctacaagaaaattgttgagacttttgactctcaaatatatttaacaaaaaaaaaataaaaatcctcaaataactgtgtagctgctctattaatgtgcttcctcttactaggtgagaaggctatggtgcagtgttaaagatttagtccagcttggaagtgccatcttgggaagaacagcagcatgatttsttcctaagaggccttttggcaatgcttgagatatacttgggtttattgtcaaaaaaccccacaaaccaccttatggaaagaaaatgayacaagactgtatcctgaagcagcttatgtttatgagttgtctagaagaattaaggcctaaagtcttaattacagatatttctttaagtttttgtgaagctcggttactacatacaaaaagaaaacccaamttaatgttccatttaagagatggctatgaaaaaatgtcattaggttgtggcaaatcaagatagggcagtgcaatataaaacaagcacgtgctatttagcttaacttagaatgatttatgcagtatgctctacatgtagataggagactgttgatatttttaaaggataag

SEQ ID NO: 16607 - DNA, 600 bp, Chicken  19866894224008_8
taggtgagaaggctatggtgcagtgttaaagatttagtccagcttggaagtgccatcttgggaagaacagcagcatgatttsttcctaagaggccttttggcaatgcttgagatatacttgggtttattgtcaaaaaaccccacaaaccaccttatggaaagaaaatgayacaagactgtatcctgaagcagcttatgtttatgagttgtctagaagaattaaggcctaaagtcttaattacagatatttctttaagtttttgtgaagctcggttactacatacaaaaagaaaacccaamttaatgttccatttaagagatggctatgaaaaaatgtcattaggttgtggcaaatcaagatagggcagtgcaatataaaacaagcacgtgctatttagcttaacttagaatgatttatgcagtatgctctacatgtagataggagactgttgatatttttaaaggataaggccatctctgtgaaagagactaaaaggtttctgtttattctgcagctggtccagctgggagttacagaagagtatgctggcacctctccatatgcaaagatactgggaccagagcagaaaaaggagtggg

SEQ ID NO: 16608 - DNA, 600 bp, Chicken  19866894224010_1
gggcagggacagggacccgggcagccgctgctcaccacgatgctcagcaccaccgggtcacggaaagacgtgtgccacagctgccctcgtgctgtgccaaggacacctgcggggacagggctggcagatgtccccacgtcagacatcgacagcgtttccccctctccctcaaccccacattctctccgagcaaacaaccgcactgtgtacctcgaggtcccaatggggcgagcagagggagccgggtttggagcaggggctgtgctggagccggcgcagcactgagcagcctctccccgyggcgcacacagggattagttacccacgctcctcagagactcaatgttctcgaaaggtttgtgcctgacataaacccccctgaccggctgaaatgtgcacactaaggctgtttttctctacctgaaagcaaaggtttccagactcagccaagatctcaatggaaagcactgcgcaaaggaaccgctgccaggagcgggagctttagcctcgagtcaccaagaaaacaaaccccctatccacttactgagcaaaaaacagctcaaaacgggcaaaagtgctgctaagccaaagggacgtgtg

SEQ ID NO: 16609 - DNA, 600 bp, Chicken  19866894224011_1
tcagcctgctgtagtgtggcagtgttttaagtagtgcagtatgttctgtgagtttggtgcagtgcagcaagcttgtataatattagcatcatcttgatgttacatttgaatcttaactttgagaaatggaaagcatccagtgttttgcctttcttttttgccactcttcccctcttcttctgttttcttttctttttctttttaataaattatagctccacgaatgagttccagtgcattgttactaccagcaagcccatcatttgctggggttttatttttcctcaagacagatttagwcttctcaaactttttacttactctggcaagccctggctctaagccttttcttgcctccatgtaggtaggaaataaactatagcggtgctgctaagcatttcttgattttactcattatcatactcatacattttagggacagacccattcatagctgaacattaaaaaagaaaaaaaaaaagccctagagctggtggtcatttcaagactaatattttatgctttgttttctccagaattttcagaaccatacaggaaatacatattcctttcactaccaagtttgctatttactcactc

SEQ ID NO: 16610 - DNA, 600 bp, Chicken  19866894224011_2
ctcttcttctgttttcttttctttttctttttaataaattatagctccacgaatgagttccagtgcattgttactaccagcaagcccatcatttgctggggttttatttttcctcaagacagatttagwcttctcaaactttttacttactctggcaagccctggctctaagccttttcttgcctccatgtaggtaggaaataaactatagcggtgctgctaagcatttcttgattttactcattatcatactcatacattttagggacagacccattcatagctgaacattaaaaaagwaaaaaaaaaagccctagagctggtggtcatttcaagactaatattttatgctttgttttctccagaattttcagaaccatacaggaaatacatattcctttcactaccaagtttgctatttactcactcacatctgtttccatgtattaagaattcatgatcacttccttgagttccagaaccatacgttcttttagaagagcagaaatcatgagctacttactgcctttaaggctctttctgcagtgaaggtatgtgtgtttttccaggcccttttctgcttagtctcatagtaatctt

SEQ ID NO: 16611 - DNA, 600 bp, Chicken  19866894224011_3; identical to SEQ ID NO: 16610

SEQ ID NO: 16612 - DNA, 600 bp, Chicken  19866894224016_1
tctggtttgtgaagcatggctctgaataaagcaatggatggtttaactatgacaaagattttatttaagaccgagaactattaaaatatgtttaaaacaaactcttacaagttcaacccttccgaacccaccaacaccgagagttgtgacaacttctaaattctggaatggggaagaagggaactgggctactttctccttcagctgtatcatttccaaagacacctctttggttgactgtccacagaaggatcttcttctgcattaagacaattaccataggttagtgatttccttgcyagcgaaacatatcataggactctaatactcctataaagaggaawtggaaagtaggagaaaaaagggaaaaaaagaaaaggaaagccttcctactccctaatgtcatcttcatttattctgtgcagaactactttctttctgggcatcatttaaaagtaaattaaaagtgaaatccttctgaaattaatcaagtactaacaatggtagttttagcctgagctgatccatkatgagattcttaatgaaggagccagccgacaaactttgggcactgacgttggagaaaaagtttctgcaggg

SEQ ID NO: 16613 - DNA, 600 bp, Chicken  19866894224016_2
aactatgacaaagattttatttaagaccgagaactattaaaatatgtttaaaacaaactcttacaagttcaacccttccgaacccaccaacaccgagagttgtgacaacttctaaattctggaatggggaagaagggaactgggctactttctccttcagctgtatcatttccaaagacacctctttggttgactgtccacagaaggatcttcttctgcattaagacaattaccataggttagtgatttccttgcyagcgaaacatatcataggactctaatactcctataaagaggaawtggaaagtaggagaaaaaagggaaaaaaagaaaaggaaagccttcctactccctaatgtcatcttcatttattctgtgcagaactactttctttctgggcatcatttaaaagtaaattaaaagtgaaatccttctgaaattaatcaagtactaacaatggtagttttagcctgagctgatccatkatgagattcttaatgaaggagccagccgacaaactttgggcactgacgttggagaaaaagtttctgcagggctgtgtagccaccacaatagaaccacaattaygtggttctagta

SEQ ID NO: 16614 - DNA, 600 bp, Chicken  19866894224016_3
ttggttgactgtccacagaaggatcttcttctgcattaagacaattaccataggttagtgatttccttgcyagcgaaacatatcataggactctaatactcctataaagaggaawtggaaagtaggagaaaaaagggaaaaaaagaaaaggaaagccttcctactccctaatgtcatcttcatttattctgtgcagaactactttctttctgggcatcatttaaaagtaaattaaaagtgaaatccttctgaaattaatcaagtactaacaatggtagttttagcctgagctgatccatkatgagattcttaatgaaggagccagccgacaaactttgggcactgacgttggagaaaaagtttctgcagggctgtgtagccaccacaatagaaccacaattaygtggttctagtaacaccttcagaagctgaagctgatctttagtggctttagtggtcaaagaatttatcatcagaatgtgaaagaaaagtacatcacacgagcacactttcactgcttctccgtgttcagttttcttggacagaatgaccaaaggttgcaagtaaatgtactgagattctctgtattctaattttcag

SEQ ID NO: 16615 - DNA, 600 bp, Chicken  19866894224016_4
ataaagaggaawtggaaagtaggagaaaaaagggaaaaaaagaaaaggaaagccttcctactccctaatgtcatcttcatttattctgtgcagaactactttctttctgggcatcatttaaaagtaaattaaaagtgaaatccttctgaaattaatcaagtactaacaatggtagttttagcctgagctgatccatkatgagattcttaatgaaggagccagccgacaaactttgggcactgacgttggagaaaaagtttctgcagggctgtgtagccaccacaatagaaccacaattaygtggttctagtaacaccttcagaagctgaagctgatctttagtggctttagtggtcaaagaatttatcatcagaatgtgaaagaaaagtacatcacacgagcacactttcactgcttctccgtgttcagttttcttggacagaatgaccaaaggttgcaagtaaatgtactgagattctctgtattctaattttcagaaaagtccttggactccgtaagcatacccagacagttttattctggtgattccaatcattcccaaatgatcatctccatcaaccaccatccattattttactg

SEQ ID NO: 16616 - DNA, 585 bp, Chicken  19866894224016_5
agtccttggactccgtaagcatacccagacagttttattctggtgattccaatcattcccaaatgatcatctccatcaaccaccatccattattttactgatgtttctctctttgtgattatctattatatcaaacaaaggatctgacttacttggcatgtcgcttttcatcagcccgggccagattagccacataaccctcaaggtaggtttgtaactcctcataagttccaacagtttgattaaatgtgctaaaatcatcaaagaaacagcataaactaccatacatactacgagaaragaaagaaaccaaaatccacattgctgcatcagggttttacatgctgttgcttagctggtatacattttcagagcttttactagttgctaacctgctgaaatatgaaagctggtttgccagaggataggggaacaaagtgcccggtctcctcagaccatttcctgttacactgaaataattcaaagaactccaagaaagttgggtttgctggtatactttctgctagttctcttccttacatcctctaactggtttcatttttttccactttaggaagtgtgcag

SEQ ID NO: 16617 - DNA, 600 bp, Chicken  19866894224032_1
tgatacaaggtacaggctactcaccttgtgcatgagcttctgtctgatttactagttaaacatttcaagtaattaaatgcattttaaatgtcacaaatacttgaagactgaaaggacagaagtgaaaggtcatcaaaacattaccttaaactcttctcttttttttttttaaggtctataggtggctcaaatatatgaatcatccaataggttttgtcaggttgtctcttcctgcaccctggccaggttcgaagcgcttcatgtattcgtagaagctgatgaaagaacatggcaaaatayctggtcaaactgatgtagagtataggaacaggcagaaatatcatactttttttttgaataaaactgtagtagactttaatcacaaactgtgtatggtgaggtttacctataaaataactgtaacaagcatgagctgcaatactcatctacttaaagaattcatgctactgtaacaaagacaatgggagagttgcatggtcctcagaccagctactttaagcaccagcacgctgtcyttccagagtgttagtgaacttatagtactgcaaaacacacgcattgcaagtatattgctgctac

SEQ ID NO: 16618 - DNA, 600 bp, Chicken  19866894224032_2
ccctggccaggttcgaagcgcttcatgtattcgtagaagctgatgaaagaacatggcaaaatayctggtcaaactgatgtagagtataggaacaggcagaaatatcatactttttttttgaataaaactgtagtagactttaatcacaaactgtgtatggtgaggtttacctataaaataactgtaacaagcatgagctgcaatactcatctacttaaagaattcatgctactgtaacaaagacaatgggagagttgcatggtcctcagaccagctactttaagcaccagcacgctgtcyttccagagtgttagtgaacttatagtactgcaaaacacacgcattgcaagtatattgctgctacctcatttccaaaactgatcagcatctgtaagtcaaccatgctgtaagacttaagtgtttaggtgaccctatgtaagaactatctatatgtataagagcagcttgtttatttcatttgcaccctctaaatggattcagtgaacatagaaccaaactacacgtgctgagtgaaggtgggttcatgtcacagccctgcctatgcatgctgggggttatgtggctactgaccttgtgcaa

SEQ ID NO: 16619 - DNA, 600 bp, Chicken  19866894224033_1
ctggttttcatctgggacacatgagagtgcccaggcttgtgatatcattagcaatacccaaaggaattttcatttagactgaactgtgaaacaaaaagaaaagaagggaagaagaggagaaggggaaaagggaaggggaagggaaggggaaggagaaagggaaagggaaagagaaaagggaaagggaaagggaaagaaggggaaggggaagaggaaaaggaaaggggaagggaagagaaaggggaggaagggaggaggaaagaaaaagtttcctgattccaaagttattacacaggtgcrcatttatcttgcaagcattctactttgctcttctgagtgacttcttcctaagacctttaaaagtattgggcaagaaggacagtgcatttgatgctggtcattttgcacaagggttgctccaaaagtaatgcctcccattttattrtgttagcccacagcctctgaggaggatgttggtggtatggcagtagaggttgaacctttcctccagtattcaatcacttttcattgacatgcgacagatggcagcataggggcagtctgacatggatgtgtgtatgaagcaaaagtatgtaattg

SEQ ID NO: 16620 - DNA, 600 bp, Chicken  19866894224033_2
ggggaaggagaaagggaaagggaaagagaaaagggaaagggaaagggaaagaaggggaaggggaagaggaaaaggaaaggggaagggaagagaaaggggaggaagggaggaggaaagaaaaagtttcctgattccaaagttattacacaggtgcrcatttatcttgcaagcattctactttgctcttctgagtgacttcttcctaagacctttaaaagtattgggcaagaaggacagtgcatttgatgctggtcattttgcacaagggttgctccaaaagtaatgcctcccattttattrtgttagcccacagcctctgaggaggatgttggtggtatggcagtagaggttgaacctttcctccagtattcaatcacttttcattgacatgcgacagatggcagcataggggcagtctgacatggatgtgtgtatgaagcaaaagtatgtaattgaatttctccatgaggaaaaaattgcacccattgatattcgccaatacttgctgaatgcttatggtggcctaatactggatgtgagcacagtgagtgtgtgggtgatgtgtttcagaaatgacaccataatagcagctatgaaaca

SEQ ID NO: 16621 - DNA, 600 bp, Chicken  19866894224034_1
tacaattgctttaaaggctacccttccagaactctaaagatgaattctctaaggaattgtccaccacatgactatagtgtgatttgctgtattacatatagtctttttttcagtgctacttaatcttcaccttttcttctgacatggacataagttttaagaatatcagggcatagtcagagatcctgttgccctgtatctaacactgacaatgtcacataagagatgttagtatgtatttttagagattcagagaaataaagtatattccctttaaaggtaggaatcatcatgtgcccrttccctctggtttttataaactcattccaacctctatgctttaacaagggctacttgattacgtaccctgtattgagctgatgaggcaactattatctgtgattaagcactaaccagacactaagaatgtgtgaggtcctctttttcaatgataatcatatacaataaacattgctaacaaagttgccttccttctggatctgttttgatccttttagagtcctgcactacttgtgtaaatacaaataaacaccattcgcaacaggagtagagcactccttccatagagagttacagtga

SEQ ID NO: 16622 - DNA, 600 bp, Chicken  19866894224041_1
tgaattaattagtaaatctctggggaagctggtccttttggagccagttgctactcaacctagtgtcttgtcttgcagagaatcatcggagtcatcttcagccctgccttcatgcaggagctttgctctccaaacacaggagcaaggacttgctcaggggtattctatgtgtcccacatgttcctgctccatgttcccagagccggtcacttcaaaactcaaggaggacagcccagaagtgttatcacagaatcatggaatcattaaggttggaaaagacctctaagatcaccaactcaycctcaccatgcccactgaccatgtccctcagtgccacatccacacatctcttgaatacctccatggatggtgactccaccgcctccctgggcagcctgtgccaatgcattgctactcttttggagaagaaattttccctaatatccaacctgaacctgccctagtgcaatatgaggccattacctctcatcctatcgctgaccccagtggctctgtctccatgatccctctacatgctctcgggcactggaaatctgtgatcctcagatgcctgatgggagctgaaagcagggatggtgg

SEQ ID NO: 16623 - DNA, 600 bp, Chicken  19866894224042_1
attttattctgaattttacttcattgtttttttcccaatcatttaacagtgaggaatattcagaatgcatcaagtatactaaaaaattaagatgtatatggattgcaaacaaacaaaacctgtattttagaatttttttcagaaaaaaattattgaactatttaaccataattgccaaatagctttattgcatttgtgttttatattttatcttgcccagttaaacttcatcataatcaataagccagttctcatcaagggatagaacactgataattaactttgtcttcatgtcaacawaatcattttaagaattttgaagttcactttaggattaaaaaaggtaaccatgtttagctatacagacatgatcattttgttccatatcagttattaaacaaataggaaagcatggactgactttgaagggagctattctgtgggtatatagactagaagttgattatgaagatctgatgcctaacatctagcagctggttcaatgtcagtgatggagatactatctattagttgaaaaaaaaaaataggaaagggtgacattccagtaaggtttccattggtgattttatcaytacattg

SEQ ID NO: 16624 - DNA, 600 bp, Chicken  19866894224042_2
atcaataagccagttctcatcaagggatagaacactgataattaactttgtcttcatgtcaacawaatcattttaagaattttgaagttcactttaggattaaaaaaggtaaccatgtttagctatacagacatgatcattttgttccatatcagttattaaacaaataggaaagcatggactgactttgaagggagctattctgtgggtatatagactagaagttgattatgaagatctgatgcctaacatctagcagctggttcaatgtcagtgatggagatactatctattagttgwaaaaaaaaaataggaaagggtgacattccagtaaggtttccattggtgattttatcaytacattgttgatggtgtcttgctattgagaatgatttataatacgtagrtatcgaagatatagaggatatgaaatagagttgycgtytttcaagttctggttcaatgaacctgttactttacatttctcaattctattttattataaaactgggttgctgctttcacaattagctcagcttgtctgacagataaaatattccttttaggacaagacttgtagcacatgcgcaatctttatgt

SEQ ID NO: 16625 - DNA, 600 bp, Chicken  19866894224042_3
tcaacawaatcattttaagaattttgaagttcactttaggattaaaaaaggtaaccatgtttagctatacagacatgatcattttgttccatatcagttattaaacaaataggaaagcatggactgactttgaagggagctattctgtgggtatatagactagaagttgattatgaagatctgatgcctaacatctagcagctggttcaatgtcagtgatggagatactatctattagttgaaaaaaaaaaataggaaagggtgacattccagtaaggtttccattggtgattttatcaytacattgttgatggtgtcttgctattgagaatgatttataatacgtagrtatcgaagatatagaggatatgaaatagagttgycgtytttcaagttctggttcaatgaacctgttactttacatttctcaattctattttattataaaactgggttgctgctttcacaattagctcagcttgtctgacagataaaatattccttttaggacaagacttgtagcacatgcgcaatctttatgtgagctgatgaatccacctagatcagcacagtatgtacaattctgttgtattcagtagt

SEQ ID NO: 16626 - DNA, 600 bp, Chicken  19866894224042_4
ggtaaccatgtttagctatacagacatgatcattttgttccatatcagttattaaacaaataggaaagcatggactgactttgaagggagctattctgtgggtatatagactagaagttgattatgaagatctgatgcctaacatctagcagctggttcaatgtcagtgatggagatactatctattagttgaaaaaaaaaaataggaaagggtgacattccagtaaggtttccattggtgattttatcaytacattgttgatggtgtcttgctattgagaatgatttataatacgtagrtatcgaagatatagaggatatgaaatagagttgycgtytttcaagttctggttcaatgaacctgttactttacatttctcaattctattttattataaaactgggttgctgctttcacaattagctcagcttgtctgacagataaaatattccttttaggacaagacttgtagcacatgcgcaatctttatgtgagctgatgaatccacctagatcagcacagtatgtacaattctgttgtattcagtagttgcagacatggacacattgttttctgaaccaaaaaaaatacatatatat

SEQ ID NO: 16627 - DNA, 600 bp, Chicken  19866894224042_5
ttgttccatatcagttattaaacaaataggaaagcatggactgactttgaagggagctattctgtgggtatatagactagaagttgattatgaagatctgatgcctaacatctagcagctggttcaatgtcagtgatggagatactatctattagttgaaaaaaaaaaataggaaagggtgacattccagtaaggtttccattggtgattttatcaytacattgttgatggtgtcttgctattgagaatgatttataatacgtagrtatcgaagatatagaggatatgaaatagagttgycgtytttcaagttctggttcaatgaacctgttactttacatttctcaattctattttattataaaactgggttgctgctttcacaattagctcagcttgtctgacagataaaatattccttttaggacaagacttgtagcacatgcgcaatctttatgtgagctgatgaatccacctagatcagcacagtatgtacaattctgttgtattcagtagttgcagacatggacacattgttttctgaaccaaaaaaaatacatatatatcctgcaaaatttgtctcttgttttgttgctgtag

SEQ ID NO: 16628 - DNA, 600 bp, Chicken  19866894224042_6
tccatatcagttattaaacaaataggaaagcatggactgactttgaagggagctattctgtgggtatatagactagaagttgattatgaagatctgatgcctaacatctagcagctggttcaatgtcagtgatggagatactatctattagttgaaaaaaaaaaataggaaagggtgacattccagtaaggtttccattggtgattttatcaytacattgttgatggtgtcttgctattgagaatgatttataatacgtagrtatcgaagatatagaggatatgaaatagagttgycgtytttcaagttctggttcaatgaacctgttactttacatttctcaattctattttattataaaactgggttgctgctttcacaattagctcagcttgtctgacagataaaatattccttttaggacaagacttgtagcacatgcgcaatctttatgtgagctgatgaatccacctagatcagcacagtatgtacaattctgttgtattcagtagttgcagacatggacacattgttttctgaaccaaaaaaaatacatatatatcctgcaaaatttgtctcttgttttgttgctgtagcagt

SEQ ID NO: 16629 - DNA, 599 bp, Chicken  19866894224049_1
  misc_feature (1)..(161): n is any nucleotide
nnnnnnnnnnnnnnnnnnnnnnnnnnnnnnnnnnnnnnnnnnnnnnnnnnnnnnnnnnnnnnnnnnnnnnnnnnnnnnnnnnnnnnnnnnnnnnnnnnnnnnnnnnnnnnnnnnnnnnnnnnnnnnnnnnnnnnnnnnnnnnnnnnnnnnnnnnnnnnnnntcacatgcggtccacacccatgctctgtcagatcctctcctttgctgcatattcagacctgctgctattccgtagacagcacagagttttactacctgtctaccaatcctgcaactgccactacacctactaccttccyttgacacttmtatttctggtagctcaataggttccacccgttcttagtacgcaaaaactcacatcctcagaaagcaaacmccctttayagatctatccagatkcagttatcaaacactgatacttgaggcacagccaaaattaccgtaagcacgtaagcaagcatactcactcttccgcacttgtgtctgtaactatcaaaaccacagmgctgtctttatcaaacttttccaacatttaaagaatacacgtactaactccaataactcaagtcaaccatctgcacaagtagcaaacgat

SEQ ID NO: 16630 - DNA, 599 bp, Chicken  19866894224049_2
  misc_feature (1)..(151): n is any nucleotide
nnnnnnnnnnnnnnnnnnnnnnnnnnnnnnnnnnnnnnnnnnnnnnnnnnnnnnnnnnnnnnnnnnnnnnnnnnnnnnnnnnnnnnnnnnnnnnnnnnnnnnnnnnnnnnnnnnnnnnnnnnnnnnnnnnnnnnnnnnnnnnnnnnnnnnntcacatgcggtccacacccatgctctgtcagatcctctcctttgctgcatattcagacctgctgctattccgtagacagcacagagttttactacctgtctaccaatcctgcaactgccactacacctactaccttccyttgacacttmtatttctggtagctcaataggttccacccgttcttagtacgcaaaaactcacatcctcagaaagcaaacmccctttayagatctatccagatkcagttatcaaacactgatacttgaggcacagccaaaattaccgtaagcacgtaagcaagcatactcactcttccgcacttgtgtctgtaactatcaaaaccacagmgctgtctttatcaaacttttccaacatttaaagaatacacgtactaactccaataactcaagtcaaccatctgcacaagtagcaaacgatcacagcggca

SEQ ID NO: 16631 - DNA, 599 bp, Chicken  19866894224049_3
  misc_feature (1)..(81): n is any nucleotide
nnnnnnnnnnnnnnnnnnnnnnnnnnnnnnnnnnnnnnnnnnnnnnnnnnnnnnnnnnnnnnnnnnnnnnnnnnnnnnnnntcacatgcggtccacacccatgctctgtcagatcctctcctttgctgcatattcagacctgctgctattccgtagacagcacagagttttactacctgtctaccaatcctgcaactgccactacacctactaccttccyttgacacttmtatttctggtagctcaataggttccacccgttcttagtacgcaaaaactcacatcctcagaaagcaaacmccctttayagatctatccagatkcagttatcaaacactgatacttgaggcacagccaaaattaccgtaagcacgtaagcaagcatactcactcttccgcacttgtgtctgtaactatcaaaaccacagmgctgtctttatcaaacttttccaacatttaaagaatacacgtactaactccaataactcaagtcaaccatctgcacaagtagcaaacgatcacagcggcagacactttttccacgccccagtctttcaaagcttcttgcaaagctcagctccacacagtcaaaagagagg

SEQ ID NO: 16632 - DNA, 599 bp, Chicken  19866894224049_4
  misc_feature (1)..(73): n is any nucleotide
nnnnnnnnnnnnnnnnnnnnnnnnnnnnnnnnnnnnnnnnnnnnnnnnnnnnnnnnnnnnnnnnnnnnnnnnntcacatgcggtccacacccatgctctgtcagatcctctcctttgctgcatattcagacctgctgctattccgtagacagcacagagttttactacctgtctaccaatcctgcaactgccactacacctactaccttccyttgacacttmtatttctggtagctcaataggttccacccgttcttagtacgcaaaaactcacatcctcagaaagcaaacmccctttayagatctatccagatkcagttatcaaacactgatacttgaggcacagccaaaattaccgtaagcacgtaagcaagcatactcactcttccgcacttgtgtctgtaactatcaaaaccacagmgctgtctttatcaaacttttccaacatttaaagaatacacgtactaactccaataactcaagtcaaccatctgcacaagtagcaaacgatcacagcggcagacactttttccacgccccagtctttcaaagcttcttgcaaagctcagctccacacagtcaaaagagaggcagaagac

SEQ ID NO: 16633 - DNA, 599 bp, Chicken  19866894224049_5
  misc_feature (1)..(58): n is any nucleotide
nnnnnnnnnnnnnnnnnnnnnnnnnnnnnnnnnnnnnnnnnnnnnnnnnnnnnnnnnntcacatgcggtccacacccatgctctgtcagatcctctcctttgctgcatattcagacctgctgctattccgtagacagcacagagttttactacctgtctaccaatcctgcaactgccactacacctactaccttccyttgacacttmtatttctggtagctcaataggttccacccgttcttagtacgcaaaaactcacatcctcagaaagcaaacmccctttayagatctatccagatkcagttatcaaacactgatacttgaggcacagccaaaattaccgtaagcacgtaagcaagcatactcactcttccgcacttgtgtctgtaactatcaaaaccacagmgctgtctttatcaaacttttccaacatttaaagaatacacgtactaactccaataactcaagtcaaccatctgcacaagtagcaaacgatcacagcggcagacactttttccacgccccagtctttcaaagcttcttgcaaagctcagctccacacagtcaaaagagaggcagaagactgagggtaggaaaac

SEQ ID NO: 16634 - DNA, 600 bp, Chicken  19866894224049_6
atattcagacctgctgctattccgtagacagcacagagttttactacctgtctaccaatcctgcaactgccactacacctactaccttccyttgacacttmtatttctggtagctcaataggttccacccgttcttagtacgcaaaaactcacatcctcagaaagcaaacmccctttayagatctatccagatkcagttatcaaacactgatacttgaggcacagccaaaattaccgtaagcacgtaagcaagcatactcactcttccgcacttgtgtctgtaactatcaaaaccacagmgctgtctttatcaaacttttccaacatttaaagaatacacgtactaactccaataactcaagtcaaccatctgcacaagtagcaaacgatcacagcggcagacactttttccacgccccagtctttcaaagcttcttgcaaagctcagctccacacagtcaaaagagaggcagaagactgagggtaggaaaacagtgtgatgctcttgtttggaggctctctgcaatgcacatccgtgcttctaacactacccacctcaggaaatagcaagttagcctaagtgtcctccagagtagaaat

SEQ ID NO: 16635 - DNA, 600 bp, Chicken  19866894224052_1
ccaaagagggaaccagtggctgcagtgttccgaaatgggaatgttttttcattgctgaaaaccctctttacggattccgattgaaacacaaactttggaggagaaaccactgttggtcttggcttctgagaggaaaaagtgttcacggcgggcccacaagcttcatcaccacggctgaggtcagttgtttccttggtgcttgcttccattgcagccacagcgttcttagcatgaggagatgtattggctgtatttgtacaagaaatatgaggcattatcaaggtgcctggctcatgggcwtgctttgcttcatcacatgtttgcttacrtgagcctgcaacatcctgcagtttgaaccacactgccagcagctctactttccctgccccaactgcaaaatcacatgcggtccacacccatgctctgtcagatcctctcctttgctgcatactcagacctggtgctattctgtggtcagcacagagttttactacctgtctaccaatcctgcaactgccactacacctactascttcctttgacacttctatttctggtagctcaataggtgccacccgttcttagtacgcaaaaactcac

SEQ ID NO: 16636 - DNA, 600 bp, Chicken  19866894224052_2
ccgaaatgggaatgttttttcattgctgaaaaccctctttacggattccgattgaaacacaaactttggaggagaaaccactgttggtcttggcttctgagaggaaaaagtgttcacggcgggcccacaagcttcatcaccacggctgaggtcagttgtttccttggtgcttgcttccattgcagccacagcgttcttagcatgaggagatgtattggctgtatttgtacaagaaatatgaggcattatcaaggtgcctggctcatgggcwtgctttgcttcatcacatgtttgcttacrtgagcctgcaacatcctgcagtttgaaccacactgccagcagctctactttccctgccccaactgcaaaatcacatgcggtccacacccatgctctgtcagatcctctcctttgctgcatactcagacctggtgctattctgtggtcagcacagagttttactacctgtctaccaatcctgcaactgccactacacctactascttcctttgacacttctatttctggtagctcaataggtgccacccgttcttagtacgcaaaaactcacatcctcagaaagcaaaccccctttataga

SEQ ID NO: 16637 - DNA, 600 bp, Chicken  19866894224052_3
gaggagatgtattggctgtatttgtacaagaaatatgaggcattatcaaggtgcctggctcatgggcwtgctttgcttcatcacatgtttgcttacrtgagcctgcaacatcctgcagtttgaaccacactgccagcagctctactttccctgccccaactgcaaaatcacatgcggtccacacccatgctctgtcagatcctctcctttgctgcatactcagacctggtgctattctgtggtcagcacagagttttactacctgtctaccaatcctgcaactgccactacacctactascttcctttgacacttctatttctggtagctcaataggtgccacccgttcttagtacgcaaaaactcacatcctcagaaagcaaaccccctttatagatctatccagattcagttatcaaacactgatacttgaggcacagccaaaattaccgtaagcacgtaagcaagcatactcactcttccgcacttgtgtctttaactatcaaaaccacagagctgtctttatcaaacttttcaaacatttaaagaatacacgtactaactccgataagtcaaccacctgcacagcggcacacactt

SEQ ID NO: 16638 - DNA, 600 bp, Chicken  19866894224060_1
ctggggcgtggaaaaagtgtctgctgctgtgatcgtttgctacttgtgcagatggttgacttgagttattggagttagtacgtgtattctttaaatgtttgaaaagtttgataaagacagctctgtggttttgatagttacagacacaagtgcggaagagtgagtatgcttgcttacgtgcttacggtaattttggctgtgcctcaagtatcagtgtttgataactgcatctggatggatctataaagggggtttgctttctgaggatgtgagtttttgcgtactaagaacgggtggcayctattgagctaccagaaatagaagtgtcaaaggaagctagtaggtgtagtggcagttgcaggattggtagacaggtagtaaaactttgtgctgaccacagaatagcagcaggtctgwgtatgcagcaaaggagaggatctgacagagcatgggtgtggaccgcatgcgatttgcagtyggggcagggaaagtagwgctgctggcagtgtggttcaaactgcaggatgttgcttacatgagcctgcaaacatgtgatgaagcaaagcaagcccatgagccaggcaccttgataacgcctca

SEQ ID NO: 16639 - DNA, 600 bp, Chicken  19866894224060_2
cagctctgtggttttgatagttacagacacaagtgcggaagagtgagtatgcttgcttacgtgcttacggtaattttggctgtgcctcaagtatcagtgtttgataactgcatctggatggatctataaagggggtttgctttctgaggatgtgagtttttgcgtactaagaacgggtggcayctattgagctaccagaaatagaagtgtcaaaggaagctagtaggtgtagtggcagttgcaggattggtagacaggtagtaaaactttgtgctgaccacagaatagcagcaggtctgwgtatgcagcaaaggagaggatctgacagagcatgggtgtggaccgcatgcgatttgcagtyggggcagggaaagtagwgctgctggcagtgtggttcaaactgcaggatgttgcttacatgagcctgcaaacatgtgatgaagcaaagcaagcccatgagccaggcaccttgataacgcctcatrtttctcgtaccaatacagccaatgcatctcctcatgctaagaacgctgaggctgcaatggaagcaaccaccaaggaaacaactgacctcagccgtggtgatgaagcttgtggggc

SEQ ID NO: 16640 - DNA, 600 bp, Chicken  19866894224060_3
tgcttacggtaattttggctgtgcctcaagtatcagtgtttgataactgcatctggatggatctataaagggggtttgctttctgaggatgtgagtttttgcgtactaagaacgggtggcayctattgagctaccagaaatagaagtgtcaaaggaagctagtaggtgtagtggcagttgcaggattggtagacaggtagtaaaactttgtgctgaccacagaatagcagcaggtctgwgtatgcagcaaaggagaggatctgacagagcatgggtgtggaccgcatgcgatttgcagtyggggcagggaaagtagwgctgctggcagtgtggttcaaactgcaggatgttgcttacatgagcctgcaaacatgtgatgaagcaaagcaagcccatgagccaggcaccttgataacgcctcatrtttctcgtaccaatacagccaatgcatctcctcatgctaagaacgctgaggctgcaatggaagcaaccaccaaggaaacaactgacctcagccgtggtgatgaagcttgtggggctgccatgaacgctttttcctctcagaagccaagaccaacactggtttctcctccaaagttc

SEQ ID NO: 16641 - DNA, 600 bp, Chicken  19866894224060_4
gctgtgcctcaagtatcagtgtttgataactgcatctggatggatctataaagggggtttgctttctgaggatgtgagtttttgcgtactaagaacgggtggcayctattgagctaccagaaatagaagtgtcaaaggaagctagtaggtgtagtggcagttgcaggattggtagacaggtagtaaaactttgtgctgaccacagaatagcagcaggtctgwgtatgcagcaaaggagaggatctgacagagcatgggtgtggaccgcatgcgatttgcagtyggggcagggaaagtagwgctgctggcagtgtggttcaaactgcaggatgttgcttacatgagcctgcaaacatgtgatgaagcaaagcaagcccatgagccaggcaccttgataacgcctcatrtttctcgtaccaatacagccaatgcatctcctcatgctaagaacgctgaggctgcaatggaagcaaccaccaaggaaacaactgacctcagccgtggtgatgaagcttgtggggctgccatgaacgctttttcctctcagaagccaagaccaacactggtttctcctccaaagttcgtgtttcagtctgagtc

SEQ ID NO: 16642 - DNA, 600 bp, Chicken  19866894224060_5
attgagctaccagaaatagaagtgtcaaaggaagctagtaggtgtagtggcagttgcaggattggtagacaggtagtaaaactttgtgctgaccacagaatagcagcaggtctgwgtatgcagcaaaggagaggatctgacagagcatgggtgtggaccgcatgcgatttgcagtyggggcagggaaagtagwgctgctggcagtgtggttcaaactgcaggatgttgcttacatgagcctgcaaacatgtgatgaagcaaagcaagcccatgagccaggcaccttgataacgcctcatrtttctcgtaccaatacagccaatgcatctcctcatgctaagaacgctgaggctgcaatggaagcaaccaccaaggaaacaactgacctcagccgtggtgatgaagcttgtggggctgccatgaacgctttttcctctcagaagccaagaccaacactggtttctcctccaaagttcgtgtttcagtctgagtccatcaagagcattttcggcaatgcagaaacattcccctttgggaatactgtagcccccggctccctctttggaggcagattcaaccctgcaagaacaagctcagacg

SEQ ID NO: 16643 - DNA, 599 bp, Chicken  19866894224063_1
  misc_feature (1)..(60): n is any nucleotide
nnnnnnnnnnnnnnnnnnnnnnnnnnnnnnnnnnnnnnnnnnnnnnnnnnnnnnnnnnnnctgaaaagcctcatgggttgggtctaagaggcttaccaaaatcggcacctaatcagcgtgatccctccttgcccgggctgtggggaaactgaccttcagaaacccggggctggggtgagcgtggcaatccctggtgacacacgagtggccccactccacgaggatgcgatgtggggcagagcgaaggcaacgggtgagcgcaggtacacagccctgtgtcactccgtccctgctgttaaygtgcaaggaaatctgggggatcagcactcaaagagctctgtgccttccatgtaatgtcttgattcctcccakctcatttgggatgtctgggggtcagatgagaaacggaacgtgatcagaaccagactgggggaagctcccatttacatgcatttctctcttccttaaaaaararggggggggctccagcacgtgcatgtgtagcagaaagtggtctgggcaaagaatacgccctcaaagcagttccagttctgtcttggggatgtgccttgtgctttgcataatctgaacrcggtcca

SEQ ID NO: 16644 - DNA, 600 bp, Chicken  19866894224063_2
atgggttgggtctaagaggcttaccaaaatcggcacctaatcagcgtgatccctccttgcccgggctgtggggaaactgaccttcagaaacccggggctggggtgagcgtggcaatccctggtgacacacgagtggccccactccacgaggatgcgatgtggggcagagcgaaggcaacgggtgagcgcaggtacacagccctgtgtcactccgtccctgctgttaaygtgcaaggaaatctgggggatcagcactcaaagagctctgtgccttccatgtaatgtcttgattcctcccakctcatttgggatgtctgggggtcagatgagaaacggaacgtgatcagaaccagactgggggaagctcccatttacatgcatttctctcttccttaaaaaararggggggggctccagcacgtgcatgtgtagcagaaagtggtctgggcaaagaatacgccctcaaagcagttccagttctgtcttggggatgtgccttgtgctttgcataatctgaacrcggtccaacacgcgctgcgtgtttgaatatggcttcatgagcacgttcaaatgagagactagtattagtaggcactctcg

SEQ ID NO: 16645 - DNA, 600 bp, Chicken  19866894224063_3
ggtgagcgtggcaatccctggtgacacacgagtggccccactccacgaggatgcgatgtggggcagagcgaaggcaacgggtgagcgcaggtacacagccctgtgtcactccgtccctgctgttaaygtgcaaggaaatctgggggatcagcactcaaagagctctgtgccttccatgtaatgtcttgattcctcccakctcatttgggatgtctgggggtcagatgagaaacggaacgtgatcagaaccagactgggggaagctcccatttacatgcatttctctcttccttaaaaaararggggggggctccagcacgtgcatgtgtagcagaaagtggtctgggcaaagaatacgccctcaaagcagttccagttctgtcttggggatgtgccttgtgctttgcataatctgaacrcggtccaacacgcgctgcgtgtttgaatatggcttcatgagcacgttcaaatgagagactagtattagtaggcactctcgcttcaatttaagctaaaagccaacagatgggggaagtaaaatgccaggaaaccaggccctgatcaggtggcattggctgcgctcggactgtatttagacaa

SEQ ID NO: 16646 - DNA, 600 bp, Chicken  19866894224063_4
tgagcgtggcaatccctggtgacacacgagtggccccactccacgaggatgcgatgtggggcagagcgaaggcaacgggtgagcgcaggtacacagccctgtgtcactccgtccctgctgttaaygtgcaaggaaatctgggggatcagcactcaaagagctctgtgccttccatgtaatgtcttgattcctcccakctcatttgggatgtctgggggtcagatgagaaacggaacgtgatcagaaccagactgggggaagctcccatttacatgcatttctctcttccttaaaaaararggggggggctccagcacgtgcatgtgtagcagaaagtggtctgggcaaagaatacgccctcaaagcagttccagttctgtcttggggatgtgccttgtgctttgcataatctgaacrcggtccaacacgcgctgcgtgtttgaatatggcttcatgagcacgttcaaatgagagactagtattagtaggcactctcgcttcaatttaagctaaaagccaacagatgggggaagtaaaatgccaggaaaccaggccctgatcaggtggcattggctgcgctcggactgtatttagacaata

SEQ ID NO: 16647 - DNA, 600 bp, Chicken  19866894224063_5
ctgttaaygtgcaaggaaatctgggggatcagcactcaaagagctctgtgccttccatgtaatgtcttgattcctcccakctcatttgggatgtctgggggtcagatgagaaacggaacgtgatcagaaccagactgggggaagctcccatttacatgcatttctctcttccttaaaaaararggggggggctccagcacgtgcatgtgtagcagaaagtggtctgggcaaagaatacgccctcaaagcagttccagttctgtcttggggatgtgccttgtgctttgcataatctgaacrcggtccaacacgcgctgcgtgtttgaatatggcttcatgagcacgttcaaatgagagactagtattagtaggcactctcgcttcaatttaagctaaaagccaacagatgggggaagtaaaatgccaggaaaccaggccctgatcaggtggcattggctgcgctcggactgtatttagacaataggctgtattgcgtatttggaggctgatcttgtgaaaatgaaaccctgctggtgctaacccacagaggctttgcacgctgggaaaatggccaaattcctctggaaaatggtgaacctc

SEQ ID NO: 16648 - DNA, 470 bp, Chicken  19866894224069_1
atagattgactattctaccatactagtttcatttgctgtagctgtacaacatcaaagcagtgatgtcctcatatactgcatttagtgataacgtaaagggctagcaatacataaaaaaataaataaacaaataaataaataaataaaatcaaagtgagagtttctaagtagtttcctggcaattgagacagcaggctctttcatctgtgctgtaactgtggcaatgcattgatttaaactccttatgagatctcaaatgcttttatattcttaggtcttgctggctgctttctttttgcwttttttcctcccttcaaatgataaaattctagcatttagcagaatgccatcttgcttccctagaagacggagacttatttcagctttggttctaaactgcacaggatcgctacataaaatagctctcaaaatgccatcctattaggaaatcggccttgacttcacagtgt

SEQ ID NO: 16649 - DNA, 600 bp, Chicken  19866894224074_1
gagaatccgtgaaatagaaggtctcctttcactgactcattgccacccagacaaccaaagtctaactggaaatgaatgcaccttgttagatgttgtatataacccagatgcttctcactggcttttccaatccaaaacacactccaagtcttaacagccctgatatttttagatcatctccatcttaaagcttcgtaacagtccttggagttggaggaaatattacaagtccccattttgcaatggaggagggaggttgccaaagatcacagaatggttccaaggcagcgtggggagaayaggacagatggtcaccctcacaggagaggagctgtattatttctggcatctccatgctgccaacctctactctggaagctgaaatgactgtaggagcccttcattttctgtctagaaaagtcatgcaatgttgctttgtgctattaaacagaatctgtgctttcctccaagaaggctgtgtttcaggtgtacgcgaaaagacttgcacacattttacagggcaggcacaatacagtgtgcactgctctgcatggcaaacaggccaaaagggaattatcttggcaaaacattaacatccct

SEQ ID NO: 16650 - DNA, 600 bp, Chicken  19866894224076_1
tgcaaaaggtgtcaggagatattttcaccaggtatggttctttcacgtaggggctggggagggctggcattcagcacttggaaatggacttctgtgataaggccagtgcagtgaaaaggcattgcgttggcaagcaatgaaatttcagaaaaggtccgaatgcacttcaataaaagattattggattcaggtactgtcaaagttaggcataattgaatgtctcgtgtttggaagaggatgtttgttattagtttctaattcagttgcagattcccacaaattgcattgctacttcagctrtggttatctttgattctttcttgctcgtgttttaaatgggagactttgttatttggagtattttgaagatctgtctttctgagttactgtacttggagcagtagagtagagtgtctttgttctgatctctggacttacaagctgttcttgagctacttttgtacttctgttttcgtatgttgttgtgagagcagagtgygttagtgcctgttcttctcaccatgatcttataatctatctaaactggtgtcttcagcaatttaacccaggcctgccacttcttgcacacagtcatcttta

SEQ ID NO: 16651 - DNA, 447 bp, Chicken  19866894224076_2
aagttaggcataattgaatgtctcgtgtttggaagaggatgtttgttattagtttctaattcagttgcagattcccacaaattgcattgctacttcagctrtggttatctttgattctttcttgctcgtgttttaaatgggagactttgttatttggagtattttgaagatctgtctttctgagttactgtacttggagcagtagagtagagtgtctttgttctgatctctggacttacaagctgttcttgagctacttttgtacttctgttttcgtatgttgttgtgagagcagagtgygttagtgcctgttcttctcaccatgatcttataatctatctaaactggtgtcttcagcaatttaacccaggcctgccacttcttgcacacagtcatctttaggtagatagatctataagactacctatatagcagatcagaaagatt

SEQ ID NO: 16652 - DNA, 599 bp, Chicken  19866894224081_1
  misc_feature (1)..(138): n is any nucleotide
nnnnnnnnnnnnnnnnnnnnnnnnnnnnnnnnnnnnnnnnnnnnnnnnnnnnnnnnnnnnnnnnnnnnnnnnnnnnnnnnnnnnnnnnnnnnnnnnnnnnnnnnnnnnnnnnnnnnnnnnnnnnnnnnnnnnnnnnnnaatgagttggaagggacctttaagatcatcttgttccaacctcccacgagaccaggttgctcaaagccccatcaagtctagtcttgaatgcctccagggtgggagcatccacagcctcacagggcaaactgtttgggtgtctcatggtatgttatatataayatattatgttaatgtactaattctgcaacagttccctgttagaagacctaagatgaaggcaatgtgtcattaattcattttaattgttttcttgtttccaaagaggttgagcacaaatgctactgccccccgactcggggggtgtcattggctttgcagcaagactcctaaagaacctgctcactgcctgttggcagtgtttgagttgaaccagttggactgcagtgggaattacgaatgctgggcagagaaagtttttgcttaaggctcccagaacctgctcttcataagagcaaata

SEQ ID NO: 16653 - DNA, 600 bp, Chicken  19866894224086_1
agcaaattttccctatcgatcaagccctagaggggcatgaacaacacttaaaggaacaaagtgtagaagatggcataactgacatgtacaaaaactcaacaagagagctgagaagtgctagtaggaaatggaacactttaacattacatcccggtcataccaaggtccattggccctgtactcattccagataattaatttacaacacattaaacctctgtgtgaagaaggaagttatgcatcagttgtgtaggaatataaagtgttattgatttaagatttctactgtatcctgcagtracagaaagaaacagtctagttgtgttttaaagacaaaaaaaccttttctgaaggacacatttgctaaataagtgcactttacactacatttaactgaagtattgttgacatcctaaaataaacgttgttaagaaagagaccctcagcataattaggagatcatggcatgactggatagtattggcattcgctctaagattcaaatgcttggaggtgataatgctctcttttacagtaatagtttaaaatagaaaaagaaattgacaaatattatttaatgaataaaatatgaagtgatcc

SEQ ID NO: 16654 - DNA, 600 bp, Chicken  19866894224094_1
catcaacaaggccacaagtcatccttgaggccattattatccatgacttcctgccatagttcttccagagcacaagtctgtgctgtgtacatctgttatcttgtgcatggggtaagaggtaggtggcagtgctcaaaacaagcacactgcagagcagaaagccaccctgggttctgtagacctgtgaagagggatgctctgttttggtcccatttgaatctacacagggacaggctaaatggatttttaaggacattcagatgtgacccacacgacaacagccttctgttccccgaactsgatattagcagaaggagatttataaaattaagagcaggttgctagaatacagacattctgcagcttaaaatcatcttggtccaagctcccattttcagtttctaggtcttgagaaaaactgatccttgcagcccccataggcaaaaacttttaagtctgcagacagaacctctccccaaggcatctcactgaaggtaatgctacaggtattctgatgcagttggcaggcttccatcgtctcttgggagaaagtttattccatataaagatgtatttgacactagaatgatgcaaagagaa

SEQ ID NO: 16655 - DNA, 600 bp, Chicken  19866894224094_2
ataggcaaaaacttttaagtctgcagacagaacctctccccaaggcatctcactgaaggtaatgctacaggtattctgatgcagttggcaggcttccatcgtctcttgggagaaagtttattccatataaagatgtatttgacactagaatgatgcaaagagaagttaaatgctactgatcaaacacaagaagttggatatgtgttgtgtctaggagcatgtcagacatgctactagaaggtgccctaaagggccacggttaataatattacacatcagacacctggacatagggtttgkttttttttaaatagacatctgtaagagtctgtagtccagcagcatgaccctccctacctttaggggatgactgaattctctttagagaattcagagcacattaaacagaagaagtacaaattgctgacaccaccttcatccaaatgcaatcttgcaatttttgctggtcctgcagacttctattgtccctgggcattaggcatgcacaggcacccagctgtttccatggtaacataattaccccaaacccaaccagactggttttcaacagcctaagcagaccataacttaactctttcc

SEQ ID NO: 16656 - DNA, 600 bp, Chicken  19866894224094_3
attgtccctgggcattaggcatgcacaggcacccagctgtttccatggtaacataattaccccaaacccaaccagactggttttcaacagcctaagcagaccataacttaactctttcctgcttcctcaccttaagtagccccatgtggatcaagagtcttgtgatgaatgcatctgaattaaatgtggcggaagagaaggcttttttcatcaaggcatctaaaaaaagaaatgcatcgcattaaacaatacagaaagggaccctgtagaaaatgttaagatccttcaacagatgatggwtactatcatttgtgaattttgagaggtaatctgcctgtctgtttccccaggaatcaggtagaatctctggaaccaagacagagatgatccagtccttaagtataaggcctgataccaggatttcagtgaaaaaagtaacactaaatcccattttcaagtttcaaatgcagcttgatctccaccctatgcaccatgagatgttctactcaatgcatttgaacttgcaagcacatgtgcgtgtatgcatataaacgttatcagttgtagtagagcagaaaggcttgaaatgtaaaggccagc

SEQ ID NO: 16657 - DNA, 542 bp, Chicken  19866894224098_1
gtaatgatgcccagaaatggtattcagagtgaatggtattcagagtgctgaaataatgtaatatacatgattaagaaatgcatagcaattgcctaattaggtatacaagtaatataataaatcttactggaaagtattttccatctgctttctgagctgcgagacaataaagaataataattaaaaaagaagaagaagaaaaagaagacaattcagacaagtgtagcaggccagaactttcctccttccaaggggcaaacagaactcccaagggttggtggccagtgctaaagatagaarcaattcaggcttttgaagtaggctctgagtctgacaatcctatttctgcattaaatcccaatctgaaaataaagagcatttcaaaagccacttgatgtggcactctgatgtggccacctttagctggatttctctctggatgctgagcataagtcagcatccattggacactgctgcagagcatcttcagcggttccatctcccagcaggtgggagctcggtgcaccacctgaagattctcc

SEQ ID NO: 16658 - DNA, 600 bp, Chicken  19866894224099_1
tttgtcagaaatagtgaacctgtttctcatttgacttctcatgatacattttgagacttggtaatgttctatccccctggcattagcacttaattttgatgctgataagagagctctgaaagaaactgcgctgcaacttagtgcgattccaaatatgttgttttctccctgagcgtggtgactatgggaggcttttcacagagttgtaggggttggaagagatctctagaggtcatcgagcccaaccacctggctgagaacttttgccttaggtggtcagcaaaccaattcttaaagaayataattatagagtaggacatgggggttctcacattgaagaactgtcagttttgtgtgtgtggctgtaaagcagggtctttttaaagctcttaagaaattaattttcaagcaagaatgtagtcgctataacaacttgcaccaaggggcagggttcgacatgggggataggtggaacagagggagaagccagtctcaaaccagtcacaaacttacacctgtagtaggtgttcatgtttatgaaagacttacagtctgttccactgttttcactattgaaaatactcgagcgttacagtaagc

SEQ ID NO: 16659 - DNA, 600 bp, Chicken  19866894224117_1
tgggttttaggaaggagcggatcggtctattagggcaaggaggcatgaagaaaaacagcctgaaaaacacaggctcttatcagaaaacagctgcggtttcagtaaatgccgactgcgcgctggtctgccgttagagccagctagtgccactcacccgtaggatctgaccctatcctgctcacgtacctgcgtgtgaaattagttgggggaggtaactatagcctcacctttatgtctctgcgtaacaaactcatacaaagcctgtaggaagagcgagaccttgagaagactgttctgtgkacctgagtgctgagctgaaggcaggccgggaggtgcagggtgcagagaacgctcaaccccttcagccaagtgttccagctgctacgtcacagtgtgtgctgtcactgcctttaaaatcatttaactgataagtcactatgccactgaaaactgtgctaaaatggaaatgaaaaggcaaccttgaataacaaacgatccttatctctgtttggattattggagcggtgtttgaagagcaaatatttctatgaacagattgtttactttgtcctgtactcatctgcaggaagaaaattagaa

SEQ ID NO: 16660 - DNA, 600 bp, Chicken  19866894224120_1
ctccacctcaccacaacctccctttaggtggttgtagagagtgataaggtctccccgagcctgttccagactaaactatcccagttctctcagtcgctccttataagacttgtgaattgttgatgtttaaagtcatgcactgaacttaacaatagatatttaaaagcctcttttgaagtttcttaattagtggagaataacaaaaagccagacaccaacacaagcatactgcttgttctttctgctgcactaaaactgactgaagtagggaaaacaacatggtggcaaattctaaaatgrattctgttgtcagaagatagcttggcaagatagatagaaagcattgctgaaaatttgaagaaactagtattagaacaaattatgtagagaatttgctctgcagttgactgcaggtacatgtcttttaacatgtttcggcttatggtacttgacaggttctgtttaaatactgaaatacaaaaagaagtacttgtgagctgctaaaaggaagaggtgccaaagggggatatattcccagtagtaaataactttggtttaaaaaataaattcttggttacagaagaaaaaaaaaaaactcat

SEQ ID NO: 16661 - DNA, 600 bp, Chicken  19866894224122_1
agtggaaggcatgctctgggttacacgagatcatgtctccctctagtgactaaatgtctgtacttttgaaagtcgtgaccctagatttacagaaacaatttttaaacggggtgtaaattacacatctacaaacttatctgtacatgaaattcatttcttttctttttactcctgagtatgatctaaggtatgatttagatttttcttaatacccctcaattattagtaggacatctcagtaagcattgtgtctccattaaatttggctttaaaagaaaaaaggctatagctgaccaggargattgacagatctcagttaaacaagtcaagctatttactttgtactcgcagctaatctttgcccaaacagttaaatccagagagtggtatttaacagcatctctactaaaactgtcgtttgtgcttaatacagatatgaggatctctttgtcttacttggcacgctagaagacatctacttatcatcaccaacaaaactgtagctcaacttgtttttaaaagacatagaaaaacgaggaaaataatgtctccagctgatgaaactctggacaggagtgaagaaatggtgatcagaaaaaa

SEQ ID NO: 16662 - DNA, 599 bp, Chicken  19866894224135_1
  misc_feature (1)..(18): n is any nucleotide
nnnnnnnnnnnnnnnnnnactgatttcagatgaacattctaagagtcctttaacagcaaataaacccttcactaaataaataagaggctccttctcatccttacacagccttgattgacttaacaaactggaaaggaatttcaaagccaagggctgctcggctttcaggaatgaccccactgcctgaaatccatgcatggagcagctcacctgcattcatttgctctgtgcacagcacagggaaagccagtgcccatgacaacagcagtgttctgctgcccaacatgctcttgtctccckgaaaagaggttccagctgtgacctccccgctctgctcatcagagaaatgtgtgcaaactccactggtggagcaatgtcagagtatttaatgctctctgcctgcctcagtcccagcccaggctgacggatccacctcactttgtgtcttctgctgctcttaagagactaatgaggaaattttcctgtgactgcttcacttgtgcrctccctctctgcattgagcagctaatggtaagaagatttaatagcgtgatatcactttaatgtgaagagcataaataaggctcttataactctgt

SEQ ID NO: 16663 - DNA, 600 bp, Chicken  19866894224135_2
gctcacctgcattcatttgctctgtgcacagcacagggaaagccagtgcccatgacaacagcagtgttctgctgcccaacatgctcttgtctccckgaaaagaggttccagctgtgacctccccgctctgctcatcagagaaatgtgtgcaaactccactggtggagcaatgtcagagtatttaatgctctctgcctgcctcagtcccagcccaggctgacggatccacctcactttgtgtcttctgctgctcttaagagactaatgaggaaattttcctgtgactgcttcacttgtgcrctccctctctgcattgagcagctaatggtaagaagatttaatagcgtgatatcactttaatgtgaagagcataaataaggctcttataactctgtaattacgtctgcattgcacctattaactattcatctgcatatagcgctctgcatggggacgggatgacttcaaaaggtttttctgctctatccgataaaatcttggtttgaaaaagaaggaaaaaaggggaaagtggaggaagggaggataaaaatctctgggatattaagcatgcaatccagaagcagtactgagggcatgatg

SEQ ID NO: 16664 - DNA, 600 bp, Chicken  19866894224139_1
ccatagaacaacagaaggtaggctaatgcaatgaggctattacattgactgtgaaacttgctactgttacctttgagtgtaaatgaaaatggcaagcaatttccacttaaacagcttttactgtttcacttttaaagcggttagcagatatcatgggcagaataaatagctgagattattctagttcatttgtagaacaacaaaagctctaatatataacataaaccaccacatttcccccctctttgatcaattgaagtaacagtctcaatcttctcatttctgattgcgtagttagaragtaatattaattgcaaaaacagagtaaaacatatgcatacatctacattacactgtgtactgtattttaaagttatacttgcaactgtaattacataaatatttttaatacactcacaaacatacacaygyatttgtgtatatatagatatatacacatctataaattgtagaaatagagagccagacttacagaataagtatacatcttgtctaatggatttttttttttactgtaattttaaggtacctgaattatactgatctaaagggagcagaatctgtgggaaaatgacactg

SEQ ID NO: 16665 - DNA, 550 bp, Chicken  19866894224139_2
tttaaagcggttagcagatatcatgggcagaataaatagctgagattattctagttcatttgtagaacaacaaaagctctaatatataacataaaccaccacatttcccccctctttgatcaattgaagtaacagtctcaatcttctcatttctgattgcgtagttagaragtaatattaattgcaaaaacagagtaaaacatatgcatacatctacattacactgtgtactgtattttaaagttatacttgcaactgtaattacataaatatttttaatacactcacaaacatacacaygyatttgtgtatatatagatatatacacatctataaattgtagaaatagagagccagacttacagaataagtatacatcttgtctaatggatttttttttttactgtaattttaaggtacctgaattatactgatctaaagggagcagaatctgtgggaaaatgacactgctcactgggaaaacatgcttttctataagacctccaactagctagcacactaaaccaaaggcagtcacaagcattgcttg

SEQ ID NO: 16666 - DNA, 548 bp, Chicken  19866894224139_3
taaagcggttagcagatatcatgggcagaataaatagctgagattattctagttcatttgtagaacaacaaaagctctaatatataacataaaccaccacatttcccccctctttgatcaattgaagtaacagtctcaatcttctcatttctgattgcgtagttagaragtaatattaattgcaaaaacagagtaaaacatatgcatacatctacattacactgtgtactgtattttaaagttatacttgcaactgtaattacataaatatttttaatacactcacaaacatacacaygyatttgtgtatatatagatatatacacatctataaattgtagaaatagagagccagacttacagaataagtatacatcttgtctaatggatttttttttttactgtaattttaaggtacctgaattatactgatctaaagggagcagaatctgtgggaaaatgacactgctcactgggaaaacatgcttttctataagacctccaactagctagcacactaaaccaaaggcagtcacaagcattgcttg

SEQ ID NO: 16667 - DNA, 600 bp, Chicken  19866894224141_1
aaagtgacactgtgcccttgtctaaatacacattcagtaaaaagactttttgcaggcaaagtttaaaattgcacaagaaatctgattaagagatttatccaacactcagactcaagaccgaagcacagtgagttgtaggagcgttgcaggagaatggatggaaccttcatttcagaagcgagttgccttcgtggggtgaaggacatcctgtggttacagggattctgtctctatatcaacatagcctaggaagtgtctccttaagaagcccctacagctgctccagagccaacagactcratggctgcgtcagcaacatggtggtcctgctcggtccttaggtgcagatatttaatattaaatatagacttgatgagtgttgtcaagcccctagaaccagcaaagccaaatctcttcaaggaaagccttgagggagcaccagggtagggaaggttgtaggaaaatgaattgccctcaaggaaatgtgtgagggagctccaagcactccgtaacacagagaggaagtcattagatgccattagatgccagcagatcccgtcagcccaaggtgctctttcagtcacctctccatgaaacaag

SEQ ID NO: 16668 - DNA, 600 bp, Chicken  19866894224161_1
aggctccgaaggcccaagagagccatgtgcagcaatacttaaaaatcatcaaaaaagacaagtgttattgcatatctgggtgtcagtatgacacgccaaacataaataattagctgatacaatgaaatgcaggaaaagaactgaaaggagacaaccttgaatccatgtctaaagccatcactgcgcgtagggtcagtgatgaagagatgcaaaaggactctgatagctttggctgccctgagtgctatgtaaaccttgtgaaacattgcaacaaggatttgaattcaacatgaaacgctrcagcttcactatgcttccaacctgggaattctactggatgcaatacccagttacttgaaaggaacaggactctacgatcaaatacacacttggaattctcctacagagaattctgtatcatacaggtatgataatgatttcaaggaattccagtaaactgcaagtgaaaaagcatgactttttctcttctcaaaaagcatgcaattacataccctgacaacaaatgtcatggcttttcatttacatttcagttggcttgctcaccaggaacaaacacagcttagtctaggacgtatcctc

SEQ ID NO: 16669 - DNA, 600 bp, Chicken  19866894224161_2
ataccctgacaacaaatgtcatggcttttcatttacatttcagttggcttgctcaccaggaacaaacacagcttagtctaggacgtatcctcctctgctgaacatgaaatataaatctggttgtttagtaaatacggcctccaggttcctacacagttggaaaaaaatcaaccagataaaaatagccattgattttagcatagagatttgtgaggttcaaaacctaactgctcacaggagtgagaaatgagagggaagcagccctgcagcccccaaggtcagtgagaaggatggtaggakgtgctccaggcatggaacagaacttcctgcagcccatggcggagcaggctgtcccactgcagcccacctatcttgtttggagcttttaatacagcattaattgaattaayacagaagctgcacaagaaaacctaagaaccaaacaaaccaccacgccttacgtgcactgcgtgtacccacaagggtcacccagtccaacccccggccccgcacagcaccacccaaacccaacccccacggctgagagcggtgtcccaacgctccctgagctccggcagctcggggctgtgctcactgccc

SEQ ID NO: 16670 - DNA, 600 bp, Chicken  19866894224161_3
ataaatctggttgtttagtaaatacggcctccaggttcctacacagttggaaaaaaatcaaccagataaaaatagccattgattttagcatagagatttgtgaggttcaaaacctaactgctcacaggagtgagaaatgagagggaagcagccctgcagcccccaaggtcagtgagaaggatggtaggakgtgctccaggcatggaacagaacttcctgcagcccatggcggagcaggctgtcccactgcagcccacctatcttgtttggagcttttaatacagcattaattgaattaayacagaagctgcacaagaaaacctaagaaccaaacaaaccaccacgccttacgtgcactgcgtgtacccacaagggtcacccagtccaacccccggccccgcacagcaccacccaaacccaacccccacggctgagagcggtgtcccaacgctccctgagctccggcagctcggggctgtgctcactgccctgggagctgctccatgcccactgccctctggggcacagccttctcctcacccccacctgaaacaaagatatcctggacagactcaacgtgctgtagagcaatacatcatt

SEQ ID NO: 16671 - DNA, 600 bp, Chicken  19866894224162_1
aaatatcataaaagaacaacttccctcctgttggtttggcattcctagccagcaaggaaccttaaaaaagatccattccaagatctttaatccagcctggttttaaaaatgaatagatgtggtagatataatatgggactgatctatttattcataaagaagaactgataacacacaaataaagtgatatcaatgcttacttgtcctgaacgcaaaagagagaatgtaaaaggcagggggttaaaacagaccaaaaaaggcccaaaacaccctactactcctcctagtaaaatctaagcwaaaatarttgccccctaggtctcacaactcatttttactatttgtggctcaaagacaagcaattgaaaaacttcaaaactatcacaaaacgactgctggatgtagtgatagcagttagagctgtgtctccagatttttcatatgcattttataatacaaatatgtattattcatatctctatacacagagatgcagatatgtatctatttaccacattcaacaaacaatttaagaattaaggaaaatggtttcattttaaagataaaaactgtggtcttattataatgctgcaaaataaa

SEQ ID NO: 16672 - DNA, 600 bp, Chicken  19866894224162_2
ataaaagaacaacttccctcctgttggtttggcattcctagccagcaaggaaccttaaaaaagatccattccaagatctttaatccagcctggttttaaaaatgaatagatgtggtagatataatatgggactgatctatttattcataaagaagaactgataacacacaaataaagtgatatcaatgcttacttgtcctgaacgcaaaagagagaatgtaaaaggcagggggttaaaacagaccaaaaaaggcccaaaacaccctactactcctcctagtaaaatctaagcwaaaatarttgccccctaggtctcacaactcatttttactatttgtggctcaaagacaagcaattgaaaaacttcaaaactatcacaaaacgactgctggatgtagtgatagcagttagagctgtgtctccagatttttcatatgcattttataatacaaatatgtattattcatatctctatacacagagatgcagatatgtatctatttaccacattcaacaaacaatttaagaattaaggaaaatggtttcattttaaagataaaaactgtggtcttattataatgctgcaaaataaaatctgct

SEQ ID NO: 16673 - DNA, 600 bp, Chicken  19866894224167_1
aggtgaagtgttaccctaagaggtggacaggtgcccccttcctgctcgtatttactgctgcctgcttctttctttgatgttggtgactaatagttcatcaatgcctgggttccactggctctatttaggacttgcagcctgttgagtgacagtaggatgtgtgggcaagctgagacgcccagaccttttctggcaggattgttagggcaagaaaatactctggaaagcacaatgtgaatcatttgtccatctgagcagatgacactatgtgccagccacgctgctctgcagtcagacctrtgcggtgggatcactgtgtccagatcctgctgtgctgaaaacccacaggacatacttaatgctaaagacctgaaaacccaagcctgtatgtcctgctgtgtgcttacagcactccttcctctctgyccagctctggcagagcgtggtggcatggatggggtgtgagcaggggcctcgtgatgctgcacaaggctgtgcgttgtgcctgggagtggggtgtgctgtctgcagggactcccctcctttctctggggcatgctgtctttcctggtggcttcagctccatgctgtgatccacag

SEQ ID NO: 16674 - DNA, 591 bp, Chicken  19866894224167_2
aggacttgcagcctgttgagtgacagtaggatgtgtgggcaagctgagacgcccagaccttttctggcaggattgttagggcaagaaaatactctggaaagcacaatgtgaatcatttgtccatctgagcagatgacactatgtgccagccacgctgctctgcagtcagacctrtgcggtgggatcactgtgtccagatcctgctgtgctgaaaacccacaggacatacttaatgctaaagacctgaaaacccaagcctgtatgtcctgctgtgtgcttacagcactccttcctctctgyccagctctggcagagcgtggtggcatggatggggtgtgagcaggggcctcgtgatgctgcacaaggctgtgcgttgtgcctgggagtggggtgtgctgtctgcagggactcccctcctttctctggggcatgctgtctttcctggtggcttcagctccatgctgtgatccacagggtgacaatgtccctccttggtgcttgtgctgtgccttgcaccactggtgtgtttaattgcattcagaaggagctgggcttgcagggataattagacctgtgtggggggggagggca

SEQ ID NO: 16675 - DNA, 599 bp, Chicken  19866894224169_1
  misc_feature (1)..(38): n is any nucleotide
nnnnnnnnnnnnnnnnnnnnnnnnnnnnnnnnnnnnnnactttcctggataaatgccaacctgaggagcacacagatgaagaatcttccccccatagtgcttaagcgtcgtcccaccggctttgaggggaagtaggctcttaaacttgatggacaccttggaaatgttctcctcaacaaaacagcactagagaaaatgtcaggcatttagtcatggtaacagaaggcattcctatgcagttagaggaaaataagattggaaagtgtggtgccacctgccttcctcgtggcagatgcagcygcaccagcacccttcctgccagacaccggtcatgaaggaaaactgcagaagctcctaagtcctgcttcacgtgagaacttgcctttgcaaggactgccttcgtgaggagctcacagcacctcctggctcagagggttccctcagtgaaaacaccctgctgacaaaatacygggaaaccttagtaactactgtgtgcacctcctgccgagcgatggtccaatgcacgaacactgtggtagaagcaggactctaaatgggtatgataattagcagcatggcaatttagcagcggctagatg

SEQ ID NO: 16676 - DNA, 600 bp, Chicken  19866894224169_2
cctcaacaaaacagcactagagaaaatgtcaggcatttagtcatggtaacagaaggcattcctatgcagttagaggaaaataagattggaaagtgtggtgccacctgccttcctcgtggcagatgcagcygcaccagcacccttcctgccagacaccggtcatgaaggaaaactgcagaagctcctaagtcctgcttcacgtgagaacttgcctttgcaaggactgccttcgtgaggagctcacagcacctcctggctcagagggttccctcagtgaaaacaccctgctgacaaaatacygggaaaccttagtaactactgtgtgcacctcctgccgagcgatggtccaatgcacgaacactgtggtagaagcaggactctaaatgggtatgataattagcagcatggcaatttagcagcggctagatgaccacacattaaccctgttcaactttctacactaactgtgggcatccccacgagcagactgcactgtgcaggtccagcgagcctgcagctccccgtcggatctgtgctgtgccctctactgttggtacaaggttcctcaaactggatcccagccttcagcatgaccaagtc

SEQ ID NO: 16677 - DNA, 600 bp, Chicken  19866894224172_1
gtatttttttcaattataattaacttgctcttgcttccaatatcctccaaacagtgaggcttctagtttgaatattcatctaccttaacaggttttgtctgtttatgtttgtagttaatactatacttcagtgataaaaagaatacttaaggctatgtattttactacactggttttcataagggaggtgggtttctgggtggttcttgtgcagaaatattcctctgtgatatcaaaatagcagatgtgaaaaaaaatgatttttactgtaaaatattcattaagaaagtgcatttaaarcctcaggtgcagttgttgatcccttattttcagctgcttttacagatgggatttttatatttattttcttgttttcaaataagcttctgtaygtaatagaaatttgaaaagctttgacacttttagtgtttagatatacctaatcagtgtaacctttgaatcatcttgaatgcatttatagagaatattactatgttaatttataaaacactgatgattttattaagaaagtcaagttattgacccttgtcaaagagaaatttaggttttatttgagttctaacacacagagacgtgaaa

SEQ ID NO: 16678 - DNA, 600 bp, Chicken  19866894224172_2
ttttgtctgtttatgtttgtagttaatactatacttcagtgataaaaagaatacttaaggctatgtattttactacactggttttcataagggaggtgggtttctgggtggttcttgtgcagaaatattcctctgtgatatcaaaatagcagatgtgaaaaaaaatgatttttactgtaaaatattcattaagaaagtgcatttaaarcctcaggtgcagttgttgatcccttattttcagctgcttttacagatgggatttttatatttattttcttgttttcaaataagcttctgtaygtaatagaaatttgaaaagctttgacacttttagtgtttagatatacctaatcagtgtaacctttgaatcatcttgaatgcatttatagagaatattactatgttaatttataaaacactgatgattttattaagaaagtcaagttattgacccttgtcaaagagaaatttaggttttatttgagttctaacacacagagacgtgaaaaagcaatcaaaacaaagtgttgtaaacaagtcattagaactgaaagcatcaagtagcattagaattattttctaacttgctttcacgcttca

SEQ ID NO: 16679 - DNA, 600 bp, Chicken  19866894224173_1
cttccacaaaactttctccaatgtctgcttaagttggtcagtgcaaacccaactgcttaagtaacacgtagctatgactggtgcttcaggactggaaagtttctcaactctaccttctccaaaccttcctgcttagctcttctactcaggtctaatatctacatggagtgagaccccccaggtcatactgtaaagagggcaatacttgctagtcctttgttctgactcgctctattcaaaccttaactttacagaacaaataaaaccagcagggatcatagcatttatgatggatttatraaggattcaactccattagatgttcacaaatrtgtttcaacttccccccaacactctggggcaactgcgtacttttattacatacctgtactttaaatgcatctccagtaatacggagaggtttatctgctccagtaggcattggaccatcttggatcataatcattttcacacctgttcgctcctgaagaaaaagcacagagcactttgctaagcagagcccctaaaactagggactacttttggttactagacattaggtaggtcatgttagcagctttgcagaacactaccgtagct

SEQ ID NO: 16680 - DNA, 600 bp, Chicken  19866894224173_2
gttggtcagtgcaaacccaactgcttaagtaacacgtagctatgactggtgcttcaggactggaaagtttctcaactctaccttctccaaaccttcctgcttagctcttctactcaggtctaatatctacatggagtgagaccccccaggtcatactgtaaagagggcaatacttgctagtcctttgttctgactcgctctattcaaaccttaactttacagaacaaataaaaccagcagggatcatagcatttatgatggatttatraaggattcaactccattagatgttcacaaatrtgtttcaacttccccccaacactctggggcaactgcgtacttttattacatacctgtactttaaatgcatctccagtaatacggagaggtttatctgctccagtaggcattggaccatcttggatcataatcattttcacacctgttcgctcctgaagaaaaagcacagagcactttgctaagcagagcccctaaaactagggactacttttggttactagacattaggtaggtcatgttagcagctttgcagaacactaccgtagctcttcacaagtacttagagcacamattcagtaa

SEQ ID NO: 16681 - DNA, 600 bp, Chicken  19866894224173_3
tcacaaatrtgtttcaacttccccccaacactctggggcaactgcgtacttttattacatacctgtactttaaatgcatctccagtaatacggagaggtttatctgctccagtaggcattggaccatcttggatcataatcattttcacacctgttcgctcctgaagaaaaagcacagagcactttgctaagcagagcccctaaaactagggactacttttggttactagacattaggtaggtcatgttagcagctttgcagaacactaccgtagctcttcacaagtacttagagcacamattcagtaacagtcctagagtgtaaaggactgccagaaagtgtgctactcctgacgatcttaaacagctgaatctcttgcaaaaatagaactcctctaccttggcaactgatttctcaagccctttccaaaatctgtagctgtccacatatagcagttatgtgatcagccttaaaactactggatgacagagggcaaccaaaaaacctgcatttttgacctaggttcctttctggaaccctctatcctttaaaaacttgtacaggatgtcagcaaaaagaatgtctaggaacatggaatt

SEQ ID NO: 16682 - DNA, 600 bp, Chicken  19866894224178_1
gtgcatggagctgcctgggcttggactgcagggagagagcatggagaacaggcagatcagcactgttccagtgcccatcggtgatggcacggaagggaacgtggggggctgtggcatggccagcatgtggcgaagcggaaggggaatgaatggagtgggcactgctggaaacgggccgggagagctgatggagtgcccagcactggatgagatgcccacaaggccgagtgccatggagctggagtggggggtggtgacgtcccccatggagcagctgccaggtccgggctgcagcagcgwgagrgctcagcaccttcccctcctgcagcagcgtgggacaccatacactgtcctctcctctccatcgggtgagaatcgtttcaagaaccgggagcaacatcccatttctccccctcgaatcaagaagtagctattgaataacacacagaaccaaatggttttagacccaccccctccaaacagcctttgcaatggaaatgcagagacgtgcagagacgaagaaggaactgagtaataggaagcggcggtgggcacggggcaacccggaagcagccacggtcccggcgcagccctgcgccc

SEQ ID NO: 16683 - DNA, 600 bp, Chicken  19866894224178_2
atggagctgcctgggcttggactgcagggagagagcatggagaacaggcagatcagcactgttccagtgcccatcggtgatggcacggaagggaacgtggggggctgtggcatggccagcatgtggcgaagcggaaggggaatgaatggagtgggcactgctggaaacgggccgggagagctgatggagtgcccagcactggatgagatgcccacaaggccgagtgccatggagctggagtggggggtggtgacgtcccccatggagcagctgccaggtccgggctgcagcagcgwgagrgctcagcaccttcccctcctgcagcagcgtgggacaccatacactgtcctctcctctccatcgggtgagaatcgtttcaagaaccgggagcaacatcccatttctccccctcgaatcaagaagtagctattgaataacacacagaaccaaatggttttagacccaccccctccaaacagcctttgcaatggaaatgcagagacgtgcagagacgaagaaggaactgagtaataggaagcggcggtgggcacggggcaacccggaagcagccacggtcccggcgcagccctgcgccccgct

SEQ ID NO: 16684 - DNA, 600 bp, Chicken  19866894224178_3
gtttcaagaaccgggagcaacatcccatttctccccctcgaatcaagaagtagctattgaataacacacagaaccaaatggttttagacccaccccctccaaacagcctttgcaatggaaatgcagagacgtgcagagacgaagaaggaactgagtaataggaagcggcggtgggcacggggcaacccggaagcagccacggtcccggcgcagccctgcgccccgctgacagccctgctgctggggtgtgggcacacagcgggggctcaccgcaagaaaccacccagggggagcacagayccccaccagcakrgctgagggatggggcagaacccggcgtggtgagcctacctcccccagagctgcattcccaagggaattttcttcggaggatacaaacttgggggaaaagaaggactgccacggcagctgcggaggtgctctgcagagctcgtggagcctctgctccaaaggtgctcgtggtgctgctcctgggggaagcacagtgcgcagcgctgccccgcactctctgcatgggcccagcagaactcggggtgctgtggttccagccccgcagtcagcacacggcaaagagagcgg

SEQ ID NO: 16685 - DNA, 600 bp, Chicken  19866894224178_4
gggagcaacatcccatttctccccctcgaatcaagaagtagctattgaataacacacagaaccaaatggttttagacccaccccctccaaacagcctttgcaatggaaatgcagagacgtgcagagacgaagaaggaactgagtaataggaagcggcggtgggcacggggcaacccggaagcagccacggtcccggcgcagccctgcgccccgctgacagccctgctgctggggtgtgggcacacagcgggggctcaccgcaagaaaccacccagggggagcacagayccccaccagcakrgctgagggatggggcagaacccggcgtggtgagcctacctcccccagagctgcattcccaagggaattttcttcggaggatacaaacttgggggaaaagaaggactgccacggcagctgcggaggtgctctgcagagctcgtggagcctctgctccaaaggtgctcgtggtgctgctcctgggggaagcacagtgcgcagcgctgccccgcactctctgcatgggcccagcagaactcggggtgctgtggttccagccccgcagtcagcacacggcaaagagagcggaggatgcacttt

SEQ ID NO: 16686 - DNA, 600 bp, Chicken  19866894224178_5
ggagcaacatcccatttctccccctcgaatcaagaagtagctattgaataacacacagaaccaaatggttttagacccaccccctccaaacagcctttgcaatggaaatgcagagacgtgcagagacgaagaaggaactgagtaataggaagcggcggtgggcacggggcaacccggaagcagccacggtcccggcgcagccctgcgccccgctgacagccctgctgctggggtgtgggcacacagcgggggctcaccgcaagaaaccacccagggggagcacagayccccaccagcakrgctgagggatggggcagaacccggcgtggtgagcctacctcccccagagctgcattcccaagggaattttcttcggaggatacaaacttgggggaaaagaaggactgccacggcagctgcggaggtgctctgcagagctcgtggagcctctgctccaaaggtgctcgtggtgctgctcctgggggaagcacagtgcgcagcgctgccccgcactctctgcatgggcccagcagaactcggggtgctgtggttccagccccgcagtcagcacacggcaaagagagcggaggatgcactttg

SEQ ID NO: 16687 - DNA, 600 bp, Chicken  19866894224178_6
agctgcattcccaagggaattttcttcggaggatacaaacttgggggaaaagaaggactgccacggcagctgcggaggtgctctgcagagctcgtggagcctctgctccaaaggtgctcgtggtgctgctcctgggggaagcacagtgcgcagcgctgccccgcactctctgcatgggcccagcagaactcggggtgctgtggttccagccccgcagtcagcacacggcaaagagagcggaggatgcactttgggaggcagtggagatgctctgctcccacacctcgggcagctcagacygaattactccgccggggtattcttttccctttccctctccgggttggagcgtcatggtcagattatctccctttggttcctttcattttatcctaaataacgatatcaaaacgggcacgcagaccccgactgatgcatatccgagtcaccaaacctctgcttccccactataatctgatgaggtagagtttgtttaattgccgaagaacacgactgtattttgattagcagctttgagtcatttgtggggaagggctgaggcggaggagctgaaatccttgtagggaaatctgatgtggc

SEQ ID NO: 16688 - DNA, 600 bp, Chicken  19866894224180_1
atctcaacaatgctgggaaatgatggacaaaaaatcttctttggtaatagcaggtactttctgaaaacctagtgaaaagagaacataagtcaccagtgagtcaccgggagatgtggcctacccttgtgcagtcgcaaacgaggaacactgctattgttgtttcatttctgcatagtgtgtgtagtgctacgggcgagtctgtctccctgcacagtcagttttgtggggactgtgagagcccaccgctgcttctccttctgattatgggctgtcttatgcttctgtgtttggacactaacrctgagtttacttgakcttcaacraataaaggccagacctatattcaggctctaaggaatgggtttgatcaagaaggtttaattcccatggagaagaataacatgtaagagcctcattagacgaacagttagaggtattaagtcctagtgtttcctcaagcagggaaaaactaaacacactaactgacatatgtaaaatgttttctcaacacagctagttgacttctggagaacctcttagagagttcctcacaagccaaggcagtcagacttcagccaagattttaggaaattctgcaat

SEQ ID NO: 16689 - DNA, 600 bp, Chicken  19866894224180_2
ggaaatgatggacaaaaaatcttctttggtaatagcaggtactttctgaaaacctagtgaaaagagaacataagtcaccagtgagtcaccgggagatgtggcctacccttgtgcagtcgcaaacgaggaacactgctattgttgtttcatttctgcatagtgtgtgtagtgctacgggcgagtctgtctccctgcacagtcagttttgtggggactgtgagagcccaccgctgcttctccttctgattatgggctgtcttatgcttctgtgtttggacactaacrctgagtttacttgakcttcaacraataaaggccagacctatattcaggctctaaggaatgggtttgatcaagaaggtttaattcccatggagaagaataacatgtaagagcctcattagacgaacagttagaggtattaagtcctagtgtttcctcaagcagggaaaaactaaacacactaactgacatatgtaaaatgttttctcaacacagctagttgacttctggagaacctcttagagagttcctcacaagccaaggcagtcagacttcagccaagattttaggaaattctgcaatctgtatctggcagca

SEQ ID NO: 16690 - DNA, 600 bp, Chicken  19866894224180_3
tggacaaaaaatcttctttggtaatagcaggtactttctgaaaacctagtgaaaagagaacataagtcaccagtgagtcaccgggagatgtggcctacccttgtgcagtcgcaaacgaggaacactgctattgttgtttcatttctgcatagtgtgtgtagtgctacgggcgagtctgtctccctgcacagtcagttttgtggggactgtgagagcccaccgctgcttctccttctgattatgggctgtcttatgcttctgtgtttggacactaacrctgagtttacttgakcttcaacraataaaggccagacctatattcaggctctaaggaatgggtttgatcaagaaggtttaattcccatggagaagaataacatgtaagagcctcattagacgaacagttagaggtattaagtcctagtgtttcctcaagcagggaaaaactaaacacactaactgacatatgtaaaatgttttctcaacacagctagttgacttctggagaacctcttagagagttcctcacaagccaaggcagtcagacttcagccaagattttaggaaattctgcaatctgtatctggcagcaagggagac

SEQ ID NO: 16691 - DNA, 369 bp, Chicken  19866894224193_1
ttccagataccttcctgaggcctttttttcatcttatgcttttctgtttctctgttttgatataattcccattgatgttagtggttttctttgtggcacagtgtcactatgtattggcttatagaagcagtaaatcatgtggccaatcattgcaaagaattatatttaacaaaattacaaataaaatcttttttactttccagaacattccctgtcgtgccatttcaatgggtcagggccaggaagtccatgcaaggcgcctgttaaatcaatgcatgcaagatggaggatggctccttytacagaactgccaccttggcttagtgtttcttaatgaattaatggacaccatcacaacaacagaatcga

SEQ ID NO: 16692 - DNA, 600 bp, Chicken  19866894224198_1
ctttgctgcagcccccagtgagttcgtgtccatgaagtccatcttaatgaagtggaggaaagggtcttcaggaatataaaagatttccctgcttagcatggagctgagagcaatgtgaaaagagagcaagcggtgcaaggtagcggcaaagccctgtggctcctccagccccgctcgacagcaccgcgttgcactgctcctcgccgtgttgttcccccagtaaatgtgccggggcccttctacctctttatttctgcttccttggagctctgggcttgctggtatgtgaaaggagaaacrtaagcatatgttcggttgctcaatcaaccttctctcgatgcacactcggtgatctcagcgagtcattacggcataattacaatttgagtgtgatatgctgtttgtagaaaagtatctatttttagctgaaggaatgctacggtccctgaaaaggagaaagaaagaaaaaaaggaagggagaaaatctgtaaccagcaaatcaatgctattgttaactgatattatgagacaccctgtagatttacaatgcttgcatgcagccacataaacccgtgctgaaaagaatgcctaccaggggtt

SEQ ID NO: 16693 - DNA, 600 bp, Chicken  19866894224198_2
aatgctattgttaactgatattatgagacaccctgtagatttacaatgcttgcatgcagccacataaacccgtgctgaaaagaatgcctaccaggggttaaattcatgtgcctgcactgcagcctatttctgtcaacactcagctcaggaaataaacatttatgctttctgaaatgaaagtgtatttttgaagactagccgtcagatattttttgcccttcacactttcaaatgcttagccttttttgtaagttgactgcaaagtgcatcggtttgctaggcaaaaaggaaaaaaaaaamccttgacaagtgcccatggcatcattgtcaagcagaagagtttctggtaggagatggcaggagggttggcacagaacatgcttccttcaagcttattacctcrggggtacctgactcctgagaagcctttcagtccttccagatgacgttattcccggctgtcatctgctttatctggagcgctgctgcagccaagcactgccgagctgcggtcagggcgcggggccttcccaccagcacagcctgccaggcacaacatggcggcagtggggagggaagcgggagttgtcaccacgtgca

SEQ ID NO: 16694 - DNA, 600 bp, Chicken  19866894224198_3
tcatgtgcctgcactgcagcctatttctgtcaacactcagctcaggaaataaacatttatgctttctgaaatgaaagtgtatttttgaagactagccgtcagatattttttgcccttcacactttcaaatgcttagccttttttgtaagttgactgcaaagtgcatcggtttgctaggcaaaaaggaaaaaaaaaamccttgacaagtgcccatggcatcattgtcaagcagaagagtttctggtaggagatggcaggagggttggcacagaacatgcttccttcaagcttattacctcrggggtacctgactcctgagaagcctttcagtccttccagatgacgttattcccggctgtcatctgctttatctggagcgctgctgcagccaagcactgccgagctgcggtcagggcgcggggccttcccaccagcacagcctgccaggcacaacatggcggcagtggggagggaagcgggagttgtcaccacgtgcagcatgaggagggcactaaggtgcacggtgttgtgttttaaacagccactgtgaaggtgtgcacttaaaactccttcccagtaaggctcttgagggtatggagg

SEQ ID NO: 16695 - DNA, 600 bp, Chicken  19866894224200_1
aaaattgctctccaggtgcttctctctgcaaagacaggctggataactactgctaattggttgttaaagctttaagagctgaataaggtacataaaggtaaaataagggtggtgaggcactggcactggttgtccagaaatgaggtggaagccctgtccctgcagacagccaaggccaggctggatggggctctgagcactgatggagctgtgggtgtccctgtttagtgcagttcagtgagaccagatggcctttaaagatcaatccagctcaattgattctctgattctatgaatgastgagaaatgaaggtcccacctgttccctgtccaaaccttcagttttggagcacccctgcaggatgagatgagaagcaaacaacgtcatcatcagcattatttcacagacaacttagatcttgaggccagaacagtctgaagactgtaaggaaaaaccaaaccagctcaaactgcagataaagctccagcagctctacttgcagaaggaattgaaggtttggggaattaatcagtgtgcaaatacctggtttatgtaatgcagcagggtcagagtgctctgtcctggttgaaggatttatc

SEQ ID NO: 16696 - DNA, 600 bp, Chicken  19866894224207_1
agatgtggcacccagatacagtgcagtgccatagcatcatttttgtttgcttgtttgtttgctttctatgtaattcagataaacttcataatgaactgtctagaatggaaaggtgaaaaactgtttttttcacttgaagaaacaaaaaacaacaaaaaaattgtctttttctcactgaagaagtttagaagtttaaatacttttttgtattcagtaatttctttgcttctggatacaaagaatgtctttcagtaggcatttgctattgaaaaattgctgttaggagaattcagaatcctyagacttgaatctgtcagaaaagcttcaggttttaaaatgtgggatttatgacagtgctagtgactttctttcaacaacaacttacactgctgtttgtggtaaactggcctaaaatcattacttgttgtaagtttaatattgctgatgtgcagttcattttctttacatttgaaaatcagcaggcctagctttgctytttactatttcatrgattttccacatggcctcaaaagttttgtaacgttaggttgtggttttccttctttcttactgaggaggttttactcaaatcatttttct

SEQ ID NO: 16697 - DNA, 600 bp, Chicken  19866894224207_2
atacttttttgtattcagtaatttctttgcttctggatacaaagaatgtctttcagtaggcatttgctattgaaaaattgctgttaggagaattcagaatcctyagacttgaatctgtcagaaaagcttcaggttttaaaatgtgggatttatgacagtgctagtgactttctttcaacaacaacttacactgctgtttgtggtaaactggcctaaaatcattacttgttgtaagtttaatattgctgatgtgcagttcattttctttacatttgaaaatcagcaggcctagctttgctytttactatttcatrgattttccacatggcctcaaaagttttgtaacgttaggttgtggttttccttctttcttactgaggaggttttactcaaatcatttttcttctgtgtatgcatagcaggtggaagatggttattcaattgaaattctagcacatatatgaatttaatgctcaaattgtccatcattctctttccactgcctcactgaggctctgtaattacttttcctgtcagctccaacgctgccttggattttcaggagtggcatttrctcctaactctttgcacacagctatc

SEQ ID NO: 16698 - DNA, 600 bp, Chicken  19866894224207_3
tcagtaatttctttgcttctggatacaaagaatgtctttcagtaggcatttgctattgaaaaattgctgttaggagaattcagaatcctyagacttgaatctgtcagaaaagcttcaggttttaaaatgtgggatttatgacagtgctagtgactttctttcaacaacaacttacactgctgtttgtggtaaactggcctaaaatcattacttgttgtaagtttaatattgctgatgtgcagttcattttctttacatttgaaaatcagcaggcctagctttgctytttactatttcatrgattttccacatggcctcaaaagttttgtaacgttaggttgtggttttccttctttcttactgaggaggttttactcaaatcatttttcttctgtgtatgcatagcaggtggaagatggttattcaattgaaattctagcacatatatgaatttaatgctcaaattgtccatcattctctttccactgcctcactgaggctctgtaattacttttcctgtcagctccaacgctgccttggattttcaggagtggcatttrctcctaactctttgcacacagctatcaaccatattaaata

SEQ ID NO: 16699 - DNA, 600 bp, Chicken  19866894224207_4
gaaaatcagcaggcctagctttgctytttactatttcatrgattttccacatggcctcaaaagttttgtaacgttaggttgtggttttccttctttcttactgaggaggttttactcaaatcatttttcttctgtgtatgcatagcaggtggaagatggttattcaattgaaattctagcacatatatgaatttaatgctcaaattgtccatcattctctttccactgcctcactgaggctctgtaattacttttcctgtcagctccaacgctgccttggattttcaggagtggcatttrctcctaactctttgcacacagctatcaaccatattaaatacaacatccccaagttgacttatccggttgtacttgttggaacagttctatggcatttattcaagggagtaaggaattgcttttgcaatcatggcttggcaaagagtaaactagaaaaggatgcccagaygagaatgaatctgtcagataaattttcttcttgctcgtaatgctgaatttattttgtcagcttcttgaggaagtggaacatacagatgtttgatacttagctggaaagtgaaattcatttatcttcctgag

SEQ ID NO: 16700 - DNA, 600 bp, Chicken  19866894224207_5
gaaattctagcacatatatgaatttaatgctcaaattgtccatcattctctttccactgcctcactgaggctctgtaattacttttcctgtcagctccaacgctgccttggattttcaggagtggcatttrctcctaactctttgcacacagctatcaaccatattaaatacaacatccccaagttgacttatccggttgtacttgttggaacagttctatggcatttattcaagggagtaaggaattgcttttgcaatcatggcttggcaaagagtaaactagaaaaggatgcccagaygagaatgaatctgtcagataaattttcttcttgctcgtaatgctgaatttattttgtcagcttcttgaggaagtggaacatacagatgtttgatacttagctggaaagtgaaattcatttatcttcctgagacaaaaagaaaaaaaaatagtctgcttcacttcttaccattctctgctgaccaaacttggaggacagcaaggcacctctttgtcctggtaaagccacctaagatagggtttgaaggttaccaggagctgaaagggcatgaatatttaattgaaataaaatattgtctct

SEQ ID NO: 16701 - DNA, 469 bp, Chicken  19866894224213_1
gcaaaatttgagtggcaggaaaaaaaaacagcagaagataagggttttcattcacaatgcaatgtaaattaaaaaaccatggatacaaaggagtagaaacaagaaaggtaatataacaaacttacatttcaccctcatcattacaaggatcaaaacagggggcatacatcttcattctggtcagatggccactatgagaataaattacagtagctcatacaagaaataaaaatatcaaggactcggttatgtattaaattgaaacaaagcaaaccaagacaaaaaaataaaaaggaaaayaaaaaacaaatcacaaagtgttggtttccttttgttgttgatactgacttggtttttttgttcatttgtctaatgaacagcaaaaatatacatggaggtatggtataactccttttatatgctcatttgcctttaactttactgggagcagcataaagctctgagattt

SEQ ID NO: 16702 - DNA, 600 bp, Chicken  19866894224218_1
tcagaagagtccgatgtgagatgaagatttgtcttgcaacctctgtggtaggttaatcagtgctgattacaagcccagtacaatcccattaattggcaacagagaacaacaagagctgttcaacagagagcagccctgcatccttctccttgaactgtgaaattcctacatttcctagcggcatggcggggggctgtttaggaagaaaatagcgtgtaggtgtggtatgggccaaaagcaactgagctgcagataacagctacctgatgaatagcacacggtgttttgtgttgcttttcmcttctaaatgtggccatggtgcatgtgcagttcagtttgtatttcctcttcccagttggaagggagagagagcagatctactgagctgaggatttctgtgccgctgtccctgacggctgatggtgacataagctggctgtcttagggatttcacgtaagctgaagcttggaaggctgagctacacagaagaagcatcaaagcacacccagaagcccagaataggaaggagaagcagtcacacagactgaagtgtctcagaagtgctagaactgggcagcagattaaacataaattgctgt

SEQ ID NO: 16703 - DNA, 599 bp, Chicken  19866894224233_1
  misc_feature (1)..(117): n is any nucleotide
nnnnnnnnnnnnnnnnnnnnnnnnnnnnnnnnnnnnnnnnnnnnnnnnnnnnnnnnnnnnnnnnnnnnnnnnnnnnnnnnnnnnnnnnnnnnnnnnnnnnnnnnnnnnnnnnnnnnnatgtcattccttaagctttctcttcacctgctaccgcaacacgcttgcttggaacacagtgtgtttccatttttacaagtttatggagtgctatcattttgtgcatgagctatacttggtttctcagggaattgagggcacaaggagcaataaataacacagaaatagagaggagattgggcmtttttttttttttttaatatatgatggatttttatatatgagaacagagcttgagagtgctcagatttggcttttattacaagctcgccaactagccaccctaaaaacacaaaaagcagatagcagcaatagtctcaaatagctgcatcccaatgctgtctataacctgcactgatatattccagacatactggcacacaatgccatcctgtcccacccttgtcagactggagccctctgttctcctgcaagacagaggccaatctgaatcagttcaagctgatgcaaagcagctttcc

SEQ ID NO: 16704 - DNA, 599 bp, Chicken  19866894224233_2
  misc_feature (1)..(116): n is any nucleotide
nnnnnnnnnnnnnnnnnnnnnnnnnnnnnnnnnnnnnnnnnnnnnnnnnnnnnnnnnnnnnnnnnnnnnnnnnnnnnnnnnnnnnnnnnnnnnnnnnnnnnnnnnnnnnnnnnnnnatgtcattccttaagctttctcttcacctgctaccgcaacacgcttgcttggaacacagtgtgtttccatttttacaagtttatggagtgctatcattttgtgcatgagctatacttggtttctcagggaattgagggcacaaggagcaataaataacacagaaatagagaggagattgggctmttttttttttttttaatatatgatggatttttatatatgagaacagagcttgagagtgctcagatttggcttttattacaagctcgccaactagccaccctaaaaacacaaaaagcagatagcagcaatagtctcaaatagctgcatcccaatgctgtctataacctgcactgatatattccagacatactggcacacaatgccatcctgtcccacccttgtcagactggagccctctgttctcctgcaagacagaggccaatctgaatcagttcaagctgatgcaaagcagctttcct

SEQ ID NO: 16705 - DNA, 599 bp, Chicken  19866894224245_1
  misc_feature (1)..(141): n is any nucleotide
nnnnnnnnnnnnnnnnnnnnnnnnnnnnnnnnnnnnnnnnnnnnnnnnnnnnnnnnnnnnnnnnnnnnnnnnnnnnnnnnnnnnnnnnnnnnnnnnnnnnnnnnnnnnnnnnnnnnnnnnnnnnnnnnnnnnnnnnnnnnnagaacttctatagacataaacaggaagcaagcttgaaaaactctgatgagagtccatgaggccagatacaaaatctattcaccaacagttgacttgaggacaactttattttacttggctgcctaaaaccagacaagtcagcaaataaaaatatgtgtraagcaggtactagaaatgaattcaattaatttgcaaaaagaagaaagagcaacgatgatggacaccttcagtarcgaaataggtggaacaaatcctatcacactgcctctgtctcactccatccacaacatcccaccagtctgcacctcatcagcagttaaggaagaattggttgcaccaatgagtggcagcagccaggttgccagattgttttcatttgcttctgactgctcaggactcatgtcaattagcgcaacgtaatcagtatttcattaaaaaggtaatcaaagacctaactc

SEQ ID NO: 16706 - DNA, 599 bp, Chicken  19866894224245_2
  misc_feature (1)..(67): n is any nucleotide
nnnnnnnnnnnnnnnnnnnnnnnnnnnnnnnnnnnnnnnnnnnnnnnnnnnnnnnnnnnnnnnnnnnagaacttctatagacataaacaggaagcaagcttgaaaaactctgatgagagtccatgaggccagatacaaaatctattcaccaacagttgacttgaggacaactttattttacttggctgcctaaaaccagacaagtcagcaaataaaaatatgtgtraagcaggtactagaaatgaattcaattaatttgcaaaaagaagaaagagcaacgatgatggacaccttcagtarcgaaataggtggaacaaatcctatcacactgcctctgtctcactccatccacaacatcccaccagtctgcacctcatcagcagttaaggaagaattggttgcaccaatgagtggcagcagccaggttgccagattgttttcatttgcttctgactgctcaggactcatgtcaattagcgcaacgtaatcagtatttcattaaaaaggtaatcaaagacctaactctgtgagagatttaaaatgttgtccattaacaccacatttgagtgctgtaattaaaccagactttcgctacgctt

SEQ ID NO: 16707 - DNA, 600 bp, Chicken  19866894224256_1
tataagtcacttctcaataatgaatgtttctgatacatgtcttttttctccttttgtccaggacatatgaagtaattttgcataataataatcatgcatgactgagaagtcaggcatttataaggggtgcaaaagaaagaaatcatgaataaaacaattaataaataccatttgttgctttatagcacagtgaaaggaaaacaaattaagacaaacagcataagcttttaaatgtgtgtattcatgtggcaaaatgctgtaggaaaatgtagcataaaaatcctatctgttctatctgcrgtgtcttaactacacaattgtcaactttgctttagacaaataattacaggttgcaacaacaacagaaaaatamcacaaacaaaaaaagatgaaagcagtttcatytgagagatctcttgcctcctgttttagagagtaaggataagagggaatgaaagcttgtagattttgtcttctgctgggacactgtccagcaccaacagctgacccactcctgtcggatacagcaggtaaaatttgacaggtgtcaacattttgggactgagggacttggagggatatgaaaagattgagactcag

SEQ ID NO: 16708 - DNA, 600 bp, Chicken  19866894224256_2
aattttgcataataataatcatgcatgactgagaagtcaggcatttataaggggtgcaaaagaaagaaatcatgaataaaacaattaataaataccatttgttgctttatagcacagtgaaaggaaaacaaattaagacaaacagcataagcttttaaatgtgtgtattcatgtggcaaaatgctgtaggaaaatgtagcataaaaatcctatctgttctatctgcrgtgtcttaactacacaattgtcaactttgctttagacaaataattacaggttgcaacaacaacagaaaaatamcacaaacaaaaaaagatgaaagcagtttcatytgagagatctcttgcctcctgttttagagagtaaggataagagggaatgaaagcttgtagattttgtcttctgctgggacactgtccagcaccaacagctgacccactcctgtcggatacagcaggtaaaatttgacaggtgtcaacattttgggactgagggacttggagggatatgaaaagattgagactcagagcaaaactgtcaagctttattgcacatgccatcagaattatcctccaaatttaatggagcagatgttgccca

SEQ ID NO: 16709 - DNA, 600 bp, Chicken  19866894224256_3
gaagtcaggcatttataaggggtgcaaaagaaagaaatcatgaataaaacaattaataaataccatttgttgctttatagcacagtgaaaggaaaacaaattaagacaaacagcataagcttttaaatgtgtgtattcatgtggcaaaatgctgtaggaaaatgtagcataaaaatcctatctgttctatctgcrgtgtcttaactacacaattgtcaactttgctttagacaaataattacaggttgcaacaacaacagaaaaatamcacaaacaaaaaaagatgaaagcagtttcatytgagagatctcttgcctcctgttttagagagtaaggataagagggaatgaaagcttgtagattttgtcttctgctgggacactgtccagcaccaacagctgacccactcctgtcggatacagcaggtaaaatttgacaggtgtcaacattttgggactgagggacttggagggatatgaaaagattgagactcagagcaaaactgtcaagctttattgcacatgccatcagaattatcctccaaatttaatggagcagatgttgcccatgggattatgacctttaccctgatgttcaggt

SEQ ID NO: 16710 - DNA, 600 bp, Chicken  19866894224257_1
ggtgggcaggacgtggcaaggagggggcatggggtggggggctgctctgggagagccggggcactctctgcttcattttgcttcagttataactctgtcttgcatagttttcttccactttatccttattctataagaacatgtcttcattcctgaaaggctgtttgggacttaaaaaataaaaccctagaaacaaacaagcagaaataaagagcacccaaatcacgagacttagcaactgtgggtgcccatccctgcaggtgccccaggccacgggtgggccctgggcagcctgagctygggggcagaggtggggctgggggctgtgaggtccctccaacccaactgtgctgtgattctgtgattttggcatcccagcagagcagccccgtccaggtggcaaaaggcagctggcagcgcccccctgcagagacggccctatttcctggctctttgggcactgggaacgttgctcccccagccagggtcccctctgtgagcctctgggccagtgctgccctgggaaatgagagaaggaaaaggttttagaaaagaaggcgagaatggagatttgtgctcgggtttgatcttcgcttccag

SEQ ID NO: 16711 - DNA, 547 bp, Chicken  19866894224257_2
gcccccctgcagagacggccctatttcctggctctttgggcactgggaacgttgctcccccagccagggtcccctctgtgagcctctgggccagtgctgccctgggaaatgagagaaggaaaaggttttagaaaagaaggcgagaatggagatttgtgctcgggtttgatcttcgcttccaggcaagcaaaccttgccaggagcagattatagccttggatacgcgggtacattgctgcggagaggaaaagctttgggctcagagctgaggctcagggccatcggggtgagctcccaccsgcgggtgctgcagacattggctcagcaggagctgtcctcatycatgctttgttttgttgcaccccttcattttttcctatcccgatgcaaactgaatctgtggactcgttgtccacagatggaaccccagagaaagcagcttcacatttgtgtgctggcagctcggtgctggagcccggtggagacgttcagcaccagcagtttgggcagcccaggtgccggagtcgtcatgttcatacagaactca

SEQ ID NO: 16712 - DNA, 505 bp, Chicken  19866894224257_3
ctgggaacgttgctcccccagccagggtcccctctgtgagcctctgggccagtgctgccctgggaaatgagagaaggaaaaggttttagaaaagaaggcgagaatggagatttgtgctcgggtttgatcttcgcttccaggcaagcaaaccttgccaggagcagattatagccttggatacgcgggtacattgctgcggagaggaaaagctttgggctcagagctgaggctcagggccatcggggtgagctcccaccsgcgggtgctgcagacattggctcagcaggagctgtcctcatycatgctttgttttgttgcaccccttcattttttcctatcccgatgcaaactgaatctgtggactcgttgtccacagatggaaccccagagaaagcagcttcacatttgtgtgctggcagctcggtgctggagcccggtggagacgttcagcaccagcagtttgggcagcccaggtgccggagtcgtcatgttcatacagaactca

SEQ ID NO: 16713 - DNA, 600 bp, Chicken  19866894224258_1
gagattccaggtagactgaggggttatttttttgtatgggcactgtgctaaccggtgacaaactattgccacccacgatctttatttttctccccaccactcaaagcctctattgtgatgggacaaatacccgagctccatcaggaccatgtgagcctggttactactgtacaggaggtgccaaaagtgctcttcagcatgtggtcatggaagggcattattcctctgcaggagctttcaagccagagccgtgtcctcctggcagcttccagcctgtgagtattagagtagcatgcactmtaagatgctcgtggggtcttcagagccattgtacaggggtgtgaatagtcatttgtgaagtgttcataagtagatagcttaaagaaagagggacttgggttttctggtaagctgggcagtcaccaccatccttgcttttgccttgcagcagcagtgctgtgcagagctagaaagactggggatggaacaccagatccaccagttcagcatggttccttgaagctaatcaggcagtttttcctaagttttgtgcagtgccagtttagcagtgggttgaggaagctttactctagcataggt

SEQ ID NO: 16714 - DNA, 600 bp, Chicken  19866894224266_1
agagacttacagatttttcagctgcaaaagtcaacaggatatagagcagcatcaagtctataagccaaagaggcaaatggaggagcagctgggctttgtgttagaggagtgtattggtggcaggttagcagggagagatggaccttccctgttcttctgggacacgatcaactgtaccattctatacgaagccatggctgagcgtatctcaagcatggcagtgcttccttcccctggaagactgctgtttcaaagcactaccttttggtttttcattatcacccaatagcggggagcacrctgacctgtgtcsaagcatgaagacctgacatggagacatagggacagccaaagttcgaatcctgcaggacatttcctacgtgctgtctgtaggatctgaaccttggatctaccacccaaaagccaacccatggacttgggcttgtatgtagccccacaaaggggggacgagacacagctgcccttcttcactactatttccattagctcagctggttatgaatcataatcatcactgacactcatggactgcttgcaagaccactgttctctgctctgcatggagtaacccaaggagaa

SEQ ID NO: 16715 - DNA, 600 bp, Chicken  19866894224266_2
tttttcagctgcaaaagtcaacaggatatagagcagcatcaagtctataagccaaagaggcaaatggaggagcagctgggctttgtgttagaggagtgtattggtggcaggttagcagggagagatggaccttccctgttcttctgggacacgatcaactgtaccattctatacgaagccatggctgagcgtatctcaagcatggcagtgcttccttcccctggaagactgctgtttcaaagcactaccttttggtttttcattatcacccaatagcggggagcacrctgacctgtgtcsaagcatgaagacctgacatggagacatagggacagccaaagttcgaatcctgcaggacatttcctacgtgctgtctgtaggatctgaaccttggatctaccacccaaaagccaacccatggacttgggcttgtatgtagccccacaaaggggggacgagacacagctgcccttcttcactactatttccattagctcagctggttatgaatcataatcatcactgacactcatggactgcttgcaagaccactgttctctgctctgcatggagtaacccaaggagaaaccagaggcttct

SEQ ID NO: 16716 - DNA, 599 bp, Chicken  19866894224267_1
  misc_feature (1)..(17): n is any nucleotide
nnnnnnnnnnnnnnnnntgctgctggctgtccctgtatgtcagttgcagctctatatagtagctctggcattgtcagcagccttctagcaaggagggcaccttctgccaggggcacggtggcattgtttcagctgtgtgacctcttcttctgcatctgtcccatcatttcttgaggtctgtttctcagaaacttgcttgcatttttttggttgttctcacaatacagtataattatttttctactgcatttagaacaattaaactggttcaacatctcctgatagcactaaatagaaaawtttcagtatttagtatgtgtggcccttccatttatagatctgtcagggaggctgacctgaaaatacagggacacgttgggagtgtggtatgttatcactttgtatcattygtgtctaatcctcattatgcacattgtattatttatatagtacatcctcttcatgatgactgtaaacatttaataaaacatacttaagatgttttaaggttgcatatggtaagcgttgcagtaacagtaaccactgaagtttcacacagcaataatgaatcatctctcataaccaaaggacactatgtg

SEQ ID NO: 16717 - DNA, 600 bp, Chicken  19866894224267_2
gggcacggtggcattgtttcagctgtgtgacctcttcttctgcatctgtcccatcatttcttgaggtctgtttctcagaaacttgcttgcatttttttggttgttctcacaatacagtataattatttttctactgcatttagaacaattaaactggttcaacatctcctgatagcactaaatagaaaawtttcagtatttagtatgtgtggcccttccatttatagatctgtcagggaggctgacctgaaaatacagggacacgttgggagtgtggtatgttatcactttgtatcattygtgtctaatcctcattatgcacattgtattatttatatagtacatcctcttcatgatgactgtaaacatttaataaaacatacttaagatgttttaaggttgcatatggtaagcgttgcagtaacagtaaccactgaagtttcacacagcaataatgaatcatctctcataaccaaaggacactatgtgcttgaatatgctgaatgtgaagtaatatgtactaaaagcagtagttcaaaaatacatttctagtttgtaggatggtagttcaataataatctcttctaccatcaatgggat

SEQ ID NO: 16718 - DNA, 600 bp, Chicken  19866894224270_1
attgttagcaccagtcttgtaagcataagatcaaataatttgatttttttgttaatgttccagactacatcagaaagcaggcatgaatatccacctccacttcatagacaaactagggcagaggagaaatgtttcccctccagtcacgtgacagagcaatgtgagggtcaggaacagaagctccgtcccttgaatagacgtcttgtcctctctctattgcaccatgcaacttctctgagattcattgctatcactgttgtagaacgtgtgctagtagactgaagatcttctagtttctgrgacagaacactggaatttgccacagatttcacatagtatggcctctcaaaaccaaaggtgaaagtatttcttaagaattagaaaaaatatatttyctctctgaaaaatgaatacttaatttgaagctgctatgtatttgtctaagaaaaaaaaaagagaataaacattttcctgaacatagtctgtctttattagttgtatcaggccacacaagttcagttacttacactcccaggatgattaacaaacaaacaaggtttgccaattaaatatctccgtgcaccacactcatgtgtaaca

SEQ ID NO: 16719 - DNA, 600 bp, Chicken  19866894224270_2
tccacttcatagacaaactagggcagaggagaaatgtttcccctccagtcacgtgacagagcaatgtgagggtcaggaacagaagctccgtcccttgaatagacgtcttgtcctctctctattgcaccatgcaacttctctgagattcattgctatcactgttgtagaacgtgtgctagtagactgaagatcttctagtttctgrgacagaacactggaatttgccacagatttcacatagtatggcctctcaaaaccaaaggtgaaagtatttcttaagaattagaaaaaatatatttyctctctgaaaaatgaatacttaatttgaagctgctatgtatttgtctaagaaaaaaaaaagagaataaacattttcctgaacatagtctgtctttattagttgtatcaggccacacaagttcagttacttacactcccaggatgattaacaaacaaacaaggtttgccaattaaatatctccgtgcaccacactcatgtgtaacagtaagcactacacttctcacagtagatgcagaaatgcaacttatcactgaatggaaacctggaagacacattgctaaaaggctgtagccctggat

SEQ ID NO: 16720 - DNA, 600 bp, Chicken  19866894224271_1
atccagccagttccttacccagcaaagagtgcatatgtccaagccacaggtagccagctcctccaggagaatactctgggagtaatccttggttttgattttcctctttttccagctgataagatttctattttaactgtacttagaatattcagtaactgcctagtttttaggctatattgttataagcatttaagtatgtattttgtgaattgttttgagaaaatttgtgagggctaccagtgacagctgagtagcaaaacgttttccttttttcaggactaaatctgaataagagaragaaggcaaagtttgggatgatggttgaatgtactatggaatctcacagccagctcatgttacagcacttgcagtgtttgtgtttcattttttctgcttacggtctctgttctgtagaattctattttcaaatacttatttgttggacagttgaaatgatgtaagataatagttcttattatttctaaatatgattctcattagccacaaatatgctgtcacaagttagaattccacaattttgaaagaaactaaaatggaacttccttttaaaattattttcgtcccataaatttactt

SEQ ID NO: 16721 - DNA, 600 bp, Chicken  19866894224276_1
gccttcttccagaacgctctcagctctcaagagctggggcctcaccgtcacaatgttcagaaacttccaggagagcagaatgtagcttcacagcgacatatgttatccgatcagcctaagaaggagcaagaccctcgctctgcattttctgttgcccgctcacaaagtctcctaggcacagatagcaagcaaacccagcatgagcccatcacatttgacacagagtttgtgaatattgggaaagatttcaattcctccactggcatcttctcatgccgtatacccggtgcatactatttytccttcaccattggcaaaatgccctttaagactatgtcagtgaaacttatgaagaaccacaatgaggtgcaggccatgatctatgatgacaaccactccaagaggcgggagatgcagagccagagtatcatgctgcctctgcagtacggggacaccgtctggctctacagccatcagcatgatggctatggtgcctacagcaaccacggcaagtacatcaccttcacgggcttcctcatctattcggagcctcagccaaagcggctcccgggtgccagctcactccaagggtcagaaaat

SEQ ID NO: 16722 - DNA, 600 bp, Chicken  19866894224278_1
tggcttcagctggagggaattaatttcaaagaacacatatttctccatatgaaagagaagagaagccaacatagatagagtcttgagaagagtttgaaatgtccaatgaccaaaagatctcctaaggctcagttcgtaattcaataggacaattcaaggaatttggtaagactcttcttctgaattctttctggtctggcagatcctctcttactacttattataaaagaaaaccagccacataacttaaccagagtgagctgccgccaacactcctccagtgctcctatctccaagacrtatcccatatccttggcatgagcaaacagaattgatatgtaaaaatgaagacttcacatgcagatagattatcatttttaataggcatcagaactgtcacttcattctttgtcacactgtctgggcaccagaagtccaaaatgtaaaacatctctctaaaataaaatactactgaaayggtctcttttgttccacgtgttaatrgtttaagaaacaacagagtatgtaaatttgcaatgaataggacattctatttttttttttccagtagaagagttcctttattcaccaagtctatta

SEQ ID NO: 16723 - DNA, 511 bp, Chicken  19866894224278_2
tctgaattctttctggtctggcagatcctctcttactacttattataaaagaaaaccagccacataacttaaccagagtgagctgccgccaacactcctccagtgctcctatctccaagacrtatcccatatccttggcatgagcaaacagaattgatatgtaaaaatgaagacttcacatgcagatagattatcatttttaataggcatcagaactgtcacttcattctttgtcacactgtctgggcaccagaagtccaaaatgtaaaacatctctctaaaataaaatactactgaaayggtctcttttgttccacgtgttaatrgtttaagaaacaacagagtatgtaaatttgcaatgaataggacattctatttttttttttccagtagaagagttcctttattcaccaagtctattaaagagtcatgctctattctgcagtttttatgagtgctgaaatccagatcagcaagatcagaatttactttgtattaaaatcaatatgca

SEQ ID NO: 16724 - DNA, 485 bp, Chicken  19866894224278_3
cctctcttactacttattataaaagaaaaccagccacataacttaaccagagtgagctgccgccaacactcctccagtgctcctatctccaagacrtatcccatatccttggcatgagcaaacagaattgatatgtaaaaatgaagacttcacatgcagatagattatcatttttaataggcatcagaactgtcacttcattctttgtcacactgtctgggcaccagaagtccaaaatgtaaaacatctctctaaaataaaatactactgaaayggtctcttttgttccacgtgttaatrgtttaagaaacaacagagtatgtaaatttgcaatgaataggacattctatttttttttttccagtagaagagttcctttattcaccaagtctattaaagagtcatgctctattctgcagtttttatgagtgctgaaatccagatcagcaagatcagaatttactttgtattaaaatcaatatgca

SEQ ID NO: 16725 - DNA, 600 bp, Chicken  19866894224282_1
cctttttaaagtactgctcaaactaaatgacactcatagctttaagtcatgtcgaagttcaccagctcagctgtttctggtctttctacagatgacattaagcaaaacacagtggggtcaggaacagaaagaagagttttgactttgctcctacctttcccagtgtttatgattcagctccaagaagtcatctaactttgcaatttctttgaggtactgagtgagctttagaagctccttgtctttatcccgatttaaatgtgctttcataaaaggccttatctattaaaaaaaaaaaargggggggttatcatcatctgctccaagtgagaaaaatgctcacagttctataacgtttaccacatagtgaaaatattgtcagtgctatgtcagatttttacctcttttaggtaagagaaagaaaaagaattkccattagcggtcacctccaatttgtctttttattgatgcaatctggatttcaggcatgctcaccaggaagaaatttgttctgtcaatctcgtatttcttcaagcctttccctcccagtcagtcagaatgataaatcratctgtgatggaccgtcacattttctaacat

SEQ ID NO: 16726 - DNA, 600 bp, Chicken  19866894224282_2
agagttttgactttgctcctacctttcccagtgtttatgattcagctccaagaagtcatctaactttgcaatttctttgaggtactgagtgagctttagaagctccttgtctttatcccgatttaaatgtgctttcataaaaggccttatctattaaaaaaaaaaaargggggggttatcatcatctgctccaagtgagaaaaatgctcacagttctataacgtttaccacatagtgaaaatattgtcagtgctatgtcagatttttacctcttttaggtaagagaaagaaaaagaattkccattagcggtcacctccaatttgtctttttattgatgcaatctggatttcaggcatgctcaccaggaagaaatttgttctgtcaatctcgtatttcttcaagcctttccctcccagtcagtcagaatgataaatcratctgtgatggaccgtcacattttctaacatgatttcatagatatttttgcaggagaaatgagggggtttcagctgtgctatgagctgtgtggctccttggaaccagatgcctttttttttttccccaacaaaacacatctgactacaatcatagcttctatg

SEQ ID NO: 16727 - DNA, 600 bp, Chicken  19866894224282_3
taaaaggccttatctattaaaaaaaaaaaargggggggttatcatcatctgctccaagtgagaaaaatgctcacagttctataacgtttaccacatagtgaaaatattgtcagtgctatgtcagatttttacctcttttaggtaagagaaagaaaaagaattkccattagcggtcacctccaatttgtctttttattgatgcaatctggatttcaggcatgctcaccaggaagaaatttgttctgtcaatctcgtatttcttcaagcctttccctcccagtcagtcagaatgataaatcratctgtgatggaccgtcacattttctaacatgatttcatagatatttttgcaggagaaatgagggggtttcagctgtgctatgagctgtgtggctccttggaaccagatgcctttttttttttccccaacaaaacacatctgactacaatcatagcttctatgacaagagatgtcagaagtaaagcttgtctgacaaccgctttaagcttggaatacattatacctgtgccttgttttagtgattcaacgttcttgtctgcagctctgttaataacattttgacaaacatctttgaaacc

SEQ ID NO: 16728 - DNA, 600 bp, Chicken  19866894224283_1
gttttactaccttatactggctttctggagtagataggtcaaagtgaatcagaacaggtggggacaaagtggattgaacgaaatataaaggggagtaagacaatgacgggggaaaagccccatcttgagaccatccagcattcattcagtaaccattctcaacccttggccattaagcagtttgttaaaagcctgtgtactttggtctgatgctcatccctctgtgctgccacactttttcttccatctttcagggtagagttggtgccataagaccatgaaaacatgcaccgtcttgamtctctgtcaggagtggaggtgaacacacattcactcacagctcacacgtgagtaagacatgccaaattcatgcaaagagaagaggagcatagattaatcaggatcttaatcgtagttcataacagcagggcttcggctgctttgctctagaactgcatgtctggatgtgaaaagaaattacatcccactgacttaaactcccctttaaacagtacccaccatcacacaagcaggtgtcacaggtgtcctaagcatctccagtggcatatgtgcaatcaaaacacaaatgtactcttctga

SEQ ID NO: 16729 - DNA, 568 bp, Chicken  19866894224285_1
cagtgtcttccgtggaagaaaaccaatccatcaaggaagcagccgttagcttcgggatctacggtatcgttataaacggggcttaagttacccgaaattgcgttctggctccgtctgttttaaagaagtcttaacagagagcccgtgtcaccgtacgccagctccttgaaggaaagcaaaaaataagagagcagcaagatggaagccaggagccgctcggttcgtccgaactcaggcccttttcctttcactctctgcacccctacggtattcctcacggcagcaccgcgctcacagcgrcaggctgctctgtgtcacaacactcgctgaggagcacagcgccgctgtgtcccaccgatccaacccagaaattcagcctggcggtcctgcccaggctctgcggaaacccacactcaccacacagaggccagaagcaagcagaagttacttccagctgagagcagcaaaaaaagagaagagagaaaatgaaggggacttcttgctctgagcaaggcctgtttctgaggacttcacattcaacacagcatcgtccctgcagttaaacttg

SEQ ID NO: 16730 - DNA, 600 bp, Chicken  19866894224291_1
tttttacactgcctgtccctaggaagccatagataagtaatgaaaacataatgcaaatactgtatctcacatatgcatgcatgcaaatcaaagtacaactttcatgcaaactagataatgcacttctgaatgtgcttaagtaggatatatatgctgtctctgaggaaagaaaaattatgctgctaataccatgactgtccgaggcatcctcaaaggaacagcaaagaacaagaaaactgaagcggaaacagaatggcacaacaactactttctgtaaaaattaaaaataaataaaataargacagcacactgtttggaaacatgaattgcaaatgaagatggagctcataaaaaaaacagcagaatcctgtaagctgttccaaagacatcagcattgatatttgtgacactatcttctgaacccttgaaagtaacaatactgaaggaaataaaggtatgctaaacaaggctatggagcatcgaacacacagcaaccgattaaccagagtaaaaaaagaaaaagaagaggaaagtatgtattgtcaaagttgtaatacacaagaagcagcccttccaaagagaatgagaaatacccacaac

SEQ ID NO: 16731 - DNA, 534 bp, Chicken  19866894224295_1
gctgggcagcagaggctgaacctttttctcagcagagattactcagtgccacccacatcatcagagcatcacccacagcaacgctgcttctcctttttcaaagaaaacgtggcttcttttgcacacgttgtgtgtagttgggaaacctggtcgtggtttgcagggactgtttcagctgcccaatgcctgcaagccatagaggtattccgcacccaaccctgggtggcatatcccactcgtgctctcggcagctccgttatttctttgcgacaacagagggcaccagcggcccttgcttastgcagggctttgccctcccgggctccccgggacatgcagggctgctcctgcgccttcggatccgtgggagaaagcagccctaacaccatgcacatcctgttcctcaggtctgggaagatgcgtgcggtgcagcaggtggtttgctcccactgggcctgcgttgggtgtttgtgaaaatgtgcaagtctgtaaagagcagtggtttggacacagcggcaaaggtgcaacagagca

SEQ ID NO: 16732 - DNA, 600 bp, Chicken  19866894224298_1
tgtatttgaatttctcatcttaatgcaaaatttgctattttcatttgagtattgatcacttatgtgatgtgaatataaatctccatatatatttataatgtaacccttacattttactttcagaatgttcctatgacaacctttgctcaaaactgtatctaaactatgaaccatgttaaactacgaagcttaaagttagaacactgaaaagaaaaacaagtggatgtatctgaacatcactgaagtaaaatattaagcacaaataggctaaagataaattcagaaaattccaactgaatrgttttatgaactccagtcccaagttataataacaaataaagaacaaactagctcaattctttgtttaataaaaaaaatggtaaaattacaaatttgttgctccagatggaacagttttkttacactgcaacttgctcaaatgattagcaagaaaatttctttctaacatccataaaatattagtccatatgcatatacatgctctcataagcacagcacgcatatctatttatactttttttttacactctaaatatgtataaacatcatgtgcatgaatacaagtatctctatgggctt

SEQ ID NO: 16733 - DNA, 600 bp, Chicken  19866894224298_2
tcagaatgttcctatgacaacctttgctcaaaactgtatctaaactatgaaccatgttaaactacgaagcttaaagttagaacactgaaaagaaaaacaagtggatgtatctgaacatcactgaagtaaaatattaagcacaaataggctaaagataaattcagaaaattccaactgaatrgttttatgaactccagtcccaagttataataacaaataaagaacaaactagctcaattctttgtttaataaaaaaaatggtaaaattacaaatttgttgctccagatggaacagttttkttacactgcaacttgctcaaatgattagcaagaaaatttctttctaacatccataaaatattagtccatatgcatatacatgctctcataagcacagcacgcatatctatttatactttttttttacactctaaatatgtataaacatcatgtgcatgaatacaagtatctctatgggcttctttgtctcagaacttcacctttccctctgattcttggcagctttcttgatggcaataatgaaaaattagagataataccgtctacagtaaagaatttggaattctgccttgctcattt

SEQ ID NO: 16734 - DNA, 600 bp, Chicken  19866894224298_3
tcactgaagtaaaatattaagcacaaataggctaaagataaattcagaaaattccaactgaatrgttttatgaactccagtcccaagttataataacaaataaagaacaaactagctcaattctttgtttaataaaaaaaatggtaaaattacaaatttgttgctccagatggaacagttttkttacactgcaacttgctcaaatgattagcaagaaaatttctttctaacatccataaaatattagtccatatgcatatacatgctctcataagcacagcacgcatatctatttatackttttttttacactctaaatatgtataaacatcatgtgcatgaatacaagtatctctatgggcttctttgtctcagaacttcacctttccctctgattcttggcagctttcttgatggcaataatgaaaaattagagataataccgtctacagtaaagaatttggaattctgccttgctcattttgtctctcacacacatatacattctcacagaataaccttagtatgaatctcacaaggaaaaaaaaaaacatattcctaatgatgctgttgtcatcctctatcctctagaaatgttat

SEQ ID NO: 16735 - DNA, 599 bp, Chicken  19866894224304_1
  misc_feature (1)..(119): n is any nucleotide
nnnnnnnnnnnnnnnnnnnnnnnnnnnnnnnnnnnnnnnnnnnnnnnnnnnnnnnnnnnnnnnnnnnnnnnnnnnnnnnnnnnnnnnnnnnnnnnnnnnnnnnnnnnnnnnnnnnnnnnaatgcagtttgcctgcatctgacaacagaaaatgccctttgcatttaaaacaatgaagtatttttgtgtgcttgtttttacaatgtgtttgttctttgtacttgctgccctttgggaattcttgtaactctagggctttctcccttccttcctgacccactggacgcaacaaggagacccygcatgctgtgggatgggctgcagagcagtttccagatcgtgcctgagagaagatggatgcagaatacaaaacgaagcagcagatccacctccaatattacaagaaccagatgggaaaggtctgggaattcaatggacacaaccctggcgtgtgcactgggcaactgccagctttgccctttagggaatgttagccagaaaagcaaattcctcacttcccttacctgaattaacgatcatgggatggagagcagtgtgatgtggagatggtgctgtctcattgctcccaagatagatttt

SEQ ID NO: 16736 - DNA, 600 bp, Chicken  19866894224306_1
ctgagggggaaggaaaccgaggctcatccccccccctccccgatgcagaggatgggaactgctgaattcacagcactgctgcttcttctgacccagttccccattccgccgcacgtcactccgcgttgccccacgctcctcgctccattttgcacgccgctcccctgcttcttcatgcgagcaggaacaaagcagggcaggcagaagcatggggcaaggcaggaggaaaacagctgcagtttcctctctcctccacttacgctggttttgctgccgtgcagctggagcagagcttgcctrtcctccgttgggcrgccttctctggaaggagaggacccaaccacctgtttgcaccmggtccagccccaaaatgagcatctgagcaacgccacactgggacaaagcttcagttctaccctggggggggggaacagagcccataaacgacagcatcactcccaccggtcctcgtgggctcccatgggcagctcgcagccctgcctccagccagatcacagctccagcagcacggaaataactcacatccacctcgctacgttgggcacggcaccagcgagcggcacacgctgtcagtgaggg

SEQ ID NO: 16737 - DNA, 600 bp, Chicken  19866894224306_2
aaccgaggctcatccccccccctccccgatgcagaggatgggaactgctgaattcacagcactgctgcttcttctgacccagttccccattccgccgcacgtcactccgcgttgccccacgctcctcgctccattttgcacgccgctcccctgcttcttcatgcgagcaggaacaaagcagggcaggcagaagcatggggcaaggcaggaggaaaacagctgcagtttcctctctcctccacttacgctggttttgctgccgtgcagctggagcagagcttgcctrtcctccgttgggcrgccttctctggaaggagaggacccaaccacctgtttgcaccmggtccagccccaaaatgagcatctgagcaacgccacactgggacaaagcttcagttctaccctggggggggggaacagagcccataaacgacagcatcactcccaccggtcctcgtgggctcccatgggcagctcgcagccctgcctccagccagatcacagctccagcagcacggaaataactcacatccacctcgctacgttgggcacggcaccagcgagcggcacacgctgtcagtgagggcagtgccccgaagg

SEQ ID NO: 16738 - DNA, 600 bp, Chicken  19866894224306_3
aactgctgaattcacagcactgctgcttcttctgacccagttccccattccgccgcacgtcactccgcgttgccccacgctcctcgctccattttgcacgccgctcccctgcttcttcatgcgagcaggaacaaagcagggcaggcagaagcatggggcaaggcaggaggaaaacagctgcagtttcctctctcctccacttacgctggttttgctgccgtgcagctggagcagagcttgcctrtcctccgttgggcrgccttctctggaaggagaggacccaaccacctgtttgcaccmggtccagccccaaaatgagcatctgagcaacgccacactgggacaaagcttcagttctaccctggggggggggaacagagcccataaacgacagcatcactcccaccggtcctcgtgggctcccatgggcagctcgcagccctgcctccagccagatcacagctccagcagcacggaaataactcacatccacctcgctacgttgggcacggcaccagcgagcggcacacgctgtcagtgagggcagtgccccgaagggccgcgcgctccgggcgggcagatcggatggccgtgggaaaa

SEQ ID NO: 16739 - DNA, 600 bp, Chicken  19866894224309_1
ttgttagcagagcttaggaatatttttgcattgataagaagtgagaagacttgatcttttgtttgcttggtttttatatctctaaggagaaattctgccagtgtaaaaatcattctcccactaatttcaacagtactcaatttctgaaatatataatctcattacacactgatctcttttgcagttctggtatgcttgcatcaaggtaattgacaaaagctagacacagcactagtggctgaaaggaaacatgatcaagagtgtaagttaagcagctcaccagctccccattttccaagyctgctgtatwgctgcagagagatcagaaagctcagagccgaaccagaaccacaccacatgtggttatctcctgtgtgcatgaggaggctgtacaatacagccattttctgaaaacctgtcatctgtccatgagatgaggatacatacataaagaaccctaaagatcaatcatcacagacttgaagaagattaaaaaaaataaatcaccgaagtatgtttcatgtgttattctttgatggcccaaattcatatttggctacctaaattgtccacttaaaagcacacctgctcctactcatt

SEQ ID NO: 16740 - DNA, 600 bp, Chicken  19866894224309_2
agcttaggaatatttttgcattgataagaagtgagaagacttgatcttttgtttgcttggtttttatatctctaaggagaaattctgccagtgtaaaaatcattctcccactaatttcaacagtactcaatttctgaaatatataatctcattacacactgatctcttttgcagttctggtatgcttgcatcaaggtaattgacaaaagctagacacagcactagtggctgaaaggaaacatgatcaagagtgtaagttaagcagctcaccagctccccattttccaagyctgctgtatwgctgcagagagatcagaaagctcagagccgaaccagaaccacaccacatgtggttatctcctgtgtgcatgaggaggctgtacaatacagccattttctgaaaacctgtcatctgtccatgagatgaggatacatacataaagaaccctaaagatcaatcatcacagacttgaagaagattaaaaaaaataaatcaccgaagtatgtttcatgtgttattctttgatggcccaaattcatatttggctacctaaattgtccacttaaaagcacacctgctcctactcatttgagaaaatt

SEQ ID NO: 16741 - DNA, 600 bp, Chicken  19866894224320_1
aaatgactgtcttaaaatgtttaaactcagaatttttattctaaaatactttgtgagctctcaaccatttcaacacgattgtcttaaagagatatcaaataaaacagaaataactttagtataatatgttgcatttgtaaatactcacaagcttaatacttaacagatcatgcaggtttatcagattggattacttggatttcttgtccagttggacaggacgggcatttgagcagtggcaggggagaaggggtgaggagtgaatggccagtgtgtgtgccctgagaatgtgcttgctgrgagagtcttcagtgggctggagcacgtctgaaaagcaccacacctacattttctcctgtcccttcagtggcagggaagggtacaaagaaggtcaggaaacccccctcataagtaaatggcgtagaggttggtgcaaacagaagaattttggtttctttgaccatggggtaatttactcagcacctggcatgatggctgcagatggaaactcacctgtctcctaggggtgtagaagggtcccagcccaggaactggcgggactcactgaaaggtctttaaaccaggtgttacgggggaagg

SEQ ID NO: 16742 - DNA, 600 bp, Chicken  19866894224325_1
ccttcctcttggagcccttctatgagcccagggcacgggtaagatctttacttcattacacttttgtaatgcgataatctctctggtccaatacctgtatacctgtttgccgtacataaggaggcataacatattctgtaatcttaatggtaggtatcatagaatcatagaatggcctgggttgaaaaggaccataatgatcattgagttttaacccccttgctatgtgcagggccaccaaccactggaccaggctgcccagagccacatccagcctggccttgaatgcccccagggatrgggcatccacaacctccttgggcaacctgttccagcgaagagcaaagaaaaatttctacagaaaggtaaagaatgtccagtattggaaaatccagaacattccrtaatttttagtggctttttattttttatctctccagtcttcactaaaaagcctaattggttaacacaattaacacatatggaaatagaggtaaaaatcatgtagtttaagaaaacaaaaggcaagagatttgtgagatgttttcaagtttgctcagccaagtaaaattcacagtagggggcacagcaaactgaatg

SEQ ID NO: 16743 - DNA, 600 bp, Chicken  19866894224325_2
gtttgccgtacataaggaggcataacatattctgtaatcttaatggtaggtatcatagaatcatagaatggcctgggttgaaaaggaccataatgatcattgagttttaacccccttgctatgtgcagggccaccaaccactggaccaggctgcccagagccacatccagcctggccttgaatgcccccagggatrgggcatccacaacctccttgggcaacctgttccagcgaagagcaaagaaaaatttctacagaaaggtaaagaatgtccagtattggaaaatccagaacattccrtaatttttagtggctttttattttttatctctccagtcttcactaaaaagcctaattggttaacacaattaacacatatggaaatagaggtaaaaatcatgtagtttaagaaaacaaaaggcaagagatttgtgagatgttttcaagtttgctcagccaagtaaaattcacagtagggggcacagcaaactgaatgagaccatccaaagtcattaacatttatatctgagaactcatgcagaatgaataaagttccaaaagactgtaaaaggacaaaaatagcactgatctttgaaagcc

SEQ ID NO: 16744 - DNA, 511 bp, Chicken  19866894224327_1
ggagataacctatccaccaatcagtttaatttcatactttttctcctcttttatatttactcatttttctcttttgatagcaaccttttttttttttcctgcatggtctttgctcttagtggtccaagtgtcctctatttgcctttttctctctagcatttggaagatcttcaatctgatgataaaaacagcttattttttcctttttgacttatttaaattctgtcctgtttactttcttctaaatctttgccactgcagtcttttgagtgacccagcaccagcaaccaaggatctctktgtcaaagaggggaaaaaagccactgaagtgatttatttgagctttgggctgaggccctctgttagggagctacttttctgcattttcaggatggagattttgatgtagtattaatgtacagttgcagttctttttgcagtttgtctccagtgaatttctcattgtataggatcatacttctgcgatttccagtttttgctatttgttttt

SEQ ID NO: 16745 - DNA, 600 bp, Chicken  19866894224334_1
gagaaaaatcacacctacagtcaagtaagaaacagaaaaccaaaggtaaaacatgcagataaaacatccgggcgctgacttgcatagttacttaacaaagcttgtgtctataaatacatttcaaggttgctattgccaacacaactgtaaatatttaaaaagaaacacatggtagcccttggactaaggcacccatttctccacacccagcagagaggtttgcctttatcacagtgtgtatcagagcattagttcacccttggaactcctcatacgtgacatgaaatacgcttcaatcasaagaattagraaaaaaatgttctttggcacgagttttgattttaatacacatccaatccaatcgcagggaaataatttgcattagtatacgcttcctcttagagcttacagataactttcttcaccctccaagaagcagaagcaaatcagataacagcagcctgaagttccttcttgtgtacaaacactrcaagtttgttttgcttccccataactacagtcttctctccatggctcccactgcaatscaaacttcctggtttgagtaagaagtctaatcttaatgacaccagtataata

SEQ ID NO: 16746 - DNA, 600 bp, Chicken  19866894224334_2
acacctacagtcaagtaagaaacagaaaaccaaaggtaaaacatgcagataaaacatccgggcgctgacttgcatagttacttaacaaagcttgtgtctataaatacatttcaaggttgctattgccaacacaactgtaaatatttaaaaagaaacacatggtagcccttggactaaggcacccatttctccacacccagcagagaggtttgcctttatcacagtgtgtatcagagcattagttcacccttggaactcctcatacgtgacatgaaatacgcttcaatcasaagaattagraaaaaaatgttctttggcacgagttttgattttaatacacatccaatccaatcgcagggaaataatttgcattagtatacgcttcctcttagagcttacagataactttcttcaccctccaagaagcagaagcaaatcagataacagcagcctgaagttccttcttgtgtacaaacactrcaagtttgttttgcttccccataactacagtcttctctccatggctcccactgcaatscaaacttcctggtttgagtaagaagtctaatcttaatgacaccagtataatagtgagtcagc

SEQ ID NO: 16747 - DNA, 589 bp, Chicken  19866894224334_3
acccatttctccacacccagcagagaggtttgcctttatcacagtgtgtatcagagcattagttcacccttggaactcctcatacgtgacatgaaatacgcttcaatcasaagaattagraaaaaaatgttctttggcacgagttttgattttaatacacatccaatccaatcgcagggaaataatttgcattagtatacgcttcctcttagagcttacagataactttcttcaccctccaagaagcagaagcaaatcagataacagcagcctgaagttccttcttgtgtacaaacactrcaagtttgttttgcttccccataactacagtcttctctccatggctcccactgcaatscaaacttcctggtttgagtaagaagtctaatcttaatgacaccagtataatagtgagtcagccacctaaatgtgtgggtccacactatagaattccttcataaaaggtctcctctgttatgtttatgcaggatgttctgcaggagctgtaaagctcaactgtctgctggaattaactcattgggtgtacattcggtgaccatctcacttgggatattttcacaatacattc

SEQ ID NO: 16748 - DNA, 531 bp, Chicken  19866894224334_4
ttagttcacccttggaactcctcatacgtgacatgaaatacgcttcaatcasaagaattagraaaaaaatgttctttggcacgagttttgattttaatacacatccaatccaatcgcagggaaataatttgcattagtatacgcttcctcttagagcttacagataactttcttcaccctccaagaagcagaagcaaatcagataacagcagcctgaagttccttcttgtgtacaaacactrcaagtttgttttgcttccccataactacagtcttctctccatggctcccactgcaatscaaacttcctggtttgagtaagaagtctaatcttaatgacaccagtataatagtgagtcagccacctaaatgtgtgggtccacactatagaattccttcataaaaggtctcctctgttatgtttatgcaggatgttctgcaggagctgtaaagctcaactgtctgctggaattaactcattgggtgtacattcggtgaccatctcacttgggatattttcacaatacattc

SEQ ID NO: 16749 - DNA, 600 bp, Chicken  19866894224339_1
ctgtgggatcaacggttcctacgcagaagctagctggaacctggtcaacaccttcccagtgagttgtgcttcccttcttcccaggggtggacgtagggttgctggagtctgtctgcagggctggacccatttgttccatgactcaagccagtccttagctcagctgatagaagcttttcttccaagtcgtgacatggagagaaagggaaggcttagtgtgtatcctgcaggtttttgaggtgcctgtcccctctgcacttccctggagacttgggtgctgggctttgtgcgtgacaaggyttgcaagggagcatgggcttctggtgcacgagttctgtgctgatgtggttgaactgcactctccayrtgcactttygtrtgggagattagtttgggagccttgaaacactgagcaaggggtgggttgatcacttgcctgtgctggcatgagtttttgggaactcctgggaattgtggtttgtgttccaacattcaggcactttgtggctctttgagacaccgtacttttctctggcttgtctgcagcatcacaccttcttttgggaaggcattgatggatcccgagtcctgacccatttc

SEQ ID NO: 16750 - DNA, 600 bp, Chicken  19866894224339_2
tgcttcccttcttcccaggggtggacgtagggttgctggagtctgtctgcagggctggacccatttgttccatgactcaagccagtccttagctcagctgatagaagcttttcttccaagtcgtgacatggagagaaagggaaggcttagtgtgtatcctgcaggtttttgaggtgcctgtcccctctgcacttccctggagacttgggtgctgggctttgtgcgtgacaaggyttgcaagggagcatgggcttctggtgcacgagttctgtgctgatgtggttgaactgcactctccayrtgcactttygtrtgggagattagtttgggagccttgaaacactgagcaaggggtgggttgatcacttgcctgtgctggcatgagtttttgggaactcctgggaattgtggtttgtgttccaacattcaggcactttgtggctctttgagacaccgtacttttctctggcttgtctgcagcatcacaccttcttttgggaaggcattgatggatcccgagtcctgacccatttcccccctggtgactcctatgggatgcatgggcgagtggaggaggtaattgagcttgccaaaygtgca

SEQ ID NO: 16751 - DNA, 600 bp, Chicken  19866894224339_3
gcttcccttcttcccaggggtggacgtagggttgctggagtctgtctgcagggctggacccatttgttccatgactcaagccagtccttagctcagctgatagaagcttttcttccaagtcgtgacatggagagaaagggaaggcttagtgtgtatcctgcaggtttttgaggtgcctgtcccctctgcacttccctggagacttgggtgctgggctttgtgcgtgacaaggyttgcaagggagcatgggcttctggtgcacgagttctgtgctgatgtggttgaactgcactctccayrtgcactttygtrtgggagattagtttgggagccttgaaacactgagcaaggggtgggttgatcacttgcctgtgctggcatgagtttttgggaactcctgggaattgtggtttgtgttccaacattcaggcactttgtggctctttgagacaccgtacttttctctggcttgtctgcagcatcacaccttcttttgggaaggcattgatggatcccgagtcctgacccatttcccccctggtgactcctatgggatgcatgggcgagtggaggaggtaattgagcttgccaaaygtgcat

SEQ ID NO: 16752 - DNA, 600 bp, Chicken  19866894224339_4
cttcccaggggtggacgtagggttgctggagtctgtctgcagggctggacccatttgttccatgactcaagccagtccttagctcagctgatagaagcttttcttccaagtcgtgacatggagagaaagggaaggcttagtgtgtatcctgcaggtttttgaggtgcctgtcccctctgcacttccctggagacttgggtgctgggctttgtgcgtgacaaggyttgcaagggagcatgggcttctggtgcacgagttctgtgctgatgtggttgaactgcactctccayrtgcactttygtrtgggagattagtttgggagccttgaaacactgagcaaggggtgggttgatcacttgcctgtgctggcatgagtttttgggaactcctgggaattgtggtttgtgttccaacattcaggcactttgtggctctttgagacaccgtacttttctctggcttgtctgcagcatcacaccttcttttgggaaggcattgatggatcccgagtcctgacccatttcccccctggtgactcctatgggatgcatgggcgagtggaggaggtaattgagcttgccaaaygtgcatgtgaagtgc

SEQ ID NO: 16753 - DNA, 600 bp, Chicken  19866894224339_5
cccaggggtggacgtagggttgctggagtctgtctgcagggctggacccatttgttccatgactcaagccagtccttagctcagctgatagaagcttttcttccaagtcgtgacatggagagaaagggaaggcttagtgtgtatcctgcaggtttttgaggtgcctgtcccctctgcacttccctggagacttgggtgctgggctttgtgcgtgacaaggyttgcaagggagcatgggcttctggtgcacgagttctgtgctgatgtggttgaactgcactctccayrtgcactttygtrtgggagattagtttgggagccttgaaacactgagcaaggggtgggttgatcacttgcctgtgctggcatgagtttttgggaactcctgggaattgtggtttgtgttccaacattcaggcactttgtggctctttgagacaccgtacttttctctggcttgtctgcagcatcacaccttcttttgggaaggcattgatggatcccgagtcctgacccatttcccccctggtgactcctatgggatgcatgggcgagtggaggaggtaattgagcttgccaaaygtgcatgtgaagtgcaat

SEQ ID NO: 16754 - DNA, 348 bp, Chicken  19866894224339_6
tccayrtgcactttygtrtgggagattagtttgggagccttgaaacactgagcaaggggtgggttgatcacttgcctgtgctggcatgagtttttgggaactcctgggaattgtggtttgtgttccaacattcaggcactttgtggctctttgagacaccgtacttttctctggcttgtctgcagcatcacaccttcttttgggaaggcattgatggatcccgagtcctgacccatttcccccctggtgactcctatgggatgcatgggcgagtggaggaggtaattgagcttgccaaaygtgcatgtgaagtgcaatgccagccttgtggggccagatctggggctc

SEQ ID NO: 16755 - DNA, 600 bp, Chicken  19866894224340_1
agtaaatgcaatacttaatacacggcagtgttttgcttgagcagaacattgcaaaactgcttgcaagaacaatttactccataactaatattcaccataagaaagagcagcctaatgttttgcagtttctcagattctcagaacaaaccagtgagatgataatcctcctaaaaggcagtatataatggtagttcatttcaggaattggcagtgaattgtttaataccttctctccacagtgtttgtgccccagagcagtgatgtttctaatacaggtatctcaggataggaacacatacrgtcttatctgctatctgaaacaaggagtcattcaccattactgtggaaggtcttgggatgtcttttgtacccgaatgcctatcacaagagaygaggcaggctacyggaactgccaaaagtttcaggtgctgtcatccataattactgtttatcaaaggaaggaatagaatgtctrtttctcactttcaaatgtcgtgctytctcctatacagatcttttaaaatttcttttaatgttggaaaaatacagtaattatagttctgataaaactgctgccaggtttgttttmtaacctgaata

SEQ ID NO: 16756 - DNA, 600 bp, Chicken  19866894224340_2
caccataagaaagagcagcctaatgttttgcagtttctcagattctcagaacaaaccagtgagatgataatcctcctaaaaggcagtatataatggtagttcatttcaggaattggcagtgaattgtttaataccttctctccacagtgtttgtgccccagagcagtgatgtttctaatacaggtatctcaggataggaacacatacrgtcttatctgctatctgaaacaaggagtcattcaccattactgtggaaggtcttgggatgtcttttgtacccgaatgcctatcacaagagaygaggcaggctacyggaactgccaaaagtttcaggtgctgtcatccataattactgtttatcaaaggaaggaatagaatgtctrtttctcactttcaaatgtcgtgctytctcctatacagatcttttaaaatttcttttaatgttggaaaaatacagtaattatagttctgataaaactgctgccaggtttgttttmtaacctgaataaacctggagtaacagaatacagttaccagttcattcttgctcccattttagcagaaggcaaatatgttatcaaacaacagcagtgagcatgt

SEQ ID NO: 16757 - DNA, 600 bp, Chicken  19866894224340_3
agcagcctaatgttttgcagtttctcagattctcagaacaaaccagtgagatgataatcctcctaaaaggcagtatataatggtagttcatttcaggaattggcagtgaattgtttaataccttctctccacagtgtttgtgccccagagcagtgatgtttctaatacaggtatctcaggataggaacacatacrgtcttatctgctatctgaaacaaggagtcattcaccattactgtggaaggtcttgggatgtcttttgtacccgaatgcctatcacaagagaygaggcaggctacyggaactgccaaaagtttcaggtgctgtcatccataattactgtttatcaaaggaaggaatagaatgtctrtttctcactttcaaatgtcgtgctytctcctatacagatcttttaaaatttcttttaatgttggaaaaatacagtaattatagttctgataaaactgctgccaggtttgttttmtaacctgaataaacctggagtaacagaatacagttaccagttcattcttgctcccattttagcagaaggcaaatatgttatcaaacaacagcagtgagcatgtatgtgaaggaagg

SEQ ID NO: 16758 - DNA, 600 bp, Chicken  19866894224340_4
cagtatataatggtagttcatttcaggaattggcagtgaattgtttaataccttctctccacagtgtttgtgccccagagcagtgatgtttctaatacaggtatctcaggataggaacacatacrgtcttatctgctatctgaaacaaggagtcattcaccattactgtggaaggtcttgggatgtcttttgtacccgaatgcctatcacaagagaygaggcaggctacyggaactgccaaaagtttcaggtgctgtcatccataattactgtttatcaaaggaaggaatagaatgtctrtttctcactttcaaatgtcgtgctytctcctatacagatcttttaaaatttcttttaatgttggaaaaatacagtaattatagttctgataaaactgctgccaggtttgttttmtaacctgaataaacctggagtaacagaatacagttaccagttcattcttgctcccattttagcagaaggcaaatatgttatcaaacaacagcagtgagcatgtatgtgaaggaaggaaagataagatgtggcaagtgtatctcaaagcacacacattagaaacaactcaaagcacatcatcaagct

SEQ ID NO: 16759 - DNA, 600 bp, Chicken  19866894224340_5
ggaattggcagtgaattgtttaataccttctctccacagtgtttgtgccccagagcagtgatgtttctaatacaggtatctcaggataggaacacatacrgtcttatctgctatctgaaacaaggagtcattcaccattactgtggaaggtcttgggatgtcttttgtacccgaatgcctatcacaagagaygaggcaggctacyggaactgccaaaagtttcaggtgctgtcatccataattactgtttatcaaaggaaggaatagaatgtctrtttctcactttcaaatgtcgtgctytctcctatacagatcttttaaaatttcttttaatgttggaaaaatacagtaattatagttctgataaaactgctgccaggtttgttttmtaacctgaataaacctggagtaacagaatacagttaccagttcattcttgctcccattttagcagaaggcaaatatgttatcaaacaacagcagtgagcatgtatgtgaaggaaggaaagataagatgtggcaagtgtatctcaaagcacacacattagaaacaactcaaagcacatcatcaagctatgtatatgcactgatgcctcttcc

SEQ ID NO: 16760 - DNA, 600 bp, Chicken  19866894224340_6
gaacacatacrgtcttatctgctatctgaaacaaggagtcattcaccattactgtggaaggtcttgggatgtcttttgtacccgaatgcctatcacaagagaygaggcaggctacyggaactgccaaaagtttcaggtgctgtcatccataattactgtttatcaaaggaaggaatagaatgtctrtttctcactttcaaatgtcgtgctytctcctatacagatcttttaaaatttcttttaatgttggaaaaatacagtaattatagttctgataaaactgctgccaggtttgttttmtaacctgaataaacctggagtaacagaatacagttaccagttcattcttgctcccattttagcagaaggcaaatatgttatcaaacaacagcagtgagcatgtatgtgaaggaaggaaagataagatgtggcaagtgtatctcaaagcacacacattagaaacaactcaaagcacatcatcaagctatgtatatgcactgatgcctcttccatcgcaaagacaccagtgtcctttatcttctaacccttagctacgttttacaatcctacagccagctgtgctctcatctaactcagatt

SEQ ID NO: 16761 - DNA, 600 bp, Chicken  19866894224347_1
gcatttgagactgtccctgaggggtcctctgatggctgcacacatcctctcccaaagtcatggatcgcaagtgtcctcccacttcttgttgatggatcatgtttttgactcttaattgctgacagagaacttctcagcaatttcaagtcaccctctgggttatcattcaagacataatcctcacaaaggtaacaaaatacatacagatcgttaacttccattgccaatggatgtctggtttcttcaaagtgtttaagtgcatgctcctcgatgtacctcccacaggctacgtgggagcayttcagacaagcccagattgattcagttgtctggcagtccatgcagtgccacttttgggggttcaggattgaatggtcctgggcgagtcgtagccgcccaacatgtttgcatctatccatctcttacagaagtcttcgctgctttgaccttgyaaggcaaaaaamaaaaacaaaaaataataatctcagagccactacacatctaaaatgatctcttctgtactgcatgtaaagacctacaaaaatacagatgttgcgtcattccacttgcagttttcctttgaccaaccacattatcttc

SEQ ID NO: 16762 - DNA, 600 bp, Chicken  19866894224347_2
ctctgggttatcattcaagacataatcctcacaaaggtaacaaaatacatacagatcgttaacttccattgccaatggatgtctggtttcttcaaagtgtttaagtgcatgctcctcgatgtacctcccacaggctacgtgggagcayttcagacaagcccagattgattcagttgtctggcagtccatgcagtgccacttttgggggttcaggattgaatggtcctgggcgagtcgtagccgcccaacatgtttgcatctatccatctcttacagaagtcttcgctgctttgaccttgyaaggcaaaaaamaaaaacaaaaaataataatctcagagccactacacatctaaaatgatctcttctgtactgcatgtaaagacctacaaaaatacagatgttgcgtcattccacttgcagttttcctttgaccaaccacattatcttcatgcataatttctttaaaagcagttttcattaccagcaaaaaatattggactgatcagctctacagaaccgaactgtctaactgtgtgctacggatggtccagacagctgccagcatgccctacccaaactgcgtggcttccttccagagag

SEQ ID NO: 16763 - DNA, 600 bp, Chicken  19866894224347_3
attcaagacataatcctcacaaaggtaacaaaatacatacagatcgttaacttccattgccaatggatgtctggtttcttcaaagtgtttaagtgcatgctcctcgatgtacctcccacaggctacgtgggagcayttcagacaagcccagattgattcagttgtctggcagtccatgcagtgccacttttgggggttcaggattgaatggtcctgggcgagtcgtagccgcccaacatgtttgcatctatccatctcttacagaagtcttcgctgctttgaccttgyaaggcaaaaaamaaaaacaaaaaataataatctcagagccactacacatctaaaatgatctcttctgtactgcatgtaaagacctacaaaaatacagatgttgcgtcattccacttgcagttttcctttgaccaaccacattatcttcatgcataatttctttaaaagcagttttcattaccagcaaaaaatattggactgatcagctctacagaaccgaactgtctaactgtgtgctacggatggtccagacagctgccagcatgccctacccaaactgcgtggcttccttccagagagaaaaagattaat

SEQ ID NO: 16764 - DNA, 600 bp, Chicken  19866894224347_4
aatgttaaaaagaaataagcacggggaaaaagtggaatatgtaacaacttgatatagtaaacctaactgtatggaatggctgcacatgtacgtgtgtgcatgaacacataaacagaaaaagctgatttactaaattaatatattgtagtggaagagaattcaaaactgggtatcacaaccatagttgtagtgtgaaaaagctttcgctccatgtcctctgctttcttataagagagattcagtcgtacaaggagcaatggcaaaacaccgaagcacagcccccagcaccgcggtggtgckttgtgcagcccgacatcccaacacaactgaaagagaytggagcaccaaagcagcacccagacccactcgctcacacgcagtactcaccgagttacgttgaaacattccttcctctccaatgcaatgctcagagcctggaacatccccatttcattcaaaggagtcttggcggttcttagagaatttaattactacttaagtcttcattctaaggaagcgcagcttcaaagccctggagagagagaatattctcgtgatgcacataaactatgaaagccagcaaggttgctttgaacggaa

SEQ ID NO: 16765 - DNA, 600 bp, Chicken  19866894224347_5
tatgtaacaacttgatatagtaaacctaactgtatggaatggctgcacatgtacgtgtgtgcatgaacacataaacagaaaaagctgatttactaaattaatatattgtagtggaagagaattcaaaactgggtatcacaaccatagttgtagtgtgaaaaagctttcgctccatgtcctctgctttcttataagagagattcagtcgtacaaggagcaatggcaaaacaccgaagcacagcccccagcaccgcggtggtgckttgtgcagcccgacatcccaacacaactgaaagagaytggagcaccaaagcagcacccagacccactcgctcacacgcagtactcaccgagttacgttgaaacattccttcctctccaatgcaatgctcagagcctggaacatccccatttcattcaaaggagtcttggcggttcttagagaatttaattactacttaagtcttcattctaaggaagcgcagcttcaaagccctggagagagagaatattctcgtgatgcacataaactatgaaagccagcaaggttgctttgaacggaattaatcccctcagtgtaagagctactgcagagaacac

SEQ ID NO: 16766 - DNA, 600 bp, Chicken  19866894224348_1
catcctttgagaagaactaacagcttaatggttctgaactttaattcccctataacaactggcaaaagaaaaaataaaaaggatttgtctgatgttggcctgccttgtatttacatctgtactgagggaaggtagttgccagggttccttgttgttgttttgtttgttttttccctattgaaaggttcagctttaagttactgccagtcttaaaagaagccactatgatgtcaagcctatctctttataaagtggagaggcagagatgatcttgggccttcacttcagtcaaattattgrtaattattgctgagagattctaaagataagctgatagtttcttctgactaagcagtttatttctgttgcgtgttactccccctcattccatctagcattgacaataatgtccatgtygcagttgtactaagcaaatgagccactcccatcaattggagcctaccaatactccctgtaatagctctttgaaagtaggctgcctttaggaataaaagcaattttctttttcttgcttgaattgaatacctctttgcaagcattcaggcaagagaagcagctgtccagtttgactgtagaaga

SEQ ID NO: 16767 - DNA, 600 bp, Chicken  19866894224348_2
tgtactgagggaaggtagttgccagggttccttgttgttgttttgtttgttttttccctattgaaaggttcagctttaagttactgccagtcttaaaagaagccactatgatgtcaagcctatctctttataaagtggagaggcagagatgatcttgggccttcacttcagtcaaattattgrtaattattgctgagagattctaaagataagctgatagtttcttctgactaagcagtttatttctgttgcgtgttactccccctcattccatctagcattgacaataatgtccatgtygcagttgtactaagcaaatgagccactcccatcaattggagcctaccaatactccctgtaatagctctttgaaagtaggctgcctttaggaataaaagcaattttctttttcttgcttgaattgaatacctctttgcaagcattcaggcaagagaagcagctgtccagtttgactgtagaagagagaaaatgtttgatgagggaaggcaagtaaactcgaccaagaatctgatgtgactgtgacaggaatcccactaagagcttgaatgaggactgacattaatgtcacgaaagcaggag

SEQ ID NO: 16768 - DNA, 477 bp, Chicken  19866894224363_1
caacaaccctgaatggtgatggataacagaaaggaatcactctctaccaataaagccctcattacaggcttcaaacattccagcatcactgagtactgacttgcagattttggcagctggactttgtatctctcagttcagttcctgctagtgcagttagtggaaataaattatgtgaaggaatcaagtgagaaactagcccaacaaaacacatacacacaccgaggagggagaacctagctgatcaacacacatacacacacaggagagggtgagagaaagaaagagagagagacgatwaaaacacggaaatatgtttaagacatctgctgaagattcataattatatatatataaaattatatatatatgtgcatataaactttatatatatatataaaacaaaagattactgccaagcaatactatttgtactactgggacaaagctgtacagtctagagtgtcatcaataaca

SEQ ID NO: 16769 - DNA, 599 bp, Chicken  19866894224368_1
  misc_feature (1)..(17): n is any nucleotide
nnnnnnnnnnnnnnnnngtttttgtcagctgtactgaggactccacatctggatgcaattcagttttggacctctcactatgaaaaggaagcaaagttgcttgagggtgtctagggaagagtagtgaagcttgtgaagaggctagaaaatatgtctttttgagggaagtgttcagtgttgagaagaggaggctgaggggagatgtctttgctctttacaactatctgactggaggctgcagcaagcagggttccagcattttttctcaggtgacaagtggtaggatgtaagcgatggcaygrgggaggtctagattgggtattgtgaagaatttcttcrtgggggagtgttcaaacatgaaaagggttgtccagggaagtgttggattcactgtccctgcaggtatttaagatacatgagaacgttgcgctaaggacgtggtttagtgatgagtcttggtaggtcaggttgatgttttgatttaaagcatgttattgagagcactatttaaattcttcttgaacactgacagtcatgggacatcagccacctatgtaggaagcctgttccctgctttgttttcttccttcgaatgcatt

SEQ ID NO: 16770 - DNA, 599 bp, Chicken  19866894224368_2
  misc_feature (1)..(15): n is any nucleotide
nnnnnnnnnnnnnnngtttttgtcagctgtactgaggactccacatctggatgcaattcagttttggacctctcactatgaaaaggaagcaaagttgcttgagggtgtctagggaagagtagtgaagcttgtgaagaggctagaaaatatgtctttttgagggaagtgttcagtgttgagaagaggaggctgaggggagatgtctttgctctttacaactatctgactggaggctgcagcaagcagggttccagcattttttctcaggtgacaagtggtaggatgtaagcgatggcaygrgggaggtctagattgggtattgtgaagaatttcttcrtgggggagtgttcaaacatgaaaagggttgtccagggaagtgttggattcactgtccctgcaggtatttaagatacatgagaacgttgcgctaaggacgtggtttagtgatgagtcttggtaggtcaggttgatgttttgatttaaagcatgttattgagagcactatttaaattcttcttgaacactgacagtcatgggacatcagccacctatgtaggaagcctgttccctgctttgttttcttccttcgaatgcattca

SEQ ID NO: 16771 - DNA, 600 bp, Chicken  19866894224368_3
actccacatctggatgcaattcagttttggacctctcactatgaaaaggaagcaaagttgcttgagggtgtctagggaagagtagtgaagcttgtgaagaggctagaaaatatgtctttttgagggaagtgttcagtgttgagaagaggaggctgaggggagatgtctttgctctttacaactatctgactggaggctgcagcaagcagggttccagcattttttctcaggtgacaagtggtaggatgtaagcgatggcaygrgggaggtctagattgggtattgtgaagaatttcttcrtgggggagtgttcaaacatgaaaagggttgtccagggaagtgttggattcactgtccctgcaggtatttaagatacatgagaacgttgcgctaaggacgtggtttagtgatgagtcttggtaggtcaggttgatgttttgatttaaagcatgttattgagagcactatttaaattcttcttgaacactgacagtcatgggacatcagccacctatgtaggaagcctgttccctgctttgttttcttccttcgaatgcattcaggtatttaaatatattttttatattgtggagcttagaa

SEQ ID NO: 16772 - DNA, 600 bp, Chicken  19866894224373_1
tggagcctgatgttctcagtggaaggtaggccagctgccttctcccagtctctcatactgctagaggccatcgcagcagtggcagttacttaggaaggaaccaccctctccagcatagcgttttgggcgtcacgctctgcagcacatcagcgctgctctccagcagcccagcagggtgacacaggcatatcgatggtccactcacttttgccatccacccttctcccagttcaggcagcatggaaagtatgttctccaaaagacacaagcagatgttcttctgaattgactgatgatttmctgtgtttagtatggattcctgcctgtctgcagcagggaccaaatttatgtttctcattcctttgcatgtacmaaactagtttctcagtaatacactaattctgtttatgtgggtaacttaggctagggcaggtgctcaggtcttacctaggctgtgttcaccccagacccagcgcattaaacccttaaaagctactgtttcctcagtcctgcagatagaaaggtgccacctcacagtgtagcttctactcattctatcacacgatgaaattggggtttgctattccaaatgatgctgtc

SEQ ID NO: 16773 - DNA, 600 bp, Chicken  19866894224373_2
cagcagtggcagttacttaggaaggaaccaccctctccagcatagcgttttgggcgtcacgctctgcagcacatcagcgctgctctccagcagcccagcagggtgacacaggcatatcgatggtccactcacttttgccatccacccttctcccagttcaggcagcatggaaagtatgttctccaaaagacacaagcagatgttcttctgaattgactgatgatttmctgtgtttagtatggattcctgcctgtctgcagcagggaccaaatttatgtttctcattcctttgcatgtacmaaactagtttctcagtaatacactaattctgtttatgtgggtaacttaggctagggcaggtgctcaggtcttacctaggctgtgttcaccccagacccagcgcattaaacccttaaaagctactgtttcctcagtcctgcagatagaaaggtgccacctcacagtgtagcttctactcattctatcacacgatgaaattggggtttgctattccaaatgatgctgtcagcaggaagctgaggctaggagaaagtgctcaygtgaaagtacccacaaccagcattgttctcagatctgtcc

SEQ ID NO: 16774 - DNA, 588 bp, Chicken  19866894224373_3
cagggaccaaatttatgtttctcattcctttgcatgtacmaaactagtttctcagtaatacactaattctgtttatgtgggtaacttaggctagggcaggtgctcaggtcttacctaggctgtgttcaccccagacccagcgcattaaacccttaaaagctactgtttcctcagtcctgcagatagaaaggtgccacctcacagtgtagcttctactcattctatcacacgatgaaattggggtttgctattccaaatgatgctgtcagcaggaagctgaggctaggagaaagtgctcaygtgaaagtacccacaaccagcattgttctcagatctgtcctcccaccacacactttgtgagactaacagctgaagaaagatttatctgagtatttcacttgataccactatcacttgtgagattaatgactgcgaaaaaaatcacacatgcttttgcagagttatcattctgtccacgtttctgtcactgctacactgaccgagtcagagctctctgaaaactatgactgtcatttacaaataaaaaaagggatgtcacagttgcaaaaattacctatttttctaaaa

SEQ ID NO: 16775 - DNA, 600 bp, Chicken  19866894224378_1
catttacactgttgtgcagcaacagatggtacctcatgtggcacaacatccagcgatgcagttacctccttgaaaacaaataaccctttgttatcagtaaaatgtctttgtactggttcaatactttgcaacatttggctgtggcttactttatttaacactagacaaaccgcagcctaacactcttcatatcttaaccactgaaaaaagtgtcaaattgccagtgagttatcctacaacatggactttgtgtgcagaagattcagtagcataaagaagactagcaagtgtaatgtattraaacagaaagtgagatttttacctgcagagcactgaaatttctaagtgaaaattcaacttacatgataaagactaaagattatgaggtatttcagtaatttcaagaaacaaaaactttgcaaccttagtatgagcagcaggattgccaaataaacgtaatgaacaatcattgcgatatattttagaaactattaccttttacttttttccccgtaaatgatcctcgaagatactgctcactgatcaatgacttcctcctccacaaagatgttccaacatgtgttgagtttcaggacatta

SEQ ID NO: 16776 - DNA, 599 bp, Chicken  19866894224379_1
  misc_feature (1)..(89): n is any nucleotide
nnnnnnnnnnnnnnnnnnnnnnnnnnnnnnnnnnnnnnnnnnnnnnnnnnnnnnnnnnnnnnnnnnnnnnnnnnnnnnnnnnnnnnnnnttgccaggttttccttcttttgctgtatctgtgctcaaaaataaagggaagaggcctttaaacaacccttatgctgatcagaacaggggagcaggagcaggaggtgtctctgtgcagtcaaatgcatatttattcacaataatgaaagaaatgaaagtggagaaattttgtaggaaagaaagaatgtgttatttatgtattttcagtcagygttagagttgtagagagtttatgctaagtactgaatataaaatattatgatggccgtaactcctaatttggagtcatagcctaaattcgagctaattctcaatgttctgtagaccatagtgccagagtctcagggattgattcaggctatctaaactcaaggtctatccagcttcaggaagtttctcagagtggctgacagctctatttcagttcactagtgtctggcttaaaagcacacagtgtgcaccagggtctgtactgaggtcagaaaatccattcaaggtgtctcacttttga

SEQ ID NO: 16777 - DNA, 509 bp, Chicken  19866894224380_1
tacatcgaagcaaagaacctaaaatcatgaaggcctgatagccattcaagacaacttctgcagaagtcactttaagtaacatgattgtttttaaaaggtagtcgtaacagatgatgttagtttttgatgacagcaagttctgcatgcttctccctgtcccctcttcttgatcattttctaactgggaagtacagataagtgtgaatagaagcaagtcttttaatttgagtcatttgtggaaagttaagtgttgtctttggtcactgatgggagtaatcagtactgctttctctacacctmaattttaggtgaatttttcagtatttcctcattcttgaaaactgatgtcttggattttcwtttttttaattgtacttgggaagtgatgtctygtgtcctctgttagaggtgctgctcagggaaataaattatttgcatctcacaagaatcattttttttttcctgacaggcttttgtgagccattagcatcaatcacctctatcaatat

SEQ ID NO: 16778 - DNA, 449 bp, Chicken  19866894224380_2
tacatcgaagcaaagaacctaaaatcatgaaggcctgatagccattcaagacaacttctgcagaagtcactttaagtaacatgattgtttttaaaaggtagtcgtaacagatgatgttagtttttgatgacagcaagttctgcatgcttctccctgtcccctcttcttgatcattttctaactgggaagtacagataagtgtgaatagaagcaagtcttttaatttgagtcatttgtggaaagttaagtgttgtctttggtcactgatgggagtaatcagtactgctttctctacacctwtttttttaattgtacttgggaagtgatgtctygtgtcctctgttagaggtgctgctcagggaaataaattatttgcatctcacaagaatcattttttttttcctgacaggcttttgtgagccattagcatcaatcacctctatcaatat

SEQ ID NO: 16779 - DNA, 417 bp, Chicken  19866894224380_3
tacatcgaagcaaagaacctaaaatcatgaaggcctgatagccattcaagacaacttctgcagaagtcactttaagtaacatgattgtttttaaaaggtagtcgtaacagatgatgttagtttttgatgacagcaagttctgcatgcttctccctgtcccctcttcttgatcattttctaactgggaagtacagataagtgtgaatagaagcaagtcttttaatttgagtcatttgtggaaagttaagtgttgtctttggtcactgatgggagtaatcagtactgctttctctacacctygtgtcctctgttagaggtgctgctcagggaaataaattatttgcatctcacaagaatcattttttttttcctgacaggcttttgtgagccattagcatcaatcacctctatcaatat

SEQ ID NO: 16780 - DNA, 600 bp, Chicken  19866894224381_1
tttaggaagtgggggattataggagtgcactgtgatgcaaatgtggaaaatagtcggtaaccaaactgatctgagaagctcagaacttgtgaaaatcagtgcaaggactgagccttgtagcaggagtgagtctgagctctgcaaactgtggtgcatttcctcgtttctgagcgagattattctccacgtagcaacagtgaatggttctgttgggtacttctgtgatgtaccattgggtttgttgagacaggtgggtgctgcagagctgtgtggctcttctggtggctctgtgacaaagcrttcctggaagtgggcatggaaatgggggggcagtgtttgagactcacttggattaagggcagttcggagcattcagtgacaagttaagagtctttatgttattttttaaagccttgggaacagaagggtcacaggttgttcacagattgtttttgtaggaaaatgtgacttgcagagccttacctgctttgcacctcctcgtgctataaaagccatcaggatacacttaacaaaatgagatcatctcttccacttctgcttgcctttactaaaacacatcagcagccattcctactgaac

SEQ ID NO: 16781 - DNA, 600 bp, Chicken  19866894224385_1
ccaaacataatataacagacaagtgttagagagacatgcaggggggagcctgaatagcgagctttaaaagaggtctttaatagagaagcagtatgcttagtcttcgacaacattcaatggcaatttatttgcagccattttctcatgtaacctttcacactggagcaggtaagatagagcacaagacaatttgtcaactgccagatatgaacaaaagaaaccatttttaataagcttcagcagccccttgtatttgttttgcaacatgttaataacttttttggaagccaatcaaaggcragaagagcaaaagaagtcaagctgggaaacaaaaaaacatagttaaagaattttacagataaacttaagttatcatctgcggtgtaatgatgcttaaacccaagagcagcacagaatttgaattagcatgctgctgtttcttagaaaaaaccrtgctgcggttacaaaagatgctacctccacatatttttgccaagaattcgcggtcctttatctcatcacaatgcagtatgtacctgtcatcaggataaccttactgccacgcaacccgggcagatcagcacaagggtcagcatcggg

SEQ ID NO: 16782 - DNA, 600 bp, Chicken  19866894224385_2
ttcacactggagcaggtaagatagagcacaagacaatttgtcaactgccagatatgaacaaaagaaaccatttttaataagcttcagcagccccttgtatttgttttgcaacatgttaataacttttttggaagccaatcaaaggcragaagagcaaaagaagtcaagctgggaaacaaaaaaacatagttaaagaattttacagataaacttaagttatcatctgcggtgtaatgatgcttaaacccaagagcagcacagaatttgaattagcatgctgctgtttcttagaaaaaaccrtgctgcggttacaaaagatgctacctccacatatttttgccaagaattcgcggtcctttatctcatcacaatgcagtatgtacctgtcatcaggataaccttactgccacgcaacccgggcagatcagcacaagggtcagcatcgggaaaggccggtggggagctgcctggttcccgrctgctgacgtggagttgcgtccccgcastccccagcacctcgcacagcctcacctcscacctcagcacctacagacattgggccaaaaaggtctccacaaggctcagcagccgccatcggac

SEQ ID NO: 16783 - DNA, 527 bp, Chicken  19866894224385_3
aaaaaacatagttaaagaattttacagataaacttaagttatcatctgcggtgtaatgatgcttaaacccaagagcagcacagaatttgaattagcatgctgctgtttcttagaaaaaaccrtgctgcggttacaaaagatgctacctccacatatttttgccaagaattcgcggtcctttatctcatcacaatgcagtatgtacctgtcatcaggataaccttactgccacgcaacccgggcagatcagcacaagggtcagcatcgggaaaggccggtggggagctgcctggttcccgrctgctgacgtggagttgcgtccccgcastccccagcacctcgcacagcctcacctcscacctcagcacctacagacattgggccaaaaaggtctccacaaggctcagcagccgccatcggaccaaacgctcctaagaactctcagccccatttctgaggggaacacctgctggtgctgagaagccagagcacccaaacagggagctatcgaaatcccaacaccataa

SEQ ID NO: 16784 - DNA, 499 bp, Chicken  19866894224385_4
taaacttaagttatcatctgcggtgtaatgatgcttaaacccaagagcagcacagaatttgaattagcatgctgctgtttcttagaaaaaaccrtgctgcggttacaaaagatgctacctccacatatttttgccaagaattcgcggtcctttatctcatcacaatgcagtatgtacctgtcatcaggataaccttactgccacgcaacccgggcagatcagcacaagggtcagcatcgggaaaggccggtggggagctgcctggttcccgrctgctgacgtggagttgcgtccccgcastccccagcacctcgcacagcctcacctcscacctcagcacctacagacattgggccaaaaaggtctccacaaggctcagcagccgccatcggaccaaacgctcctaagaactctcagccccatttctgaggggaacacctgctggtgctgagaagccagagcacccaaacagggagctatcgaaatcccaacaccataa

SEQ ID NO: 16785 - DNA, 470 bp, Chicken  19866894224385_5
gatgcttaaacccaagagcagcacagaatttgaattagcatgctgctgtttcttagaaaaaaccrtgctgcggttacaaaagatgctacctccacatatttttgccaagaattcgcggtcctttatctcatcacaatgcagtatgtacctgtcatcaggataaccttactgccacgcaacccgggcagatcagcacaagggtcagcatcgggaaaggccggtggggagctgcctggttcccgrctgctgacgtggagttgcgtccccgcastccccagcacctcgcacagcctcacctcscacctcagcacctacagacattgggccaaaaaggtctccacaaggctcagcagccgccatcggaccaaacgctcctaagaactctcagccccatttctgaggggaacacctgctggtgctgagaagccagagcacccaaacagggagctatcgaaatcccaacaccataa

SEQ ID NO: 16786 - DNA, 599 bp, Chicken  19866894224388_1
  misc_feature (1)..(73): n is any nucleotide
nnnnnnnnnnnnnnnnnnnnnnnnnnnnnnnnnnnnnnnnnnnnnnnnnnnnnnnnnnnnnnnnnnnnnnnnntttttttctgtattgtggcaaatgtcaaaattcaaggactgtcatcagctgacataatgaccactgcccctctccagaaacaaaccatgccacagtatctttcctaacactttagctatactgcattcgtgttggcaagtggtccatccctagtgtttcaatagctctgatgaattttatcccccaaagtactttctatctgaagacagcttgaaaagattcatctygggtttcttgtagatgggaacaaagtgagcatgcagtggatgaatagcaaatttcagccttagttgtggccattccttcagtgcaacaatcattttgagtccaacgagagcttactcagaggctgaattccaaactagtagcaactcatacctgtgggagctgtcatggcttctgtctgctgaggttcctctccaagcattattgatttctaacattttctgttattatttaaaagtatttcaactacttgccagtatgtgtgtcaattgcctttgcctaatctttcttgttgctgatt

SEQ ID NO: 16787 - DNA, 599 bp, Chicken  19866894224389_1
  misc_feature (1)..(218): n is any nucleotide
nnnnnnnnnnnnnnnnnnnnnnnnnnnnnnnnnnnnnnnnnnnnnnnnnnnnnnnnnnnnnnnnnnnnnnnnnnnnnnnnnnnnnnnnnnnnnnnnnnnnnnnnnnnnnnnnnnnnnnnnnnnnnnnnnnnnnnnnnnnnnnnnnnnnnnnnnnnnnnnnnnnnnnnnnnnnnnnnnnnnnnnnnnnnnnnnnnnnnnnnnnnnnnnnnnnnnnnnnntagggaccccatagggcccatagggaccccacagaccccatagagcccacagggaccccacagaccccagagggaccccacrgaacccatagagcccacagggaccccagagaccccataggaacccccaaccccatagggaccccatagagcccacagggaccccacggagcccatagagcccacagggaccccacggagcccatagggaccccatagggacccccaaccccatacggaccccatagagcccacaaggaccccacagaccccatagggactcccaaccctataaggaccccacagaccccatagggagcccacagggaccccacagagaccccccaaccccacatagagccccacagaccccatagggac

SEQ ID NO: 16788 - DNA, 600 bp, Chicken  19866894224391_1
agacacttcttttgccctagactaacaaaagggaacgtgccctaccagcccatatgaggcacaacttcactcacagtactgcacagggatagggtccatcctgtttgcctcacctgtgtctacaggccttgacagacaattgccttcaggtaaataatttttaaaggcaacagaatgagcctcgcaacagagaacaacaggaatacatttattatgctgacagcacattttaacacctcatacagaggaatctgctaatcctgatgaatattcactttcctctgagtgggagcctgaaaygcaatgcataaattcacacctctcaaacaggacatctttcagaagccatcaaaatacaacatttccatctatttttcccactttggcacatcctttgtgttccacttaatcaaaaattacctgtatgactccacacgtgaaagaaacacactgtgttcccaaagtcaggtctacacaccttggacacatacatataactggcacaccaataaggtattttgaatcctccccttaacatgtattattcatgccacaaaacatctgcttgagagaacagaattaacagtatttgatagcaac

SEQ ID NO: 16789 - DNA, 599 bp, Chicken  19866894224396_1
  misc_feature (1)..(78): n is any nucleotide
nnnnnnnnnnnnnnnnnnnnnnnnnnnnnnnnnnnnnnnnnnnnnnnnnnnnnnnnnnnnnnnnnnnnnnnnnnnnnntgttggttgtatatttacaggagcttttttttttttttttttttgatagaaactgtcatcttttgatgaattgtactgtttttccccaagatagaatttctctctaaactctgtgttgtcaaactcttcagtgctactagacatcctcatcccaattaaatagcagctcctacctgattcttaggtcacagcttcagcctccatgtcatggtggtatgaatmcagatagagaggtattcagtagcaattttaggaacaacataatgtgtgataaattcagaagtgattttcactgatctgtttaatagctctgaagattaattaaaagtagcactgctgttcctcatgtatgtccataacaggattcatttcctacacatagcaagaaattgaatactttaaatgtgaacattgctatccaaaattattctaaaaagctaaattttcctttccctggacaccttgaaatcattttgtcctctgtatgtacaaacagtttttatatcaattattccttatga

SEQ ID NO: 16790 - DNA, 600 bp, Chicken  19866894224404_1
cgtgcagtgtcctgctgtgtcagcacattttgctgctttagagaattcttattcggggttttctttgtaagcagtttgaggtgctggcggttgtccatccacatggacaaatcaaatttccacaaactctgagaatgtcttttgatgctttaatgagatgtcaccaaagtggtcctctttagtcctcagctgctgttcactgcaagtttgtgattcaaatgcctctgctcataatgagagacaaacaatcatagaattcagaacttgtgatcactcagtgtcaaatgtggaaaaggcttygaaattcctgagagttttaaagcagaaggatgtggtgcttttttgaagacatgcctgacaagacagcagtaaggccgtgtacctgccctgcccattagaaaatctgtgcttttgtgaagcaacacatattccgaattaaatgatgagtgatgttgaaatgaaagtaaagggcatttgattccaatgtcttcttgcaaactgaagtgagtacttcagtgatttactaccatactttcatgatacatataattctaaaataatgatagactttcactccttctagaaaaacctgttgcttta

SEQ ID NO: 16791 - DNA, 600 bp, Chicken  19866894224409_1
tgagagagaaatcctgctttatgcaaatattagtccatgtagtaacatttccaaagctacatcctataaaagccagaaaaaaagaattttcctcagcaacacatcctggatttgaagcagcatggtgagcttccctggaagttaccagggagggaggcaatagagtactcagtgaggtttctctatttggcacaagggcagcaaattctagcatggtgtagttcaggtaaaagcctctaaattagtgaatgttctggactctttgatctggttttctaatgcaacaaacatcattttgtrgtgaggagagagacagctccttgtccctctcagaggtgttgccatgcaagggagtcagcctggagctactgagcagaggcagtagaagygctaactactaactcaacacgtcatgctgtctctcaaacagtgaagcaagcagaaaactagggaccaatctaggtgtacccagggagtgaaagaaaggaaaaaaaaaatctggggacagaattctgtaggtcacagggttccattatttttgctgttagcagaacaacttctctgataaaatggtagcaagccaagggcttttcctgggtc

SEQ ID NO: 16792 - DNA, 600 bp, Chicken  19866894224409_2
tcctcagcaacacatcctggatttgaagcagcatggtgagcttccctggaagttaccagggagggaggcaatagagtactcagtgaggtttctctatttggcacaagggcagcaaattctagcatggtgtagttcaggtaaaagcctctaaattagtgaatgttctggactctttgatctggttttctaatgcaacaaacatcattttgtrgtgaggagagagacagctccttgtccctctcagaggtgttgccatgcaagggagtcagcctggagctactgagcagaggcagtagaagygctaactactaactcaacacgtcatgctgtctctcaaacagtgaagcaagcagaaaactagggaccaatctaggtgtacccagggagtgaaagaaaggaaaaaaaaaatctggggacagaattctgtaggtcacagggttccattatttttgctgttagcagaacaacttctctgataaaatggtagcaagccaagggcttttcctgggtcttctcttacattttagagtcctttgttgcagaggaaagaataaaaatgcaaagcatgttacatgcttaactgagggcctttagtgacgt

SEQ ID NO: 16793 - DNA, 600 bp, Chicken  19866894224409_3
ggcacaagggcagcaaattctagcatggtgtagttcaggtaaaagcctctaaattagtgaatgttctggactctttgatctggttttctaatgcaacaaacatcattttgtrgtgaggagagagacagctccttgtccctctcagaggtgttgccatgcaagggagtcagcctggagctactgagcagaggcagtagaagygctaactactaactcaacacgtcatgctgtctctcaaacagtgaagcaagcagaaaactagggaccaatctaggtgtacccagggagtgaaagaaaggyaaaaaaaaatctggggacagaattctgtaggtcacagggttccattatttttgctgttagcagaacaacttctctgataaaatggtagcaagccaagggcttttcctgggtcttctcttacattttagagtcctttgttgcagaggaaagaataaaaatgcaaagcatgttacatgcttaactgagggcctttagtgacgttcaaaaactagaattcacaaagcaaacagattacctactgaacatcaggacagttactgagaacttgctttaatatcacaaatggtttttttcttcttt

SEQ ID NO: 16794 - DNA, 600 bp, Chicken  19866894224412_1
tgtaaatgctcacagaaaagctgataagttcagtgcatactcaccagctgcccttcacagtaagtgactctacactcagccccaggaggtgccaatagatttccacctgcaaagcagttgcctgagaatcgctttattaagctaaaggaagagttcactgcgtgactgatcacaaaggaagaggaaaggagggtatggtcctctaggaattcaaaggtgtacacttctccccaagccttaatggagcagcgttggatccgacataccagcccaatctgctcttctttacaagagcaattyggctgagcaacaacaaactcaggtactgaaagacatggaacaaagaaacaaacaaacagaagggaaatagttatgaaaaataatgatacatggaaaagaaatgtaatgatctgtcttcttaggaaaaattattctctgactgacagctgtggccttttaaggtcagtttgtcaatcggcaaagaacttctgtgtcttcatctattccaaagtgaggtactcagactaggaacagacaacagctctggaactggctcctgaatggtctgtgcttctctccctcgtcaatgagaacagttca

SEQ ID NO: 16795 - DNA, 600 bp, Chicken  19866894224412_2
ttcatctattccaaagtgaggtactcagactaggaacagacaacagctctggaactggctcctgaatggtctgtgcttctctccctcgtcaatgagaacagttcatttggcaaaggctgagacagatttgcttcctcagacattaaatagtactgagtgagaattaccataaaccaaacagagacactgggaacagcagtaggtgaactcacaaattaacagcatccttcctttaagaaggtgacagttcaaaatgcacctttatgtagaactatccagaacaatccagacctagaacamtccacccrtgcattttaaaatgttaacaagcatatttaaagctattcttagtctataccttcccattcagatgacttagatctgttaatcttgtagaaaaatactgatacagaaaataaggactacagctgaaaaagatttatcatagctccttaagcagagtttaaatactggcccagttcttcaattgcttccacactgagacatggattatctcactgagcaacgcagctcagaaatgctaaatacttgtcagagcagggttagttaataagtgttcttagtgttatcaaatgtaca

SEQ ID NO: 16796 - DNA, 600 bp, Chicken  19866894224412_3
ttccaaagtgaggtactcagactaggaacagacaacagctctggaactggctcctgaatggtctgtgcttctctccctcgtcaatgagaacagttcatttggcaaaggctgagacagatttgcttcctcagacattaaatagtactgagtgagaattaccataaaccaaacagagacactgggaacagcagtaggtgaactcacaaattaacagcatccttcctttaagaaggtgacagttcaaaatgcacctttatgtagaactatccagaacaatccagacctagaacamtccacccrtgcattttaaaatgttaacaagcatatttaaagctattcttagtctataccttcccattcagatgacttagatctgttaatcttgtagaaaaatactgatacagaaaataaggactacagctgaaaaagatttatcatagctccttaagcagagtttaaatactggcccagttcttcaattgcttccacactgagacatggattatctcactgagcaacgcagctcagaaatgctaaatacttgtcagagcagggttagttaataagtgttcttagtgttatcaaatgtacaggattagg

SEQ ID NO: 16797 - DNA, 571 bp, Chicken  19866894224413_1
ttgacatagctatcttaaccagctggaagctgataaagagattaaatcctgcttaggtatccaggcagtctaagtagctggtgtaaagcatattaggcttctcattagaatgctgtctgtggctagtgggcttagaccatctatgaaatacatcttgagaagaagatggagagagacttgtgttagcaggaggatagtcactatgtgaatgttgttgagggctgcaattgtgctgtaatgctgtaatcagggttgagacctgccctgatggtagagcagcccagcagccctgtgttcctsgtgagttccctggtccattcagcactcagctgtaccaatgggcagcaggtgggacaggacttctttttttttttttttaacagagctattagaaagtcaagttttaggttttaatagagaatttacatatgctaacatccatcatgtaagtaaatttaattatttagctaacttgcatgctgttttgttttgtttttctttttttcttatactaggcagtagctctgtgtttcggaattctctcctttaaaacagtagggggttctttttt

SEQ ID NO: 16798 - DNA, 599 bp, Chicken  19866894224416_1
  misc_feature (1)..(252): n is any nucleotide
nnnnnnnnnnnnnnnnnnnnnnnnnnnnnnnnnnnnnnnnnnnnnnnnnnnnnnnnnnnnnnnnnnnnnnnnnnnnnnnnnnnnnnnnnnnnnnnnnnnnnnnnnnnnnnnnnnnnnnnnnnnnnnnnnnnnnnnnnnnnnnnnnnnnnnnnnnnnnnnnnnnnnnnnnnnnnnnnnnnnnnnnnnnnnnnnnnnnnnnnnnnnnnnnnnnnnnnnnnnnnnnnnnnnnnnnnnnnnnnnnnnnnnnnnnnncaggacacgccacagcctccaggtaaccgctctgggttcagatgtcayacggggtttttctttgcctgtacacatgaatacttgcgggcattgattaccatttctcactctatccgaagaataactcctcattcaaatggaagggatctgggcaacacagcatggcagaaaggctggcagctactacaaagcatggtgtgcacaaacaggaggaataaactgctcggtcagcagagcaagactcattcccagacatgtgsctgtctctgtgcagagagggctgtggttttcaagatgcccagctgtaagagctgtaacaaaaagcattgcttcttcagtcttctggg

SEQ ID NO: 16799 - DNA, 599 bp, Chicken  19866894224416_2
  misc_feature (1)..(40): n is any nucleotide
nnnnnnnnnnnnnnnnnnnnnnnnnnnnnnnnnnnnnnnncaggacacgccacagcctccaggtaaccgctctgggttcagatgtcayacggggtttttctttgcctgtacacatgaatacttgcgggcattgattaccatttctcactctatccgaagaataactcctcattcaaatggaagggatctgggcaacacagcatggcagaaaggctggcagctactacaaagcatggtgtgcacaaacaggaggaataaactgctcggtcagcagagcaagactcattcccagacatgtgsctgtctctgtgcagagagggctgtggttttcaagatgcccagctgtaagagctgtaacaaaaagcattgcttcttcagtcttctgggtccaaagtatagttcaggctttcccagctgtatcaattggtttaggaaatattgcagctgctgtctgcaactttttttctcttgcttgctttgaaataaatctaccctcagcaggacagatgaggcatactgcaggccccactcatgcaaaaggcgttgcctttggaagccactcacagatctgtgagagccccacacctgcagataccatt

SEQ ID NO: 16800 - DNA, 600 bp, Chicken  19866894224416_3
tccaaagacatggatactgaccctgcctttgccttcagtttgtttgctgcatgccacacctggttttccctttgctgctgctataccacaaaccctgccaggtcgggttactgctctgttatctggctcttctaagccatatgttgaaggcccccctgaggaggccctcgtgtaacatttcagctcctggagaccaagtggtctttcactgggacaggaacagcgatgggagcaacagcagctgaaaagcattatgagttggctctgtgctgcaaggtactttcccatgagaggtcttcrgctgaacagagcagcggcggtgagtacagaggcttttataaagtctacagcccaccccagatgcagctgtaggcggtaacaaatagactggagggcttctaacagacgctgcttacagccttgctgcattttacacctttctgcttcctcacaagatgaagtagaccgatctaaagtgcatatacgtgtggtttggttttctttttcccccccttttccttacagatcgaaagtgcaatgcagtagcagcatctatctgctagcagggtgcacacaggcagccccacacagctgctgctg

SEQ ID NO: 16801 - DNA, 600 bp, Chicken  19866894224416_4
gtgtctgtgtaaacacatccgctacagttgtcaaggagtcagataacatgtgtgaagaaacaaaggtcctgaaaggaatcccagatgcaacagtcctcgtgggaaagatattctgttatcccgtgccagtatttacctttcagggaacgataactcagtacaaggtaatgctgttaaatgcacttcttggtataatccttcagcaaatgagcattcacttcatttttaaaattaactcaataaaagtctccctcagagatgcactctaaagaattagaaatggtggtaaaaaggtaaccrctgctcttttccaatgcaacagttacatcctcagcaaacagagaaaacccatgcacagygtgtatttaatttacctgcggcatgaagaatgtggggtctttgaagtgtacagagttgtcactacatctaaaaggacaacacaagcactacagaaagactgaggtacaccacctctagaacaccacctcatttgcagcttttcctggacttctgtttttcctatttagaacatgccatctgtaaaactacaggggctgctccaaaagcaatgcctcttattttatgatgttggcccacaat

SEQ ID NO: 16802 - DNA, 542 bp, Chicken  19866894224416_5
acaaaggtcctgaaaggaatcccagatgcaacagtcctcgtgggaaagatattctgttatcccgtgccagtatttacctttcagggaacgataactcagtacaaggtaatgctgttaaatgcacttcttggtataatccttcagcaaatgagcattcacttcatttttaaaattaactcaataaaagtctccctcagagatgcactctaaagaattagaaatggtggtaaaaaggtaaccrctgctcttttccaatgcaacagttacatcctcagcaaacagagaaaacccatgcacagygtgtatttaatttacctgcggcatgaagaatgtggggtctttgaagtgtacagagttgtcactacatctaaaaggacaacacaagcactacagaaagactgaggtacaccacctctagaacaccacctcatttgcagcttttcctggacttctgtttttcctatttagaacatgccatctgtaaaactacaggggctgctccaaaagcaatgcctcttattttatgatgttggcccacaatg

SEQ ID NO: 16803 - DNA, 600 bp, Chicken  19866894224417_1
agggagtgctcttgtcaaaatgtaggacagcgaaggaagaaatccaggaggagaactgagtttccaaaaactttgaggcttcttttactttttgacactgcttgttaaatgattcccaggaagtgcaagccaactcctgacaacctgggtaacagaagagtgcatgctctgttttttatcagcagcatactttgcagtgaatctattttaatttttggtagaaaggctgagagtaatgaagtgttttgttacatcatttcagaaaagtgaagtgactgcagcctggtacaaaagcacgcrttcagtgcctggtggaggagaagaagatgagaaagaattagggcagctagtytgagatatgtttatttctgtgggtggctaccagaggctgtcttcctcagtttataaacctctctgtatttgttgtactgaggatcccagtttagtggatattgctccatcaccaacaggcttgcttttgtctctcatctccattgattccttgcagggtcagaggagcagaggttgaaatccctgagctaggagaattgtcttctacttccctcccctcccccccagatagctcctttttgaaagcct

SEQ ID NO: 16804 - DNA, 600 bp, Chicken  19866894224417_2
gaactgagtttccaaaaactttgaggcttcttttactttttgacactgcttgttaaatgattcccaggaagtgcaagccaactcctgacaacctgggtaacagaagagtgcatgctctgttttttatcagcagcatactttgcagtgaatctattttaatttttggtagaaaggctgagagtaatgaagtgttttgttacatcatttcagaaaagtgaagtgactgcagcctggtacaaaagcacgcrttcagtgcctggtggaggagaagaagatgagaaagaattagggcagctagtytgagatatgtttatttctgtgggtggctaccagaggctgtcttcctcagtttataaacctctctgtatttgttgtactgaggatcccagtttagtggatattgctccatcaccaacaggcttgcttttgtctctcatctccattgattccttgcagggtcagaggagcagaggttgaaatccctgagctaggagaattgtcttctacttccctcccctcccccccagatagctcctttttgaaagcctggtttatgtgataaactgcaagggtaggtcagtgtggtctcagtggatagct

SEQ ID NO: 16805 - DNA, 600 bp, Chicken  19866894224419_1
ataaatgctctgattgttgccaactctcatctcgcagtatcttctttacagaaaagctgtgtcagaacatacagattgttgtggcttggtgacatatctcaggagtagctatgtttcctgttaaacagcttatcatgacttcctttaagctctgaagatgtgattagttagcattgcttgagtgtgccaagtcagtgacgaaacattgtttagtgcatatcccaacacaaatcagttgatcatggttcagcaaaatgaatggccagaaatcattcagttgtattgctttgaatgttcttratctcaatttgcaactagatggatacaaatctgtggcatttctaatattgcagctttactatatagatggtaactgctccagataccagaaaatgttgggyttgagttaaatctaaatcacccactgttgttctttactgtcctttagttatcacggtaaatgtcttcccatgtttgatttactattagtcttgatttgacaatagtgctggaatacctccttcaagatagtgaccctatgatccttggctactgtagacccacctatattactgttaatgttttagagtgcctaaacag

SEQ ID NO: 16806 - DNA, 600 bp, Chicken  19866894224419_2
ggagtagctatgtttcctgttaaacagcttatcatgacttcctttaagctctgaagatgtgattagttagcattgcttgagtgtgccaagtcagtgacgaaacattgtttagtgcatatcccaacacaaatcagttgatcatggttcagcaaaatgaatggccagaaatcattcagttgtattgctttgaatgttcttratctcaatttgcaactagatggatacaaatctgtggcatttctaatattgcagctttactatatagatggtaactgctccagataccagaaaatgttgggyttgagttaaatctaaatcacccactgttgttctttactgtcctttagttatcacggtaaatgtcttcccatgtttgatttactattagtcttgatttgacaatagtgctggaatacctccttcaagatagtgaccctatgatccttggctactgtagacccacctatattactgttaatgttttagagtgcctaaacagttcagtaaaaaaatgagagaggttgcaaatacgttctgagctccttgtgctttttataggaactggttaatcgctcagagaacagcacccagcaagcagtg

SEQ ID NO: 16807 - DNA, 600 bp, Chicken  19866894224419_3
cagtgggagaccagtgttcctagtacatgctgaacactgcaaggaattgtcctatacctaaaatgacagacgtgcagccaagcatgtggccaagcccaaagacctgtttgtgctgcttatgttttggctttgactgaagtctgactcaagggcaggagcagcgctgcagaggtggagaaccagggctcaagcccttaccccacagaaggataagcagcatggcatatacacgcttggcatgtatcagttaaaaaatacaaagtcttctattaaaaaggaaaccccttcataatcccaagyrtataactgacttgcagatcagatcttccagaatgctggtgccatagcaagtggaagtgtctctgactacctatgatgtcagtgatacactgcttaagtagactgtgacagtcagatttacagcaaagttctgttacaccgaaattgagtctgcatgcagaatacagtttgctaggccttaacatccaaaggctgtagcatagcggcccttgagaacaggttcacatcagagatgttaattgttcccaaacatcaggcaagtaatctgcattttgaagaggctctagatgggcatttcca

SEQ ID NO: 16808 - DNA, 600 bp, Chicken  19866894224419_4
agtgggagaccagtgttcctagtacatgctgaacactgcaaggaattgtcctatacctaaaatgacagacgtgcagccaagcatgtggccaagcccaaagacctgtttgtgctgcttatgttttggctttgactgaagtctgactcaagggcaggagcagcgctgcagaggtggagaaccagggctcaagcccttaccccacagaaggataagcagcatggcatatacacgcttggcatgtatcagttaaaaaatacaaagtcttctattaaaaaggaaaccccttcataatcccaagyrtataactgacttgcagatcagatcttccagaatgctggtgccatagcaagtggaagtgtctctgactacctatgatgtcagtgatacactgcttaagtagactgtgacagtcagatttacagcaaagttctgttacaccgaaattgagtctgcatgcagaatacagtttgctaggccttaacatccaaaggctgtagcatagcggcccttgagaacaggttcacatcagagatgttaattgttcccaaacatcaggcaagtaatctgcattttgaagaggctctagatgggcatttccat

SEQ ID NO: 16809 - DNA, 600 bp, Chicken  19866894224419_5
tgtagcatagcggcccttgagaacaggttcacatcagagatgttaattgttcccaaacatcaggcaagtaatctgcattttgaagaggctctagatgggcatttccataatttatgttttacaaagtccactgatgcatatttgcataatagaccacaacattgccagcagatccattgcagcacatggtgtcagctctcatgatgttccggtgggtttttccctttattggagctcttctgacacaaagaacttgtcaatagctgatacatctcaaagagaagactgagtgcctgtcaragcttctttggcwagattggcagcacacacgaatcaagctacacgtgcagtcacctaagaagtgttttgcatatatccatgccaattctgtgcatagaagcaattgaagatgatttatatatttactgtatttagggccttagctgacctacatagaacagtccatcccttctcctggagtctcccattgcactccactcacttgcagcaatacactgatgctttcaggctctccaaattcttcccgcttaaaaactacagttattttctcatcaccacactcagcacctgggcacaatc

SEQ ID NO: 16810 - DNA, 600 bp, Chicken  19866894224419_6
cccttgagaacaggttcacatcagagatgttaattgttcccaaacatcaggcaagtaatctgcattttgaagaggctctagatgggcatttccataatttatgttttacaaagtccactgatgcatatttgcataatagaccacaacattgccagcagatccattgcagcacatggtgtcagctctcatgatgttccggtgggtttttccctttattggagctcttctgacacaaagaacttgtcaatagctgatacatctcaaagagaagactgagtgcctgtcaragcttctttggcwagattggcagcacacacgaatcaagctacacgtgcagtcacctaagaagtgttttgcatatatccatgccaattctgtgcatagaagcaattgaagatgatttatatatttactgtatttagggccttagctgacctacatagaacagtccatcccttctcctggagtctcccattgcactccactcacttgcagcaatacactgatgctttcaggctctccaaattcttcccgcttaaaaactacagttattttctcatcaccacactcagcacctgggcacaatccagtggagaggtg

SEQ ID NO: 16811 - DNA, 599 bp, Chicken  19866894224431_1
  misc_feature (1)..(229): n is any nucleotide
nnnnnnnnnnnnnnnnnnnnnnnnnnnnnnnnnnnnnnnnnnnnnnnnnnnnnnnnnnnnnnnnnnnnnnnnnnnnnnnnnnnnnnnnnnnnnnnnnnnnnnnnnnnnnnnnnnnnnnnnnnnnnnnnnnnnnnnnnnnnnnnnnnnnnnnnnnnnnnnnnnnnnnnnnnnnnnnnnnnnnnnnnnnnnnnnnnnnnnnnnnnnnnnnnnnnnnnnnnnnnnnnnnnnnttcttgttgtttactgctatcgttctgccgggggcaggagcaggatataaaagtcacacctgccccaactygcagggacctccgggcatctttcatctttcacatcccttcttgaatgatctctgaacatcgattcattgattgggtatgtatttggaaacaagaagggatttatttcacagtcagtagtaaagattgttttaaccatatgcccacttctttgcctttgtgtcctttggcttttacttctatgtctcaccgagtgcaaaccttccatctttccgagatccatccatccatacagattcttacctgaataaatacctgtctgccacagacctattcatttgtccccattacattcaggcag

SEQ ID NO: 16812 - DNA, 600 bp, Chicken  19866894224431_2
gaagggatttatttcacagtcagtagtaaagattgttttaaccatatgcccacttctttgcctttgtgtcctttggcttttacttctatgtctcaccgagtgcaaaccttccatctttccgagatccatccatccatacagattcttacctgaataaatacctgtctgccacagacctattcatttgtccccattacattcaggcaggcttgagtctggtaagcccagacatacacgcttgtaaatatttaagacttctatacccctgtgtgaacacatttgaatgtcttgttgaggaayttgtggtccacacagaaatcatgcaactgccatgagactggccaagagataaggaaactcaaaaaccatacagagctcttgagagccgaaagcacagccttaccagtctgcagaatccaaccatacrtgggygtgcagctcgctactggaattgctttcactttcacttttgttctgctgtttaatcaattgctgacgtggcgacagaacagaaccaatctgtgtgacacagaggcacagaagatttccttagtcctcggagttggcgaagcactgaccactgaacagaatgtcaagtga

SEQ ID NO: 16813 - DNA, 600 bp, Chicken  19866894224431_3
atccatccatacagattcttacctgaataaatacctgtctgccacagacctattcatttgtccccattacattcaggcaggcttgagtctggtaagcccagacatacacgcttgtaaatatttaagacttctatacccctgtgtgaacacatttgaatgtcttgttgaggaayttgtggtccacacagaaatcatgcaactgccatgagactggccaagagataaggaaactcaaaaaccatacagagctcttgagagccgaaagcacagccttaccagtctgcagaatccaaccatacrtgggygtgcagctcgctactggaattgctttcactttcacttttgttctgctgtttaatcaattgctgacgtggcgacagaacagaaccaatctgtgtgacacagaggcacagaagatttccttagtcctcggagttggcgaagcactgaccactgaacagaatgtcaagtgaagggaattggtaacttcttggaaaaaggattatgatgcactgtccatactgcttagcaccataactctggttctagcagaagaaaaagcagagtctgagtttgaacacccacaaaaaacatagttaa

SEQ ID NO: 16814 - DNA, 596 bp, Chicken  19866894224431_4
tccatacagattcttacctgaataaatacctgtctgccacagacctattcatttgtccccattacattcaggcaggcttgagtctggtaagcccagacatacacgcttgtaaatatttaagacttctatacccctgtgtgaacacatttgaatgtcttgttgaggaayttgtggtccacacagaaatcatgcaactgccatgagactggccaagagataaggaaactcaaaaaccatacagagctcttgagagccgaaagcacagccttaccagtctgcagaatccaaccatacrtgggygtgcagctcgctactggaattgctttcactttcacttttgttctgctgtttaatcaattgctgacgtggcgacagaacagaaccaatctgtgtgacacagaggcacagaagatttccttagtcctcggagttggcgaagcactgaccactgaacagaatgtcaagtgaagggaattggtaacttcttggaaaaaggattatgatgcactgtccatactgcttagcaccataactctggttctagcagaagaaaaagcagagtctgagtttgaacacccacaaaaaacatagttaaa

SEQ ID NO: 16815 - DNA, 600 bp, Chicken  19866894224434_1
atgtagctaagactttaatagtttgtggcgtcttttcacatctaaacaaataaatgggtttatgcaacaattgtgttgaaaaaaggtcacatactaacaaatgaaatggaataagcaacttcatgtataagcttttttaattctgtaaagtttacaattatttttaaaccatgtgtaggctcagagtcagctatattgtatatctgatgatactgtcatttcttagaatagtttatttcgctatccaattaatttcagagttaccgtatggatttgacgtgtatgcattcgtagctgttmtcaagaactttaatggcttactaaccctctcctgtgaataaagccttttcctttgtaaaactagaagaacgtggtagaatagaaaaagtttttacacctcctcttgtcagtctgaatgattcactagtcatggtaggctgtatgctctatgtcaatacaattaaataatcagtacctgtaagttaaatcacttctcacacccactagtaaaaatatgacaataaagctattcccattatagttttctttcttcattgaacataattacatatagtgtagagactacagctataagacata

SEQ ID NO: 16816 - DNA, 600 bp, Chicken  19866894224462_1
aggctgcgccgagctgccgccgcctcagccacgcatccacatggttactgcgctccgagcgcgccgccgcgccttatatagccgcgcggagccttctgggtagcggagtcccggccgcgccgcgcgccgcgggctggaggcgggcagctgccagacgggactacgactcccggcgtgcaccgcgccgcgcccacagccgggccgggagcgcgggcttcctcagggagcgctctgccgacaccgctgctgagagcagtgagcagcagtggtaaataagcgatgcttgcttctgtttgttgyaaatacaactatttgtccttaaaatattcgtctggggacgcggttcgtggttacaccgcagttttctgcctgccgtggggtagaggcaggcacgtccggagctcagctgtgggtgtacggtgtgggaatcgtcccccgcagccacctgcggccgtgggtcactgcaggcagcgcgcagcgcccggccttggtcgcctcaggcagtgcggtgcccgctgctggggcctgctgccatggagctgcaggagcaggcctggctcagggctgcagaccactgcccgccgtgccactcccgcgctg

SEQ ID NO: 16817 - DNA, 600 bp, Chicken  19866894224462_2
gtctggggacgcggttcgtggttacaccgcagttttctgcctgccgtggggtagaggcaggcacgtccggagctcagctgtgggtgtacggtgtgggaatcgtcccccgcagccacctgcggccgtgggtcactgcaggcagcgcgcagcgcccggccttggtcgcctcaggcagtgcggtgcccgctgctggggcctgctgccatggagctgcaggagcaggcctggctcagggctgcagaccactgcccgccgtgccactcccgcgctgaaataccgtgaagaagtcataacggtgcygctaagcacaggtgtgcagaagctgaagtccgccgcttagaaactgaagcaaaggtcagcggtggagctgtgccgttcccatccctggctgcggtactacaaagccgttactcatcagaaatttggcagagtaatggtgcctaatatcgttaggtaatcctaatgaattcccatgtaatcaaatctaatctctggcagagctcagcagccaagggagccaagggccggaacgccgggtgcatgtaggcacagtgctttgggcagcagtggaaggacagtcattgcagccaacaagaggag

SEQ ID NO: 16818 - DNA, 600 bp, Chicken  19866894224476_1
gttctttgtattgtatgagctatgtgtgttttctgttccttccttgttttcactgatcagaatcctgctggttctagcaaagggttagatgccctctgttacaattagagggtttttgaggatcagctacatttattcttttcagatgaatcctttcttgtgctcttcaaatatacttagattaggagtgacatgtgtgtacgaaatgcaagttgcataagcaccattataagagaagtgctgataggtctttttgaatggtaaataccagatgacctggatgtgattttttttgtgtgygcacacattaaatgggcttgtactggtgttacaagacagccagatgttctgaacttatagctcaatttgagcaacaaaaattagtggatgaattgcaagcagttaaagtctctgartttgtttgcagaatgcttaggtgctgtaggatttcccacaaaaaggaaattctcctttgtgttctcacagaaatagggcttaagtcacagaatgaagaaaggattttgaacattgttttcagtgattgtggactgccactctcggagctgcacagttctgttaatcaaaaggcatcatatacaa

SEQ ID NO: 16819 - DNA, 600 bp, Chicken  19866894224476_2
tgaggatcagctacatttattcttttcagatgaatcctttcttgtgctcttcaaatatacttagattaggagtgacatgtgtgtacgaaatgcaagttgcataagcaccattataagagaagtgctgataggtctttttgaatggtaaataccagatgacctggatgtgattttttttgtgtgygcacacattaaatgggcttgtactggtgttacaagacagccagatgttctgaacttatagctcaatttgagcaacaaaaattagtggatgaattgcaagcagttaaagtctctgartttgtttgcagaatgcttaggtgctgtaggatttcccacaaaaaggaaattctcctttgtgttctcacagaaatagggcttaagtcacagaatgaagaaaggattttgaacattgttttcagtgattgtggactgccactctcggagctgcacagttctgttaatcaaaaggcatcatatacaaacacttgactttctagatttactccacaaaattcttggtctggtttataatacatcagtatttcaccatctttttaagatgtctgttgtattgtgctgttaaacacttcaaagcgt

SEQ ID NO: 16820 - DNA, 600 bp, Chicken  19866894224479_1
gtcccgcaaaaagcatgaagtcacaaagcctctgtcttcttcctatgtcttacactagaaaatgattcattgctaacttggaaattcagtatttctacagttgcattatagatggtatgactcccgtgtttctttagtcaacaaaaaatgcttagaattaacatgcatttaacaactatgttccgtgtctgcatagggaaatgctttatagccaggccccagaaaagcaggtaaagcaaacagaagtcttgagtttcagcagaaaagcaggtgtcttgtttggtggttgttgctttgtgygtttgttttcatatcaaactcgtttcatctgctttgaccattccttttccttcctcctagacataaatgagtgtgagactactaatgaatgcagagaggatgaaatttgctggaattaccatggaggatttcgttgttacccgataaagtccttgtcaagagccctagtgtcctcacatctgagaagtaagagaaagacagacacttttttagggttatccacatcaggcagcatgactgaatttggcagatagcaagtgctgtttgactgctactatcaaagtcatccatttttgtttt

SEQ ID NO: 16821 - DNA, 600 bp, Chicken  19866894224480_1
cagcatgaaagcaaatttcattttggttagagctgaacaatttttttttttctcccaagtggtcatttttaacattattcaattagttggaattatcttccttcttatcttaacaattttgtatcttcaaaactaataaaagccaagaaaaatgctggaaatgtaaatttcacattctctaatggagcgctcaagaaaattctgaaggaaaactgaaagggcccccatcctcctttcatttaacattaaaaaaagaaaacaacctttgattaggcccaaatatagactgtataaaatttyctttgtagccatgagaagcaaactgacagaataagcattcagcatcacaacagaaactggggaaatgagggaagctaaataagattgtctcaaagctgcttctcagtaaatgtcagcgagacacattcaacctgtcattggaaagttatgtctatgagctgatgtaacttcaaagaaaaaaaaacaatacatactgaaaatcaggcactgatcaattagattccaatcatactaccactcaaggagttttatttcattggcttgtgactactctaaaaagcagccaaattaaacgttttt

SEQ ID NO: 16822 - DNA, 600 bp, Chicken  19866894224483_1
agacatgaagatttttgttttttgaagaggctgtctagcttgttttatccttcctagcctaatggaggtttgtttggtacagcacatcctctgaccataataactttcatcctttatgagcagccgtttattttctagggaacgcaaaacgtccctcctgaggaggttttccctgttttccttcgggctgacatatacagctggagacctccgtttaattaatcttctagacttaatttatctcccgcttctttcttctttccctctatcagccctgccgcatagaggtggaacccttcygcagccgctcggatcatttacagcagccacttccacaggcagtagcgaggcagagatcgaagtgagtacctctgataacaacggtagtgtttgtgagctgcgactgactgggggggggtgccagacatttgcagacacacacaacaagacaggcccctgctctgttcggcttgtaaattaaaggaaagtacattggcgggagcagaagggatgatacgacatgctttaaatagtttattgggagcgggaggattgctgtttatttggtgacgttgggaaaatatgtaatgtgcttcgctt

SEQ ID NO: 16823 - DNA, 600 bp, Chicken  19866894224484_1
cctgactgcaaggtgtaaaacatggcaagaaatgagacgacgcctgaggtgtgtctgttccccgggcaccagcaggtgagaagagattatttactgggggtttggggaaataagtaggcagtgaacaaacacagactgtgtgcattgttgtatgcgatgaatatcctcaaaaatctttgtacgaatggaactctgagttattccaagccgaatgcaacgtgagatttaaaggtcagctccttctcctttggaagtagatggaggtttgtgttttgcaaggctcaggagtgaattgcaggyttttctctgcctgcttgctccagcattttggaattgtcgaggtgatgaggagagctggaagaggaagtgggacacgacagcaggttggcaccttggccatagaggcgatggaatggacacacaccggttctggtgctacaagcatcttcttggcacagcaggtgggcttttcataggagtgcttatttcttgtttcccctgttgaggctcttaacaagcataacaaaagagttaaataggtggaaaaaaggccaaaagcccatagagcagtgactgccaaaccaagggaaaccgatgcca

SEQ ID NO: 16824 - DNA, 600 bp, Chicken  19866894224493_1
atggtagcatcagcatctttcatcagctgtttatctgccttctcagcagtctgctcttctctcacaagcaacgtgtgctcttaccaagttggattgagacttaggaagggtgacagaaggtgagaagtcagcctgtgagaccagctcactgtactggcagtgacggtttgtttgctccttttgccattcagatcactctttcttcacagcctggcccctctcctccacatgaagaagaaggtgaagattcacaggactgatatgccagttctgagacaataatgggaaaaataattcccrgaagggcagaaatggttttcttacaccacttctctcctctagtctcaccaggctctctaaatcactcttcatagacccrtggaacacgcagtcattctccagccctccttgaagaaagtggtcaaaaaccagcctccgtgcccagtgggtttttaagaaaggtcttttccaaaggctgcattcatcttttcccaggctccgtaagcagcaggagcagctttgggatgatcactgtgtacctgggagtttcccgagaccactaatcaaatatccttgctctttcctcccagatatactctc

SEQ ID NO: 16825 - DNA, 600 bp, Chicken  19866894224493_2
cttaccaagttggattgagacttaggaagggtgacagaaggtgagaagtcagcctgtgagaccagctcactgtactggcagtgacggtttgtttgctccttttgccattcagatcactctttcttcacagcctggcccctctcctccacatgaagaagaaggtgaagattcacaggactgatatgccagttctgagacaataatgggaaaaataattcccrgaagggcagaaatggttttcttacaccacttctctcctctagtctcaccaggctctctaaatcactcttcatagacccrtggaacacgcagtcattctccagccctccttgaagaaagtggtcaaaaaccagcctccgtgcccagtgggtttttaagaaaggtcttttccaaaggctgcattcatcttttcccaggctccgtaagcagcaggagcagctttgggatgatcactgtgtacctgggagtttcccgagaccactaatcaaatatccttgctctttcctcccagatatactctcctgcttaatgggagtgctgatgcagagcctgttccagctctgagaccagggagcgtgctttggaatatggacaagggag

SEQ ID NO: 16826 - DNA, 599 bp, Chicken  19866894224502_1
  misc_feature (1)..(152): n is any nucleotide
nnnnnnnnnnnnnnnnnnnnnnnnnnnnnnnnnnnnnnnnnnnnnnnnnnnnnnnnnnnnnnnnnnnnnnnnnnnnnnnnnnnnnnnnnnnnnnnnnnnnnnnnnnnnnnnnnnnnnnnnnnnnnnnnnnnnnnnnnnnnnnnnnnnnnnnntgtttgctacatgctaggttttgggcctgaatatgggcttgatggcaacttgtggatgagatggttggactagatgacctcagaggtcttttccacctaaatgattccatgattctatgagaactcttgctcgccatggtgaggaagrgattgctgacctccattcagcaatatcagtgctggatgggtggttggtaaagctgtctataaaagcagctctgctaacaacctgacgtctgggcaaaaagttaatattaaccaagcatggagccctgcagaacatgttgagaaaaacagctttagctccaaagcaagtggctgatattgtcattaggtattccttaactgtgttctatagtactgtgcagaaaagctacccttaaaagtgagtgtgcctgattgaaagcactgcaataaaaggttatagatgcagcctctttttacaca

SEQ ID NO: 16827 - DNA, 599 bp, Chicken  19866894224505_1
  misc_feature (1)..(147): n is any nucleotide
nnnnnnnnnnnnnnnnnnnnnnnnnnnnnnnnnnnnnnnnnnnnnnnnnnnnnnnnnnnnnnnnnnnnnnnnnnnnnnnnnnnnnnnnnnnnnnnnnnnnnnnnnnnnnnnnnnnnnnnnnnnnnnnnnnnnnnnnnnnnnnnnnnnctggattattctataaattttgaaatggctctgctgatgtgagctcagaaaatcttttggaaagcatattatttagcctagtaggagatatattcaattcttttcatgtgaaaaaaatgattgtaaatgatcatttataataatatagtaccrtaactggtctatttcactttagaaaaataaaatcagaaaagtagtaatgtcctcctggtatatttgtcactgatatttttgatcttgaaacctatttcttaaagaagcgtatttcttaaagcacagagatgtgtctgtccaagttaatttgcaggagtgtgataataatttaaatagaaacagaattagtggagcagcacagaacaagaattgaaggccagctgcctccttatcaccccagtgattggaaatccagggctccagggtaggctgagttatgagarraragtgctgatgga

SEQ ID NO: 16828 - DNA, 600 bp, Chicken  19866894224505_10
gcacagaattttcataacttaataggaaagaccaaattgcctagtaagtaaatttttgtacacagcaaaagaatggaataayatgtaccacatgctggattcttcctcagatcccccatggatttgatggatccccctttcaccatgctcagccagatctaacagtgattttgaatattttagtgaagttaagtctggagaaagttgtcaaaggccccaaccctagactcagggagtgtgataatrtttagataaaaagtagatctcattgttttgtgcagatgactgtgcaaatgcarrtcattataaatgcatctgcagagaagaaggtggaagtaagaatgcatctgagttttgcttttgcagcagaaggctctggggttacataggagattaaaaaccagcactagaaagatcctgaatattgttttcttctttactggttcataggaagctactcaacctggtctccagtaaggggtgtgtcatggctctgtgatccttatgggtcccttccaacttaggatattctgtgattctatggtggcatgcagcactgacccgttcacctgaacacgaaccatccctttgttcccagga

SEQ ID NO: 16829 - DNA, 600 bp, Chicken  19866894224505_11
ctcttggagtcttctttcccccatgtccattccaatggcgctgcatttcaggtgaggtgggcagggcatgtggccccttgccagttctcctacatgaactttggtttgctctgcacgtctgtctgtgcttcagtccctgcctccaaccaaggtgaacctcccaggagggagagggagtgatgtgccacgttacacagggcctaaaggaaatcacactgcagctccaaaaatctgtgggatgggaaagtttatcctgtggttgtcccatccctggagttcaaggccaggttggatgggcastctgatctagtgcctggtttagtggctggcaaccctgtctgcagcrggattggaactggatgatctttgaactcccttccaacccaagccattctatgattccataattctatgattctacaattcgactgtaacagtaacacattyttaagaycttccacctgtaattcmtctgcagtattatttgcaataacaatttccgggtgagactgtgactatccctgaatctgaaaggtgtgaggaagtatccggctgagcttggacagaagatgaaggaagaccctgggggaggctgctgat

SEQ ID NO: 16830 - DNA, 600 bp, Chicken  19866894224505_12
ttcaggtgaggtgggcagggcatgtggccccttgccagttctcctacatgaactttggtttgctctgcacgtctgtctgtgcttcagtccctgcctccaaccaaggtgaacctcccaggagggagagggagtgatgtgccacgttacacagggcctaaaggaaatcacactgcagctccaaaaatctgtgggatgggaaagtttatcctgtggttgtcccatccctggagttcaaggccaggttggatgggcastctgatctagtgcctggtttagtggctggcaaccctgtctgcagcrggattggaactggatgatctttgaactcccttccaacccaagccattctatgattccataattctatgattctacaattcgactgtaacagtaacacattyttaagaycttccacctgtaattcmtctgcagtattatttgcaataacaatttccgggtgagactgtgactatccctgaatctgaaaggtgtgaggaagtatccggctgagcttggacagaagatgaaggaagaccctgggggaggctgctgatctgctctgagcccaaggcatccagatggcatccacagtgctgctgt

SEQ ID NO: 16831 - DNA, 578 bp, Chicken  19866894224505_13
caaggtgaacctcccaggagggagagggagtgatgtgccacgttacacagggcctaaaggaaatcacactgcagctccaaaaatctgtgggatgggaaagtttatcctgtggttgtcccatccctggagttcaaggccaggttggatgggcastctgatctagtgcctggtttagtggctggcaaccctgtctgcagcrggattggaactggatgatctttgaactcccttccaacccaagccattctatgattccataattctatgattctacaattcgactgtaacagtaacacattyttaagaycttccacctgtaattcmtctgcagtattatttgcaataacaatttccgggtgagactgtgactatccctgaatctgaaaggtgtgaggaagtatccggctgagcttggacagaagatgaaggaagaccctgggggaggctgctgatctgctctgagcccaaggcatccagatggcatccacagtgctgctgtcatcatgtcacatcatgggagatgtgaagtgattgacctagtcataaagagctgaatgatttgtttaaaaaatgttaag

SEQ ID NO: 16832 - DNA, 571 bp, Chicken  19866894224505_14
aacctcccaggagggagagggagtgatgtgccacgttacacagggcctaaaggaaatcacactgcagctccaaaaatctgtgggatgggaaagtttatcctgtggttgtcccatccctggagttcaaggccaggttggatgggcastctgatctagtgcctggtttagtggctggcaaccctgtctgcagcrggattggaactggatgatctttgaactcccttccaacccaagccattctatgattccataattctatgattctacaattcgactgtaacagtaacacattyttaagaycttccacctgtaattcmtctgcagtattatttgcaataacaatttccgggtgagactgtgactatccctgaatctgaaaggtgtgaggaagtatccggctgagcttggacagaagatgaaggaagaccctgggggaggctgctgatctgctctgagcccaaggcatccagatggcatccacagtgctgctgtcatcatgtcacatcatgggagatgtgaagtgattgacctagtcataaagagctgaatgatttgtttaaaaaatgttaag

SEQ ID NO: 16833 - DNA, 554 bp, Chicken  19866894224505_15
agggagtgatgtgccacgttacacagggcctaaaggaaatcacactgcagctccaaaaatctgtgggatgggaaagtttatcctgtggttgtcccatccctggagttcaaggccaggttggatgggcastctgatctagtgcctggtttagtggctggcaaccctgtctgcagcrggattggaactggatgatctttgaactcccttccaacccaagccattctatgattccataattctatgattctacaattcgactgtaacagtaacacattyttaagaycttccacctgtaattcmtctgcagtattatttgcaataacaatttccgggtgagactgtgactatccctgaatctgaaaggtgtgaggaagtatccggctgagcttggacagaagatgaaggaagaccctgggggaggctgctgatctgctctgagcccaaggcatccagatggcatccacagtgctgctgtcatcatgtcacatcatgggagatgtgaagtgattgacctagtcataaagagctgaatgatttgtttaaaaaatgttaag

SEQ ID NO: 16834 - DNA, 600 bp, Chicken  19866894224505_2
taataatatagtaccrtaactggtctatttcactttagaaaaataaaatcagaaaagtagtaatgtcctcctggtatatttgtcactgatatttttgatcttgaaacctatttcttaaagaagcgtatttcttaaagcacagagatgtgtctgtccaagttaatttgcaggagtgtgataataatttaaatagaaacagaattagtggagcagcacagaacaagaattgaaggccagctgcctccttatcaccccagtgattggaaatccagggctccagggtaggctgagttatgagarraragtgctgatggagttgcttactgctttggtataatcctgttcacttacagaatgtacgtgccgtcctatttcctagatgcagcaggaatcaaacagtgggaagcatgttccttactctcatctccaagtgccatttctgcccatacacactccatatcccctttcttatctgtgcagcaggactattttctggcarttgttcgtctttcatgtctggccattcccatttctttgctggattttctcatccttttgagcatataaggaaaagacaaatttttgcatttcaatttccag

SEQ ID NO: 16835 - DNA, 600 bp, Chicken  19866894224505_3
aataatatagtaccrtaactggtctatttcactttagaaaaataaaatcagaaaagtagtaatgtcctcctggtatatttgtcactgatatttttgatcttgaaacctatttcttaaagaagcgtatttcttaaagcacagagatgtgtctgtccaagttaatttgcaggagtgtgataataatttaaatagaaacagaattagtggagcagcacagaacaagaattgaaggccagctgcctccttatcaccccagtgattggaaatccagggctccagggtaggctgagttatgagarraragtgctgatggagttgcttactgctttggtataatcctgttcacttacagaatgtacgtgccgtcctatttcctagatgcagcaggaatcaaacagtgggaagcatgttccttactctcatctccaagtgccatttctgcccatacacactccatatcccctttcttatctgtgcagcaggactattttctggcarttgttcgtctttcatgtctggccattcccatttctttgctggattttctcatccttttgagcatataaggaaaagacaaatttttgcatttcaatttccagt

SEQ ID NO: 16836 - DNA, 600 bp, Chicken  19866894224505_4
taatatagtaccrtaactggtctatttcactttagaaaaataaaatcagaaaagtagtaatgtcctcctggtatatttgtcactgatatttttgatcttgaaacctatttcttaaagaagcgtatttcttaaagcacagagatgtgtctgtccaagttaatttgcaggagtgtgataataatttaaatagaaacagaattagtggagcagcacagaacaagaattgaaggccagctgcctccttatcaccccagtgattggaaatccagggctccagggtaggctgagttatgagarraragtgctgatggagttgcttactgctttggtataatcctgttcacttacagaatgtacgtgccgtcctatttcctagatgcagcaggaatcaaacagtgggaagcatgttccttactctcatctccaagtgccatttctgcccatacacactccatatcccctttcttatctgtgcagcaggactattttctggcarttgttcgtctttcatgtctggccattcccatttctttgctggattttctcatccttttgagcatataaggaaaagacaaatttttgcatttcaatttccagttg

SEQ ID NO: 16837 - DNA, 600 bp, Chicken  19866894224505_5
aattagtggagcagcacagaacaagaattgaaggccagctgcctccttatcaccccagtgattggaaatccagggctccagggtaggctgagttatgagarraragtgctgatggagttgcttactgctttggtataatcctgttcacttacagaatgtacgtgccgtcctatttcctagatgcagcaggaatcaaacagtgggaagcatgttccttactctcatctccaagtgccatttctgcccatacacactccatatcccctttcttatctgtgcagcaggactattttctggcarttgttcgtctttcatgtctggccattcccatttctttgctggattttctcatccttttgagcatataaggaaaagacaaatttttgcatttcaatttccagttgagcttcttcacatttgctggtcttctttgctcttcatcgagtgacattatctttgatttgggcagaagcttctgccagggtgcttactggctcccggcagctatctcagataaagagaagttgttatccttctgtgtaatatgattatccattcactaaggggactaacagaagcctacacttgtcaaacgactag

SEQ ID NO: 16838 - DNA, 600 bp, Chicken  19866894224505_6
tgtgcatgggtggcctccctcttctgttcactacgatggccagaaaggaggcctccaaggcaaaaggaaatgctggagtaaccctgtgctgcttggtcataagcaagtagtcttcccagatctagtcctggtgtctaatttcagcattacttttttttttagttatttcctaatctttctttggcccttgcttgcaaatcatagaatcactgaagttaaaaaagaccactaagatcttctggtcccaaccatcagcccatccccaccatgcccactaaccacgtccctcagtgccacatycagacagttcttgaacacctccagggatggtgactccaccaccgccctgggcagcctgtaccactgcctcaccactcattctgagaagaaatttttcctaatatccaagctgaatatccccaggtgcaacttaacgccatcacttctcacttttcacaggcccattttaaccaaatctcttgtctttgtagagtaaatgcccttctgcccggagttagcacactggtgacttgcagcactgggcacccacatgtaaaattttcacttctagagccagcaaagagaataatgttccccttg

SEQ ID NO: 16839 - DNA, 600 bp, Chicken  19866894224505_7
ttctgcccggagttagcacactggtgacttgcagcactgggcacccacatgtaaaattttcacttctagagccagcaaagagaataatgttccccttgagcagtggaaacctcagaagattgagataatttatcaatttatatagaaatttcctttttagatgacagatatacttgaattgcagctccttctttactataacatttatatcaattgaagcacagaattttcataacttaataggaaagaccaaattgcctagtaagtaaatttttgtacacagcaaaagaatggaataayatgtaccacatgctggattcttcctcagatcccccatggatttgatggatccccctttcaccatgctcagccagatctaacagtgattttgaatattttagtgaagttaagtctggagaaagttgtcaaaggccccaaccctagactcagggagtgtgataatrtttagataaaaagtagatctcattgttttgtgcagatgactgtgcaaatgcarrtcattataaatgcatctgcagagaagaaggtggaagtaagaatgcatctgagttttgcttttgcagcagaaggctctggggt

SEQ ID NO: 16840 - DNA, 600 bp, Chicken  19866894224505_8
cagatatacttgaattgcagctccttctttactataacatttatatcaattgaagcacagaattttcataacttaataggaaagaccaaattgcctagtaagtaaatttttgtacacagcaaaagaatggaataayatgtaccacatgctggattcttcctcagatcccccatggatttgatggatccccctttcaccatgctcagccagatctaacagtgattttgaatattttagtgaagttaagtctggagaaagttgtcaaaggccccaaccctagactcagggagtgtgataatrtttagataaaaagtagatctcattgttttgtgcagatgactgtgcaaatgcarrtcattataaatgcatctgcagagaagaaggtggaagtaagaatgcatctgagttttgcttttgcagcagaaggctctggggttacataggagattaaaaaccagcactagaaagatcctgaatattgttttcttctttactggttcataggaagctactcaacctggtctccagtaaggggtgtgtcatggctctgtgatccttatgggtcccttccaacttaggatattctgtgattctatggtg

SEQ ID NO: 16841 - DNA, 600 bp, Chicken  19866894224505_9
agcacagaattttcataacttaataggaaagaccaaattgcctagtaagtaaatttttgtacacagcaaaagaatggaataayatgtaccacatgctggattcttcctcagatcccccatggatttgatggatccccctttcaccatgctcagccagatctaacagtgattttgaatattttagtgaagttaagtctggagaaagttgtcaaaggccccaaccctagactcagggagtgtgataatrtttagataaaaagtagatctcattgttttgtgcagatgactgtgcaaatgcarrtcattataaatgcatctgcagagaagaaggtggaagtaagaatgcatctgagttttgcttttgcagcagaaggctctggggttacataggagattaaaaaccagcactagaaagatcctgaatattgttttcttctttactggttcataggaagctactcaacctggtctccagtaaggggtgtgtcatggctctgtgatccttatgggtcccttccaacttaggatattctgtgattctatggtggcatgcagcactgacccgttcacctgaacacgaaccatccctttgttcccagg

SEQ ID NO: 16842 - DNA, 600 bp, Chicken  19866894224509_1
cttccatgaggtatcctttctgtctgcagagcattcatctcggtcattttacagcataaactttgtccttcagtcaagtcctgttgtgatgcttgttgttaaaggctagtaaacattgctgtatttatagtcaatttctgatccgtggcccactacctgataccatttttgcttccctttgaaaagcatgttgcacatgaaaacttcaccctgttgtcatcttagttgccagtgttgtgcacaacattgttgaggctatatctcaaatactgtgtttactttagggtccctcactacaasaggaatgttgagttgctggaatacattcagagaaaagcagtgaagctgaggaagggtctagaaaacaagacagatgatgggcaattgagggaattaggattatgtaatctgggaaagggaagctgagaggaaatctcatcattctctacatctacctgaaaggaggttgcagcaaaggaagtgtcgttatcttttctcaagtgacaagaggtaacttcccctggtagatcttaagttgtgtcaggggaagtttaaattggatatcaggaagaatttctccatagaggagtggttaggcat

SEQ ID NO: 16843 - DNA, 600 bp, Chicken  19866894224509_2
gggcaattgagggaattaggattatgtaatctgggaaagggaagctgagaggaaatctcatcattctctacatctacctgaaaggaggttgcagcaaaggaagtgtcgttatcttttctcaagtgacaagaggtaacttcccctggtagatcttaagttgtgtcaggggaagtttaaattggatatcaggaagaatttctccatagaggagtggttaggcattggaacgggctgcccagggaagcagtggagtccccattcctggaggtatctaagagatgtgtggatgtggcaataagrgacatggcttagtgatgtgacttggtaagctgggttgaaatttggttttcatgatattgaaggtcttttccaacctagatgtgattctatgactagacaaatcaatatttacttgaaaaaagaatagccatgttgaccagcacagcctcctctcaggtttctaatctcttaggatatttgttttccttgccttgatttgcaatttckgtgaatctttgcatggtagctattacatgtggcctgggttattttatttgggctgtgataatgtgataaactagataatggttagcctgctcg

SEQ ID NO: 16844 - DNA, 600 bp, Chicken  19866894224509_3
ggagtggttaggcattggaacgggctgcccagggaagcagtggagtccccattcctggaggtatctaagagatgtgtggatgtggcaataagrgacatggcttagtgatgtgacttggtaagctgggttgaaatttggttttcatgatattgaaggtcttttccaacctagatgtgattctatgactagacaaatcaatatttacttgaaaaaagaatagccatgttgaccagcacagcctcctctcaggtttctaatctcttaggatatttgttttccttgccttgatttgcaatttckgtgaatctttgcatggtagctattacatgtggcctgggttattttatttgggctgtgataatgtgataaactagataatggttagcctgctcgttgcattaacccttgatgagaaactgtattctggcatccatgtggtactcccttcccttaccagcgttcagacatattctacggtctagacttygtgttcaaataagaaaaagtccaagccgattgaagtagtgttgctatctaatgaaaccttgctgataatgaattgctctaactggttgctgctgaacaactgcttttctaatt

SEQ ID NO: 16845 - DNA, 480 bp, Chicken  19866894224509_4
agacaaatcaatatttacttgaaaaaagaatagccatgttgaccagcacagcctcctctcaggtttctaatctcttaggatatttgttttccttgccttgatttgcaatttckgtgaatctttgcatggtagctattacatgtggcctgggttattttatttgggctgtgataatgtgataaactagataatggttagcctgctcgttgcattaacccttgatgagaaactgtattctggcatccatgtggtactcccttcccttaccagcgttcagacatattctacggtctagacttygtgttcaaataagaaaaagtccaagccgattgaagtagtgttgctatctaatgaaaccttgctgataatgaattgctctaactggttgctgctgaacaactgcttttctaattcttaatttattttcttcaactgagttttattaaagaagactaggagttatttatgcatttcttttcc

SEQ ID NO: 16846 - DNA, 600 bp, Chicken  19866894224514_1
caataaagcagtatagattggcacatctctaataaagattaactttaacactcaaaaaaataccaactcccatgaaaaccctttgtctttttgatatctttatgcaagttatgtcgcaaacatattacagatgagttctcctctatctcaaagtcacttgtaataattttttagagaaaatgaacatctttgtactgttaaagggacactatcaggctaatgagagacatatgtggggaaaaaaaaaaaagcaaatttgtgaagggaaacttcaatctaacaaagggtaaattttacacrctttcatccaccttgacaatagttataaccagtgctagggactggatctgccccctgcaaggacacagtgtgtacctacatacctggtgaaggtccccagcctgcgcctggagcagtgagagcccatagccagcacttcacctgactgcatggctccaggaatgctttgagccaaatagacaaaccagcagaaaaaatgttttttccttgtgattgagacggaattaacacacgtgctggggaggtgagttttgcttttttttttttttccttaaaacaagaacctaatgttaatctgag

SEQ ID NO: 16847 - DNA, 598 bp, Chicken  19866894224519_1
ctcctgaatgcaaagcttctcccctgcaaaaatcttcagctgaagatgctatttcttgtatagagtgctttagaatgtagcaacttagaacatctttaaagaaaaataagaaaatgttttcttcacagaagactgcagaggaatataaaatagttcatgattgctagattgcacaaaaaacatagctaaacccaaattattgtttctctgcaagttatgtaaatcctctggtgcctgcactgattgctgctttcatcacactgctttagccttaatagatttgcttttgtgtgatcaaayctcattgccttttcatttgacttcatttgctaatgttctgggaagcccatgggctgttccctagcagctctcatgtagtcaatagcagtggtccacaaccctccttgccatgtctctgactgcactcccctatacaccaatcctcttaactcttcttacctgaaccataggtaaaaaaaatgcaaaaacctaagctaaatcagaaaaatgatttagaacccttttctcaacatgactgtgctacagtaggaagcatctcaacttcaatgggttgactgaagtgaacaccttatcgaaa

SEQ ID NO: 16848 - DNA, 600 bp, Chicken  19866894224520_1
atcctatcctatcctatcccatcccatcccatcccatcccatcccatcccatcccatcccatcccatcccatcccattcatactatctgcaacaaaatctatgctttatataaccttacagaactcacgtagtccctccatgtctcaggttcatgttttgaaatggcctcaaaaactgagttcagagaagtgtcaagatgaatccaaaaactactgtgacattatcacagcatgggaagagaacaagagagatgcagccaaaacatttcaaaccacattttaaacaagaggtttatcctscactgacatgtgtcttgacgtacgcaatgttgagacagaaaaaaaaaatggacaaagaagaatctcagctaattggatcaacacttttccatcaccatttcagaaatttcagaaacaagaaaaaacttttcaaacccttaggaaacacaccatagcctccctggatatctagctccttttcacttcagcacaaacagtactgtctgtgctgcacaagggaaaakaaatgaaattgcacgactcagcttagtcagtgctgcatcacttgagaactattccagcagggaattctggggcttc

SEQ ID NO: 16849 - DNA, 600 bp, Chicken  19866894224520_2
tcacagcatgggaagagaacaagagagatgcagccaaaacatttcaaaccacattttaaacaagaggtttatcctscactgacatgtgtcttgacgtacgcaatgttgagacagaaaaaaaaaatggacaaagaagaatctcagctaattggatcaacacttttccatcaccatttcagaaatttcagaaacaagaaaaaacttttcaaacccttaggaaacacaccatagcctccctggatatctagctccttttcacttcagcacaaacagtactgtctgtgctgcacaagggaaaakaaatgaaattgcacgactcagcttagtcagtgctgcatcacttgagaactattccagcagggaattctggggcttccacagcagggtcggcagccagaatgaatcacccaccgcgactctgctgagcatctggcatttcagctatgggagcgtgagaagacagaaatggattcaaagctggggaggaagcttccattttacagcagttcaagggtgatgagatgctattttttaaaaattaattatgcagcagagacacaactcataatagctctgaagaaatagtgtaagccttaatat

SEQ ID NO: 16850 - DNA, 505 bp, Chicken  19866894224529_1
tgaagtatagctcttataatagatttttttttcagagagcatgaggaaaattgcttaggtgttaagacattcaattttgaggtcagaaattcaggtttcatctttagatctattcacctggggcattcagacaggggacattgaaaatgagtcagcagctacttcctttaaccctgcgcaatgtgctgactgtcgggaggtgggttttttggccagagtgatctaattgcctctgtccagggcatagacaatgacttgccatgggcagtgctgcagacagcaaccagtatttgtgccgtmccattatgtctatcactgcctgttctcatgggaagcaagtgctgcttgtaaattgcaagataaagaattccagaaatatatacatcaaagggcacatttcagtcaaaccaggacctgaattcatttagaagagaagaatagctgtgctaatggtgcatgatgtgcaggaagtagacaggaaggtcagcttgatttggcttatgtt

SEQ ID NO: 16851 - DNA, 600 bp, Chicken  19866894224540_1
agtggaagttgtgttgctgtttgcttgatctgcagtttcatgctaaaggcaaatacactgctaaaaatataacttctatctgtagcgaaggaagatggcatgaagcctcaataaaaaaacaaacatatctaagctgataacaggaaggctctactgactgtatcaatacactgaaaatttaaatagcacaacaacttctcatgttgattaaagtaataagctgtatttggaattctttatcaaaatagtactatttcatcttgctttgctggccaagggaaccgtaattttgcttagttrgtgcaaataccagtgagttctcaaaattacaagttcaacaacttgaaaaatgaaaaactgtgttaaatattctccatatcccaaggcatggctatgtaaatataagttgctgtctcatgatgtttgaaggacttttacaaacaaggccttgcaattttaaggatggttcagtcatgtagttagggtaagaatacattcgtaaatgattgctatcaaaatatctacccctgaaatattgtctttattgttctgcttcatataatgaacacatatgttagctttatactgtactgtctacat

SEQ ID NO: 16852 - DNA, 599 bp, Chicken  19866894224545_1
atgtttttaaatgtcagactctgttagaggaagccaaggggtgaaattacaatgttccttgctatgttataatccaggataactgcaggacataaaggagggcagtagatcagaaaaaaagcccagggtgtgcttctttacatgggaaacaaattcaaaactgaagatggaactgagacctgtgtaggaatctaaggtagtactgttttcatcaaaaaatccaatagacagtattatcattttgctgctattttagcccatgtgtattaggatttgagcctgcagattagaattcattaratttctgttcttatacatcaaacttgttctgctttgttccctgaattcacctgcatccagtatgcttacctgagtgtctttacctcttaggaagctgacacagatgagaaccaaggaactctaaattttgaagaattttcagtgttttacaagatgatgtcgttgcgtcgagacctctacttactgctcttaagctacagtgacaagaaagatcaccctcaccgttgaagaacttgctcaatttctgaaggtggaacaaaaggtatggaaatacatatccatacatatctacatgcata

SEQ ID NO: 16853 - DNA, 599 bp, Chicken  19866894224549_1
  misc_feature (1)..(3): n is any nucleotide
nnnatactctttttgctacagaaatgtatcacttgacgacagtacaaatcatgaaatcgaagttgcatttcacaacatttttgtcactcaaatgaatgccaaagtagaacaaacatcagacatatgccagcctgaagaacaaggacagtgatagaacactcagtaaacacaacatctaactgacacagtattcagctggggggatgggagagaagcaataccaaaattgcagtggtgctccaagcattaattatctgaagtgtagacctcaaaaacacaaagaatgaaccttgtatgagrtgcagattgcttgaaaggagtgttgctaccattctcaatcttttccctataattaatagaatgggtcagtatcgtttatttgctaacagtttttctctcttcttattctattacttaggctgaatataaatagagaaatcctataatctggtaaaacaaacaaacaagcaagagcaacaaaaaaaacatccacagttactatatgctcttcattttcagaaggaagcatctcttctgctgtttaatttatgcatctttcaaattagtataaaccaatytgaggaaaatgcatttttaaa

SEQ ID NO: 16854 - DNA, 600 bp, Chicken  19866894224549_2
aaagaatgaaccttgtatgagrtgcagattgcttgaaaggagtgttgctaccattctcaatcttttccctataattaatagaatgggtcagtatcgtttatttgctaacagtttttctctcttcttattctattacttaggctgaatataaatagagaaatcctataatctggtaaaacaaacaaacaagcaagagcaacaaaaaaaacatccacagttactatatgctcttcattttcagaaggaagcatctcttctgctgtttaatttatgcatctttcaaattagtataaaccaatytgaggaaaatgcatttttaaaccatttccatttctgcagccttctayctattagaaayatggaagaaaaacaattacacttcttaccaaccatcccagtggaaagaaagaaatctagcctggcaaaggtatcttttccttgtgggctatgtgttattgagcatggtggtttcaacyataataggacggaactccatctgtaaaaataaactgctacacagctacatcagcatatcctaggcacagcatgcttggctccattttgtgataagctgccacatggggaattagattagtgtaa

SEQ ID NO: 16855 - DNA, 600 bp, Chicken  19866894224549_3
ctaccattctcaatcttttccctataattaatagaatgggtcagtatcgtttatttgctaacagtttttctctcttcttattctattacttaggctgaatataaatagagaaatcctataatctggtaaaacaaacaaacaagcaagagcaacaaaaaaaacatccacagttactatatgctcttcattttcagaaggaagcatctcttctgctgtttaatttatgcatctttcaaattagtataaaccaatytgaggaaaatgcatttttaaaccatttccatttctgcagccttctayctattagaaayatggaagaaaaacaattacacttcttaccaaccatcccagtggaaagaaagaaatctagcctggcaaaggtatcttttccttgtgggctatgtgttattgagcatggtggtttcaacyataataggacggaactccatctgtaaaaataaactgctacacagctacatcagcatatcctaggcacagcatgcttggctccattttgtgataagctgccacatggggaattagattagtgtaacttgagagaaatgcagcacagttacaccaatacaaggttggtgaaac

SEQ ID NO: 16856 - DNA, 600 bp, Chicken  19866894224549_4
aatcttttccctataattaatagaatgggtcagtatcgtttatttgctaacagtttttctctcttcttattctattacttaggctgaatataaatagagaaatcctataatctggtaaaacaaacaaacaagcaagagcaacaaaaaaaacatccacagttactatatgctcttcattttcagaaggaagcatctcttctgctgtttaatttatgcatctttcaaattagtataaaccaatytgaggaaaatgcatttttaaaccatttccatttctgcagccttctayctattagaaayatggaagaaaaacaattacacttcttaccaaccatcccagtggaaagaaagaaatctagcctggcaaaggtatcttttccttgtgggctatgtgttattgagcatggtggtttcaacyataataggacggaactccatctgtaaaaataaactgctacacagctacatcagcatatcctaggcacagcatgcttggctccattttgtgataagctgccacatggggaattagattagtgtaacttgagagaaatgcagcacagttacaccaatacaaggttggtgaaactgttgctgaag

SEQ ID NO: 16857 - DNA, 537 bp, Chicken  19866894224549_5
aacaaacaaacaagcaagagcaacaaaaaaaacatccacagttactatatgctcttcattttcagaaggaagcatctcttctgctgtttaatttatgcatctttcaaattagtataaaccaatytgaggaaaatgcatttttaaaccatttccatttctgcagccttctayctattagaaayatggaagaaaaacaattacacttcttaccaaccatcccagtggaaagaaagaaatctagcctggcaaaggtatcttttccttgtgggctatgtgttattgagcatggtggtttcaacyataataggacggaactccatctgtaaaaataaactgctacacagctacatcagcatatcctaggcacagcatgcttggctccattttgtgataagctgccacatggggaattagattagtgtaacttgagagaaatgcagcacagttacaccaatacaaggttggtgaaactgttgctgaaggcttgcatttttctgtattgtaagcggaggagtatgagaggagagtttcagcagg

SEQ ID NO: 16858 - DNA, 600 bp, Chicken  19866894224556_1
cttattttgcagtaatgcagattctgtattattaaataagaaacattcatatattcatctttactgtatagttacatgtcactaaagtcaatatattcatatcgatatctctggagaaagaaatcattacagtccacatattttatcttaaatttctgtagattttaaagacaaatccccaaaatttccacattttccatccagattccctgctcatgtttatgtattcagactatatcaagagatttcttttttagtatttcaataagtttccaatattcagaaatatgttgaaatggsgcttaaaaattgtattattcatagtatttgtggttatgtacaatactttgcaaactaaaactcaaggcacattttgttatgctaaaaaaaaagccctggtgactgtcctaatttggctataggtgtaagaaccgctcattaaaatctaatgtcagactcaaagctagcacaaagtttcattatgcaaacatgaaatcgactggaagggctaatgagggtagaaagataccctagatatcaatagaaaacaatctacttctagcaaagactttcttctgggaatttcccccagctacaatg

SEQ ID NO: 16859 - DNA, 600 bp, Chicken  19866894224560_1
gttaatttctttcttttttcctcttctaatttaggtcaacatttaatccctccccccaaaattgtggagtaaataagttctaaaaacgtccaatagattttccaaaataaaggcaaactttttcacaagaaaaattccccataaacctcccctttcttttcgagccctatccccagccaccctggcattcccaacgcaatctgactttatgagtagatgctctgtagcatcacagtaggacgagcaatttgaacagactacctgtgcatgcaaacaaatgtctccatgccgcttcacacrtgacagcctaccaacaccccgcttctgcaaacactatggccacagccagccctgaaatgcaagttgcccatccttcacactccagtctcctccctttctgcatttgacttttgccagccgctaccatcagttagcagccaccatggygatgagctaagctgttccctcgctcacacaggcattgttttgtatatctctccaagcagacaataaaactgcctgaagccacggtctttattcwgatgtacatactaatggcagagaatgctccagtaaatggtctgctattaaatgtcgaty

SEQ ID NO: 16860 - DNA, 600 bp, Chicken  19866894224560_2
tcccctttcttttcgagccctatccccagccaccctggcattcccaacgcaatctgactttatgagtagatgctctgtagcatcacagtaggacgagcaatttgaacagactacctgtgcatgcaaacaaatgtctccatgccgcttcacacrtgacagcctaccaacaccccgcttctgcaaacactatggccacagccagccctgaaatgcaagttgcccatccttcacactccagtctcctccctttctgcatttgacttttgccagccgctaccatcagttagcagccaccatggygatgagctaagctgttccctcgctcacacaggcattgttttgtatatctctccaagcagacaataaaactgcctgaagccacggtctttattcwgatgtacatactaatggcagagaatgctccagtaaatggtctgctattaaatgtcgatyatcatcatgcactacctctctgctcacaattgcattttctcattttccctagggaccactcaggaaacaattttgcccctaaaatctaagtaccaggtcttgaatttgtaattggagtaacattcagataaggcctgggaattctct

SEQ ID NO: 16861 - DNA, 600 bp, Chicken  19866894224560_3
gagcaatttgaacagactacctgtgcatgcaaacaaatgtctccatgccgcttcacacrtgacagcctaccaacaccccgcttctgcaaacactatggccacagccagccctgaaatgcaagttgcccatccttcacactccagtctcctccctttctgcatttgacttttgccagccgctaccatcagttagcagccaccatggygatgagctaagctgttccctcgctcacacaggcattgttttgtatatctctccaagcagacaataaaactgcctgaagccacggtctttattcwgatgtacatactaatggcagagaatgctccagtaaatggtctgctattaaatgtcgatyatcatcatgcactacctctctgctcacaattgcattttctcattttccctagggaccactcaggaaacaattttgcccctaaaatctaagtaccaggtcttgaatttgtaattggagtaacattcagataaggcctgggaattctctgggtgcgtgaaagacctgcactcccctgggcatggggcatggccagaggactgcttggacaatgctttaagatacagggtttaaatttttgggt

SEQ ID NO: 16862 - DNA, 600 bp, Chicken  19866894224560_4
tgacagcctaccaacaccccgcttctgcaaacactatggccacagccagccctgaaatgcaagttgcccatccttcacactccagtctcctccctttctgcatttgacttttgccagccgctaccatcagttagcagccaccatggygatgagctaagctgttccctcgctcacacaggcattgttttgtatatctctccaagcagacaataaaactgcctgaagccacggtctttattcwgatgtacatactaatggcagagaatgctccagtaaatggtctgctattaaatgtcgatyatcatcatgcactacctctctgctcacaattgcattttctcattttccctagggaccactcaggaaacaattttgcccctaaaatctaagtaccaggtcttgaatttgtaattggagtaacattcagataaggcctgggaattctctgggtgcgtgaaagacctgcactcccctgggcatggggcatggccagaggactgcttggacaatgctttaagatacagggtttaaatttttgggtggccctgtgtggagcccggagatggactcgatgatccttaggagtatcttctaacttgg

SEQ ID NO: 16863 - DNA, 599 bp, Chicken  19866894224564_1
  misc_feature (1)..(127): n is any nucleotide
nnnnnnnnnnnnnnnnnnnnnnnnnnnnnnnnnnnnnnnnnnnnnnnnnnnnnnnnnnnnnnnnnnnnnnnnnnnnnnnnnnnnnnnnnnnnnnnnnnnnnnnnnnnnnnnnnnnnnnnnnnnnnnnaactctccatccctccctgccagactctttcagttgctctccagacatccctgcaaagcaccaaaatccacccctgcatcagttacctcccctttcatcagcagagcctgggcagatacagcagccccacaactcacatgtcaggtgaatgcacggtcttgacatgtccagcrtaaagcagcttgtcatccatggggatgaggacacgcaggccatccttcagctcatccttgtcaattatgcaggagcggggagctgtgaggtgttgaagcaagacagggattagagaacgccacagaggaaaaagcaaccgcaaagggagagggaaatttcattcccccagcatgatcctcccctaggaaaggaccagcaagccctttgcagaaaggcatccttcttggtaataacagtatgtcagcaaatgaaaatagggcagctcggacactgggcttcatctagatgtcaaacagag

SEQ ID NO: 16864 - DNA, 600 bp, Chicken  19866894224569_1
gagcggaggggacgctgccaaggaacccacctccttcaagaggatggagaagaggcagtcatttggaggcttttttaaaggccttgtacgttatgttgatcctgtctttttaagttatttcttaacaaattttaactcccaatctgcgagctgttaaccctgtgagatttgtgctctgatgcacagtacgtccatatcaggagtgtcattttgtaagcagcttgcaggactagagctaaaatgcaatgtgttggtcaggggcaagaaaacttgggcctcggggtagtgatttacaggtasaaccaactgtgggacagccataattgctcccacacccctgcttcacaggttcatgccttggccgtggggatgactcaactgctcctgtagcaggtgctgaaccacctacaaattatggtgtatacatgaaggaaaagtgagggtggtgtcagtttgccgagacacgctgcctccacagtggtaactcagctgctgctctggggcagatggtgcatccctgcacggagcagtggaccaaactcgaggagaaaatcaaggcattcctcttgctggttggaaaacagcacagatgtcacaaga

SEQ ID NO: 16865 - DNA, 599 bp, Chicken  19866894224575_1
  misc_feature (1)..(96): n is any nucleotide
nnnnnnnnnnnnnnnnnnnnnnnnnnnnnnnnnnnnnnnnnnnnnnnnnnnnnnnnnnnnnnnnnnnnnnnnnnnnnnnnnnnnnnnnnnnnnnnntttgtttgccccctacatcatctaccatttagaggaaaatacaagagttttgaaatggttaaggcttagaaccatatttcattattgcccttgagactggaggacttatgaatgtaaaataaaaagactgccaaatgaaggggagagctgcaggtacttcagcccttagtgccaaatatctgcacatttatagtgaagcaggtwtatatctgatgttttccctagatcttaagtgtctcctgtgatcctgagaactgcacgtgaagctgctctgagagcatttgacatttaactcacatgctgtgctttttattgtacataaggtccctgytcctccatgccaacaactgggcacttcctcgccttgctgtgggagatgcttagcacagacaagtaactccaaacccagctgtacaaagtcctcagtaacctgctgtagttgaggcatctttggtcaagagggttggattaggtaatttctaaacctctcctttygtacctca

SEQ ID NO: 16866 - DNA, 600 bp, Chicken  19866894224575_2
gaggaaaatacaagagttttgaaatggttaaggcttagaaccatatttcattattgcccttgagactggaggacttatgaatgtaaaataaaaagactgccaaatgaaggggagagctgcaggtacttcagcccttagtgccaaatatctgcacatttatagtgaagcaggtwtatatctgatgttttccctagatcttaagtgtctcctgtgatcctgagaactgcacgtgaagctgctctgagagcatttgacatttaactcacatgctgtgctttttattgtacataaggtccctgytcctccatgccaacaactgggcacttcctcgccttgctgtgggagatgcttagcacagacaagtaactccaaacccagctgtacaaagtcctcagtaacctgctgtagttgaggcatctttggtcaagagggttggattaggtaatttctaaacctctcctttygtacctcagctrttttggcattctctgaattgatcgacttgagcagagacctgatgggcttttgtaccatttccagcattttaattcccttcaatgtaatctacttgcaggggactggttttagtaataacaatat

SEQ ID NO: 16867 - DNA, 600 bp, Chicken  19866894224575_3
aagcaggtwtatatctgatgttttccctagatcttaagtgtctcctgtgatcctgagaactgcacgtgaagctgctctgagagcatttgacatttaactcacatgctgtgctttttattgtacataaggtccctgytcctccatgccaacaactgggcacttcctcgccttgctgtgggagatgcttagcacagacaagtaactccaaacccagctgtacaaagtcctcagtaacctgctgtagttgaggcatctttggtcaagagggttggattaggtaatttctaaacctctcctttygtacctcagctrttttggcattctctgaattgatcgacttgagcagagacctgatgggcttttgtaccatttccagcattttaattcccttcaatgtaatctacttgcaggggactggttttagtaataacaatataatttatcacatggaaattttatccaaagaagttagcattgtttgtggtcttggtttccattggtggtgacgttgctgtatcttgtgacagctggagatgttcctgatttaatctgttgtgagtgtggtttgaatcttatcttttgcagacaagacgaagaata

SEQ ID NO: 16868 - DNA, 600 bp, Chicken  19866894224575_4
atctgatgttttccctagatcttaagtgtctcctgtgatcctgagaactgcacgtgaagctgctctgagagcatttgacatttaactcacatgctgtgctttttattgtacataaggtccctgytcctccatgccaacaactgggcacttcctcgccttgctgtgggagatgcttagcacagacaagtaactccaaacccagctgtacaaagtcctcagtaacctgctgtagttgaggcatctttggtcaagagggttggattaggtaatttctaaacctctcctttygtacctcagctrttttggcattctctgaattgatcgacttgagcagagacctgatgggcttttgtaccatttccagcattttaattcccttcaatgtaatctacttgcaggggactggttttagtaataacaatataatttatcacatggaaattttatccaaagaagttagcattgtttgtggtcttggtttccattggtggtgacgttgctgtatcttgtgacagctggagatgttcctgatttaatctgttgtgagtgtggtttgaatcttatcttttgcagacaagacgaagaataaactttcctttc

SEQ ID NO: 16869 - DNA, 600 bp, Chicken  19866894224579_1
tctgtgtaaagaaaatagctgctgcaaatgttattttggtcagtcttctagtctgttttgtccttgatggagttcttgatcttcccacagggtcatagtgacctagctgatttaggtttctaaggtaaaggcacaaagttatacaaagtcctgtgccttcctccttcctgtgcctattcacaccctcatagggtctacaaatgccagtctgaattaaagagaaacataacaaaaagctgatgtatgttcagtctcatgccataatattgtcatcacacttttctagttttgtcacacctrttcctctccattatactttaattatttttattataaacagtatacatgctaaggtataactaatgcatattatacatatgcaacacatactaaaatgaatttaatgtttcagcctctgtgaagatgtctgtaggacattgagatattacagcagaatggttatatagaaaagcagtgaaatttcaaagtgaaatgcattttattttgctcagtataatctgttataatacagatagctataggtaaaggaaaggtttacaaaaatttccttaaaagaggagagaagaagggagagaagca

SEQ ID NO: 16870 - DNA, 600 bp, Chicken  19866894224579_2
attgttgatactggctctttgaaaatttcacgtgccctcaggctttgccttgaggaaagatgcttgggtgagttacaatcagtaacaatcacttctttctccttatatcttcttggtcaaagtatcagtgtgcacatctgattaacaggccacagatcaatatatttcatgaaattctaaatttatttttatttcagagatgaacttttatcttttattatgagctttaatacagtcctaaggtgagtgttcccatggaactgaaaagagaccactcagatgaataaagttaatcacacrtataaaagtttgtagaactgagctgatgtaatatactgcttctaagagtaaggatcccttttctatgcacaaaaaataaaaattctaacattctcttatattttaaagatattaagagtgcaattcagaaagaaactccaatctcatgccacgttgaagcatgaatttccattgtagtgcttagtgctcttttgagctcttggaaatcatttacctggagtataagaggcatggtgaagcatacctaccatgctgtgagcaggcatgaactcacaccctgtaaacttcatgcaaactaaa

SEQ ID NO: 16871 - DNA, 600 bp, Chicken  19866894224586_1
gccagtacctgacatattggatcattttcccctgctttttgtaacaagtgttgttgtgactgctccataggtatatacttgaactgcagacatcacaggcaatctttcatttgccttatgaaatactaatgcctattggtgtgataaaacaccttcatatccccacgagattgcttgcatgaacctcaaggaaaagccaatcaaagcagagagagctagatgggggcacaatatcatcctttgctataagggaagtacaggcaggccagaagccaagaagtacttatgttgctcgtcacwttactgttgctactacacagttaattgcttcttctctagtggaggattttttttcccttagactgcagtgtgcctgtgctggaactccagtgatatgactccattacatggattgttgctgaacagtactttcacaacatcaaggctgtcactcttacccctggatcccaaaagagactaggatgcaagtggtcaagaagttaggtgggtaaatagtttggacaatgacttaaagagaccaaagggataatcataccatatgacattgatctctatttccagctaacttctctttcaagt

SEQ ID NO: 16872 - DNA, 600 bp, Chicken  19866894224593_1
catgttctatagaaattattcagctgaaatctagcagcagtatatgtaaatgctgctgtgggcatgactaattcacaatccacagatctgttcagaataatgaagcccaaaacttttatcttgtcactttcttcccaatggtaccttatactaacataaagaaagagatgaagtatagacaaattgttctggcagattcgctcctagatttttttcttttatgagggctgtgctaaacctccctcctcccatctgaatgtgtgttaaaatgcagacatctatcatatgacatgcagaggsgtgagtcctgtgcgtcaactgcaactgctgagaaggagaacacccatctctgcaggcgtgtgatgaggatgctgtcaactcatgarcaaccagcaggcaggactgcgttttgatcatgcagcagggaaaactacatgatgtgacctgtgtgtaatgaagtgtgtgttcgtgtgtatggcctccagtgtggcgacagtgtcctgtttgtaactgacggctgtgcagactaatggctggagatccgacaggtgacctggcgacaaagacactgtcacgttataagtaatggtgctatgagct

SEQ ID NO: 16873 - DNA, 600 bp, Chicken  19866894224593_2
tctgttcagaataatgaagcccaaaacttttatcttgtcactttcttcccaatggtaccttatactaacataaagaaagagatgaagtatagacaaattgttctggcagattcgctcctagatttttttcttttatgagggctgtgctaaacctccctcctcccatctgaatgtgtgttaaaatgcagacatctatcatatgacatgcagaggsgtgagtcctgtgcgtcaactgcaactgctgagaaggagaacacccatctctgcaggcgtgtgatgaggatgctgtcaactcatgarcaaccagcaggcaggactgcgttttgatcatgcagcagggaaaactacatgatgtgacctgtgtgtaatgaagtgtgtgttcgtgtgtatggcctccagtgtggcgacagtgtcctgtttgtaactgacggctgtgcagactaatggctggagatccgacaggtgacctggcgacaaagacactgtcacgttataagtaatggtgctatgagctgtaacttacttttttgtgaggtatttcatcatacctgtgtgagtgcatgtgtgtatctgtagttgtttaataagaacagctggttt

SEQ ID NO: 16874 - DNA, 600 bp, Chicken  19866894224603_1
cccttgggaattcagaattgtgaatacattcaaaatgtattcaaacttgctaaagtcaaacatacagagttcgttccagctgacaccttgtgctatcctgtcactacaaatatataagatagttgaggtcacagaagtgacctcaaaggcctttatacttaaatagtcacagactaaatcagaaacatttctgttctgcttacagagacgttacagaacagagaggaagagaaatcagaaatccccaaactcaagtttctctggatagagcaggcaaaaatttctaagtaatgccataaygcattagaagtcttctttcaaaatattacacctctctctaatgggtgtttaagaaaggtaaacagttgtttattgtttggaacattagtgatttctctagtgctgacagmgttacatttccctacaaacaatggctcacagtgtcagggtatgactaggagttgctaaataaataactcatgaatatgctaggaagatctggtacattcttaagaaattattcacctgagttttgttgttcttcagcttcttcagttcacaactgtcactgagtaaaagaggcagcaatctgtgtttcca

SEQ ID NO: 16875 - DNA, 600 bp, Chicken  19866894224603_2
tatataagatagttgaggtcacagaagtgacctcaaaggcctttatacttaaatagtcacagactaaatcagaaacatttctgttctgcttacagagacgttacagaacagagaggaagagaaatcagaaatccccaaactcaagtttctctggatagagcaggcaaaaatttctaagtaatgccataaygcattagaagtcttctttcaaaatattacacctctctctaatgggtgtttaagaaaggtaaacagttgtttattgtttggaacattagtgatttctctagtgctgacagmgttacatttccctacaaacaatggctcacagtgtcagggtatgactaggagttgctaaataaataactcatgaatatgctaggaagatctggtacattcttaagaaattattcacctgagttttgttgttcttcagcttcttcagttcacaactgtcactgagtaaaagaggcagcaatctgtgtttccaaaacagcttcttacattaccccatgcaccgttcatttgtacaagttatacatctgatttttaccaagatccaggaagaaccagaagttctatcacactaagaaagcatga

SEQ ID NO: 16876 - DNA, 600 bp, Chicken  19866894224608_1
taaagtgtttctacaaacacagcaaatatcttagaagaactataatttaccggattctaaacatgccatttccaagctgtactcagcggacataaatctctcaccttggcttactaatcaaagattgcacagtgaaatatcttagactaatcattacctctgatctctcagtcctcatgcccaatgcagcccacaagacactctgaaacaacctcgtgacaaagttctgcccatgtggagcctgctcctccgcatatctggaatcacacattcaacagttagttttatggcacattctasatttcccttccccttacttgcctagtcatatttcacaacctaaaaatcacttgtcgtttttcctccaccatacataccacttttccccataaacaccatgactcctactccatagatactattttcactctcaagtatctctccagtgcatacctaactaaattcagtactgttctttaatattcaactcccaagtttgacatttttgtttcagatctggagaacggtctgcataacacacaaaaacacgttagcctttatttaaacagagcagaacagccagtaaaagattattcctac

SEQ ID NO: 16877 - DNA, 600 bp, Chicken  19866894224614_1
ttgggcaaaatttgtttattacagccaaacaaaaatgtgttcctcttataaaattgtatttttctttgccaaaagagaaaaatctcccatgtctctgcagcaattctcttaaaatgccatgagatgttgactgaatatctatttctacttatttattaggatcaacacaatattttcttaaagaaataatgccttaaattaaaaataaaatttcagacgacccagagtggtacctggatggattatccacagtgcagtgtcactaggcccttcctgcctccaccagccctggccacaacwccatgtctgaatggagcaacgttcatcccgctggcacccagccccattctgcctgcttaaagctgcttctgttctgtacagcaacccagttagcagcctttcaaaggtgaatgcactaaatatatccttactgccttatttaccttttgtatcacctttggttctgtttgatttggtggtcattctaccactgccattatgctgcacaactgaaagttcagccagttctgagaaactggcagctgcgaaaagtgctgatttaatagcctggaagtcttgatgcctctagtttttctgcag

SEQ ID NO: 16878 - DNA, 600 bp, Chicken  19866894224616_1
ctttaatcttatcattttttccttttagtggttgcacaaaatatatgttcaattctaaatactagcatctgtataagctggaagaaatcgccttgctccagtccattcataaattctagacttgtccaagagcagaatgcatttttccagaggaaagcaatctcaaattcctttaggtaaattgaaataccatggagagtgcatgttgaacaatgattcttttcttcaagatgatcatacagaggtattgttttggttctcaaacacatctgaaagtgaagtctgtaattttggcctacrtgatactatataggaagaatagctgagttcaagaaatggacatcgtcttagtgtttactcctgcttgatatactgaatctgtgcctgaagaactatcatatttgtaaatcttcacctggttcagaattttctaacctttctgctactaggtttaacatttactagaaaaattactgctctgaagatgaaactcttgtttcaaaggcatcgctgcataatacaygaactgagctactttgtcagtagagaagcttaaaaaactacttacgtgcttatgtcagtcagggttttcataaatat

SEQ ID NO: 16879 - DNA, 600 bp, Chicken  19866894224616_2
cttcaagatgatcatacagaggtattgttttggttctcaaacacatctgaaagtgaagtctgtaattttggcctacrtgatactatataggaagaatagctgagttcaagaaatggacatcgtcttagtgtttactcctgcttgatatactgaatctgtgcctgaagaactatcatatttgtaaatcttcacctggttcagaattttctaacctttctgctactaggtttaacatttactagaaaaattactgctctgaagatgaaactcttgtttcaaaggcatcgctgcataatacaygaactgagctactttgtcagtagagaagcttaaaaaactacttacgtgcttatgtcagtcagggttttcataaatatacttggctatatacccagtaaaggtaagagtatcaaatggttttatcaaattatgtcttcaagggctccctgatgtaatgaaccttgagccctttggtgatacataggacagaaatgtacaaaaaataattgcaataataagtgcaataattgcacttagtctaggaaaagggaaaatggcctatacatggtatattgttgactgtggatttcagagtgtcat

SEQ ID NO: 16880 - DNA, 599 bp, Chicken  19866894224624_1
  misc_feature (1)..(27): n is any nucleotide
nnnnnnnnnnnnnnnnnnnnnnnnnnngaagctctgttttctcagttctccatctccacttcggctgggctccctagcttgccaggctatcataaccacattgcctggattaaaaaccagacaaatagcacaaaacacaagaaagaaagaaagaaaggaaggaaggaaggaaggaaggaaggaaggaaggaaggaaggaaggaaggaaggaaggaaggaaggaaggaaggaaggaaggaaggaaggaaggaaggaaggaaggaaggaaggaaggaaggaaggaaggaaggaaggaaggayagraagagagaaacccaacgatcccacaacaacaaaaaaacacaacaaaaccaaaaccctaaggcaaacagcatggttagtacgagaggcaccacctatgtagacaaaaactggagcaacctgcaaaaaatattaaccaagaacaggaggtataagatgctacgagatgccaaaggatgtgcaaaatcatcttgcttgtcttcaggagagcaacgcagagatctgcacacaagtgcctgaagctacttgagacacctggaatacctgagacatttgtgcagggataagatagacagggc

SEQ ID NO: 16881 - DNA, 599 bp, Chicken  19866894224624_2
  misc_feature (1)..(24): n is any nucleotide
nnnnnnnnnnnnnnnnnnnnnnnngaagctctgttttctcagttctccatctccacttcggctgggctccctagcttgccaggctatcataaccacattgcctggattaaaaaccagacaaatagcacaaaacacaagaaagaaagaaagaaaggaaggaaggaaggaaggaaggaaggaaggaaggaaggaaggaaggaaggaaggaaggaaggaaggaaggaaggaaggaaggaaggaaggaaggaaggaaggaaggaaggaaggaaggaaggaaggaaggaaggaaggaaggagagraagagagaaacccaacgatcccacaacaacaaaaaaacacaacaaaaccaaaaccctaaggcaaacagcatggttagtacgagaggcaccacctatgtagacaaaaactggagcaacctgcaaaaaatattaaccaagaacaggaggtataagatgctacgagatgccaaaggatgtgcaaaatcatcttgcttgtcttcaggagagcaacgcagagatctgcacacaagtgcctgaagctacttgagacacctggaatacctgagacatttgtgcagggataagatagacagggcttg

SEQ ID NO: 16882 - DNA, 600 bp, Chicken  19866894224625_1
aggcagcttccatttgtgaaagttctgggttttaggtggtgatgaccaggagggccatgaagatgatcagagagatggaaaacctcccctatgaggacaggctgagggagctggggctcttcagccagaagaagagaaggttctgaggagacctcatagtggccttccagtacctgaagggggccgacagaaaagctggggagcgacttttcataagggcatgtagtgacaggacaagaggaaatggttttaaattggaagagggcagatttagactagatattaggaagaaattctttwctgtgaggatggtgagatactgaaacaggttgcycagtgaggttgtgggtgctccttcactggaggcattcaaaaccaggctggatagagctttgagcaacctggtctagtgggaggtgtctctgcctatagcagggagattggaactaggtgatctcaaaggtcacttccaacccaaaccattctgtgattctatgaagatgcgtggtcaagttgactgtttgacctgatgatcttggaggtcttctccatgctcaatgagtacatggtacacgtactgcttttgggagatgtctggat

SEQ ID NO: 16883 - DNA, 600 bp, Chicken  19866894224625_2
ggtggtgatgaccaggagggccatgaagatgatcagagagatggaaaacctcccctatgaggacaggctgagggagctggggctcttcagccagaagaagagaaggttctgaggagacctcatagtggccttccagtacctgaagggggccgacagaaaagctggggagcgacttttcataagggcatgtagtgacaggacaagaggaaatggttttaaattggaagagggcagatttagactagatattaggaagaaattctttwctgtgaggatggtgagatactgaaacaggttgcycagtgaggttgtgggtgctccttcactggaggcattcaaaaccaggctggatagagctttgagcaacctggtctagtgggaggtgtctctgcctatagcagggagattggaactaggtgatctcaaaggtcacttccaacccaaaccattctgtgattctatgaagatgcgtggtcaagttgactgtttgacctgatgatcttggaggtcttctccatgctcaatgagtacatggtacacgtactgcttttgggagatgtctggataaggcggtgcatgagacagagggtaagacattga

SEQ ID NO: 16884 - DNA, 600 bp, Chicken  19866894224635_1
tataaatgtgctgaagagtaaatcattttccattatgagcagacatgagaacagcctccaaatacacaaacagctgctggagagcagcagggagctcctctttgctaaaggggcaccgaatggcttctctggggagaataaaaagccctgtgatgggtctctggagagggctgtgaagtcagcctggaggcaggatagtgctgctgaccccgaagatgcccccagctccatcttctgagctctctacgttcagtgactgcagctgctggcccctgagcagcacagagatgcactgccacrtgcacaacccaaacccaactctgtgctgaattagcctgagctagcagtatctaggaggggaaggggccagagcagccggaggggaagcactcccctccctgttacaccacagtaaggtgcacaaaatacagaagtaagcaggcactgcaagagtggaagggttattcgcagggccccatgcggctttgctggttgtgactcagcagcatttccaaccaggaggcccagctactgcctgctcactgcccggtgctgcacagagcaggacaggctcacrgggatgcgccccagagccagcga

SEQ ID NO: 16885 - DNA, 600 bp, Chicken  19866894224635_2
cagcacagagatgcactgccacrtgcacaacccaaacccaactctgtgctgaattagcctgagctagcagtatctaggaggggaaggggccagagcagccggaggggaagcactcccctccctgttacaccacagtaaggtgcacaaaatacagaagtaagcaggcactgcaagagtggaagggttattcgcagggccccatgcggctttgctggttgtgactcagcagcatttccaaccaggaggcccagctactgcctgctcactgcccggtgctgcacagagcaggacaggctcacrgggatgcgccccagagccagcgacctgctctgcacctccaaagcctgggctccaatccgagctttgctggtgctcaggttcctccactcatcgaggcaccgaacttggctccaaggttggctgtcagccagcagctgcgggckctgcagaagcagcagtgctgagatgttgtctgcacaaatggttgcacacgcaaagctaggtgggtaagagcacacccagctgtattcagaatcctgaaagtatccccgagcctcttttcgctgagcccctcttctctccagctgccttcccacggcc

SEQ ID NO: 16886 - DNA, 600 bp, Chicken  19866894224635_3
acaaaatacagaagtaagcaggcactgcaagagtggaagggttattcgcagggccccatgcggctttgctggttgtgactcagcagcatttccaaccaggaggcccagctactgcctgctcactgcccggtgctgcacagagcaggacaggctcacrgggatgcgccccagagccagcgacctgctctgcacctccaaagcctgggctccaatccgagctttgctggtgctcaggttcctccactcatcgaggcaccgaacttggctccaaggttggctgtcagccagcagctgcgggckctgcagaagcagcagtgctgagatgttgtctgcacaaatggttgcacacgcaaagctaggtgggtaagagcacacccagctgtattcagaatcctgaaagtatccccgagcctcttttcgctgagcccctcttctctccagctgccttcccacggcccgtggcaactctttggctggaagatgaatttaagcatagcttctaccataaacctcccgcaggcattgctgctccatggggagctgcrtgcttacagctgaggccactcagagccagcacatcctgaagaaaggtctgtgcaa

SEQ ID NO: 16887 - DNA, 600 bp, Chicken  19866894224635_4
catcgaggcaccgaacttggctccaaggttggctgtcagccagcagctgcgggckctgcagaagcagcagtgctgagatgttgtctgcacaaatggttgcacacgcaaagctaggtgggtaagagcacacccagctgtattcagaatcctgaaagtatccccgagcctcttttcgctgagcccctcttctctccagctgccttcccacggcccgtggcaactctttggctggaagatgaatttaagcatagcttctaccataaacctcccgcaggcattgctgctccatggggagctgcrtgcttacagctgaggccactcagagccagcacatcctgaagaaaggtctgtgcaaaaatgagcaagagagagccagctccagctcttcaccctacgaagcagagctgcaacatgggcccccagggctgcaaacctgtggggcaggaactcggggccataacagatgcaggcttccaagcaccggtagtgcctgggctcgctgctgttagtgggttaatggggaggaagtgagtgcttctccttttgtgcacacctgctcccacagtctgcagcacaagaaacctcactgccccattcctg

SEQ ID NO: 16888 - DNA, 600 bp, Chicken  19866894224635_5
tcctgcatcccctgctctgtgagtcctcgccacgcacggaggttctgcagcatttccctgccctggaagcacgctgccagcactcagccctgggcaccaagccttgctctctgctttacagctccttggcagggaggaagggtaggtccccaaaagccagccgtgagctgtcaggggatttgagccactcgagctcagttttgctttgctaacaccgagagatggaacaggaagctgaggaagatctgcgccccgctcacctgcgcagagaagtcgatcagctttggcagtggctgcttrttgccttcctcactcttcaggaagtccagcaggctccctgagggcagagcacggcgctcagcctggctgcagcccaacaactcccatgctcacccaccrttrgcacargtccrctcctgtccctatctctccctctgccagggttgtccctgcaaccctgcagcccccacctcctgcacccccacgtcccacaccgtgcaggccagcagcacctttctccatgaactcggtgatgatgtatatgggctcctccctggtgaccacggcgtgcagcctcaccagcttgtcgtgctgcaggct

SEQ ID NO: 16889 - DNA, 600 bp, Chicken  19866894224635_6
agccttgctctctgctttacagctccttggcagggaggaagggtaggtccccaaaagccagccgtgagctgtcaggggatttgagccactcgagctcagttttgctttgctaacaccgagagatggaacaggaagctgaggaagatctgcgccccgctcacctgcgcagagaagtcgatcagctttggcagtggctgcttrttgccttcctcactcttcaggaagtccagcaggctccctgagggcagagcacggcgctcagcctggctgcagcccaacaactcccatgctcacccaccrttrgcacargtccrctcctgtccctatctctccctctgccagggttgtccctgcaaccctgcagcccccacctcctgcacccccacgtcccacaccgtgcaggccagcagcacctttctccatgaactcggtgatgatgtatatgggctcctccctggtgaccacggcgtgcagcctcaccagcttgtcgtgctgcaggctcttcatgaggttcgcctcctccaggaaggcactcacagacatgctgcccggtttcattgtcttcactgccaccttggtgtgcttgttgtacgttgctgc

SEQ ID NO: 16890 - DNA, 600 bp, Chicken  19866894224635_7
cttgctctctgctttacagctccttggcagggaggaagggtaggtccccaaaagccagccgtgagctgtcaggggatttgagccactcgagctcagttttgctttgctaacaccgagagatggaacaggaagctgaggaagatctgcgccccgctcacctgcgcagagaagtcgatcagctttggcagtggctgcttrttgccttcctcactcttcaggaagtccagcaggctccctgagggcagagcacggcgctcagcctggctgcagcccaacaactcccatgctcacccaccrttrgcacargtccrctcctgtccctatctctccctctgccagggttgtccctgcaaccctgcagcccccacctcctgcacccccacgtcccacaccgtgcaggccagcagcacctttctccatgaactcggtgatgatgtatatgggctcctccctggtgaccacggcgtgcagcctcaccagcttgtcgtgctgcaggctcttcatgaggttcgcctcctccaggaaggcactcacagacatgctgcccggtttcattgtcttcactgccaccttggtgtgcttgttgtacgttgctgccgg

SEQ ID NO: 16891 - DNA, 600 bp, Chicken  19866894224635_8
ctctgctttacagctccttggcagggaggaagggtaggtccccaaaagccagccgtgagctgtcaggggatttgagccactcgagctcagttttgctttgctaacaccgagagatggaacaggaagctgaggaagatctgcgccccgctcacctgcgcagagaagtcgatcagctttggcagtggctgcttrttgccttcctcactcttcaggaagtccagcaggctccctgagggcagagcacggcgctcagcctggctgcagcccaacaactcccatgctcacccaccrttrgcacargtccrctcctgtccctatctctccctctgccagggttgtccctgcaaccctgcagcccccacctcctgcacccccacgtcccacaccgtgcaggccagcagcacctttctccatgaactcggtgatgatgtatatgggctcctccctggtgaccacggcgtgcagcctcaccagcttgtcgtgctgcaggctcttcatgaggttcgcctcctccaggaaggcactcacagacatgctgcccggtttcattgtcttcactgccaccttggtgtgcttgttgtacgttgctgccgggatacc

SEQ ID NO: 16892 - DNA, 600 bp, Chicken  19866894224635_9
ctttacagctccttggcagggaggaagggtaggtccccaaaagccagccgtgagctgtcaggggatttgagccactcgagctcagttttgctttgctaacaccgagagatggaacaggaagctgaggaagatctgcgccccgctcacctgcgcagagaagtcgatcagctttggcagtggctgcttrttgccttcctcactcttcaggaagtccagcaggctccctgagggcagagcacggcgctcagcctggctgcagcccaacaactcccatgctcacccaccrttrgcacargtccrctcctgtccctatctctccctctgccagggttgtccctgcaaccctgcagcccccacctcctgcacccccacgtcccacaccgtgcaggccagcagcacctttctccatgaactcggtgatgatgtatatgggctcctccctggtgaccacggcgtgcagcctcaccagcttgtcgtgctgcaggctcttcatgaggttcgcctcctccaggaaggcactcacagacatgctgcccggtttcattgtcttcactgccaccttggtgtgcttgttgtacgttgctgccgggataccagccc

SEQ ID NO: 16893 - DNA, 600 bp, Chicken  19866894224640_1
ccgggcctgcagagccagcgccgcgtccaccaccagccgctccgcgccgcccagccccaggtccgggtgcaggaatagcacggacgggccgctcgtctcctcctcctcctcccgctccgccatggcgccgagcggcagcgcgcacgcgccgccaacaggctctagggccacgtcagcctgtcctgccgggccgcccctccacctcccctaccgggctgccctgatactgccgggcggctcgtctcatgccttctcggtgctgacaccccagcctggccatctgcggggacgaagactccrtgtgaaggggtctcgttaggaaagaggccctacagcgggcggagaggagrgaaaggaggcaggcgctgcctcaggcatcgccggggacagccccggggacctgagggcggggggcggggcctcgagcgggcggggcgccattgctggtagggacgtggctgtggggagccgtgtctgccggctgactgatcgactgtaagcagcgccgccgcgatggtgaggttccgcgctcctgtgctcctgcgctcctgcttccagcctggggagctccctgcttttgcggttcttccccttgcttcc

SEQ ID NO: 16894 - DNA, 600 bp, Chicken  19866894224640_2
ccagccccaggtccgggtgcaggaatagcacggacgggccgctcgtctcctcctcctcctcccgctccgccatggcgccgagcggcagcgcgcacgcgccgccaacaggctctagggccacgtcagcctgtcctgccgggccgcccctccacctcccctaccgggctgccctgatactgccgggcggctcgtctcatgccttctcggtgctgacaccccagcctggccatctgcggggacgaagactccrtgtgaaggggtctcgttaggaaagaggccctacagcgggcggagaggagrgaaaggaggcaggcgctgcctcaggcatcgccggggacagccccggggacctgagggcggggggcggggcctcgagcgggcggggcgccattgctggtagggacgtggctgtggggagccgtgtctgccggctgactgatcgactgtaagcagcgccgccgcgatggtgaggttccgcgctcctgtgctcctgcgctcctgcttccagcctggggagctccctgcttttgcggttcttccccttgcttccctccttgcatccgtttctccctaaccctgcttctctccttcccccgcagc

SEQ ID NO: 16895 - DNA, 600 bp, Chicken  19866894224643_1
tgctaaacagaccatgttttaggccccatcgtactgtttactctttttcacctcaatgtttttcttctttttactctccagcttcagcggaagcgtcacattgggaatgacattgtagccatcatcttccaggatgaaagcacaccttttgtgcctgatatgatcgcttctaatttcctacatgcatatgtggtagttcagctcactcacagcagtagtggggagaccctctacaaggtaaacagagccaacagactcttctgtggtgaggtactgactttgacccttgaagcaaaaacytgttcttgggcttttgggagagggtacaggtttggccagctgtcttccaaacacctttgcttgctctgtcagtaagtgttaaccacattctcagtgaaaagcaagwagtaagcctagagatccagtgtttgtcaccagctctccttcccctttacctacactttgatctctgactaggagtctccttcctgctatactattctctattctgtaggtttgtggaggtcctctctgattgatatgatttctactattagtagtctgtgatcctgcttagtgagtattcagatttaataaaaa

SEQ ID NO: 16896 - DNA, 600 bp, Chicken  19866894224643_2
atgacattgtagccatcatcttccaggatgaaagcacaccttttgtgcctgatatgatcgcttctaatttcctacatgcatatgtggtagttcagctcactcacagcagtagtggggagaccctctacaaggtaaacagagccaacagactcttctgtggtgaggtactgactttgacccttgaagcaaaaacytgttcttgggcttttgggagagggtacaggtttggccagctgtcttccaaacacctttgcttgctctgtcagtaagtgttaaccacattctcagtgaaaagcaagwagtaagcctagagatccagtgtttgtcaccagctctccttcccctttacctacactttgatctctgactaggagtctccttcctgctatactattctctattctgtaggtttgtggaggtcctctctgattgatatgatttctactattagtagtctgtgatcctgcttagtgagtattcagatttaataaaaatatggataagctggagaagggtaatagctaagactgagaatgatcaagattctggaacacgagtattttactgagcaaagtccaggaatgcttattatctctacct

SEQ ID NO: 16897 - DNA, 583 bp, Chicken  19866894224648_1
cagaaatgagggctagaatgaacatgtgaagacctaattacaaaattactgaaggtatgcacatcgtctggaatattagagccttcagcaaaatgcttgtggttgtaaaactatttgtaggactggaagcttgcagtgcctgtaaagttgtggtgtaacaaaccacattcatcaggcaaccagctccgatgaccactttttctctcatttaccacaactgattatctctgaaattggcaatttgacacaagaggtgggctttgtcctcactcccagtgctctccatgcattttacatcamattctcagtggataaaagtaaaatcaactcggggcacagtaaggcccggttccctcctagcaaagacactgtgggatggagctccatctctcttggtcgcagcagggaccaaagattcccttcccagattgttcatcatcattctggaaaaaaaggagaattgagacctggcgtcccacttcctgaaagactgtgctggctgccaggctgttgtgcaaagctggacagtaccaagctgctggtggtttcagacatgaatgatctcacctgctggactttgtgt

SEQ ID NO: 16898 - DNA, 600 bp, Chicken  19866894224653_1
gagcatgcagacataaagtgcctttcacttccaggagccccaagagatcttcccagctcgaagttctggggatctgctgccagttctcttcctcctcagctaagctggttgatttctccaaggtgcaggatgttctcaaattcttccaaaatacgtgggagtgacagttgccgagtaacaaaacctcatcactcttctcctggagtgctcaatccctcacgtttctgttttgcagggcgggcagatgaagctgtgagttgggcaccagtctcggatcaggattgctcggatctcagcctygcccctgggtaaatctattgggtcagagttcaaagaaaggaagggatctgactgcctgtgtcctctggacttcataaacaacgtcagggatgcatttcgtgattcactgaactgacacagtgaccaatgtaaggagatcatggcagggatgctgcagccatggagaggctgcctagcatttcttcacgcagtgctcttccccagcacgtaccttaaagcccttgtccagttgatgtcaagcaaagttggaacatcaggtaccaagcagagtcatttaaagctgatagatcccaccccttc

SEQ ID NO: 16899 - DNA, 600 bp, Chicken  19866894224667_1
tttgagcacttttataattaataaagttttaaactactttctatggtgtagcaaagctgaaatggcgttagaatttttaatgtgtatttataaaatttatttacctctttcttctcataaggaaagcagttcaatttttgctgaaatctgagaggagacatccattcagtaacacagagatgaactcccttcccggaaatcattaacgtaaaagccaaaagtaagagctctgttgttcacttaagacaattagcacaacccttattttaggtagcagtctgtagagagactccgagagtrtaagtactttctcctgaaacaaggttggattacttaatgctgtttgttacattttaaagtaaacaattaagaaaaactgaaaccctttttaaaccattgatgctgtgacagtgcaaacagcatacaatttattgctcaacttctgcatgggtacatacattaagtacttaaaaaccattttatacagattttttttgttaaagctcatgtaacagctgggtgaaaatacaatgatatcaatgctaaaacactctgtaataaatacaatggaaatgataaactaagaactgtcaggttgtg

SEQ ID NO: 16900 - DNA, 600 bp, Chicken  19866894224670_1
gtatgctgatacttgtcttccaatagcaacaattaaaaaagcttgcttgtgtaaccaaagtgagacgctattttcagtattaagccattcttctttaaacagtatcagttgctaaaacctgcagttcattttgaacacaaaagcatttgatttatgaagatttgtgtgggggcttttttccactttcttttccaaaacctgcaccaggacagtaactggaagtaagtccacagaagaaagttcagctcacaacttcatatctgtccctccaaacttaaactgctttcactttgaagtctyctcaaaacattttaaggaaacacagccysacaagccttcagccagggcttgcctawaactcagaaatgtgcccatatctgtatttgcagtttgtattgcactgtagcactgtttgaaaacaattgattgaagaatcatttaaaaactgcagtttaaacacaaacctggatcttagtttaggaggrctttacaacctctttttttaaatcatatcagtttcattctaaaagttatatgcctaaagaaatacttaagaatctgaataaatataaacctcttccacagtacaaagaaaaccaa

SEQ ID NO: 16901 - DNA, 600 bp, Chicken  19866894224670_2
acaattaaaaaagcttgcttgtgtaaccaaagtgagacgctattttcagtattaagccattcttctttaaacagtatcagttgctaaaacctgcagttcattttgaacacaaaagcatttgatttatgaagatttgtgtgggggcttttttccactttcttttccaaaacctgcaccaggacagtaactggaagtaagtccacagaagaaagttcagctcacaacttcatatctgtccctccaaacttaaactgctttcactttgaagtctyctcaaaacattttaaggaaacacagccysacaagccttcagccagggcttgcctawaactcagaaatgtgcccatatctgtatttgcagtttgtattgcactgtagcactgtttgaaaacaattgattgaagaatcatttaaaaactgcagtttaaacacaaacctggatcttagtttaggaggrctttacaacctctttttttaaatcatatcagtttcattctaaaagttatatgcctaaagaaatacttaagaatctgaataaatataaacctcttccacagtacaaagaaaaccaatggtatttagtgcacgaggctatattca

SEQ ID NO: 16902 - DNA, 600 bp, Chicken  19866894224670_3
caattaaaaaagcttgcttgtgtaaccaaagtgagacgctattttcagtattaagccattcttctttaaacagtatcagttgctaaaacctgcagttcattttgaacacaaaagcatttgatttatgaagatttgtgtgggggcttttttccactttcttttccaaaacctgcaccaggacagtaactggaagtaagtccacagaagaaagttcagctcacaacttcatatctgtccctccaaacttaaactgctttcactttgaagtctyctcaaaacattttaaggaaacacagccysacaagccttcagccagggcttgcctawaactcagaaatgtgcccatatctgtatttgcagtttgtattgcactgtagcactgtttgaaaacaattgattgaagaatcatttaaaaactgcagtttaaacacaaacctggatcttagtttaggaggrctttacaacctctttttttaaatcatatcagtttcattctaaaagttatatgcctaaagaaatacttaagaatctgaataaatataaacctcttccacagtacaaagaaaaccaatggtatttagtgcacgaggctatattcat

SEQ ID NO: 16903 - DNA, 600 bp, Chicken  19866894224670_4
aaagtgagacgctattttcagtattaagccattcttctttaaacagtatcagttgctaaaacctgcagttcattttgaacacaaaagcatttgatttatgaagatttgtgtgggggcttttttccactttcttttccaaaacctgcaccaggacagtaactggaagtaagtccacagaagaaagttcagctcacaacttcatatctgtccctccaaacttaaactgctttcactttgaagtctyctcaaaacattttaaggaaacacagccysacaagccttcagccagggcttgcctawaactcagaaatgtgcccatatctgtatttgcagtttgtattgcactgtagcactgtttgaaaacaattgattgaagaatcatttaaaaactgcagtttaaacacaaacctggatcttagtttaggaggrctttacaacctctttttttaaatcatatcagtttcattctaaaagttatatgcctaaagaaatacttaagaatctgaataaatataaacctcttccacagtacaaagaaaaccaatggtatttagtgcacgaggctatattcatgctcaaagaatgaatgcacgggtgaat

SEQ ID NO: 16904 - DNA, 600 bp, Chicken  19866894224670_5
tcttttccaaaacctgcaccaggacagtaactggaagtaagtccacagaagaaagttcagctcacaacttcatatctgtccctccaaacttaaactgctttcactttgaagtctyctcaaaacattttaaggaaacacagccysacaagccttcagccagggcttgcctawaactcagaaatgtgcccatatctgtatttgcagtttgtattgcactgtagcactgtttgaaaacaattgattgaagaatcatttaaaaactgcagtttaaacacaaacctggatcttagtttaggaggrctttacaacctctttttttaaatcatatcagtttcattctaaaagttatatgcctaaagaaatacttaagaatctgaataaatataaacctcttccacagtacaaagaaaaccaatggtatttagtgcacgaggctatattcatgctcaaagaatgaatgcacgggtgaataaatgaataaacagatgggagtcatttcagccatgctccattagaaatagtggagggactcactcgccaaattagaaaatgcagaaataagaaaaataatacattttttcrgcattgtggttttcagct

SEQ ID NO: 16905 - DNA, 600 bp, Chicken  19866894224670_6
gatcttagtttaggaggrctttacaacctctttttttaaatcatatcagtttcattctaaaagttatatgcctaaagaaatacttaagaatctgaataaatataaacctcttccacagtacaaagaaaaccaatggtatttagtgcacgaggctatattcatgctcaaagaatgaatgcacgggtgaataaatgaataaacagatgggagtcatttcagccatgctccattagaaatagtggagggactcactcgccaaattagaaaatgcagaaataagaaaaataatacattttttcrgcattgtggttttcagctaaaagattatgaacagaaccttttagaatgctgacagaaacctctgcggaaatgggctgagccttcgctggtcagggaagctgccctaaagcagtggtgacagcagccatgttcttgtcccactgcggcaaaagtggatgtgagaaaaacagcccacgctgtatgacagtgtgttgtcattggggtgggtggcctttactaaaaagccattatttgctaacatctaccactcggttttttatgatattttagcctacatcttcatccaacttcattgtgtgg

SEQ ID NO: 16906 - DNA, 599 bp, Chicken  19866894224674_1
  misc_feature (1)..(22): n is any nucleotide
nnnnnnnnnnnnnnnnnnnnnnccccgcgtgctgtcacgtccccaccacgtgctcctgctgcccctccgccaccggagccaccccccggtcctccatcgatccatgcatcgattccccagggtttccaacttggggacaaggtcaccacgctcgtgttcccggcgctggggatggggctgatggcagtgccactgccaccggtgccaaccagggccgtaccctgggcagggggctggctgttctctaccccctgccatggcaatgcacgtttccagggtgctgggtggcaccagggggayattgtggaacagggtggcagcgggacacgaggctggcacagtattgaggacacagagagagacagggaagggggccagggggaacgtgggacattcaggggacagcagtggggcaggaggtgatgcatggggcacatggggcataaggggtacaggggggacacagaggcccctggaacagacagcagagcagtgctcagaacaagaggaaactatgggggcgcagggaggcacggggagatggggtgcaggggtgctgagcaggcagggaggtgggggagacatggggacacagtggg

SEQ ID NO: 16907 - DNA, 599 bp, Chicken  19866894224681_1
  misc_feature (1)..(92): n is any nucleotide
nnnnnnnnnnnnnnnnnnnnnnnnnnnnnnnnnnnnnnnnnnnnnnnnnnnnnnnnnnnnnnnnnnnnnnnnnnnnnnnnnnnnnnnnnnnncagtgccagcaagtctttagattactgtattatataaatactttttataggcttacagacccactttatcctttcattaatgaaattattcctgatagtcctgatagtcagagttagtattaagtagaaagtattaatccagatttttgttgtgtatattctgattagtgcagagccaagaatattctctgcagaaactccaaaagtyattccttactccttttctaactgctgccaaagcaagtgagaaatggaaatgcaatgagcatgtacgtctgaataagatttggagtctacttgctctccttttggaacatatacccattgtgattcatttctcttctcctttcatatttcaagctcctttttatgacttayaaagctctacaaagatgttttatgaagttatgaactacttgagggcaattacagaaaaggccagaatctgcgtgctctgcgtttgttgtgaattgttttaactgctcccctaaagtctgacagatcacc

SEQ ID NO: 16908 - DNA, 600 bp, Chicken  19866894224681_2
aatgaaattattcctgatagtcctgatagtcagagttagtattaagtagaaagtattaatccagatttttgttgtgtatattctgattagtgcagagccaagaatattctctgcagaaactccaaaagtyattccttactccttttctaactgctgccaaagcaagtgagaaatggaaatgcaatgagcatgtacgtctgaataagatttggagtctacttgctctccttttggaacatatacccattgtgattcatttctcttctcctttcatatttcaagctcctttttatgacttayaaagctctacaaagatgttttatgaagttatgaactacttgagggcaattacagaaaaggccagaatctgcgtgctctgcgtttgttgtgaattgttttaactgctcccctaaagtctgacagatcacctttttgtcaggtctgacatttctacattgattttcctaaacaaattgcctcatctgtagtcatcatgtgaaaaaggaaccttgcaaagatgggagctgcttatttagttgggaagtgagtgtcaggctggggggaaggggatgtcccaggctacctgaaccaaaactgcca

SEQ ID NO: 16909 - DNA, 599 bp, Chicken  19866894224684_1
  misc_feature (1)..(116): n is any nucleotide
nnnnnnnnnnnnnnnnnnnnnnnnnnnnnnnnnnnnnnnnnnnnnnnnnnnnnnnnnnnnnnnnnnnnnnnnnnnnnnnnnnnnnnnnnnnnnnnnnnnnnnnnnnnnnnnnnnnntgcctgaccccctttcagagaagtagtatttcctaacatccagcctgaaccttccctggcacagcttgaagccattccctctagtcctatcgctagttgcacgagagaggaggctgacccccagctcactacagcctcccttcaggtagttatagagagcagtaaggtctcccctgagcctccycttctctagactgaacaatcccagctccttcagccactcttcataaggcctgtgctccagacccctcgccagctttgttgccctcctctggacacgctccagggcctygatgtctttcttacagtgaggggcccaaaactggacacagaactcgaggcgtggcctcaccagtgctgagtacagggggacaattacttccctgttcctgctggccacactatttctgatacaagccagtgtgccattggccttcttggccaacagggcacactgctggctcatattcagtctagcatcaa

SEQ ID NO: 16910 - DNA, 599 bp, Chicken  19866894224684_2
  misc_feature (1)..(8): n is any nucleotide
nnnnnnnntgcctgaccccctttcagagaagtagtatttcctaacatccagcctgaaccttccctggcacagcttgaagccattccctctagtcctatcgctagttgcacgagagaggaggctgacccccagctcactacagcctcccttcaggtagttatagagagcagtaaggtctcccctgagcctccycttctctagactgaacaatcccagctccttcagccactcttcataaggcctgtgctccagacccctcgccagctttgttgccctcctctggacacgctccagggcctygatgtctttcttacagtgaggggcccaaaactggacacagaactcgaggcgtggcctcaccagtgctgagtacagggggacaattacttccctgttcctgctggccacactatttctgatacaagccagtgtgccattggccttcttggccaacagggcacactgctggctcatattcagtctagcatcaatcaatacccccaggtccatttcctctacgcagtcttccagccactctgccccaagcctgtagcattgcctggggttattgtggccaaagtgcaggacccagcacttgg

SEQ ID NO: 16911 - DNA, 599 bp, Chicken  19866894224685_1
  misc_feature (1)..(103): n is any nucleotide
nnnnnnnnnnnnnnnnnnnnnnnnnnnnnnnnnnnnnnnnnnnnnnnnnnnnnnnnnnnnnnnnnnnnnnnnnnnnnnnnnnnnnnnnnnnnnnnnnnnnnnnaccctttcagagaagtagtatttcctaacatccagcctgaaccttccctagcacagcttgaagccattccctctagtcctatcactagttgcacgagagaggagggtgacccccagctcactacagcctcccttcaggtagttatagagagcaataaggtctcccctgagcctcccctttctagactgaacaatccsagctccttcagccgctcytcataaggcctgtgctccagacccctcrccagctttgttgcccttctctggacacgctccagggcctcgatgtctttcttacagtgaggggcccaaaactggacacagaactcgaggtgtggcctcaccattgctgagtacagggggacaattacttccctgttcctgctggccacactatttctgatacaagccagtgtgccattggccttcttggccaacagggcacactgctggctcatattcagtctagcatcaatcaatacccccaggtccatttc

SEQ ID NO: 16912 - DNA, 599 bp, Chicken  19866894224685_2
  misc_feature (1)..(85): n is any nucleotide
nnnnnnnnnnnnnnnnnnnnnnnnnnnnnnnnnnnnnnnnnnnnnnnnnnnnnnnnnnnnnnnnnnnnnnnnnnnnnnnnnnnnnaccctttcagagaagtagtatttcctaacatccagcctgaaccttccctagcacagcttgaagccattccctctagtcctatcactagttgcacgagagaggagggtgacccccagctcactacagcctcccttcaggtagttatagagagcaataaggtctcccctgagcctcccctttctagactgaacaatccsagctccttcagccgctcytcataaggcctgtgctccagacccctcrccagctttgttgcccttctctggacacgctccagggcctcgatgtctttcttacagtgaggggcccaaaactggacacagaactcgaggtgtggcctcaccattgctgagtacagggggacaattacttccctgttcctgctggccacactatttctgatacaagccagtgtgccattggccttcttggccaacagggcacactgctggctcatattcagtctagcatcaatcaatacccccaggtccatttcctctacgcagtcttccag

SEQ ID NO: 16913 - DNA, 593 bp, Chicken  19866894224685_3
  misc_feature (1)..(57): n is any nucleotide
nnnnnnnnnnnnnnnnnnnnnnnnnnnnnnnnnnnnnnnnnnnnnnnnnnnnnnnnnaccctttcagagaagtagtatttcctaacatccagcctgaaccttccctagcacagcttgaagccattccctctagtcctatcactagttgcacgagagaggagggtgacccccagctcactacagcctcccttcaggtagttatagagagcaataaggtctcccctgagcctcccctttctagactgaacaatccsagctccttcagccgctcytcataaggcctgtgctccagacccctcrccagctttgttgcccttctctggacacgctccagggcctcgatgtctttcttacagtgaggggcccaaaactggacacagaactcgaggtgtggcctcaccattgctgagtacagggggacaattacttccctgttcctgctggccacactatttctgatacaagccagtgtgccattggccttcttggccaacagggcacactgctggctcatattcagtctagcatcaatcaatacccccaggtccatttcctctacgcagtcttccagccactctgccccaagcctgtag

SEQ ID NO: 16914 - DNA, 599 bp, Chicken  19866894224696_1
  misc_feature (1)..(210): n is any nucleotide
nnnnnnnnnnnnnnnnnnnnnnnnnnnnnnnnnnnnnnnnnnnnnnnnnnnnnnnnnnnnnnnnnnnnnnnnnnnnnnnnnnnnnnnnnnnnnnnnnnnnnnnnnnnnnnnnnnnnnnnnnnnnnnnnnnnnnnnnnnnnnnnnnnnnnnnnnnnnnnnnnnnnnnnnnnnnnnnnnnnnnnnnnnnnnnnnnnnnnnnnnnnnnnnnnntggagcttgatacaagcaaatctttgatctgtcctgtaagaaggaagcaaagcagtgagtgctaagacacagtctgtctggtttgcatgwatgaggcaaagggattggagggtgctgctttgtggggttttgttttcattgcaggagtgttttgttttagatgtcaaccagcaagcttgagttgacttcctgttctttaaatgatggcatgtggaattcaagttcacgagtgatttcatacagaacaactaacccttaaccaggcatttctgtaaggaggcacgtaggcttgaatgttcacacacatycccaggaatatctcaaacgtccttggaaaaagacttgcatasaacagaaggaagtgaaaagcaaagcagggataccgatct

SEQ ID NO: 16915 - DNA, 600 bp, Chicken  19866894224696_2
gatacaagcaaatctttgatctgtcctgtaagaaggaagcaaagcagtgagtgctaagacacagtctgtctggtttgcatgwatgaggcaaagggattggagggtgctgctttgtggggttttgttttcattgcaggagtgttttgttttagatgtcaaccagcaagcttgagttgacttcctgttctttaaatgatggcatgtggaattcaagttcacgagtgatttcatacagaacaactaacccttaaccaggcatttctgtaaggaggcacgtaggcttgaatgttcacacacatycccaggaatatctcaaacgtccttggaaaaagacttgcatasaacagaaggaagtgaaaagcaaagcagggataccgatcttctgcctctcactgtgcttccttctaatacttgattcttgttttcttcccacctttttcctgataaatgtacatacactcttaatcattccttttcttacaccaacytagtggccacattattttcttccatggaagcccatttcttatccatccagcatatgcttgtaaaatgatgccaatattgtagggaagctgggaccaatcttgcatgagttat

SEQ ID NO: 16916 - DNA, 600 bp, Chicken  19866894224696_3
agcagtgagtgctaagacacagtctgtctggtttgcatgwatgaggcaaagggattggagggtgctgctttgtggggttttgttttcattgcaggagtgttttgttttagatgtcaaccagcaagcttgagttgacttcctgttctttaaatgatggcatgtggaattcaagttcacgagtgatttcatacagaacaactaacccttaaccaggcatttctgtaaggaggcacgtaggcttgaatgttcacacacatycccaggaatatctcaaacgtccttggaaaaagacttgcatasaacagaaggaagtgaaaagcaaagcagggataccgatcttctgcctctcactgtgcttccttctaatacttgattcttgttttcttcccacctttttcctgataaatgtacatacactcttaatcattccttttcttacaccaacytagtggccacattattttcttccatggaagcccatttcttatccatccagcatatgcttgtaaaatgatgccaatattgtagggaagctgggaccaatcttgcatgagttatgctctccttgcacagaaagcacacactggcatccctgccttt

SEQ ID NO: 16917 - DNA, 523 bp, Chicken  19866894224696_4
ttaaatgatggcatgtggaattcaagttcacgagtgatttcatacagaacaactaacccttaaccaggcatttctgtaaggaggcacgtaggcttgaatgttcacacacatycccaggaatatctcaaacgtccttggaaaaagacttgcatasaacagaaggaagtgaaaagcaaagcagggataccgatcttctgcctctcactgtgcttccttctaatacttgattcttgttttcttcccacctttttcctgataaatgtacatacactcttaatcattccttttcttacaccaacytagtggccacattattttcttccatggaagcccatttcttatccatccagcatatgcttgtaaaatgatgccaatattgtagggaagctgggaccaatcttgcatgagttatgctctccttgcacagaaagcacacactggcatccctgcctttgtcatatatatttaaatgcactgtcaccgcacacaaaaaagtgtgcaatagagtcatcagtttccacag

SEQ ID NO: 16918 - DNA, 600 bp, Chicken  19866894224697_1
agagtgaaggaatacataagatatatatatatatatataagtatattgcatacgtgtgtgtatctatctgtctatctgtatatatgcatggaggcttgggggaagcaggagtgcccttcccgtcgcccagcagaggcggagcagagcccgcactgcacagagcactgacgcccgcccgccgtgccctgatatctgcagctaatcccatcagctgacgttaccatcacggacgcagtcggccatgccagagagagagcactgcgggcacatctcaggggccagctgtaccctttgctctcyctgccaaatttctcttaaaagaccccaaagcaggaaaaggcagcgaagcacygcaggaactcaaggagaggactgaggagccaaccatcccctctgcagcactgcggtgcagctcggtgggctctgcggcagcacccacaccatgggcgcctctactccggccatgcagcactaactgggagctctgctgaccccacagcgcccatcccactgcatggggctcttcrgagamcagcaacgcacggagcaaagcttcaaggcttcgttcgccaattaggctcaaacaatatgcaaacatgc

SEQ ID NO: 16919 - DNA, 600 bp, Chicken  19866894224697_2
cgtgtgtgtatctatctgtctatctgtatatatgcatggaggcttgggggaagcaggagtgcccttcccgtcgcccagcagaggcggagcagagcccgcactgcacagagcactgacgcccgcccgccgtgccctgatatctgcagctaatcccatcagctgacgttaccatcacggacgcagtcggccatgccagagagagagcactgcgggcacatctcaggggccagctgtaccctttgctctcyctgccaaatttctcttaaaagaccccaaagcaggaaaaggcagcgaagcacygcaggaactcaaggagaggactgaggagccaaccatcccctctgcagcactgcggtgcagctcggtgggctctgcggcagcacccacaccatgggcgcctctactccggccatgcagcactaactgggagctctgctgaccccacagcgcccatcccactgcatggggctcttcrgagamcagcaacgcacggagcaaagcttcaaggcttcgttcgccaattaggctcaaacaatatgcaaacatgcgggattaaaatcaatgcactggattttatgacagataaagcaccacagagca

SEQ ID NO: 16920 - DNA, 600 bp, Chicken  19866894224697_3
ggacgcagtcggccatgccagagagagagcactgcgggcacatctcaggggccagctgtaccctttgctctcyctgccaaatttctcttaaaagaccccaaagcaggaaaaggcagcgaagcacygcaggaactcaaggagaggactgaggagccaaccatcccctctgcagcactgcggtgcagctcggtgggctctgcggcagcacccacaccatgggcgcctctactccggccatgcagcactaactgggagctctgctgaccccacagcgcccatcccactgcatggggctcttcrgagamcagcaacgcacggagcaaagcttcaaggcttcgttcgccaattaggctcaaacaatatgcaaacatgcgggattaaaatcaatgcactggattttatgacagataaagcaccacagagcatcattgtgtttattaaagacaattagaggattccatgcataacacaaaataaaaaaaaaaacccaatcagctcagcacccattttcttggtaaccaacagctgaagagatctgatagcacggagctgcagggaggaggcggaggaggcgctccgtgcgctgacctttgggatgca

SEQ ID NO: 16921 - DNA, 600 bp, Chicken  19866894224697_4
cagtcggccatgccagagagagagcactgcgggcacatctcaggggccagctgtaccctttgctctcyctgccaaatttctcttaaaagaccccaaagcaggaaaaggcagcgaagcacygcaggaactcaaggagaggactgaggagccaaccatcccctctgcagcactgcggtgcagctcggtgggctctgcggcagcacccacaccatgggcgcctctactccggccatgcagcactaactgggagctctgctgaccccacagcgcccatcccactgcatggggctcttcrgagamcagcaacgcacggagcaaagcttcaaggcttcgttcgccaattaggctcaaacaatatgcaaacatgcgggattaaaatcaatgcactggattttatgacagataaagcaccacagagcatcattgtgtttattaaagacaattagaggattccatgcataacacaaaataaaaaaaaaaacccaatcagctcagcacccattttcttggtaaccaacagctgaagagatctgatagcacggagctgcagggaggaggcggaggaggcgctccgtgcgctgacctttgggatgcagagca

SEQ ID NO: 16922 - DNA, 492 bp, Chicken  19866894224698_1
ggaaatacatgaatctctcatatacactataaggcagaactgaaaatccatgtgtttgagagctgttgtgtaattgtggcctgcaggcaattgggatctacaaacagggagatacatatgtttttattagtaaagttccaaataaatgagctaggaatgcataaacatgccacagtattgtttgagactgaatgaggttagaagacttaagatcttctgttgttgagttgatagatgtattgttaaagcttgtcattatactttacttacgtttctattgagttctcttcaatatcgaaktaaaaaatagttgtatttaggaatacaaaaaagagggctacagactttgctttatcttgactctgtttggtacactgaaggtttatgccatccatttgctgcagtgattgaattacatctttatccataagtagagcaggagactccaggcagaagaatgcctactgatgcacttcagggttgtgttgcagt

SEQ ID NO: 16923 - DNA, 600 bp, Chicken  19866894224699_1
atctcaaatgacaaccacgtttgtactgtgattcaactgtgtattgcaattgctgctttgtccttgcatagtgaattcagtaccctgctgaatcatttttctaaattgaaatcttaggtaacatcaaatatctttttttattagtagtatttgatttagttaggaagtgtttctccctctacacatagaacatctagaagtatttagtcagagagtattagactgtgacagctctgtttcacaaatgatcaaatattatgatattcagagtgtaaaagggaatcacttgtgttactgagyttacacagcctatgtaggcttaggaactagaaattctgtccccttaatttaatatttggagcgcacaacttccttctccaatgtaattgtgttgacagctagtgacactctcagtgatgtggccaaaaaaattctgtatgctaggctcgtgctctgaaaggggacagttttttgtccagtttataccaaaattttcactcataagctgcaacagctctaacagtgttactctagctcaaaagaaagcaaaatagttgtttccctcttttttttttttctcatttaaattgtctgttcaaa

SEQ ID NO: 16924 - DNA, 599 bp, Chicken  19866894224702_1
  misc_feature (1)..(33): n is any nucleotide
nnnnnnnnnnnnnnnnnnnnnnnnnnnnnnnnngattcttctcttgtatcttatctaaaacccttctgacatacagtaccttgagatttcttcctcctgtagagaggaggatgtagcttggtatttaccaggcttttctgatcttcactgtttgaaaaaaggagagcaagggaggggagggaaagaagctgggtttttttgggaaacttgggtcttgttgggtgaactacttcacttctgtgatagagtgattgtggtagttctgtttggcatactggtgctatgtgagatcaagcttgycaaaagaagcctatgtactgtggccaagatactttggcaacactgagttccattacaaattacactgagttcaggcaatttaatgactatctgaaaacatgatagtgatgggcctgctgaattgtgagtagattggtctgtctcgcttgccatgctcctgtctgcttaggagcaccaccaacgtcttcatcaaataatggaaattgagaaagcaagaaggttttaggcactgtagttaggcaaygtagcaattattctcctagcaaatgtcttaaaacattctgctgctctgcagtgct

SEQ ID NO: 16925 - DNA, 600 bp, Chicken  19866894224702_2
agagtgattgtggtagttctgtttggcatactggtgctatgtgagatcaagcttgycaaaagaagcctatgtactgtggccaagatactttggcaacactgagttccattacaaattacactgagttcaggcaatttaatgactatctgaaaacatgatagtgatgggcctgctgaattgtgagtagattggtctgtctcgcttgccatgctcctgtctgcttaggagcaccaccaacgtcttcatcaaataatggaaattgagaaagcaagaaggttttaggcactgtagttaggcaaygtagcaattattctcctagcaaatgtcttaaaacattctgctgctctgcagtgcttgcagactctccttagtaatctttccagcctgactaaaagtacagttcaaggagcttgtagacaaccatctgaaaaacactagcctcgtggatgtagccattcttgttcttaactttgcatctatactcttcwgtccagactttggcttaaaatatgtcacatgcactgtctaggagcagttatgcaaacagtaatgtaatgtagaacaccatgtcttagtttaccatactaattaaatttgaga

SEQ ID NO: 16926 - DNA, 600 bp, Chicken  19866894224702_3
ttggtctgtctcgcttgccatgctcctgtctgcttaggagcaccaccaacgtcttcatcaaataatggaaattgagaaagcaagaaggttttaggcactgtagttaggcaaygtagcaattattctcctagcaaatgtcttaaaacattctgctgctctgcagtgcttgcagactctccttagtaatctttccagcctgactaaaagtacagttcaaggagcttgtagacaaccatctgaaaaacactagcctcgtggatgtagccattcttgttcttaactttgcatctatactcttcwgtccagactttggcttaaaatatgtcacatgcactgtctaggagcagttatgcaaacagtaatgtaatgtagaacaccatgtcttagtttaccatactaattaaatttgagagagtgcctctgacatttagagtctcatgatcttgttgaggtagtggctcgtgctttgctgacaaatctgaccttatatatgcggaggcctcagtgtaagaacagagcggaggtgagaaacaagaaagagcaaagctgtttttcccctcattgtagagaatagagaagatgtacacggtttcagttttt

SEQ ID NO: 16927 - DNA, 600 bp, Chicken  19866894224705_1
aactctattacatcctcaaggacagatctaaaacacccaaaccgggtctggaacaggtactttgctgccagaatcgcaggcgctcaggagactgtaaatcacgcagcattaatactgtcactggcaatgaaaatctgtgcatctgtctgtgaatggtggccttcaaattgtgcttaataagcacccaggatcctgtgccgcaatgagagcaggagagaagcaccccattgcaggatggggacgtggtgccttgagatgtgggggggttacctgtgccacctccatggggctgggcagggwgcaggaagctgacacagcacccactgctacttgaggctctgagctgcagtcctgggkgtaccaggctgcttaagagcaaagagccccaccccatgccacccacacaccacgctctgtcccaccaaaatgaaggcactgagcatcgcagagcatccctgaggtgtcaggaatcagcagagcacacgaggacagggaaggaggaggatgaaggcacagtctgcagagagatgtgcacccaattccccagcctctgtgggagggtaggaccaagtgatgcagcactgaggtatggagcgcgct

SEQ ID NO: 16928 - DNA, 600 bp, Chicken  19866894224705_2
tactttgctgccagaatcgcaggcgctcaggagactgtaaatcacgcagcattaatactgtcactggcaatgaaaatctgtgcatctgtctgtgaatggtggccttcaaattgtgcttaataagcacccaggatcctgtgccgcaatgagagcaggagagaagcaccccattgcaggatggggacgtggtgccttgagatgtgggggggttacctgtgccacctccatggggctgggcagggwgcaggaagctgacacagcacccactgctacttgaggctctgagctgcagtcctgggkgtaccaggctgcttaagagcaaagagccccaccccatgccacccacacaccacgctctgtcccaccaaaatgaaggcactgagcatcgcagagcatccctgaggtgtcaggaatcagcagagcacacgaggacagggaaggaggaggatgaaggcacagtctgcagagagatgtgcacccaattccccagcctctgtgggagggtaggaccaagtgatgcagcactgaggtatggagcgcgctcaggaggggggaggtatttcaggtgctggagaggctgagcacagagggagcccgtgc

SEQ ID NO: 16929 - DNA, 600 bp, Chicken  19866894224707_1
gtgcagacagagggagggagggaggcactgagagtgggaaggaaaagtgcgcttacagagaacaatggaatgatgcaaattacgtaaactatgccgaggaactaagccagtcagggacaacttcaatttattttttttttctgtattgttttattgttgaagcttccttaatttggaggcctgtaacacagccttgtggcaaaagaaaggagagagtgtgctggggcccaaccctgggcctcagtgatgtggggcctggtgaagagggagtgctacagcttgcgtttccctctgacttcycactcttccctcatatcaatcactgtcattgaatcccagaaaataggaacaattctcaaggatgggcagaacccctaaactggagttcacgtctgactcaaagtcccttrcattttaagaggaaaggtatgttgcagtctgactcattaaatctatctatagtacaatgatgttggtagactactgtctgagtatcttccaaatttaagttttagctgtcggccacctttccaaaacaggaaagttttgctctcctataactgagctgggggccctcagctccttggagtgacaatagag

SEQ ID NO: 16930 - DNA, 600 bp, Chicken  19866894224707_2
tcagggacaacttcaatttattttttttttctgtattgttttattgttgaagcttccttaatttggaggcctgtaacacagccttgtggcaaaagaaaggagagagtgtgctggggcccaaccctgggcctcagtgatgtggggcctggtgaagagggagtgctacagcttgcgtttccctctgacttcycactcttccctcatatcaatcactgtcattgaatcccagaaaataggaacaattctcaaggatgggcagaacccctaaactggagttcacgtctgactcaaagtcccttrcattttaagaggaaaggtatgttgcagtctgactcattaaatctatctatagtacaatgatgttggtagactactgtctgagtatcttccaaatttaagttttagctgtcggccacctttccaaaacaggaaagttttgctctcctataactgagctgggggccctcagctccttggagtgacaatagagacaaacaattttatgaagtgactcatccaacctattttaaatgtcaacctcaaggaaacttggatcctgacgtacaagatggcttcttctccccgttgactgcaaaggag

SEQ ID NO: 16931 - DNA, 599 bp, Chicken  19866894224709_1
  misc_feature (1)..(115): n is any nucleotide
nnnnnnnnnnnnnnnnnnnnnnnnnnnnnnnnnnnnnnnnnnnnnnnnnnnnnnnnnnnnnnnnnnnnnnnnnnnnnnnnnnnnnnnnnnnnnnnnnnnnnnnnnnnnnnnnnnnacgtcaactccgcatgggccaggatctgctgcacaactcttgacttgtggcttgatcaatgcagtgtttctgttagttcaggtcccagctgctgtgacgctggttcaagccagccccatgatgcacatccagtcccatgctgtgaggtttggattcatctcatttctcagctctggctgctcctyctaccacagaggaggatgcccaagttaaagctgctgagcagaagtgctctctgtaccattctgtcggcagaagtttccttggtcgccatgtttctgatattattcaggctctgatggtaacagcaagggttgctgtaaggtaccatgagacaggacagcaccgcagcatcccttccccactcctcacctttgttcctgggaggatatcggtgctcttttgcagcaccacttgaaatgacaaattacaaatgagtcaatttttcaaacttcagatgccgcaacgattcaacacaaacaaa

SEQ ID NO: 16932 - DNA, 600 bp, Chicken  19866894224711_1
aatatacatacacataaatatactactacatatagtacatgttctatgtatatatgaacacacactacacacacacacgtccagatacataaatataaaaagaacttatacaacttcacatcatgccattattgcagctggagtttctgaacacagttaaaacagaaatgaacacccccaacaccacgtatgctgctgtgcttatatgtagctgcagccctacctgggtacctcccatgggacatgtcgtcctccaagctccacgcaaaccagacacacaagaccttccttcttgttagyacagcatcaagccagcagtaagatctgatgctgccagrggagttacgttagctttctaatcaaagtaacaygtcccctttcatagagaacaaaataaaacatgccaccacaaagctccaaaccatctgaaaactgccctgtctttgcatcacacccagataaggcagcagatttcaccaaaacaaagctgttctgcagtatctcacttgccttctacgcctcgtccttggagctgacaccagcagcggtgctgcagcacactttgacagtggaagaacaaccaccatcaaatcagaacac

SEQ ID NO: 16933 - DNA, 600 bp, Chicken  19866894224711_2
atgttctatgtatatatgaacacacactacacacacacacgtccagatacataaatataaaaagaacttatacaacttcacatcatgccattattgcagctggagtttctgaacacagttaaaacagaaatgaacacccccaacaccacgtatgctgctgtgcttatatgtagctgcagccctacctgggtacctcccatgggacatgtcgtcctccaagctccacgcaaaccagacacacaagaccttccttcttgttagyacagcatcaagccagcagtaagatctgatgctgccagrggagttacgttagctttctaatcaaagtaacaygtcccctttcatagagaacaaaataaaacatgccaccacaaagctccaaaccatctgaaaactgccctgtctttgcatcacacccagataaggcagcagatttcaccaaaacaaagctgttctgcagtatctcacttgccttctacgcctcgtccttggagctgacaccagcagcggtgctgcagcacactttgacagtggaagaacaaccaccatcaaatcagaacacaaagtatgtgacgcagttaaggcgccctggaaaagctt

SEQ ID NO: 16934 - DNA, 600 bp, Chicken  19866894224711_3
cacacacgtccagatacataaatataaaaagaacttatacaacttcacatcatgccattattgcagctggagtttctgaacacagttaaaacagaaatgaacacccccaacaccacgtatgctgctgtgcttatatgtagctgcagccctacctgggtacctcccatgggacatgtcgtcctccaagctccacgcaaaccagacacacaagaccttccttcttgttagyacagcatcaagccagcagtaagatctgatgctgccagrggagttacgttagctttctaatcaaagtaacaygtcccctttcatagagaacaaaataaaacatgccaccacaaagctccaaaccatctgaaaactgccctgtctttgcatcacacccagataaggcagcagatttcaccaaaacaaagctgttctgcagtatctcacttgccttctacgcctcgtccttggagctgacaccagcagcggtgctgcagcacactttgacagtggaagaacaaccaccatcaaatcagaacacaaagtatgtgacgcagttaaggcgccctggaaaagcttgaatattcaagcctgagttgctagtagactgct

SEQ ID NO: 16935 - DNA, 599 bp, Chicken  19866894224720_1
  misc_feature (1)..(60): n is any nucleotide
nnnnnnnnnnnnnnnnnnnnnnnnnnnnnnnnnnnnnnnnnnnnnnnnnnnnnnnnnnnnatgtacaaatgttacttaatttgaggggaaaaaaaacccactacagattatcacaaacctgagtaacgccaactctcacttccctattgacagatcctcctactttcagcatctctccgccgctctttaagaaaccagaccctcctcgcagaaatcccgtggccatgagttccaagacttcctcaagagtagccctcttcacattctgtcgcatcacttttgccaagagaaaagcaaccwtttaatcctaaagttccaagcaatacaagtaattatctcaaaaattggaattatcaaytcagagttctctcgacacatagatccagccaacatttcagttaacagctttgttttgtgcttacaaaataagttctttttcccaaatgatttttgaccatttcctttgtctttgtatgactacaagagagaatctgagtgctttacctctttttaaaytcggaggtttaaaaaacaacagcaaatcaactacaggtgttcatgaactggaacaaaatatcgtatcatgcaacacaatatgg

SEQ ID NO: 16936 - DNA, 599 bp, Chicken  19866894224720_2
  misc_feature (1)..(2): n is any nucleotide
nnatgtacaaatgttacttaatttgaggggaaaaaaaacccactacagattatcacaaacctgagtaacgccaactctcacttccctattgacagatcctcctactttcagcatctctccgccgctctttaagaaaccagaccctcctcgcagaaatcccgtggccatgagttccaagacttcctcaagagtagccctcttcacattctgtcgcatcacttttgccaagagaaaagcaaccwtttaatcctaaagttccaagcaatacaagtaattatctcaaaaattggaattatcaaytcagagttctctcgacacatagatccagccaacatttcagttaacagctttgttttgtgcttacaaaataagttctttttcccaaatgatttttgaccatttcctttgtctttgtatgactacaagagagaatctgagtgctttacctctttttaaaytcggaggtttaaaaaacaacagcaaatcaactacaggtgttcatgaactggaacaaaatatcgtatcatgcaacacaatatggaagatgcaatttgtttggggacgtaattcaggaggattgtacctgttgcttgtttcgg

SEQ ID NO: 16937 - DNA, 489 bp, Chicken  19866894224720_3
ccgtggccatgagttccaagacttcctcaagagtagccctcttcacattctgtcgcatcacttttgccaagagaaaagcaaccwtttaatcctaaagttccaagcaatacaagtaattatctcaaaaattggaattatcaaytcagagttctctcgacacatagatccagccaacatttcagttaacagctttgttttgtgcttacaaaataagttctttttcccaaatgatttttgaccatttcctttgtctttgtatgactacaagagagaatctgagtgctttacctctttttaaaytcggaggtttaaaaaacaacagcaaatcaactacaggtgttcatgaactggaacaaaatatcgtatcatgcaacacaatatggaagatgcaatttgtttggggacgtaattcaggaggattgtacctgttgcttgtttcggtatcagtgccgtagccatgacagttcccaaaagctttgacactgcaac

SEQ ID NO: 16938 - DNA, 599 bp, Chicken  19866894224722_1
  misc_feature (1)..(28): n is any nucleotide
nnnnnnnnnnnnnnnnnnnnnnnnnnnntgcagctgaagacagaatgtaggctttaagagagcaataatgtcttatgacctgataaaaccaacacaaagcttccttccagctgtggatttgatccagatacaaaagcttgcagggtttctacatatgagttctgaaaaatcattctttttgctagaagcttacagcctcagatttgcagtgattcttaactctacatttaattgctaattctggttttggaaaacgagatgttaggagtattatttcagtctgccatgtgctaaacttastttccaaacttacttaaaccccgtttggttttgccccacgtagctgaccaaactgttcagacaggttgaacagagtttcagctatgttttaaaggattcagcaagtgtgatgctaactttagctayggtttaacagctgggacagccattcttgttaaaagaaattgaaggggaaattggctgccaaccccaaatacctgctgtgtcagggcagctgccctgtgcagaccagcctgaatctttttcygctgtgcttttggtagatcggcataaatgaagatgagtttgaacagtcacat

SEQ ID NO: 16939 - DNA, 600 bp, Chicken  19866894224722_2
gatacaaaagcttgcagggtttctacatatgagttctgaaaaatcattctttttgctagaagcttacagcctcagatttgcagtgattcttaactctacatttaattgctaattctggttttggaaaacgagatgttaggagtattatttcagtctgccatgtgctaaacttastttccaaacttacttaaaccccgtttggttttgccccacgtagctgaccaaactgttcagacaggttgaacagagtttcagctatgttttaaaggattcagcaagtgtgatgctaactttagctayggtttaacagctgggacagccattcttgttaaaagaaattgaaggggaaattggctgccaaccccaaatacctgctgtgtcagggcagctgccctgtgcagaccagcctgaatctttttcygctgtgcttttggtagatcggcataaatgaagatgagtttgaacagtcacatggaataagagggacctgccaattaagtgtgtgctaaaaaggaaatgcaagtgttgaatgggtactatgtggccgctcttggttttgtggggatgttttttttcgcaggggtggtatgccatrtatac

SEQ ID NO: 16940 - DNA, 600 bp, Chicken  19866894224722_3
tggaaaacgagatgttaggagtattatttcagtctgccatgtgctaaacttastttccaaacttacttaaaccccgtttggttttgccccacgtagctgaccaaactgttcagacaggttgaacagagtttcagctatgttttaaaggattcagcaagtgtgatgctaactttagctayggtttaacagctgggacagccattcttgttaaaagaaattgaaggggaaattggctgccaaccccaaatacctgctgtgtcagggcagctgccctgtgcagaccagcctgaatctttttcygctgtgcttttggtagatcggcataaatgaagatgagtttgaacagtcacatggaataagagggacctgccaattaagtgtgtgctaaaaaggaaatgcaagtgttgaatgggtactatgtggccgctcttggttttgtggggatgttttttttcgcaggggtggtatgccatrtataccttttctagcaccraactactactttttataccaaaaaaacctgcattctgaataccatcaggagcttggctagatctgctctctggcacagaggcaaattatctccaaaatcagatgctc

SEQ ID NO: 16941 - DNA, 600 bp, Chicken  19866894224722_4
gctayggtttaacagctgggacagccattcttgttaaaagaaattgaaggggaaattggctgccaaccccaaatacctgctgtgtcagggcagctgccctgtgcagaccagcctgaatctttttcygctgtgcttttggtagatcggcataaatgaagatgagtttgaacagtcacatggaataagagggacctgccaattaagtgtgtgctaaaaaggaaatgcaagtgttgaatgggtactatgtggccgctcttggttttgtggggatgttttttttcgcaggggtggtatgccatrtataccttttctagcaccraactactactttttataccaaaaaaacctgcattctgaataccatcaggagcttggctagatctgctctctggcacagaggcaaattatctccaaaatcagatgctccttgggcatcctgcatggggaggatatatgcacagtcagctagatgtgatcctgccagtgatgttactgtagcgtgacacattgccttggaacaccttgctgtatgagaagacttgtttgttgaaagtccgggaaaattgatggagtataaataagaaaaataaaatgcagaga

SEQ ID NO: 16942 - DNA, 600 bp, Chicken  19866894224722_5
gacagccattcttgttaaaagaaattgaaggggaaattggctgccaaccccaaatacctgctgtgtcagggcagctgccctgtgcagaccagcctgaatctttttcygctgtgcttttggtagatcggcataaatgaagatgagtttgaacagtcacatggaataagagggacctgccaattaagtgtgtgctaaaaaggaaatgcaagtgttgaatgggtactatgtggccgctcttggttttgtggggatgttttttttcgcaggggtggtatgccatrtataccttttctagcaccraactactactttttataccaaaaaaacctgcattctgaataccatcaggagcttggctagatctgctctctggcacagaggcaaattatctccaaaatcagatgctccttgggcatcctgcatggggaggatatatgcacagtcagctagatgtgatcctgccagtgatgttactgtagcgtgacacattgccttggaacaccttgctgtatgagaagacttgtttgttgaaagtccgggaaaattgatggagtataaataagaaaaataaaatgcagagagcagaatgaaattgctttt

SEQ ID NO: 16943 - DNA, 600 bp, Chicken  19866894224727_1
gattgggctattcagagtttgaggagatggaagacagatgtggatatatccactgaagagggaattagggagactttgtccttagtttgtaactgtaagttaggagccatggtttctatggctttcttagctgcagatgtgatggggagacaagcagaatcagtttcaggaagaattttcttagtcatttttcttatgtgcacaccaaaggatactcattttgaggtgactgctgctactgtttgcattctgacaggagcttgagtcatgcttgaaatgtgttttgctgtgggtgtttcyttaccattgtttgttccccctttgcctcagctgtagggcaggctatagaacttgggctgtttggttatttgaaatgttatattcttgctcatactttatctctagaaaaaactcttaaaattctgtaactgtggttttcattcctgattggcaagtgctttccatgagcttgcgactaaggcttgtcatttgacttttagaaatactttttgcagaaaatctgtaattctggaagtgatttcgctcctgtgctgagtattaaacactgttggacaaggactgatgaaactcctcctcgtt

SEQ ID NO: 16944 - DNA, 600 bp, Chicken  19866894224727_2
ttgctttaatactctgtggtctgaaatggcttgagaaaaattccggactagattccagcagaattatcttaatagagctaattacttaataaaagcagtaacaaaggagaaattatgtcagagatgttaggtcgatgttctgtttactgtcagttctttgagcagtaagagcttaatgcaagattgatttcattatgcccaccgagctttttgggaaagcacaagtagttaaaagcatttgggaaataaaattactccgtatttaaaagtgccagctatgatctcagagccctgtgtaaragatcaaattctccactttaaataagtccatccagtttttagattagtgtctgaccaacgttacaattcttaatctgagagttagtaaccattcataatgcttggagcaattggaaacagagaccagtcccttttaattgtttccttccgttgtatttaatgcagcttctctggatacattaagatccctgcatgatggatttgttttctgtttgttatcttaatgataattgctggaccctacaggatgatgtaggaaatcagggaattccaagttcttcttgagtaccatccaaactt

SEQ ID NO: 16945 - DNA, 600 bp, Chicken  19866894224727_3
acaattcttaatctgagagttagtaaccattcataatgcttggagcaattggaaacagagaccagtcccttttaattgtttccttccgttgtatttaatgcagcttctctggatacattaagatccctgcatgatggatttgttttctgtttgttatcttaatgataattgctggaccctacaggatgatgtaggaaatcagggaattccaagttcttcttgagtaccatccaaacttgttggtgaactttttctaatggcctcatttctccaatgtttatattccaaatataacattcygtaggtgttattaatatttgaaatgatatttcagttttacacagctatcatctctgtgaagatttctccttttttagtttcttttaccgttttcagcacaacttggtcctgttttccttgctcacctttacaggtgagggagcaaacttaattattttcttcttgcttttcatagatgtatcctagttggagctgagcactcctccttgttgttttttggggtttttttaatcatgtgttctgtcttcagcccagttctgtgggtcttcagtgacatatatcttgagtgatgctggtgtt

SEQ ID NO: 16946 - DNA, 600 bp, Chicken  19866894224729_1
agcaatattgaactggcacagtatgaaacagaagagcatttcaaatatcattgtaccagatcctgattttgcatgtcgataaacagcatccagtgggagcttagggcactgtgcaagtttgaacctttatttaatagatgcagtttaatattaactatttattaaaatatagtataaaatattctttttttttttgcctgtgtaaaattaaagtagtccttgaaatatgaaacctgaacacaactctccaatttagtgccgcacacaattacagttgagcacgtgtgaaagtgctgaatsagccttttttcctctgtgtgctgagaaagcgggaggaatcttctgattacttaaattttcattttattcttcatttaagaacaaaacgtggccaaaaaaagggcaatgaggtctggaagcactggaagaactcatcttcaaagcctttcactggtttgattcaacgtsagatgtcttmaaagtcccyggaatgaatccgtgaacacatttatggaataaatttctgtgtctagattccaaactgtgcaaatgatgaagttacaatttagcagatagatttgggttactgggtctagatga

SEQ ID NO: 16947 - DNA, 582 bp, Chicken  19866894224729_2
atagtataaaatattctttttttttttgcctgtgtaaaattaaagtagtccttgaaatatgaaacctgaacacaactctccaatttagtgccgcacacaattacagttgagcacgtgtgaaagtgctgaatsagccttttttcctctgtgtgctgagaaagcgggaggaatcttctgattacttaaattttcattttattcttcatttaagaacaaaacgtggccaaaaaaagggcaatgaggtctggaagcactggaagaactcatcttcaaagcctttcactggtttgattcaacgtsagatgtcttmaaagtcccyggaatgaatccgtgaacacatttatggaataaatttctgtgtctagattccaaactgtgcaaatgatgaagttacaatttagcagatagatttgggttactgggtctagatgacctagcagaatagagctcattttcctccgtgatcactgcagatatctcagctaaaaccttaatgtctgccaacatacaggattagacaaattggcaggtagtaatggattcaaaagttaaaaggaaacaaactgagcagcaggataaaat

SEQ ID NO: 16948 - DNA, 572 bp, Chicken  19866894224729_3
atattctttttttttttgcctgtgtaaaattaaagtagtccttgaaatatgaaacctgaacacaactctccaatttagtgccgcacacaattacagttgagcacgtgtgaaagtgctgaatsagccttttttcctctgtgtgctgagaaagcgggaggaatcttctgattacttaaattttcattttattcttcatttaagaacaaaacgtggccaaaaaaagggcaatgaggtctggaagcactggaagaactcatcttcaaagcctttcactggtttgattcaacgtsagatgtcttmaaagtcccyggaatgaatccgtgaacacatttatggaataaatttctgtgtctagattccaaactgtgcaaatgatgaagttacaatttagcagatagatttgggttactgggtctagatgacctagcagaatagagctcattttcctccgtgatcactgcagatatctcagctaaaaccttaatgtctgccaacatacaggattagacaaattggcaggtagtaatggattcaaaagttaaaaggaaacaaactgagcagcaggataaaat

SEQ ID NO: 16949 - DNA, 563 bp, Chicken  19866894224729_4
ttttttttgcctgtgtaaaattaaagtagtccttgaaatatgaaacctgaacacaactctccaatttagtgccgcacacaattacagttgagcacgtgtgaaagtgctgaatsagccttttttcctctgtgtgctgagaaagcgggaggaatcttctgattacttaaattttcattttattcttcatttaagaacaaaacgtggccaaaaaaagggcaatgaggtctggaagcactggaagaactcatcttcaaagcctttcactggtttgattcaacgtsagatgtcttmaaagtcccyggaatgaatccgtgaacacatttatggaataaatttctgtgtctagattccaaactgtgcaaatgatgaagttacaatttagcagatagatttgggttactgggtctagatgacctagcagaatagagctcattttcctccgtgatcactgcagatatctcagctaaaaccttaatgtctgccaacatacaggattagacaaattggcaggtagtaatggattcaaaagttaaaaggaaacaaactgagcagcaggataaaat

SEQ ID NO: 16950 - DNA, 600 bp, Chicken  19866894224730_1
tccactgcttaaatcccaagctagtagtgaatatgcagatgtaaaagttacacataacaaaatttaaatacgaaatacataaaaacaagttactttcatatgacaaattcatctagcaggataattttcttgcattcctggtggttttctcctacccagtcacagagatttccctctcattagctttgaattcggtggtaggaacatgccccctcttgctttccctacctgtcttagattgtcaagaagctgaagaccacataaattaaagaagtatgttgtctcccaccatgactacawtcttagaagctgctataataaccatagtcaattttccctagtggtggagtatgctcagcccttagtaaggcagagatgttagagatgagcatccttattttctctaccaagttgatctcacattggcccttcccactatgttatctgcccacttcagaacacctagcaggtaacttggtttacagatcagtggaaactttgatgatttccctaaaataaaaggaaaagtgctgcacttctttaggagtatgatatagcttgtaggctaattgggtctgtgaatatccttaacagtatcta

SEQ ID NO: 16951 - DNA, 599 bp, Chicken  19866894224732_1
  misc_feature (1)..(159): n is any nucleotide
nnnnnnnnnnnnnnnnnnnnnnnnnnnnnnnnnnnnnnnnnnnnnnnnnnnnnnnnnnnnnnnnnnnnnnnnnnnnnnnnnnnnnnnnnnnnnnnnnnnnnnnnnnnnnnnnnnnnnnnnnnnnnnnnnnnnnnnnnnnnnnnnnnnnnnnnnnnnnnnctgcctactcttatgtatgttacatgtggtttgtcatggaccaagggctttgaacagcaagaattactgcacttactgtttttgcttgcttaggctttccataaggctattctaagaatatgtcattcccatttccaacargggtcactgggatgttcaactgactactgttagcattaagtctcttacagtcacagtaaattgtaggggcaaaatttgtaaattgaataattaatctgagycaaggggctaaaatggaagctcagtgcaccaaaaaccatgcttacattttttattttagtggaatcacgttcttttaaatgtgtctcgtgaaaygtatagctgmtgttctctatcctttggtycttctagctaaagcaaacaaataaatgcaacacagaaaatacttsgttttatttcataacagcctctcctacctt

SEQ ID NO: 16952 - DNA, 599 bp, Chicken  19866894224732_2
  misc_feature (1)..(58): n is any nucleotide
nnnnnnnnnnnnnnnnnnnnnnnnnnnnnnnnnnnnnnnnnnnnnnnnnnnnnnnnnnctgcctactcttatgtatgttacatgtggtttgtcatggaccaagggctttgaacagcaagaattactgcacttactgtttttgcttgcttaggctttccataaggctattctaagaatatgtcattcccatttccaacargggtcactgggatgttcaactgactactgttagcattaagtctcttacagtcacagtaaattgtaggggcaaaatttgtaaattgaataattaatctgagycaaggggctaaaatggaagctcagtgcaccaaaaaccatgcttacattttttattttagtggaatcacgttcttttaaatgtgtctcgtgaaaygtatagctgmtgttctctatcctttggtycttctagctaaagcaaacaaataaatgcaacacagaaaatacttsgttttatttcataacagcctctcctaccttctgataaccaaaactcccattctgtagtgytctctccagagacaagccttccctatactgacaacaacatttaacaacagcctgatgagctccaagctagg

SEQ ID NO: 16953 - DNA, 600 bp, Chicken  19866894224732_3
tggaccaagggctttgaacagcaagaattactgcacttactgtttttgcttgcttaggctttccataaggctattctaagaatatgtcattcccatttccaacargggtcactgggatgttcaactgactactgttagcattaagtctcttacagtcacagtaaattgtaggggcaaaatttgtaaattgaataattaatctgagycaaggggctaaaatggaagctcagtgcaccaaaaaccatgcttacattttttattttagtggaatcacgttcttttaaatgtgtctcgtgaaaygtatagctgmtgttctctatcctttggtycttctagctaaagcaaacaaataaatgcaacacagaaaatacttsgttttatttcataacagcctctcctaccttctgataaccaaaactcccattctgtagtgytctctccagagacaagccttccctatactgacaacaacatttaacaacagcctgatgagctccaagctaggagcgtaggatgagcataggattcacccacatatgcatgctgctatcaacagcagagaaaatccctctgcagttctaacagactactctgcccact

SEQ ID NO: 16954 - DNA, 600 bp, Chicken  19866894224732_4
gctttgaacagcaagaattactgcacttactgtttttgcttgcttaggctttccataaggctattctaagaatatgtcattcccatttccaacargggtcactgggatgttcaactgactactgttagcattaagtctcttacagtcacagtaaattgtaggggcaaaatttgtaaattgaataattaatctgagycaaggggctaaaatggaagctcagtgcaccaaaaaccatgcttacattttttattttagtggaatcacgttcttttaaatgtgtctcgtgaaaygtatagctgmtgttctctatcctttggtycttctagctaaagcaaacaaataaatgcaacacagaaaatacttsgttttatttcataacagcctctcctaccttctgataaccaaaactcccattctgtagtgytctctccagagacaagccttccctatactgacaacaacatttaacaacagcctgatgagctccaagctaggagcgtaggatgagcataggattcacccacatatgcatgctgctatcaacagcagagaaaatccctctgcagttctaacagactactctgcccactgaaaatctga

SEQ ID NO: 16955 - DNA, 600 bp, Chicken  19866894224732_5
actgcacttactgtttttgcttgcttaggctttccataaggctattctaagaatatgtcattcccatttccaacargggtcactgggatgttcaactgactactgttagcattaagtctcttacagtcacagtaaattgtaggggcaaaatttgtaaattgaataattaatctgagycaaggggctaaaatggaagctcagtgcaccaaaaaccatgcttacattttttattttagtggaatcacgttcttttaaatgtgtctcgtgaaaygtatagctgmtgttctctatcctttggtycttctagctaaagcaaacaaataaatgcaacacagaaaatacttsgttttatttcataacagcctctcctaccttctgataaccaaaactcccattctgtagtgytctctccagagacaagccttccctatactgacaacaacatttaacaacagcctgatgagctccaagctaggagcgtaggatgagcataggattcacccacatatgcatgctgctatcaacagcagagaaaatccctctgcagttctaacagactactctgcccactgaaaatctgacagcaaatcattttccctt

SEQ ID NO: 16956 - DNA, 600 bp, Chicken  19866894224732_6
tctaagaatatgtcattcccatttccaacargggtcactgggatgttcaactgactactgttagcattaagtctcttacagtcacagtaaattgtaggggcaaaatttgtaaattgaataattaatctgagycaaggggctaaaatggaagctcagtgcaccaaaaaccatgcttacattttttattttagtggaatcacgttcttttaaatgtgtctcgtgaaaygtatagctgmtgttctctatcctttggtycttctagctaaagcaaacaaataaatgcaacacagaaaatacttsgttttatttcataacagcctctcctaccttctgataaccaaaactcccattctgtagtgytctctccagagacaagccttccctatactgacaacaacatttaacaacagcctgatgagctccaagctaggagcgtaggatgagcataggattcacccacatatgcatgctgctatcaacagcagagaaaatccctctgcagttctaacagactactctgcccactgaaaatctgacagcaaatcattttccctttttgcctttataatgtattagactatgacagcagcataaatccca

SEQ ID NO: 16957 - DNA, 600 bp, Chicken  19866894224732_7
ttagcattaagtctcttacagtcacagtaaattgtaggggcaaaatttgtaaattgaataattaatctgagycaaggggctaaaatggaagctcagtgcaccaaaaaccatgcttacattttttattttagtggaatcacgttcttttaaatgtgtctcgtgaaaygtatagctgmtgttctctatcctttggtycttctagctaaagcaaacaaataaatgcaacacagaaaatacttsgttttatttcataacagcctctcctaccttctgataaccaaaactcccattctgtagtgytctctccagagacaagccttccctatactgacaacaacatttaacaacagcctgatgagctccaagctaggagcgtaggatgagcataggattcacccacatatgcatgctgctatcaacagcagagaaaatccctctgcagttctaacagactactctgcccactgaaaatctgacagcaaatcattttccctttttgcctttataatgtattagactatgacagcagcataaatcccacgaaaaaaaaaatgtgcagtgattttgccgatagatgccacaaaacctatttatgacaca

SEQ ID NO: 16958 - DNA, 600 bp, Chicken  19866894224743_1
cccttgccatttgaattgagcagcttaagtactgaggttaatatgtgtgctactgagatagatataatgctctctgcaggaaggaccctcaccctggtcctttaaatgctttccctctctgccagtctcattacaaagactcattcctgtgctgataacaacagctgtgacaataggtatcagctcaatgcaggattaagaactgttgagcctgaggagaaattccatctgtgatagagcacattttgttcagtcctctggacatctccacctgcacagagatgccacttgatgccaccwgggtctgggccctccctaatgagtaggctcttgccagaagcctygcttgttttatcacctcaacaggaggcatggtggtcaatgctgaattaaagttctgagcatttgtgctaactcagtctagagctgcaccatccacaaatggcatctgcgtctacaggcagcctccctcagcaggatcctgcttgtatcggcatctctgcctctggactgctgcagtgcagactgtggaggctgtgggctttcctctcaagaaatccagttaatcttgaaggcagaatattttctgctctctttatt

SEQ ID NO: 16959 - DNA, 600 bp, Chicken  19866894224743_2
gtgtgctactgagatagatataatgctctctgcaggaaggaccctcaccctggtcctttaaatgctttccctctctgccagtctcattacaaagactcattcctgtgctgataacaacagctgtgacaataggtatcagctcaatgcaggattaagaactgttgagcctgaggagaaattccatctgtgatagagcacattttgttcagtcctctggacatctccacctgcacagagatgccacttgatgccaccwgggtctgggccctccctaatgagtaggctcttgccagaagcctygcttgttttatcacctcaacaggaggcatggtggtcaatgctgaattaaagttctgagcatttgtgctaactcagtctagagctgcaccatccacaaatggcatctgcgtctacaggcagcctccctcagcaggatcctgcttgtatcggcatctctgcctctggactgctgcagtgcagactgtggaggctgtgggctttcctctcaagaaatccagttaatcttgaaggcagaatattttctgctctctttatttctttggttactttctctgtgtcaatcaactgaaacaaatatga

SEQ ID NO: 16960 - DNA, 600 bp, Chicken  19866894224744_1
ttaattaaatcagtggaggaaatgggctctcctcctctgtatggatgagggggaagagaaatgcaagaagcgaacatctgctctctttcagtagtatttgaagaggttccagtaacagcccttgcacaaagcaaaaggcattttgtccttcggagactcactgttttccagacattttgattaaattaggtcagcatagcaggtctgtaccacagcacaaggatggcaagcttactccatttttgcagcaggctgaactaagttcctgagagaagcagcgatagcattttaattatacakctagaaagatatttattacacagacattccaaaatagcaggagcctggtttayagacaccatttggaataatacgttctgatgaggtgtggttgacatcttactctttgcacagaggtcaagtgaaaggttttggccactgctatggggaagtaagaggatttcctttgcaggaaagaaaagacccattagttctttgcagtacctattgtgtctcaagtagtgggtgtttgacagagcctgcacgctgtgggtacaccgataaggagtgtaacggggttgtttggaggctgattcagtg

SEQ ID NO: 16961 - DNA, 600 bp, Chicken  19866894224744_2
aagagaaatgcaagaagcgaacatctgctctctttcagtagtatttgaagaggttccagtaacagcccttgcacaaagcaaaaggcattttgtccttcggagactcactgttttccagacattttgattaaattaggtcagcatagcaggtctgtaccacagcacaaggatggcaagcttactccatttttgcagcaggctgaactaagttcctgagagaagcagcgatagcattttaattatacakctagaaagatatttattacacagacattccaaaatagcaggagcctggtttayagacaccatttggaataatacgttctgatgaggtgtggttgacatcttactctttgcacagaggtcaagtgaaaggttttggccactgctatggggaagtaagaggatttcctttgcaggaaagaaaagacccattagttctttgcagtacctattgtgtctcaagtagtgggtgtttgacagagcctgcacgctgtgggtacaccgataaggagtgtaacggggttgtttggaggctgattcagtggccaagaaaaacgttgtgtaagggtggcaaacaaaactcatgccatggttact

SEQ ID NO: 16962 - DNA, 600 bp, Chicken  19866894224749_1
ctgctcctttgcctgagcctccttggagccatcgctcaggcccagaagtggtgctgctggttgtgtctttaatcctaaggttgttttccttcctcccttccttcctttctttctttcttctccccctctctcttttttttaatcccctgctggcaatagcgtagtagagaggattgactgtataatcttttccttttactcctgagccttctatcttaaaattgacttttgtttttgtcttttacagtgcacttctttatggtttcttgtgtttcctagcattaaaagtctggaaatgtyagttattgaatggagaagtatttttagtcatgaaacagaagatcactggcttttggtcatcagaaatacacttaggaggagtttgcctggtatgtttaagaccttttacttagggaagcagacaggaatcctccaacagatgaccaaggyggcatttcctgtgcttggtctgaagggattaaaagtagcattcatcctgaaaaatgtaagacaaggcgataagttaccctttgtatgtacttttttatctttactttatctctacgaccaactctacttggttgtagagaaggctttcat

SEQ ID NO: 16963 - DNA, 600 bp, Chicken  19866894224749_2
tggcaatagcgtagtagagaggattgactgtataatcttttccttttactcctgagccttctatcttaaaattgacttttgtttttgtcttttacagtgcacttctttatggtttcttgtgtttcctagcattaaaagtctggaaatgtyagttattgaatggagaagtatttttagtcatgaaacagaagatcactggcttttggtcatcagaaatacacttaggaggagtttgcctggtatgtttaagaccttttacttagggaagcagacaggaatcctccaacagatgaccaaggyggcatttcctgtgcttggtctgaagggattaaaagtagcattcatcctgaaaaatgtaagacaaggcgataagttaccctttgtatgtacttttttatctttactttatctctacgaccaactctacttggttgtagagaaggctttcatggtgtagcatggaggagatgcttatgctttgctgggtaaggtgaaccccactctgaacgttaccttgtattgctagagttagattaacacagggaagcccaggaaggctggtgggagggatgggctctgtgccacacattgtgaccaatc

SEQ ID NO: 16964 - DNA, 600 bp, Chicken  19866894224749_3
tgaaaaatgtaagacaaggcgataagttaccctttgtatgtacttttttatctttactttatctctacgaccaactctacttggttgtagagaaggctttcatggtgtagcatggaggagatgcttatgctttgctgggtaaggtgaaccccactctgaacgttaccttgtattgctagagttagattaacacagggaagcccaggaaggctggtgggagggatgggctctgtgccacacattgtgaccaatctgtgaggactttctaatctcaaagggcagcagaaacccacgcagagkttgtaggcsttgtttatgtatttatttctccaaaaagagtggtatgtgaagctatttctaatggttttcwctgtgacaagttgttgtaaaggrggtaggttggcaggtgaatcgcacagagtccatcagagaagcacgagtaaacatggttcatcgaatggattagctgtgatgtgtatgtatgtacatgtaaggtgttggaaactgaatgatacactttaaatttagtcaattgcaacctgccatataaaaaggcattttaaatgaacttcttccctttattctaatcagaaagttgaa

SEQ ID NO: 16965 - DNA, 600 bp, Chicken  19866894224749_4
taagacaaggcgataagttaccctttgtatgtacttttttatctttactttatctctacgaccaactctacttggttgtagagaaggctttcatggtgtagcatggaggagatgcttatgctttgctgggtaaggtgaaccccactctgaacgttaccttgtattgctagagttagattaacacagggaagcccaggaaggctggtgggagggatgggctctgtgccacacattgtgaccaatctgtgaggactttctaatctcaaagggcagcagaaacccacgcagagkttgtaggcsttgtttatgtatttatttctccaaaaagagtggtatgtgaagctatttctaatggttttcwctgtgacaagttgttgtaaaggrggtaggttggcaggtgaatcgcacagagtccatcagagaagcacgagtaaacatggttcatcgaatggattagctgtgatgtgtatgtatgtacatgtaaggtgttggaaactgaatgatacactttaaatttagtcaattgcaacctgccatataaaaaggcattttaaatgaacttcttccctttattctaatcagaaagttgaactaaagcca

SEQ ID NO: 16966 - DNA, 600 bp, Chicken  19866894224749_5
ccaactctacttggttgtagagaaggctttcatggtgtagcatggaggagatgcttatgctttgctgggtaaggtgaaccccactctgaacgttaccttgtattgctagagttagattaacacagggaagcccaggaaggctggtgggagggatgggctctgtgccacacattgtgaccaatctgtgaggactttctaatctcaaagggcagcagaaacccacgcagagkttgtaggcsttgtttatgtatttatttctccaaaaagagtggtatgtgaagctatttctaatggttttcwctgtgacaagttgttgtaaaggrggtaggttggcaggtgaatcgcacagagtccatcagagaagcacgagtaaacatggttcatcgaatggattagctgtgatgtgtatgtatgtacatgtaaggtgttggaaactgaatgatacactttaaatttagtcaattgcaacctgccatataaaaaggcattttaaatgaacttcttccctttattctaatcagaaagttgaactaaagccacacatacgtgattttagctgcagttgctgtaaatttaggttgcttctgactgcaagtatag

SEQ ID NO: 16967 - DNA, 600 bp, Chicken  19866894224749_6
aggctttcatggtgtagcatggaggagatgcttatgctttgctgggtaaggtgaaccccactctgaacgttaccttgtattgctagagttagattaacacagggaagcccaggaaggctggtgggagggatgggctctgtgccacacattgtgaccaatctgtgaggactttctaatctcaaagggcagcagaaacccacgcagagkttgtaggcsttgtttatgtatttatttctccaaaaagagtggtatgtgaagctatttctaatggttttcwctgtgacaagttgttgtaaaggrggtaggttggcaggtgaatcgcacagagtccatcagagaagcacgagtaaacatggttcatcgaatggattagctgtgatgtgtatgtatgtacatgtaaggtgttggaaactgaatgatacactttaaatttagtcaattgcaacctgccatataaaaaggcattttaaatgaacttcttccctttattctaatcagaaagttgaactaaagccacacatacgtgattttagctgcagttgctgtaaatttaggttgcttctgactgcaagtataggggctgtcacgttttaaaataga

SEQ ID NO: 16968 - DNA, 600 bp, Chicken  19866894224761_1
gcaaaaggcttgtgaaattaaatgacttattgcaatgtgtattttcatagaaagtttaagatccttgaaagattgaaaggtcacaaaacacaagtttgaccttggaacgaatgaagcaagagcttgttcaacagctgcatgatttaaagccaaaggaatttgattgctttaaatcactcagctgttaaacacgctccttgtctcctctgctttccaaaatacagaatgaccagtgaagtgcattactccaaaagccaatttcactagcacattttcacatcagtcatgagctaggaaggrcagatatcagacttttagtgaacttgcagttgctaaagcagtacagcccaggcaaaacgggaggctgcggggtttcttttctgaatactgttactagacataactaaaatyactcaaaactaaaatatcttcagaaccaagtattactgaccccttcaaaagtagtagaatgtgcttctgaatatggtatacagtaaagttttttatgtatgttctccttcmttgaaaggtaacctttgtattcacagccctagcctggcttatttcccatctcatatcttagagaaacagcctgagctg

SEQ ID NO: 16969 - DNA, 600 bp, Chicken  19866894224761_2
tgaagcaagagcttgttcaacagctgcatgatttaaagccaaaggaatttgattgctttaaatcactcagctgttaaacacgctccttgtctcctctgctttccaaaatacagaatgaccagtgaagtgcattactccaaaagccaatttcactagcacattttcacatcagtcatgagctaggaaggrcagatatcagacttttagtgaacttgcagttgctaaagcagtacagcccaggcaaaacgggaggctgcggggtttcttttctgaatactgttactagacataactaaaatyactcaaaactaaaatatcttcagaaccaagtattactgaccccttcaaaagtagtagaatgtgcttctgaatatggtatacagtaaagttttttatgtatgttctccttcmttgaaaggtaacctttgtattcacagccctagcctggcttatttcccatctcatatcttagagaaacagcctgagctgcttagaccatgccctgtttcccagaaagtctacagagagtttcagcttttcaccaacaaaaataagtcaatgtttctcaggtcaccctcaaagctgctcttttttcctcca

SEQ ID NO: 16970 - DNA, 600 bp, Chicken  19866894224761_3
agaatgaccagtgaagtgcattactccaaaagccaatttcactagcacattttcacatcagtcatgagctaggaaggrcagatatcagacttttagtgaacttgcagttgctaaagcagtacagcccaggcaaaacgggaggctgcggggtttcttttctgaatactgttactagacataactaaaatyactcaaaactaaaatatcttcagaaccaagtattactgaccccttcaaaagtagtagaatgtgcttctgaatatggtatacagtaaagttttttatgtatgttctccttcmttgaaaggtaacctttgtattcacagccctagcctggcttatttcccatctcatatcttagagaaacagcctgagctgcttagaccatgccctgtttcccagaaagtctacagagagtttcagcttttcaccaacaaaaataagtcaatgtttctcaggtcaccctcaaagctgctcttttttcctccaactggggtccataaaatcttctgttcaggataaagctagctttttctgtttgttgttaactcctctgaagctgtatgtcttctgttgttgttctgttgttgttgttgtggc

SEQ ID NO: 16971 - DNA, 600 bp, Chicken  19866894224762_1
atttgagagagacattaacagaatcagtagctataaagtattaaaaaacagtctctcggtcttaattggttgttaccaagggattcatgcagggttggatgagagtttatacaactaggtcaaattaaagcaattgtatcatttccttcaaaaatagtttccaagatgatattaattcaagagttttttttctttagcatggcttgcatacctcagttttgtatgtgtgggacagactttacataaagtactgaaactttccagtaagagtggttcagtgtgtttggtccatggagaaaygttgctatcaattgctacatcatatytgtataggtatatataacatgcatgtgtagttgttgcatactccattttcccaaacaagtagtgaaaacatgttccattttcagaaagtcaaacacacataatatccttatcacaaaagcaatgcttttaaaacaagaaattaaagcaactgaaagtaacagaaagtactcactttacttttcttctctgttttttagctgaaaatgcagctggaggtggtggaggtggagaggatggaaaatccaaaacatgtatagttttgtaattctttgt

SEQ ID NO: 16972 - DNA, 600 bp, Chicken  19866894224762_2
gtagctataaagtattaaaaaacagtctctcggtcttaattggttgttaccaagggattcatgcagggttggatgagagtttatacaactaggtcaaattaaagcaattgtatcatttccttcaaaaatagtttccaagatgatattaattcaagagttttttttctttagcatggcttgcatacctcagttttgtatgtgtgggacagactttacataaagtactgaaactttccagtaagagtggttcagtgtgtttggtccatggagaaaygttgctatcaattgctacatcatatytgtataggtatatataacatgcatgtgtagttgttgcatactccattttcccaaacaagtagtgaaaacatgttccattttcagaaagtcaaacacacataatatccttatcacaaaagcaatgcttttaaaacaagaaattaaagcaactgaaagtaacagaaagtactcactttacttttcttctctgttttttagctgaaaatgcagctggaggtggtggaggtggagaggatggaaaatccaaaacatgtatagttttgtaattctttgtctcaaagacactgtttctgctacaga

SEQ ID NO: 16973 - DNA, 600 bp, Chicken  19866894224769_1
ttattttgcagaagaacacccacagggcaaggacattaaaaattgctccaaaaaagaaagtgaggatatatatagcaaattcaatgagacgaacatggggattcacctgtatgtctgtgagattgcagctcttggactcattcattgtcctggtatgtggatggcatgtgatggtctgagacctgaaatggggaaaaaaatggtaagaccctcctacctctcaatacatgcatggttcctataaaaagggcatttaaggaaatactaactctgttataaatgtgaatttgagtgtacaasattggctttctcaggcagcctgtagtgaggatgcacctctgtctcaagctctgtttatgtttactcagtttatgagtaaatatctctgggagcacttccaacaggacacagcaggcagcctcaattagataggagctgttgaatgaggggagggaatgacacgcagaagagaacacatgaataccaggacaacctgtgataatgttagtagtaattctctaacccagcctgtgcagatgaggcaaaatgattcagagtcggttttgagacaggcagggactgaagcagccagcactaagt

SEQ ID NO: 16974 - DNA, 600 bp, Chicken  19866894224771_1
ttgatactccaggtccttttgttttgattcctcccttccatcaaagcaccccattctattatttctgccccttgctccgggtatgcccagcaccccatctgctgggccaggtcttttctcctctctccctatccacgcatctctgctcttcctcagctctgcacaccaaaggcagcaatcgccttggctttcccaattaaaaaaacaacaacaacaacaacaaaaacccgcaggagttttattgctgtgatggcttttccttttctccctggctctgattcgcagcgtttttgcagaagmgtccatccctgatgctcccaataaccaccggtgtgcgaggggagggagggaagcggtgcgttactgcagcccggcgatgcgaggcggcaccggggagctgcgagatcagggaacccggctgggagacgcaaacccctcactccgggctcagcgtcatctcattggttcctgagctgctggtttaaagccgagaagagctcggagctccgagccgcacaggcagacgcagagtctcagccaagttgccagcaggctgccggggatcgcttgggtgtccgcagctctccgtgtccgaaaagg

SEQ ID NO: 16975 - DNA, 600 bp, Chicken  19866894224776_1
gtgaatagccccactatgaaatcactttgtgccatctttaagtagaatttcatttacattttgtgctcataaatgggattcaccaatgagtgacaggagtaatcctgtccccttgcccccattactgttaccttgtaaacgaagtaactgctgtcagtgcagtgtgacctgagggctgttttccatgctaacctgttggaggaagctctcgattatcttggtgcagtcactgggaagccacagtcacagaccatcgttggttttccatcctagggagatgttgtacttcagagcgaccaygtgatagagacgctcacaaagacagccatgcgggcagacaaagttaacaacatcaacatcaaccagggcaggtgagtgaagccatgmaggcccagccctgctcaggagctgtttcattgttgtgttggctctgcttcagcattacagagccacaggtatatgtatatacagtgaagccacttgcacggacgggggtcacacattctcatcacgtttcttacctgtttgtctctgcagcataaaatttacagttggtcaaggcaaagaaggcatcatcgattttatatcaggatcagaact

SEQ ID NO: 16976 - DNA, 600 bp, Chicken  19866894224776_2
gagtgacaggagtaatcctgtccccttgcccccattactgttaccttgtaaacgaagtaactgctgtcagtgcagtgtgacctgagggctgttttccatgctaacctgttggaggaagctctcgattatcttggtgcagtcactgggaagccacagtcacagaccatcgttggttttccatcctagggagatgttgtacttcagagcgaccaygtgatagagacgctcacaaagacagccatgcgggcagacaaagttaacaacatcaacatcaaccagggcaggtgagtgaagccatgmaggcccagccctgctcaggagctgtttcattgttgtgttggctctgcttcagcattacagagccacaggtatatgtatatacagtgaagccacttgcacggacgggggtcacacattctcatcacgtttcttacctgtttgtctctgcagcataaaatttacagttggtcaaggcaaagaaggcatcatcgattttatatcaggatcagaactgcttatagccaaagccaagaacggccatctaaccgtggtgagtacaggccaagattggtaagagatgtyrcttacagtgagtcagaa

SEQ ID NO: 16977 - DNA, 600 bp, Chicken  19866894224776_3
aggtgagtgaagccatgmaggcccagccctgctcaggagctgtttcattgttgtgttggctctgcttcagcattacagagccacaggtatatgtatatacagtgaagccacttgcacggacgggggtcacacattctcatcacgtttcttacctgtttgtctctgcagcataaaatttacagttggtcaaggcaaagaaggcatcatcgattttatatcaggatcagaactgcttatagccaaagccaagaacggccatctaaccgtggtgagtacaggccaagattggtaagagatgtyrcttacagtgagtcagaacccagagcttgtcactaggccacattcactgcagacagacgcatgccacaacttcctccctgaacacactgccctggtccaggaactctctccccagttggagttctgcactgcacttctcctcctacagtcctaggagactgccaggcttgctcaaactcatcaagtaattgtcctatcaaccacttgggtcctttcacatgattctgtctttagtgcaagtcaagttttaaaggacttaaaaacacaagaagaaaaacaattcctcttcccttctggaat

SEQ ID NO: 16978 - DNA, 600 bp, Chicken  19866894224776_4
ggtgagtgaagccatgmaggcccagccctgctcaggagctgtttcattgttgtgttggctctgcttcagcattacagagccacaggtatatgtatatacagtgaagccacttgcacggacgggggtcacacattctcatcacgtttcttacctgtttgtctctgcagcataaaatttacagttggtcaaggcaaagaaggcatcatcgattttatatcaggatcagaactgcttatagccaaagccaagaacggccatctaaccgtggtgagtacaggccaagattggtaagagatgtyrcttacagtgagtcagaacccagagcttgtcactaggccacattcactgcagacagacgcatgccacaacttcctccctgaacacactgccctggtccaggaactctctccccagttggagttctgcactgcacttctcctcctacagtcctaggagactgccaggcttgctcaaactcatcaagtaattgtcctatcaaccacttgggtcctttcacatgattctgtctttagtgcaagtcaagttttaaaggacttaaaaacacaagaagaaaaacaattcctcttcccttctggaatt

SEQ ID NO: 16979 - DNA, 600 bp, Chicken  19866894224785_1
cactgtccagtgcaagagtgaaggtaactgtggaatatcccaagctggaagggatccataaaggatcatcgagtccatctcctatagcagggctctgccttcacacctagcagacaacatccccatttgtaccacctctccacctactggatatgttaattttattcagaaacatcctcatttgacctccctcatttatagatgggagagaagtgattgtacactgctaatgcccagctcaatggttatcagataataccatcctatacctaggctttttctgtatggagaaagatggtscatcagaaaggcagttctccccatgccaaacagccatggtttatttttctgtcaattaagttcagggtgaacagccatatggcagaagtttggtaaacctgcatcctatccctttgagattctcttccaaagcttgatccagagcacagtgaagtcagtgggtgtttttctgtttcattccatgaactctgggtcagttccctctctgctgtgtctctgttggaattggttttgctgctcttgtgaatactatgactgatatcatcgctactgcagtcatgtatacataatcctttggac

SEQ ID NO: 16980 - DNA, 600 bp, Chicken  19866894224786_1
tgacaggaaacaaaggaaaattaatactaatgtgaaattaaagaataacttatagctatgcagaatttctagtactatctcaaagataattctactaaacaaacaaacaaacaaaaactataaaaaaaaaaacaactatgcccatacagagacaataacaaaacgggaagcagtatttacatagaaacatcaactaagatacgaagacagaaatataaacacttattctccttcatttggttgtgagatttcaaatgatactgataatgatacaaaaatggactgtttccacctggggtratagggagtattaatccaatttacaagtactttttacctgaaaacttctgagtatactagtgagataaaagaatttgaaataaatwattaaatgtcaatatgcaacagacttgtgtcttgtcagtgcagatcacaattttgggagtaaaaactttccttacagcttgttgcccctgtgaactgaattgtcagacaagctctgtatattctgctactacaaagcaattttctgcattgttgcagttcacaaaatgaaaagacagcagttgcagtatactactgttgcagctacaattatgg

SEQ ID NO: 16981 - DNA, 600 bp, Chicken  19866894224786_2
taattctactaaacaaacaaacaaacaaaaactataaaaaaaaaaacaactatgcccatacagagacaataacaaaacgggaagcagtatttacatagaaacatcaactaagatacgaagacagaaatataaacacttattctccttcatttggttgtgagatttcaaatgatactgataatgatacaaaaatggactgtttccacctggggtratagggagtattaatccaatttacaagtactttttacctgaaaacttctgagtatactagtgagataaaagaatttgaaataaatwattaaatgtcaatatgcaacagacttgtgtcttgtcagtgcagatcacaattttgggagtaaaaactttccttacagcttgttgcccctgtgaactgaattgtcagacaagctctgtatattctgctactacaaagcaattttctgcattgttgcagttcacaaaatgaaaagacagcagttgcagtatactactgttgcagctacaattatggcaatttgaaaataaacccatgtttttaatttcagagctaatcattgaaaaagaaaataaacagtgcctgctaatatttaaattctt

SEQ ID NO: 16982 - DNA, 599 bp, Chicken  19866894224787_1
  misc_feature (1)..(103): n is any nucleotide
nnnnnnnnnnnnnnnnnnnnnnnnnnnnnnnnnnnnnnnnnnnnnnnnnnnnnnnnnnnnnnnnnnnnnnnnnnnnnnnnnnnnnnnnnnnnnnnnnnnnnnnaacagtagattcaattagctattcactaaggattctttttaaaattttgacctttgtttccttatttctctcatatttgttcttaacacagctttatccagatgtttccatttaagtctgtattagaaaaacaaaattaggggagtggtgtgttgtggctaattttccccccaccatcagcaaaaagattatgaaayagccagtaaagaagcactacaagcgaaacaatttygcccgaccataatctatctcattwtttttttatttcattaacattcacttcttctatgtcagctctgcgagttgtgagctgcaatcaggagctcatttaggaagcttctttatacacacaaaaaaaacatattgcctcttactcttcagaaatatcaactgatctttcttgattcaacctgattcaaaaaacrgatagtttattgcattttagcttaacatttttgctttcttctgtataaayactcaccatcacctacaaacg

SEQ ID NO: 16983 - DNA, 599 bp, Chicken  19866894224787_2
  misc_feature (1)..(68): n is any nucleotide
nnnnnnnnnnnnnnnnnnnnnnnnnnnnnnnnnnnnnnnnnnnnnnnnnnnnnnnnnnnnnnnnnnnnaacagtagattcaattagctattcactaaggattctttttaaaattttgacctttgtttccttatttctctcatatttgttcttaacacagctttatccagatgtttccatttaagtctgtattagaaaaacaaaattaggggagtggtgtgttgtggctaattttccccccaccatcagcaaaaagattatgaaayagccagtaaagaagcactacaagcgaaacaatttygcccgaccataatctatctcattwtttttttatttcattaacattcacttcttctatgtcagctctgcgagttgtgagctgcaatcaggagctcatttaggaagcttctttatacacacaaaaaaaacatattgcctcttactcttcagaaatatcaactgatctttcttgattcaacctgattcaaaaaacrgatagtttattgcattttagcttaacatttttgctttcttctgtataaayactcaccatcacctacaaacgctgcatcttcttaaagatartcacagaatcatcaa

SEQ ID NO: 16984 - DNA, 599 bp, Chicken  19866894224787_3
  misc_feature (1)..(44): n is any nucleotide
nnnnnnnnnnnnnnnnnnnnnnnnnnnnnnnnnnnnnnnnnnnnaacagtagattcaattagctattcactaaggattctttttaaaattttgacctttgtttccttatttctctcatatttgttcttaacacagctttatccagatgtttccatttaagtctgtattagaaaaacaaaattaggggagtggtgtgttgtggctaattttccccccaccatcagcaaaaagattatgaaayagccagtaaagaagcactacaagcgaaacaatttygcccgaccataatctatctcattwtttttttatttcattaacattcacttcttctatgtcagctctgcgagttgtgagctgcaatcaggagctcatttaggaagcttctttatacacacaaaaaaaacatattgcctcttactcttcagaaatatcaactgatctttcttgattcaacctgattcaaaaaacrgatagtttattgcattttagcttaacatttttgctttcttctgtataaayactcaccatcacctacaaacgctgcatcttcttaaagatartcacagaatcatcaaggttggaaaagacctaagatcatc

SEQ ID NO: 16985 - DNA, 599 bp, Chicken  19866894224787_4
  misc_feature (1)..(43): n is any nucleotide
nnnnnnnnnnnnnnnnnnnnnnnnnnnnnnnnnnnnnnnnnnnaacagtagattcaattagctattcactaaggattctttttaaaattttgacctttgtttccttatttctctcatatttgttcttaacacagctttatccagatgtttccatttaagtctgtattagaaaaacaaaattaggggagtggtgtgttgtggctaattttccccccaccatcagcaaaaagattatgaaayagccagtaaagaagcactacaagcgaaacaatttygcccgaccataatctatctcattwwttttttatttcattaacattcacttcttctatgtcagctctgcgagttgtgagctgcaatcaggagctcatttaggaagcttctttatacacacaaaaaaaacatattgcctcttactcttcagaaatatcaactgatctttcttgattcaacctgattcaaaaaacrgatagtttattgcattttagcttaacatttttgctttcttctgtataaayactcaccatcacctacaaacgctgcatcttcttaaagatartcacagaatcatcaaggttggaaaagacctaagatcatcc

SEQ ID NO: 16986 - DNA, 600 bp, Chicken  19866894224787_5
tttgtttccttatttctctcatatttgttcttaacacagctttatccagatgtttccatttaagtctgtattagaaaaacaaaattaggggagtggtgtgttgtggctaattttccccccaccatcagcaaaaagattatgaaayagccagtaaagaagcactacaagcgaaacaatttygcccgaccataatctatctcattwtttttttatttcattaacattcacttcttctatgtcagctctgcgagttgtgagctgcaatcaggagctcatttaggaagcttctttatacacacwaaaaaaacatattgcctcttactcttcagaaatatcaactgatctttcttgattcaacctgattcaaaaaacrgatagtttattgcattttagcttaacatttttgctttcttctgtataaayactcaccatcacctacaaacgctgcatcttcttaaagatartcacagaatcatcaaggttggaaaagacctaagatcatccagtccaatcatccacctatcaccagtagttctcaccaaaccatgtccctcagtacaacatytaaatttttcttgaacacttccagggatggtaatt

SEQ ID NO: 16987 - DNA, 600 bp, Chicken  19866894224787_6
gaaaaacaaaattaggggagtggtgtgttgtggctaattttccccccaccatcagcaaaaagattatgaaayagccagtaaagaagcactacaagcgaaacaatttygcccgaccataatctatctcattwtttttttatttcattaacattcacttcttctatgtcagctctgcgagttgtgagctgcaatcaggagctcatttaggaagcttctttatacacacaaaaaaaacatattgcctcttactcttcagaaatatcaactgatctttcttgattcaacctgattcaaaaaacrgatagtttattgcattttagcttaacatttttgctttcttctgtataaayactcaccatcacctacaaacgctgcatcttcttaaagatartcacagaatcatcaaggttggaaaagacctaagatcatccagtccaatcatccacctatcaccagtagttctcaccaaaccatgtccctcagtacaacatytaaatttttcttgaacacttccagggatggtaattcaaccatctctccaggcagcccactccagcatctgaccactctttcagagaatatttttttcctaatgtccag

SEQ ID NO: 16988 - DNA, 600 bp, Chicken  19866894224787_7
atcagcaaaaagattatgaaayagccagtaaagaagcactacaagcgaaacaatttygcccgaccataatctatctcattwtttttttatttcattaacattcacttcttctatgtcagctctgcgagttgtgagctgcaatcaggagctcatttaggaagcttctttatacacacaaaaaaaacatattgcctcttactcttcagaaatatcaactgatctttcttgattcaacctgattcaaaaaacrgatagtttattgcattttagcttaacatttttgctttcttctgtataaayactcaccatcacctacaaacgctgcatcttcttaaagatartcacagaatcatcaaggttggaaaagacctaagatcatccagtccaatcatccacctatcaccagtagttctcaccaaaccatgtccctcagtacaacatytaaatttttcttgaacacttccagggatggtaattcaaccatctctccaggcagcccactccagcatctgaccactctttcagagaatatttttttcctaatgtccagcctgaatctcccctggtacaatttgtggccattccctcttgtcctgtcag

SEQ ID NO: 16989 - DNA, 600 bp, Chicken  19866894224787_8
caagcgaaacaatttygcccgaccataatctatctcattwtttttttatttcattaacattcacttcttctatgtcagctctgcgagttgtgagctgcaatcaggagctcatttaggaagcttctttatacacacaaaaaaaacatattgcctcttactcttcagaaatatcaactgatctttcttgattcaacctgattcaaaaaacrgatagtttattgcattttagcttaacatttttgctttcttctgtataaayactcaccatcacctacaaacgctgcatcttcttaaagatartcacagaatcatcaaggttggaaaagacctaagatcatccagtccaatcatccacctatcaccagtagttctcaccaaaccatgtccctcagtacaacatytaaatttttcttgaacacttccagggatggtaattcaaccatctctccaggcagcccactccagcatctgaccactctttcagagaatatttttttcctaatgtccagcctgaatctcccctggtacaatttgtggccattccctcttgtcctgtcagcagttacatgggagaagagatcgatccctacctcaccacaa

SEQ ID NO: 16990 - DNA, 503 bp, Chicken  19866894224787_9
caggagctcatttaggaagcttctttatacacacaaaaaaaacatattgcctcttactcttcagaaatatcaactgatctttcttgattcaacctgattcaaaaaacrgatagtttattgcattttagcttaacatttttgctttcttctgtataaayactcaccatcacctacaaacgctgcatcttcttaaagatartcacagaatcatcaaggttggaaaagacctaagatcatccagtccaatcatccacctatcaccagtagttctcaccaaaccatgtccctcagtacaacatytaaatttttcttgaacacttccagggatggtaattcaaccatctctccaggcagcccactccagcatctgaccactctttcagagaatatttttttcctaatgtccagcctgaatctcccctggtacaatttgtggccattccctcttgtcctgtcagcagttacatgggagaagagatcgatccctacctcaccacaacctc

SEQ ID NO: 16991 - DNA, 600 bp, Chicken  19866894224791_1
cacttgcagagttcaactcagatatctaaagataaccctgaagcaagcttccatatcactaacattcttcacatattattttgctgatcccgagagggaatctataataatagaaagggaatgtggaaaagggaagctgtaaaagaaatatatgatatttgtggtcttgaaaaggaaaaactgcattagaagtgtttagcctttggccaatacaaaacctatgaccatgaacagcctttttacagaaaaatcagatgcataaagaataatcagaggagtgatcagagctgtttgtatttrgagtcaaaggagtttaactcagtacattttctattattctgttaattaaccaggtgcaaaagtgcattaaaatctaagtttaggaacagcacctaggaagagatataatctaaactaaaacagaccttaggccaaagcattcctctgcacrgtgcagtatgtctgtgttagaggcactattatcaaatacactgctcagtccttgtgagggtcatcctgcaaatttgaaatacatattaagagggaaaacccacacagagcctaagatcattttccggatgctgttgatggagagtcatg

SEQ ID NO: 16992 - DNA, 600 bp, Chicken  19866894224791_2
atgatatttgtggtcttgaaaaggaaaaactgcattagaagtgtttagcctttggccaatacaaaacctatgaccatgaacagcctttttacagaaaaatcagatgcataaagaataatcagaggagtgatcagagctgtttgtatttrgagtcaaaggagtttaactcagtacattttctattattctgttaattaaccaggtgcaaaagtgcattaaaatctaagtttaggaacagcacctaggaagagatataatctaaactaaaacagaccttaggccaaagcattcctctgcacrgtgcagtatgtctgtgttagaggcactattatcaaatacactgctcagtccttgtgagggtcatcctgcaaatttgaaatacatattaagagggaaaacccacacagagcctaagatcattttccggatgctgttgatggagagtcatgagaggtgacattgctgaggaaagtaacatcctggagatcccttttttccccattaaatccagaaggagcccatacagctaacttagcatagatacttcagttaaagctgaatgagrtgaatccaaacaacagttaagtcacctctgaatgg

SEQ ID NO: 16993 - DNA, 600 bp, Chicken  19866894224791_3
aaaacagaccttaggccaaagcattcctctgcacrgtgcagtatgtctgtgttagaggcactattatcaaatacactgctcagtccttgtgagggtcatcctgcaaatttgaaatacatattaagagggaaaacccacacagagcctaagatcattttccggatgctgttgatggagagtcatgagaggtgacattgctgaggaaagtaacatcctggagatcccttttttccccattaaatccagaaggagcccatacagctaacttagcatagatacttcagttaaagctgaatgagrtgaatccaaacaacagttaagtcacctctgaatggatggaaagcataattttgaaagctgtgatgccagaggcaacccaaagaggctgacagtgggctgcagtctacagagatcagtgcatttccatgaagcactaaataaacaacaggagatggaagaagaggcctgcattccttaaaaggacaagatgtacaaaagtaaactcatggttttaaaaaagaaaacaactaagaacagtaaacaaagcaagctgtttctaaaagtaaacttgaatcaccaaatgtgtttaatgtaaagaac

SEQ ID NO: 16994 - DNA, 600 bp, Chicken  19866894224797_1
tccactgcttgcatttcatcccgttgcttccttccccaagactgaataccagtgaaaaagaaagcccaagaaatcaacaaaacaagtaacaagacagttgattacatcggctctctctcgcttcccctcctcgtgctttgcagaacctcgggctccagctgggtaacatcaggacagtggagcagcccccaggcctgagcccagccccccctgcactcaggatctgtgcactgctcccagcccccccagcactcagagcaggctgcagacatgcaaggccattgcatctgctgtatgacytccccacgctgacgtggctcctcaaacaaactcttcrgatacggttctgctgtcccagcacagtgaccagctcagccaaacccaaagggacagcacggaccccacggggacaggtgtgggcaggggggtttgcagccacgctgtgctcacagaagctgcctgggaggctgaacatactgctgctgtcaggtgaaaggaaaacagccatcaacagcaaagggaaacatgacatgggcagaagcagcgcgggctgcagcgggggggtccggcactgcatccctgtttgtcacattggggcac

SEQ ID NO: 16995 - DNA, 600 bp, Chicken  19866894224797_2
aagactgaataccagtgaaaaagaaagcccaagaaatcaacaaaacaagtaacaagacagttgattacatcggctctctctcgcttcccctcctcgtgctttgcagaacctcgggctccagctgggtaacatcaggacagtggagcagcccccaggcctgagcccagccccccctgcactcaggatctgtgcactgctcccagcccccccagcactcagagcaggctgcagacatgcaaggccattgcatctgctgtatgacytccccacgctgacgtggctcctcaaacaaactcttcrgatacggttctgctgtcccagcacagtgaccagctcagccaaacccaaagggacagcacggaccccacggggacaggtgtgggcaggggggtttgcagccacgctgtgctcacagaagctgcctgggaggctgaacatactgctgctgtcaggtgaaaggaaaacagccatcaacagcaaagggaaacatgacatgggcagaagcagcgcgggctgcagcgggggggtccggcactgcatccctgtttgtcacattggggcacagggatgtggggtcggcccctctggaggcaaagcccc

SEQ ID NO: 16996 - DNA, 600 bp, Chicken  19866894224805_1
gtccaggcagcttctgagcatctctaaggatggagactccacccaccttccctccaccacctctgccacttggacccaagctgatatccaccgcaacaagctgcaagaccaagctcccagaagggcactgagtgttggagctgggacacgtgggaccctcctgctcctcttgccctgcatgactgggagcatccagcctgaggaagcgcatgcctggagacacacgcatgcctctacttactcaaacctcttcagaataggtttgtccccatgcaaggagggggcatcctcccgcctgarggaaaacaggggttagcccctgctaatggagatctcttgcccccasccccagccccatggcacggcatagggcyccccagcaagaactgctcttgcatggtgttggtgacgctgggagcactgtccttgtcaccagtaccacccgacctgccaccaggatgctgcaggctggagagggcatgggagccccataaggggttggagggtgctgtcaccccaagtgggacagytgtggtatgggggtcctggccacccagagagggtgcaagcagaggagatgaagggctgggtacagcaagc

SEQ ID NO: 16997 - DNA, 600 bp, Chicken  19866894224805_2
cttccctccaccacctctgccacttggacccaagctgatatccaccgcaacaagctgcaagaccaagctcccagaagggcactgagtgttggagctgggacacgtgggaccctcctgctcctcttgccctgcatgactgggagcatccagcctgaggaagcgcatgcctggagacacacgcatgcctctacttactcaaacctcttcagaataggtttgtccccatgcaaggagggggcatcctcccgcctgarggaaaacaggggttagcccctgctaatggagatctcttgcccccasccccagccccatggcacggcatagggcyccccagcaagaactgctcttgcatggtgttggtgacgctgggagcactgtccttgtcaccagtaccacccgacctgccaccaggatgctgcaggctggagagggcatgggagccccataaggggttggagggtgctgtcaccccaagtgggacagytgtggtatgggggtcctggccacccagagagggtgcaagcagaggagatgaagggctgggtacagcaagcaggtgtcacgcagagcacgggcacttaccagacagcagcaggttgg

SEQ ID NO: 16998 - DNA, 600 bp, Chicken  19866894224805_3
cccaagctgatatccaccgcaacaagctgcaagaccaagctcccagaagggcactgagtgttggagctgggacacgtgggaccctcctgctcctcttgccctgcatgactgggagcatccagcctgaggaagcgcatgcctggagacacacgcatgcctctacttactcaaacctcttcagaataggtttgtccccatgcaaggagggggcatcctcccgcctgarggaaaacaggggttagcccctgctaatggagatctcttgcccccasccccagccccatggcacggcatagggcyccccagcaagaactgctcttgcatggtgttggtgacgctgggagcactgtccttgtcaccagtaccacccgacctgccaccaggatgctgcaggctggagagggcatgggagccccataaggggttggagggtgctgtcaccccaagtgggacagytgtggtatgggggtcctggccacccagagagggtgcaagcagaggagatgaagggctgggtacagcaagcaggtgtcacgcagagcacgggcacttaccagacagcagcaggttggtgcagcctgcaaaaggaaaagatagaaa

SEQ ID NO: 16999 - DNA, 600 bp, Chicken  19866894224805_4
cctctacttactcaaacctcttcagaataggtttgtccccatgcaaggagggggcatcctcccgcctgarggaaaacaggggttagcccctgctaatggagatctcttgcccccasccccagccccatggcacggcatagggcyccccagcaagaactgctcttgcatggtgttggtgacgctgggagcactgtccttgtcaccagtaccacccgacctgccaccaggatgctgcaggctggagagggcatgggagccccataaggggttggagggtgctgtcaccccaagtgggacagytgtggtatgggggtcctggccacccagagagggtgcaagcagaggagatgaagggctgggtacagcaagcaggtgtcacgcagagcacgggcacttaccagacagcagcaggttggtgcagcctgcaaaaggaaaagatagaaagagtgggcagaggagagaatcagcacgggcagagaggagtgagggggaagagatggagctggagcagaggtgtgcacaccccagcggggctaaggatgctgtgaaagccctgcacttgaatcatctcacactgccctttcctgtcctgtgaacctc

SEQ ID NO: 17000 - DNA, 600 bp, Chicken  19866894224805_5
acgtcacactgcagcattcctgcatcccacacttactccactgggatgctcagctcagggctgtcctcaataggcggctccttcggggtgctgggggtctcatttggggatgcggggctccctgggctctgcagagggtcgggctcagcacagctcccctgtgctctccacccacgccgcccctcgtctgtcttcctgcgctccttgcgcccgcctgccggcggctcctccacgccatcctccagccgcagtgcgctctgcagtgggatggggacatgctgtgaaccccggggggatgcrtcacactgccatcaccctgggcaccccactcacttcatagaggacaaattgctgcttcaggtcgaggtcagtgcctttgctgcttaaatattgctgcacgaccctctccatgccctgctgctccaggcagtccgtcacgtcgtagaaggagtcttggtctgggagggcggccagcgtctgggtggtggcgaagggacagggctggcaccggggacatagggacgccggtggtcccatggcacagtcctgatgctcaccttgttgatcaacgtcatggcgaacaccagcagctccgtgtca

SEQ ID NO: 17001 - DNA, 599 bp, Chicken  19866894224812_1
  misc_feature (1)..(90): n is any nucleotide
nnnnnnnnnnnnnnnnnnnnnnnnnnnnnnnnnnnnnnnnnnnnnnnnnnnnnnnnnnnnnnnnnnnnnnnnnnnnnnnnnnnnnnnnnncgagttcacagccttctgcatccctccccagtttttgtgggatctctatcatttttcattgaaataacagctttttgaaacatactgctcttacacaccaagcacatgcaacatttgaagggtacagatttcaagtgttttaacatagtgcagtttttcatgaatctgtgttgcaatagataacttcaataagccatgttaaaaatgtgyaggctgccagactttccaggtagtattgtcaatactgttgacaatggtattgctctgcatcaggttttcaagtaaatttctatttaagtataacatctgttaacatgcagtcttgaaatttgaacttttagccacgtttcttttggtgaatactttaataacacatcctgagtaattttatagcaccaataaagactacacactgggatcaaatmgttgttactttctgaaagtcttttactgtaaacccagtagaagtgtggcattaacatcttatctgtaaagaaaaagaagtctta

SEQ ID NO: 17002 - DNA, 600 bp, Chicken  19866894224812_2
agatttcaagtgttttaacatagtgcagtttttcatgaatctgtgttgcaatagataacttcaataagccatgttaaaaatgtgyaggctgccagactttccaggtagtattgtcaatactgttgacaatggtattgctctgcatcaggttttcaagtaaatttctatttaagtataacatctgttaacatgcagtcttgaaatttgaacttttagccacgtttcttttggtgaatactttaataacacatcctgagtaattttatagcaccaataaagactacacactgggatcaaatmgttgttactttctgaaagtcttttactgtaaacccagtagaagtgtggcattaacatcttatctgtaaagaaaaagaagtcttatttaggatagtacagaaaggacagccttacagtttaaccattctgaaagcacttatgtaactgcatttagataggcacaattacaaggtttctattaaataacagctgtatttcctgaaaggaaggctgctttaatagcaaaaaaaaagttcgtagagtaggcatttagctctgctttctccagtagatgtcacttgcagtacataataattcatg

SEQ ID NO: 17003 - DNA, 599 bp, Chicken  19866894224815_1
  misc_feature (1)..(19): n is any nucleotide
nnnnnnnnnnnnnnnnnnnactggaagtgctgcagtaatattgtgctcctcttctgggaagagtgtgagtatgaaggcttcagtttaaaaattttactaacctagaggtttttctgagcaaatgtgggtagttatgttgtgcatctgtagcaatccaaatggtgtctgagaacttgtgtaagtgattgctttagagctctgatgatagggccacatggggaagtttcaagaactggaaggatagaaaatgcaatgccctactgctttctaatatatgaatttctctccgccatttgtgtrtatgtaatagatatacggacacatgaawatatatatatatatatatawaagtgtatgaaagtatatattaaaaaaaccttttgttagaggtcattatattacaccataggcattattgatttacagataggctcttccatctgcagatccttatctcttgtttctgtcatgtttatgagaaaagtttgacatataaatctgattgatttaatgaaagatgaacagtatgcctagtttcatttggctgcatgctgcagttgtctcagtgattcagataaaatcactggtacactggtttt

SEQ ID NO: 17004 - DNA, 600 bp, Chicken  19866894224815_2
gctgcagtaatattgtgctcctcttctgggaagagtgtgagtatgaaggcttcagtttaaaaattttactaacctagaggtttttctgagcaaatgtgggtagttatgttgtgcatctgtagcaatccaaatggtgtctgagaacttgtgtaagtgattgctttagagctctgatgatagggccacatggggaagtttcaagaactggaaggatagaaaatgcaatgccctactgctttctaatatatgaatttctctccgccatttgtgtrtatgtaatagatatacggacacatgaawatatatatatatatatatawaagtgtatgaaagtatatattaaaaaaaccttttgttagaggtcattatattacaccataggcattattgatttacagataggctcttccatctgcagatccttatctcttgtttctgtcatgtttatgagaaaagtttgacatataaatctgattgatttaatgaaagatgaacagtatgcctagtttcatttggctgcatgctgcagttgtctcagtgattcagataaaatcactggtacactggttttctctgcacatgtccatgcttggtctaagg

SEQ ID NO: 17005 - DNA, 600 bp, Chicken  19866894224815_3
ctcttctgggaagagtgtgagtatgaaggcttcagtttaaaaattttactaacctagaggtttttctgagcaaatgtgggtagttatgttgtgcatctgtagcaatccaaatggtgtctgagaacttgtgtaagtgattgctttagagctctgatgatagggccacatggggaagtttcaagaactggaaggatagaaaatgcaatgccctactgctttctaatatatgaatttctctccgccatttgtgtrtatgtaatagatatacggacacatgaawatatatatatatatatatawaagtgtatgaaagtatatattaaaaaaaccttttgttagaggtcattatattacaccataggcattattgatttacagataggctcttccatctgcagatccttatctcttgtttctgtcatgtttatgagaaaagtttgacatataaatctgattgatttaatgaaagatgaacagtatgcctagtttcatttggctgcatgctgcagttgtctcagtgattcagataaaatcactggtacactggttttctctgcacatgtccatgcttggtctaaggtatcaagaaaaaatctttca

SEQ ID NO: 17006 - DNA, 600 bp, Chicken  19866894224817_1
ccaagaccgagctggaggcaagaagctcacagggagagagcaacactactgacttgtatggccttgtatttcctccgtgagagaggaaggcggctccctaaagggtttggttttgtgcagagagaagggcatttatcctgactgaacaaactccagatctgacttactcagcaatgaatgtccttgtgttcaagcacataatttctgacagtgtttgttactccttcttacccaatgcttttggggaaattatgtgtttcaaagccgttccttcagaagatgagggaaacccaaatcacrcagcgagaacactgctgctctggtgagagttacggtcacaggttggcactgttaacacttctcttgttccatttcaggtactacagctgccacmggctcctccatccacaatgtcacaggtacctgctgggttgtggtcccatttaaatgtctattggggtgtgggtacacatgcccgcatggggacgcaaatggagagggcattccttagcacctcttgctcccatcaccccctttcattcttgtgggccataagaacccatttctggcccatccttcaaaccttcctgcagggatcca

SEQ ID NO: 17007 - DNA, 600 bp, Chicken  19866894224817_2
tccctaaagggtttggttttgtgcagagagaagggcatttatcctgactgaacaaactccagatctgacttactcagcaatgaatgtccttgtgttcaagcacataatttctgacagtgtttgttactccttcttacccaatgcttttggggaaattatgtgtttcaaagccgttccttcagaagatgagggaaacccaaatcacrcagcgagaacactgctgctctggtgagagttacggtcacaggttggcactgttaacacttctcttgttccatttcaggtactacagctgccacmggctcctccatccacaatgtcacaggtacctgctgggttgtggtcccatttaaatgtctattggggtgtgggtacacatgcccgcatggggacgcaaatggagagggcattccttagcacctcttgctcccatcaccccctttcattcttgtgggccataagaacccatttctggcccatccttcaaaccttcctgcagggatccagcacayctagatgtcacctccatgtctctgcttgtcttacagatcaacctcaatcaacaacacgcaaccatgaagtagggaacaatacctcagg

SEQ ID NO: 17008 - DNA, 432 bp, Chicken  19866894224817_3
gaacactgctgctctggtgagagttacggtcacaggttggcactgttaacacttctcttgttccatttcaggtactacagctgccacmggctcctccatccacaatgtcacaggtacctgctgggttgtggtcccatttaaatgtctattggggtgtgggtacacatgcccgcatggggacgcaaatggagagggcattccttagcacctcttgctcccatcaccccctttcattcttgtgggccataagaacccatttctggcccatccttcaaaccttcctgcagggatccagcacayctagatgtcacctccatgtctctgcttgtcttacagatcaacctcaatcaacaacacgcaaccatgaagtagggaacaatacctcaggtaaaaaactccaacagggaaggactgtgggtgtctgtaattccc

SEQ ID NO: 17009 - DNA, 600 bp, Chicken  19866894224823_1
ccaaaccaaacaaaaacaaaaacaaaaaaagaaaaaggaatttcagtgcttttattgaactctgtcatttctacttaccctgcttgattcgtaccatggaagacaacagttcaacttagaaatattattttatttttgttttagtgctttgacttgtgctcccttgcttcactactttacaattcctccattttaatgagtgccttaaggagacagttttgaaaaatagtgactgcaaccaagaagatatttatatctactctttgccatcctcatgcctataccttgcaatagaaaaamctcagcattctctctcatgattgcaaattagggctaggagaagcttgaatgaaatatcttttctccacgtggcttgtatttagaggctagaagatctttcagccatcagagttcaacataaaacagatatcagagctaagatactatattcatttcccactcagctattgtgaggaggagttgtgcactgtttctgataacactgaaggttccatttgagaggagatgtagaaagatccattccaaatgacagctatggtacttcatatactatatctgagatactttcagaacagagct

SEQ ID NO: 17010 - DNA, 599 bp, Chicken  19866894224824_1
  misc_feature (1)..(5): n is any nucleotide
nnnnntgcaggggattggcatgcacaccagctgggtgctataacctgtgggcgggagggtggaggtagtttctgggacctgacttgagtcaggaaaggtgggccaaattaaatatcaatagcccgtcaggacataacagtgaggtgtagcaacagtcataattggcaataagcctaggcataggcaagagggatcccttcttaaaaggagagagacagatttccctaccctgcacagaggaagtagaattttcctcttctgagtgagggagacttgttttccaccctacgagaatttatyatctgcacttcctccctagcctttgtcaagtcatattcccccaaatcagaacaataatgcaaacagacagtttaactcttcccttccaccttctgaaaagacagagcacccaaagccctcccaggctcacccytccaccctgatgaatgacaggactgcagccctttgttagccataattttcctgrcaaaccattcagcccaagacctctgaggcttcctcagggctgccatgacagcttccacaggcacatcccaaaaaacagcagaacacatagcaaagttatgcctgctaagaag

SEQ ID NO: 17011 - DNA, 600 bp, Chicken  19866894224824_2
taacagtgaggtgtagcaacagtcataattggcaataagcctaggcataggcaagagggatcccttcttaaaaggagagagacagatttccctaccctgcacagaggaagtagaattttcctcttctgagtgagggagacttgttttccaccctacgagaatttatyatctgcacttcctccctagcctttgtcaagtcatattcccccaaatcagaacaataatgcaaacagacagtttaactcttcccttccaccttctgaaaagacagagcacccaaagccctcccaggctcacccytccaccctgatgaatgacaggactgcagccctttgttagccataattttcctgrcaaaccattcagcccaagacctctgaggcttcctcagggctgccatgacagcttccacaggcacatcccaaaaaacagcagaacacatagcaaagttatgcctgctaagaagtaccactgagagagggaacaaaaaaagtgtgtgtaggggggatgctgagagtctatcactcttcatccaccatgtcacatttgccatatagcaacagaaaattccaacttttttgccaattgcacaggcaaaca

SEQ ID NO: 17012 - DNA, 600 bp, Chicken  19866894224824_3
gagggatcccttcttaaaaggagagagacagatttccctaccctgcacagaggaagtagaattttcctcttctgagtgagggagacttgttttccaccctacgagaatttatyatctgcacttcctccctagcctttgtcaagtcatattcccccaaatcagaacaataatgcaaacagacagtttaactcttcccttccaccttctgaaaagacagagcacccaaagccctcccaggctcacccytccaccctgatgaatgacaggactgcagccctttgttagccataattttcctgrcaaaccattcagcccaagacctctgaggcttcctcagggctgccatgacagcttccacaggcacatcccaaaaaacagcagaacacatagcaaagttatgcctgctaagaagtaccactgagagagggaacaaaaaaagtgtgtgtaggggggatgctgagagtctatcactcttcatccaccatgtcacatttgccatatagcaacagaaaattccaacttttttgccaattgcacaggcaaacaaatcctttttgtggcaatagaacaaatacctccatcgtgacttaacagtcctga

SEQ ID NO: 17013 - DNA, 600 bp, Chicken  19866894224829_1
gagtttgcaaccaagagtgaattttaatgaaatccaactagataaacatttgtagtttgagagggatctctgtgtaagggctggagagtaagttttttgctcttggagatttttttagggcttggatggcttgtaaatctagaatcccaaagcatcactgcgtgaagctattcttatacctttgggactcagctgaacttcagtgcagtggctgtggtttaaaatgaacgtgaagtacaatataaccaggctcctgtactgatcagtgctctgaattccactgcagccagagtagtgtaraagttttctaacgaagtaatgaattaagtccataatatcataattttaaatagataaagctttccattaggacttcatttacgcatgaattttaaccrcaatcatttatttattgtttcgaggaggacaaaaagtgcatgttatcctgactacagtctataggttgcagttgaaatactttaggttacattctgatagatgctgtttgaaaataaccagataaatgccagaacagtaaaacagcggaaagtgaattaaaaactattatggtatttgtacaatattttatatactatttat

SEQ ID NO: 17014 - DNA, 600 bp, Chicken  19866894224829_2
gctcttggagatttttttagggcttggatggcttgtaaatctagaatcccaaagcatcactgcgtgaagctattcttatacctttgggactcagctgaacttcagtgcagtggctgtggtttaaaatgaacgtgaagtacaatataaccaggctcctgtactgatcagtgctctgaattccactgcagccagagtagtgtaraagttttctaacgaagtaatgaattaagtccataatatcataattttaaatagataaagctttccattaggacttcatttacgcatgaattttaaccrcaatcatttatttattgtttcgaggaggacaaaaagtgcatgttatcctgactacagtctataggttgcagttgaaatactttaggttacattctgatagatgctgtttgaaaataaccagataaatgccagaacagtaaaacagcggaaagtgaattaaaaactattatggtatttgtacaatattttatatactatttatgcccactgaaataaatgtgtaaatgtttccatggctgattcattggggcctctgtgtcttttgagacaccctacagaaagatatcactgtgcttactc

SEQ ID NO: 17015 - DNA, 600 bp, Chicken  19866894224834_1
gatcctccctgcagagcggggatttgcatttccgaggatccctagcgctgctctgtggcagcccggcgcagagccgtgcgcggagccgcccgcagacacggagcggttcggctgacggccctcgggacgggcccggcctgccttccggggctgctgcgccccacatcttccagtgaggctgcctgcgtgcccgtacgtgctggttgtgttactctgagggtctgcaggtaacgacgtttgtgcaatgagggcggcgaggcagtgccacaggttgcccggagaggcggtgtgccccatccstgcacacacccagggtcaggacggaggggctctgagcactgacggggctgtaggtgtccctgttggtgcatcgggctggacccgatgaccttcaaagctcccttccaactccggcttcttatgatcctatgctggccatgtgcttccctctgctgtctgctgtggaacgtaaggcgttatcgggtctacggtaagacctgggataaaccttcaacttccagtaagcagcacctctctgacagttatttaaagcctgtccgcattgttccagagctatttcctttttcctctaaggcaacc

SEQ ID NO: 17016 - DNA, 599 bp, Chicken  19866894224836_1
  misc_feature (1)..(142): n is any nucleotide
nnnnnnnnnnnnnnnnnnnnnnnnnnnnnnnnnnnnnnnnnnnnnnnnnnnnnnnnnnnnnnnnnnnnnnnnnnnnnnnnnnnnnnnnnnnnnnnnnnnnnnnnnnnnnnnnnnnnnnnnnnnnnnnnnnnnnnnnnnnnnncccaagacaacagtcaaaacacaaagaaaaacaatgttcctttagatctaagctcacgtgaagtttggtttcaaaattatctaccttggagagaagagagaaaggaaggaaaatccacagttttctactaagaatggcaggtcctctgatactacatyagatgagcgagtcgtgttattgacagcagtgacacaagaccagcctgagcatatttcacttcttgccaaatgaaaaaagggccttttacagaactgccattatcacatccacctctctataccacaagggatttgagcacattggcagtgtctcaagcaatgatgagaagcctcacaactggatattgtctcctcttgactgatcacagtaggtaagaagaagcagggtcatttcaaaatcaattggttataaaatgtagcttgtcgactatctttatttgcattacaagggtgtctag

SEQ ID NO: 17017 - DNA, 600 bp, Chicken  19866894224836_2
agtgacacaagaccagcctgagcatatttcacttcttgccaaatgaaaaaagggccttttacagaactgccattatcacatccacctctctataccacaagggatttgagcacattggcagtgtctcaagcaatgatgagaagcctcacaactggatattgtctcctcttgactgatcacagtaggtaagaagaagcagggtcatttcaaaatcaattggttataaaatgtagcttgtcgactatctttatttgcattacaagggtgtctaggagcctcagacacagatttttcaccctrtttagtgtgtacaaacgcaccctagatatattcccctgaaacagacaaatgtgctaaaaaaaagttgcatcacttgaaggatgacttacaactagatttttaatgactgcaggtttcagtggtgacaagaaataaacaactactttgcagtcacaagaacacttatgcaacaaaatcctcacgatacacagaagaaacttcacaattactaaacaggtttagcatggacatgaatgcaaacttagatgtgcacactggtctaaaacaaatgtctgtgtagttgtattgcctacatattag

SEQ ID NO: 17018 - DNA, 600 bp, Chicken  19866894224840_1
ccaaaagctttttatgtatataactttagcttgcctttgcttctctgtggaaaacatctttcaaagtggtgactgcaatgcacaggcagtaaggggaacaacagcctcgaagccttaaggtgccagcttcaagtcagaatattcctagtgtaaaacggattgtttccatgatggggaagtctctcatcatcctaaaggacggactagagagagtggaaagagacaagcagggaacagacacagacagcctacagaacagagaggaagcactgctttcctggggagagccaacggacccgrcctgggcctcctccactgcaccccaacttctgccttcctggcagcctcagcagaacagccccagggtttgtgaagtgcccattccttctcccatggccagaccaaaaccctggagcctttacacctcttgcatcagctacaaatgtgctttgtcagcttcagacagaattggtggcgagggaaagttcaagtttattttgaatggtatcactgataggaygtgccactgcattctgaaattgggagatgggaagaagagggtttttaaccttaggaacaacataaggaccaggtcaggca

SEQ ID NO: 17019 - DNA, 600 bp, Chicken  19866894224840_2
agacaagcagggaacagacacagacagcctacagaacagagaggaagcactgctttcctggggagagccaacggacccgrcctgggcctcctccactgcaccccaacttctgccttcctggcagcctcagcagaacagccccagggtttgtgaagtgcccattccttctcccatggccagaccaaaaccctggagcctttacacctcttgcatcagctacaaatgtgctttgtcagcttcagacagaattggtggcgagggaaagttcaagtttattttgaatggtatcactgataggaygtgccactgcattctgaaattgggagatgggaagaagagggtttttaaccttaggaacaacataaggaccaggtcaggcaaatgttttagcagatgcttcaagtgcacagcactaaagatatgttgaaacaatgattaaataaaaccttcaaaacttccatcttctcaaacagaattataaatacaatcgatgaataaagccactggaaaaaaatagaatgggccttttgtttgtcacacctgaaggttggctcccacactcagatttttgttcctaagaaaaatactttctaaagcacc

SEQ ID NO: 17020 - DNA, 600 bp, Chicken  19866894224844_1
gcaaacaaccctccatgctggattaccatgctgaaaatcagttcaggttgtaatggtaaacactttaaaaataaaatgccactatgccagggagagaatttacattatgtacactattccataaaagctattctaatttatggttcattacaactaatgggaaatgagaaagatatcttcactcaaacaataaccagctaactcagcatttctgttcccgttttggtcagaacttgattggttatctcaagagagctgagccattgagctgttgcttcaaaaagatgacccaaaccttgmttctaattcctaatgcagggcatctagagtagtcagggtattcgaatttcacctgtaaatgcatatctaaaaaccttcctacagaacaagttttgaattttgacactggtgatgtcaagaacccagcttatgtcagagaaggacccacatattccatttacattgccaagaagcttagtttatgactttggatagctgaataatttcggagttatcctgtttagagacgttgctggctactcaaaaccagaagcaccatacatcactaaataccaagraaagttccacatatggttagta

SEQ ID NO: 17021 - DNA, 600 bp, Chicken  19866894224844_2
aaaaagatgacccaaaccttgmttctaattcctaatgcagggcatctagagtagtcagggtattcgaatttcacctgtaaatgcatatctaaaaaccttcctacagaacaagttttgaattttgacactggtgatgtcaagaacccagcttatgtcagagaaggacccacatattccatttacattgccaagaagcttagtttatgactttggatagctgaataatttcggagttatcctgtttagagacgttgctggctactcaaaaccagaagcaccatacatcactaaataccaagraaagttccacatatggttagtacaggaaaactcttcatttctactctttggtttgaaaagaaaaatataatctattctgaacaaggaatgttacagaattatgaagaacttcctgaaaaaaaaacaggtcacttagaagcaccgtgaagcacttttacatgaggtttctcactcaaattatatttataaaatttaatttttgagacttaaactttaatttacaagattaaaacaaacaaaagggctgcagaagggaaaaaaaaaaacaaccaacacaccacctgaaaaacagccaaggta

SEQ ID NO: 17022 - DNA, 599 bp, Chicken  19866894224846_1
  misc_feature (1)..(68): n is any nucleotide
nnnnnnnnnnnnnnnnnnnnnnnnnnnnnnnnnnnnnnnnnnnnnnnnnnnnnnnnnnnnnnnnnnnntcttacataaaattctactataaaagagactgccatctgcaaatggccaagcttgcttgacttccccaaccaccacagcagcagtgcactgccccagagcctggccccatcacggggagggctttctaagaaaacttatgaaggagtggaagacactcaagacatgaaactcagaatattgacagaatcgccaatttcaatttcatggctgtgttctaaccttgagttggaygaggtgtggggagatggagagctggccgttgggcagcaggagctggtgggcacggagcagaattgaagcccccaggtccatatgccgggtgacacccagagccacatcctgctgtgctgatgggcaccaacacaacaatgaacacagatatatcgtgggaataaaagtgatgggtctgatcataragactgctgttaatggctccgagggatggtaccacctgccaagggagcatggaaggggaaccgcatggtttttaaaagtaagcatgcttggcctttgtttcttgtttttgttag

SEQ ID NO: 17023 - DNA, 600 bp, Chicken  19866894224846_2
agggctttctaagaaaacttatgaaggagtggaagacactcaagacatgaaactcagaatattgacagaatcgccaatttcaatttcatggctgtgttctaaccttgagttggaygaggtgtggggagatggagagctggccgttgggcagcaggagctggtgggcacggagcagaattgaagcccccaggtccatatgccgggtgacacccagagccacatcctgctgtgctgatgggcaccaacacaacaatgaacacagatatatcgtgggaataaaagtgatgggtctgatcataragactgctgttaatggctccgagggatggtaccacctgccaagggagcatggaaggggaaccgcatggtttttaaaagtaagcatgcttggcctttgtttcttgtttttgttagtagaagacagagaacttacctacataattgcacataaattacatatttgcagaccactgtaaaaaataatgacctagctttcaactgttacacatactcagctccaattaactgcagtgaaagctctgtgtttatacccagggaagagtgagacttaattatttccagtatttttaatacaaattc

SEQ ID NO: 17024 - DNA, 599 bp, Chicken  19866894224856_1
  misc_feature (1)..(60): n is any nucleotide
nnnnnnnnnnnnnnnnnnnnnnnnnnnnnnnnnnnnnnnnnnnnnnnnnnnnnnnnnnnnacaactgaggactcatttaacatgcagaagggaaaatttaggttaaacattaggaaagactgtgtaacgcctgaacaaataagagttcctatacaaaagttcagactggaaaactgttcaggaggtcttatttcttggggtgattcagaaataactaaactccaggctttgtaagagaaagcgtcaggtgacccctagaagtcagctcaaatccacgcaattctggctacgataccctarggcttttcctaaaatgcaaccgaaattggagacagatttacacctttgtattgtatgcacttagactgtattttaaccaccctctatgtgctttagacacttagcattatgtatgcaaaccatttattttcataaatgttttgcttcaaatactgttgcagtaaacactttcatgtaaccttataataagaagggaaaatggtgacttataggcatgaatgaatgaaaaacaaactgaaaagccaaattaccaaagaataaatttaattttgtaaataacaacttctgcaagcctatag

SEQ ID NO: 17025 - DNA, 600 bp, Chicken  19866894224856_2
cttagactgtattttaaccaccctctatgtgctttagacacttagcattatgtatgcaaaccatttattttcataaatgttttgcttcaaatactgttgcagtaaacactttcatgtaaccttataataagaagggaaaatggtgacttataggcatgaatgaatgaaaaacaaactgaaaagccaaattaccaaagaataaatttaattttgtaaataacaacttctgcaagcctatagaaaaattgaataaaaatggctatagaattgaattgtgcaagacagtgactacttagtccycagtcttgtaatatgcatttgcagtgcgacaatcacatgtagtgtgcttccaagtcccctctctggtgcctgatttgggatgttgcatattttcatacattcaaaaaaacttctaataagttactcttttattattttcttcagagatcttaaggaatttccttctcctttgcatgagctgttgtggacaacaggaatacattttctcttatgaaatgctgcctgctattcctaaatatgtattagtcggtaacaatttagcaatcacatttttttgccaaggtaaaatcttgtaggtgc

SEQ ID NO: 17026 - DNA, 600 bp, Chicken  19866894224858_1
ccatccccagactcctctcaggtaacacaggcaacagctgcaggatgggtattatggacccatccacttcagatgcaatctgcttcattgccagaaatgtcctcagctcttggatgaatgcagcacttggtcgcttttgcaagtcaggcaatgctggaactcagtcgctgctcatggggatgtggggacacagtgctcccagtgccataatgcagcataattggccaacagtctccatcactccgctgggagtgagaaccatcatcatcacggtaataaaaagggagggaggaaacaacrggaaagaaaacaagagacttctagcagaggtaggcacagcacttccaatggatgccggcactcaggcatgcagctctgatgagtgcatggctgagtgcagcgctgacgagggagcgatggatggagatggcagcaataaagcagtgatgcatgccaaggagagccccacctgcacggctcctctgacaccttctggtacagagataaggaggtgtgttagcgctcacccgggttggttttttttcccctaatatttagagaaagcaaagcctggagatggtttgagctttggtagagcaa

SEQ ID NO: 17027 - DNA, 600 bp, Chicken  19866894224860_1
tgcaacttttaaactttaggctgtttctgaaagcactgcgtaatgctcgtgatagcttaagaaaaaattcagtcatgcatctatttccacaagtcctccaatttttcattcacccccttgtaacaatgtaactgatgccattttgttcttattggcacacttctcccacagacatacggagtcatttctctaccatatatcttcccccaatctcttgtctccccggtcagttcttacacttcttcccctcaacaaacttaggcagggtcaggctggctttggccagaatgaactcacatyctctatgccttagctttgacctctgtgaacagttccagagctgctcctgccttctcctcctcctccctcttcacacatctaatatgatgcctcgactatgctgtgggtaacacccaggccccatcatagcccataaaaaacttgcagagctactgacctttgtaagtgcagaggagaggcaaacatgggccaaggattcctgacccaaaaatccaggcccagcctcccatcttatatcatctgacctacagaaatacctctttgctcaatcttgtatttcaaaatgagtcctgaattgtc

SEQ ID NO: 17028 - DNA, 600 bp, Chicken  19866894224863_1
gctcatttgtgtgtacatgtagggagggggaaaaaaaagtgtttttaacacatcttgttctgccttctctttctccttgctcctttgaattccaaaattcaaatgctataattggagtgaaaaaaaaacatagtttctatcatatgataaactgacatcatggcatgcttctactctgactcagaactaaaaaaaaaccctatgttttctcatgtaatggcaatccaaaaactcccattttgaacccacctatattgatacatttaaacatttattttgagagcgttgaagcaatgtaakaaattaaatcttcttaaagtatatcaacatttgatgttaaggatccaagcaaacactaaaacaaggattttatcttagcagagcgaaacaaaatgctcttctgttgaaaagtatctgtgcaattgacacttctcaataagatattctgattttgatgaaactgctttttctgacaaaaaaattgttccatcagaaactctgattagctttcctgtaatataaacctgtctggtttatacatgcccagaagcaaatgccaggcagtaaaattttcatttatggaaggcaccttaccaatat

SEQ ID NO: 17029 - DNA, 600 bp, Chicken  19866894224863_2
ttgcatttcctctgcaatggtgagttgtttgcaagagaaacagaggacaagctgtcacatcaaagagaaaagactaaaacccaccaggaggtgaagcaggggtttattgtctttagccctgggttttgacagttaattagctctcatccaatttatgtttgtgtgacagctacactggggtcaacagaaacaaccccaaggtgaggcaaaagcaaaggatacaaggcaggaaaacctgctacagagccccaggaaagcaaagggcttcctctttctccctcttcacaactgatggactcrtacactaatgaagcttttgacctgcttgttttcccctctccacacagaggtttcttttggcagctttgggcactgagggactgccaaagtgtctgctaagttaagcagtcaatatagcaacatctgaggaaaaatgctgtccattcagcttgctttttgacgactgccaggaaagaggaataagtcatccacaggaaggtggcaaatggagggctctatcactccatagggttggactccactgtctgcccactgggacctacacgtcccttcaaccacttcttctgacatccagatatc

SEQ ID NO: 17030 - DNA, 600 bp, Chicken  19866894224864_1
agctatatttcttccagctgctgagtcttcagctcagctaccactgccattcttagcacagactgaaggtcacatacatacttatcatgcctgtgctcattgtgacacacacctagcaccttgattggggtagtagggtgctgtgtgccccacactgaagtacttctgtgcaaggccgtcagaattttgcaatggtcaatgtaggaaaatgtatatgctgcttttagctcgaagtcagcatagtttagcttaccaccaaattcacaggcaaagccactttttcatatttggcaaaatttwcttatgtggtcagtcaaatgtgtaagtcaataaaaacagtctagggaaggatctaattatccaagttagtggttggatccattcttctccctttctgtggggaacagcttccactgagtttgagttcccacactgtgaataggagggaagaggcctgaaagttttgcactttcacagtatactcactactgacattcttcagagcttctgaattacagctttcatccgcaggcttttttgaggacagtctttattttcttctattcatttctggatggatcttctgaaattgtgcaaaat

SEQ ID NO: 17031 - DNA, 600 bp, Chicken  19866894224869_1
aggcatggcaaggcctggatgcagcccagcaggctcaggactgaatcagccgagcagaatctgctgcgagaagcaatctagcatgaggaaatgcttccaaacaggagcgtatttctgcttacagatggaaaccacccgcttctgaacttctgtgtcggtagcagtggaggcttgcgttttgcggccgggagacagacatgtgtgctagattaagtcccttgtttttgccaggtcctgctggtaagtagggcgaggctctctctgtggtaactgcttcccagccccaggtctgccaggctycaagaagccggaygcatcgtcctgaagtagaccagggccctgctcccctggaggcacagttacgtgggagctggtgcagctggaaactgatggctagacagaggagtagatagcacataatcatagaatggcttggatgggaccttaaagatcatataattacatccccctgccatgggcagggctgcccccctcctgctcaggctgcccaggaccccatccaacctagccttgagtgcctccagggatggggcaccacagcttctctgggcagctgtgtcagcacctcaccgccctctg

SEQ ID NO: 17032 - DNA, 600 bp, Chicken  19866894224869_2
cctggatgcagcccagcaggctcaggactgaatcagccgagcagaatctgctgcgagaagcaatctagcatgaggaaatgcttccaaacaggagcgtatttctgcttacagatggaaaccacccgcttctgaacttctgtgtcggtagcagtggaggcttgcgttttgcggccgggagacagacatgtgtgctagattaagtcccttgtttttgccaggtcctgctggtaagtagggcgaggctctctctgtggtaactgcttcccagccccaggtctgccaggctycaagaagccggaygcatcgtcctgaagtagaccagggccctgctcccctggaggcacagttacgtgggagctggtgcagctggaaactgatggctagacagaggagtagatagcacataatcatagaatggcttggatgggaccttaaagatcatataattacatccccctgccatgggcagggctgcccccctcctgctcaggctgcccaggaccccatccaacctagccttgagtgcctccagggatggggcaccacagcttctctgggcagctgtgtcagcacctcaccgccctctgagtaaagaattcc

SEQ ID NO: 17033 - DNA, 600 bp, Chicken  19866894224871_1
caatcccatggcttacctctaagcttcactaacagatacagaccattcacatggcaaggcattattcatctcacctacctcctgcacacacacacacacacacacacacacacacactggtatcttcccagacatcccaaaaaagcagcggcagtcagaacatccagtgccagacatgggaataattaaagtttaactcaagtgcttttaagtttgtaaatgctggggaaagcgagcacagatcaaaggggtttcttcagcttaggcattcatgcatccgaagtagtatctaagaaagargtaaccctgaggaattaagagcttatggagaagactgcgtgaagtcccaggcccagcagtgccctctgctacccactctgtgagyacacacggtctgctgctgccagcccctgcagcccaacaggcagcccttgggctaaacaagtggggaggacttctctcatcaaggcaggatctcagctctgctcaccraaaagcaaagcgcagcttctcgcgtggcagggattcgtcgcaccaaccagggttattagcatcacaggtaattctgtgatatttggctggcaacaaaagcaggcccaa

SEQ ID NO: 17034 - DNA, 600 bp, Chicken  19866894224871_2
acacacacacacacacacacacacacacacactggtatcttcccagacatcccaaaaaagcagcggcagtcagaacatccagtgccagacatgggaataattaaagtttaactcaagtgcttttaagtttgtaaatgctggggaaagcgagcacagatcaaaggggtttcttcagcttaggcattcatgcatccgaagtagtatctaagaaagargtaaccctgaggaattaagagcttatggagaagactgcgtgaagtcccaggcccagcagtgccctctgctacccactctgtgagyacacacggtctgctgctgccagcccctgcagcccaacaggcagcccttgggctaaacaagtggggaggacttctctcatcaaggcaggatctcagctctgctcaccraaaagcaaagcgcagcttctcgcgtggcagggattcgtcgcaccaaccagggttattagcatcacaggtaattctgtgatatttggctggcaacaaaagcaggcccaagaatttgaaggtaagttcccaatcttttcttttttcaagatagagatacaaggaaaaatgaaatccagaaagcattgtcagcttg

SEQ ID NO: 17035 - DNA, 600 bp, Chicken  19866894224871_3
ttaactcaagtgcttttaagtttgtaaatgctggggaaagcgagcacagatcaaaggggtttcttcagcttaggcattcatgcatccgaagtagtatctaagaaagargtaaccctgaggaattaagagcttatggagaagactgcgtgaagtcccaggcccagcagtgccctctgctacccactctgtgagyacacacggtctgctgctgccagcccctgcagcccaacaggcagcccttgggctaaacaagtggggaggacttctctcatcaaggcaggatctcagctctgctcaccraaaagcaaagcgcagcttctcgcgtggcagggattcgtcgcaccaaccagggttattagcatcacaggtaattctgtgatatttggctggcaacaaaagcaggcccaagaatttgaaggtaagttcccaatcttttcttttttcaagatagagatacaaggaaaaatgaaatccagaaagcattgtcagcttgaatgattttccaggttcttgacactgaacaaccatcatccctcagagcacaaggcaggcaataaaaccaataaaactaataaaggaaaacggtgtggagcttgacag

SEQ ID NO: 17036 - DNA, 600 bp, Chicken  19866894224876_1
aaagaagtaataaaatacattaatgcttttcttatatgaagagctgaagtaccaaaaggtatttcctcaagaggctaatatttcaaacagagatctttcttaaatgctgaaggattaagggttttaaaatattataaaattctatatagtttgtgtagctgaaatcttcttagtgattttacccttccttaaactgactatctactgatacatacatttttcctttgcatatgtgaagactagtgccccgtgttgctactaggttattctaacacctactttagttcagttagaaataaygtgtggtctgaaagtgtttatgtgaatagactccagggtgaaatttggttttagtgactaaggtagctgtgatagtctgctttgaattgaaaagagggtagaaaatcaatggatctggggacaatcttaccatcagagtctagaatttcatagaagtaaccatatttgaaaactaaaagtttatgcataaaactgatataaatatatgatataaagatatgcataaaacagtccctctggccaattcgtattgacagagccgacaaatcagagtctttttaactcatgattctgattctc

SEQ ID NO: 17037 - DNA, 600 bp, Chicken  19866894224879_1
tccaaaaaaaaaaaagcataaatagtggagggagtctcatttcctttttttccaatgtgagttttatagtacagctaactatatggggattatcggctacaaacctcagacgttatctaacttgctgaaaagcaagatggtaattattaatccacatcagaatgaggttctggcttgtgtaggtttggataattaccttggcttcaatttctatttttcaagcaggaaacctattgtggagtttaaatgctaaaggaaggtgtaactacaaagatgtagataaaaaattatcgagagacraattaattctttatgccagcatggcttggaatagctgtctgttctctttgaacatcattaagaaactgttatggttggcttccttttctctgccataagcagctgatgtgaaaaagaaagagggggccttagccttacctcttccatgttttcacagacaaaaataacttcactctgtccttcctgagttttattttttcggagtgtgtggataactttgaggtttaacatttcttattagaggaagttaacatccaggttaaagtaggtgtcacaaaggccacaaattaatgcaaagcc

SEQ ID NO: 17038 - DNA, 600 bp, Chicken  19866894224891_1
cctcgttctgactaaagaaatcaaggctgcttgcaactgagtgactaaattatacagcaagagtcaccaaactgagttgactactgtcccttttttgtgactatgccttactcctggtagatcagaagtctgcaaatatcttataaagaaagatgctccccactgattattatggttacatacccaagaaaatgtaccagtacctttccactgtactttggaaatgtggaaagtgaaaatattacagaggcagtacctacctcatccaaacggttcttatattcttctatatgacactcraacaattgctccagaactctgcaaataaaaataattaagatcaggtaacacaaacaaatcatgttttaacaaacccagttcttgatttttatttcttagctgaagaggaccattaagattgttttaattaagctctgtcacaaagagggctacttggggcctttattctacaggtaagtaaagaatctgggagtaatgctcacatccatgcattgaatcattacttattggttaattatttaaaaaaaaaaatatggcttagtaactagtgaacccttatctgaaacagtgtgtaatcct

SEQ ID NO: 17039 - DNA, 600 bp, Chicken  19866894224894_1
tcatcgcacaccgatgtgacacaggtcccactgaggacagtgctgcacccacaccatcctcatcctcagcccgaggtgggagcccacagcccccgcccacctgctgcctccacatcgtgctgtggggtgccagctgtgttcccccgggcagtgggcacagccacatccttcctcagctggcaggagagcggctggaagctggggtcgagctccaggatcatccggttgaggttctctatggagatgtccaagatgggcgacccgaggtgggtgttgggctctgtgcccacgtcctcccaytgcagggatggctcctgtggtgtggggtgacctccctgcagcccccgggtgggcagcggggctgcagcacagcgcacagcaccgggctcagcccaggcgtccgttgagtagtaggagcacggggtgggcaggcgctgrgtgccctcctgggatgggacgcacacactctgccccacacgcagcacgtggctgtggatgacctgcgacatggctgagcaccgaccctcctcctcctcctcctgctgctcccacgtcggccccacggagccggggctcctcctcagcccacagctccagcag

SEQ ID NO: 17040 - DNA, 600 bp, Chicken  19866894224894_2
ttcccccgggcagtgggcacagccacatccttcctcagctggcaggagagcggctggaagctggggtcgagctccaggatcatccggttgaggttctctatggagatgtccaagatgggcgacccgaggtgggtgttgggctctgtgcccacgtcctcccaytgcagggatggctcctgtggtgtggggtgacctccctgcagcccccgggtgggcagcggggctgcagcacagcgcacagcaccgggctcagcccaggcgtccgttgagtagtaggagcacggggtgggcaggcgctgrgtgccctcctgggatgggacgcacacactctgccccacacgcagcacgtggctgtggatgacctgcgacatggctgagcaccgaccctcctcctcctcctcctgctgctcccacgtcggccccacggagccggggctcctcctcagcccacagctccagcagaagaggaatctgaggaatgcaggagagcagtgttacacgaggcgtgctgcggrcagggccggctgcagcagaaacagcgagcgggagcatagggcggtgcaggaaagggcctgtcctgctctgcgccactgtcactgc

SEQ ID NO: 17041 - DNA, 600 bp, Chicken  19866894224894_3
cagcggggctgcagcacagcgcacagcaccgggctcagcccaggcgtccgttgagtagtaggagcacggggtgggcaggcgctgrgtgccctcctgggatgggacgcacacactctgccccacacgcagcacgtggctgtggatgacctgcgacatggctgagcaccgaccctcctcctcctcctcctgctgctcccacgtcggccccacggagccggggctcctcctcagcccacagctccagcagaagaggaatctgaggaatgcaggagagcagtgttacacgaggcgtgctgcggrcagggccggctgcagcagaaacagcgagcgggagcatagggcggtgcaggaaagggcctgtcctgctctgcgccactgtcactgcgtggctgggtgagggcagggacagccaccgcttcccaggatttggcagcctgaaaagacacatcagcgctcattttcttgtaaggagtgaaatgcagtagcagcccctgtggggaggggtggaagggggatcacatgctcccagcagctgcaccaggcacgaacagcaacagtggctgctgccagatgcaacggggaacctcaatggtgcacctc

SEQ ID NO: 17042 - DNA, 600 bp, Chicken  19866894224900_1
aacttcctcgtaatataagcctagagatactggttttgttcacaaaaggctgtctgtcatctcaattaaatataaaatggcaggtcacttcagtaaggcagcacttttaatagctgttttttccaatataactgcatgtgtgagttgcttaaatagctacagtaatggtagctatctgagttaatatatcagaacccagttctttctggacttagagctacatacataatctattgaaaaggagcatacaccagatccaacttggaacattaacttttcttttgctgctgacagtttcaygttgactgtgaactacacagcagttaaaagttttgttacctagagaaatcaggctgtctgccctcatcttctgttgaacataaagcctgcattcagcattacttccacaaacagcaacccagagccatcactcaaatacaaacgattaagaccagaagtgaagaatttcgactacctgccacgttttaccagtaagtcttattctaccctctgggtctgattcatcttttagctatactcatgtaaataatgagaagctttaccaagttaaagrtgttacaaccagagaaaaattgttat

SEQ ID NO: 17043 - DNA, 486 bp, Chicken  19866894224900_2
ttttcttttgctgctgacagtttcaygttgactgtgaactacacagcagttaaaagttttgttacctagagaaatcaggctgtctgccctcatcttctgttgaacataaagcctgcattcagcattacttccacaaacagcaacccagagccatcactcaaatacaaacgattaagaccagaagtgaagaatttcgactacctgccacgttttaccagtaagtcttattctaccctctgggtctgattcatcttttagctatactcatgtaaataatgagaagctttaccaagttaaagrtgttacaaccagagaaaaattgttataagtaagaataaaatcagctccctggttgtgaatttggggatttctgaaggtaacgatacagaggaagactgcttcataccaagcttgtttaaactcatttaattgctatcagactacaaaaatgagtaccaaaacatgtcagactatactgtcacttca

SEQ ID NO: 17044 - DNA, 600 bp, Chicken  19866894224901_1
aataagactaaaacaagtgaaggatacttccctaggattctctgcaggcctccaaccatctatgactcaggaacctcctgagtggtatgtctatgtataagtgctattaaactgactcttcttatcttatgatgctttgcactcctgactgtggcactactgagcattaagctgactttctcatagaactgctataacttcaatgtgtttattccgctaattaagagctcattactgcttatgtaaagcaatattttctcccctatacataaatttgtggctagaacctaagttacaacygtgtaattcaaagtagtcctataggtataactgcagtgcagttgggtagcgcagctgtgtcgatgagcaatgtgcagctctgtgcggtctagctactccccagctaaaaatttgcataaacaggataatgggatcagtttggaacaacagatcaacttgaaaaaaaggtgactgactgaagttaagctgcctttgcaattaagtatttacactaattggtgtttgagtgcaccaggtgggaattttggactatcttcaagagtcccataggcagctcccccatagcacagatcaattcat

SEQ ID NO: 17045 - DNA, 600 bp, Chicken  19866894224904_1
agtttatcttcattcgtggaatagtcatacagcgagattgcagtgtaattaccttctcacaaaccctaactggaaatcttcacatccagtcattagctttaagacaggcagacaggcaattatatctgaataaatgactgagaaatgaatctgggagactctcacccttggtccaagcccagttcacagctgtggatgcagagctagctgcctgtcaactctacctgcactcattaggatgcccttggcttgctggatgtcctgaggtcccacatgtgaccccagaccagcctctctgtsgtcctggcatgggcaagctacctgctcacatcctccatggactgtgatggacctgggtgaccctggcatggcccagcccaaggctcccgcacctcctcagcatttcactcttggctgaactccttcttcacctcttcccttcctctgttttcccagtaggtttataagcctctgtgctgaatgtgtgaagtctcctaaacaggtgagcaataaaacatacgagacctcgtggcggggaggcagcagcactgcagtctggttggagcacgcaggcagcatgccaggacactcgaggtcagt

SEQ ID NO: 17046 - DNA, 600 bp, Chicken  19866894224909_1
tggccccatcactcccatgtttcccacagaagcactgcaggatgcagcagctccacagctggtggacttcgcctgctgcccagccactgcctgccagcacacaaggtccccaccagctggagttgtggctgagggagacctgtatggctctggggaagcgagccaaggaagtggcacagcccagaactctgccgaagacagcactggctctatgcactcaccataaggatctccagcagcttgcccttcaaggagaggttaaagcaggcagagtcacccacagcttggaaggcagagctsaagtcrgtgatgctctgcaccagcgcaagcttgttctgcaagtcctgaggcccaagagagaagaacattctttgaactgcgggaagggctgagggctgcaaggggaacacgtgggggcaacgctaagggaagggcttggatcttcatctgggcacaaaccattccccaagggacctttggaaagagaaggcccatctcagcatccccccacatggaggggctgcagctggatgttctgacaccctggcaaaccccaagctctcacccagcagctgcagctgtagagcagcaggatgttgc

SEQ ID NO: 17047 - DNA, 600 bp, Chicken  19866894224909_2
catcactcccatgtttcccacagaagcactgcaggatgcagcagctccacagctggtggacttcgcctgctgcccagccactgcctgccagcacacaaggtccccaccagctggagttgtggctgagggagacctgtatggctctggggaagcgagccaaggaagtggcacagcccagaactctgccgaagacagcactggctctatgcactcaccataaggatctccagcagcttgcccttcaaggagaggttaaagcaggcagagtcacccacagcttggaaggcagagctsaagtcrgtgatgctctgcaccagcgcaagcttgttctgcaagtcctgaggcccaagagagaagaacattctttgaactgcgggaagggctgagggctgcaaggggaacacgtgggggcaacgctaagggaagggcttggatcttcatctgggcacaaaccattccccaagggacctttggaaagagaaggcccatctcagcatccccccacatggaggggctgcagctggatgttctgacaccctggcaaaccccaagctctcacccagcagctgcagctgtagagcagcaggatgttgcccacaa

SEQ ID NO: 17048 - DNA, 600 bp, Chicken  19866894224909_3
tttggaaagagaaggcccatctcagcatccccccacatggaggggctgcagctggatgttctgacaccctggcaaaccccaagctctcacccagcagctgcagctgtagagcagcaggatgttgcccacaatgtctccctctaggtgggcgagcagctgttccttggaggctcgcagtgccaagctgccatgggcgaggatgagagcgctgcgtgtggcctgagctcttctgctgtccagctccatctgtgtggggggaaatgccttgagatacttgctcaatggtccccggtgccccaygatgcacctgggctcccaaggcaggagctgcygtgaaaataagggggaagaaagccaagatggaaacccgtaacgcttcaccttcttgtgtctggagatcttcgcattctggcctttgcacagcctggatgcaaacatggtgagtgtgtccaggactgtgtggaagttgctctcagcagcatggctgagaagagagatcattccctgcacaaaagaacaaggggcagttggtgcaggcctgaatctactggcacggccagccacaggggccagtctgctccttgcctgaggtaaatggca

SEQ ID NO: 17049 - DNA, 600 bp, Chicken  19866894224909_4
ccacatggaggggctgcagctggatgttctgacaccctggcaaaccccaagctctcacccagcagctgcagctgtagagcagcaggatgttgcccacaatgtctccctctaggtgggcgagcagctgttccttggaggctcgcagtgccaagctgccatgggcgaggatgagagcgctgcgtgtggcctgagctcttctgctgtccagctccatctgtgtggggggaaatgccttgagatacttgctcaatggtccccggtgccccaygatgcacctgggctcccaaggcaggagctgcygtgaaaataagggggaagaaagccaagatggaaacccgtaacgcttcaccttcttgtgtctggagatcttcgcattctggcctttgcacagcctggatgcaaacatggtgagtgtgtccaggactgtgtggaagttgctctcagcagcatggctgagaagagagatcattccctgcacaaaagaacaaggggcagttggtgcaggcctgaatctactggcacggccagccacaggggccagtctgctccttgcctgaggtaaatggcagcagtgaggagatcgaaaggcctgtagcatgg

SEQ ID NO: 17050 - DNA, 599 bp, Chicken  19866894224915_1
  misc_feature (1)..(13): n is any nucleotide
nnnnnnnnnnnnncatcaacctgacagtaaagaagttcttcccccatccaattaccatgcattgtctccttaatagtaatcaggaaagcagaccagcagccctacacactgtgcaagggtctccaaggggagaggagtggaagtacataataaaataagtaaagtaaaggcatatcttgagaagggtatgtacacgagtgcataggaagcaagtgagggaaagctttggggagccttatcactcagtggacagtcacagcactgaagtatgaaataagaaatgaaacaaatccaaatctstgtcaggagatgatttcctagggctctcgttgtgactgaacttatcaagctaagccttcatttccagtcctatccaataatcactgaagccaaacatagccttttctctgctccagaagactttggagcgagccccttctgagaactacagaggaaacaaatgttggagaggagaagaaatacataatgttaattgtgaaaagcattttcagcatccctcaaagtggccatgtttacctgcaagctgacgcagagtatataggtaagagttaaaattcaaaagatatgccattcattct

SEQ ID NO: 17051 - DNA, 600 bp, Chicken  19866894224926_1
aagtaaaatatgaaaatgtctgataggtctttggctctttcctttccatgccttgctgatggatattaggttgaaataacaaagcagttgatatccttggtgctccgaacaccaagagttattccgatgcagatatgtccctgagggttcctacaggcttcctgacacatcaccacacttgttctgctaatgcaataagcctaatttgttccaaactgggctccttctcttattcctaccagatttaattacttcatcttttgttgtcgttactgtactcagaaaccttcagctttgcarcaccgtggacactttcctgaacatatccatttatttattcggccattctacgtgtaaatattatttctttcgcctcctttgtatggcttgagtcccatgctactctataataagaacagttaaaacaggaaaaggaagatctaatgaataaattagtaagtaaataaataaagtatctgttacagcatccaacaaaatgatcagaggaaaagcagcttatctggttttaaataatgaagactttcagatgcctagcccaatgactacctttcactggctgtttgatagaggcacaaatcc

SEQ ID NO: 17052 - DNA, 600 bp, Chicken  19866894224927_1
atctaagctatacaagtgattcattaaactattatagatgttctgcaccactccagcatcttctttttagacttcagtgattcaaatttattcacaaacttaaaccagagatctcattttgagagtgtatgtgcctgtagcagcacgtgtagtacagaaagaatgtaatatttgtaagagttacagacatgtaagccacatttgcagatattagatttgttcagctacattaacggctgttttgaactttcagaatcagtggttttgtatgcaataaaagaattctatttccagttaatrgagaaaggaatcttgtagatagatcatttatcttaaatattcaataactttttaattaaataataaaatacaaagattagcatttcaggatttttttgtgtgttaagtaggtacctattctacagactgtttttctttaatattaacatcagctttccccaggcaataactgcacttcttagaactgcagcgtacagtagcgaactccaattagttgccagctgagtggctgcataattattattgtaagtcattgcctactgtggatctggatctccatcatatcatcattcagtagtc

SEQ ID NO: 17053 - DNA, 600 bp, Chicken  19866894224927_2
ctacagactgtttttctttaatattaacatcagctttccccaggcaataactgcacttcttagaactgcagcgtacagtagcgaactccaattagttgccagctgagtggctgcataattattattgtaagtcattgcctactgtggatctggatctccatcatatcatcattcagtagtcatttttctagactgtggagtactattcagtcacattcagcacagaggccctactgtagttttgattgtctttgttgccgttccatttacctcttttagttttatgggtttgttcatttkgggggcttttttttgttgacaagggaacatgcagaactgcatatgcgttaagatataagtgcatcataatttattcagtctcatgatgatttgttctgtatcattccctagtattttccataaaaacccgctagtattttgttttgatcactatcagacactgatctgacactaagtttcctgtgtgaaggatgacactcagttcttagttctcacacctaccttcagaaaagcctgaacagtaaggtagtaaacaagtcatggcgcttcttgcagtatttcgctcatgagagatccttg

SEQ ID NO: 17054 - DNA, 600 bp, Chicken  19866894224927_3
cactaagtttcctgtgtgaaggatgacactcagttcttagttctcacacctaccttcagaaaagcctgaacagtaaggtagtaaacaagtcatggcgcttcttgcagtatttcgctcatgagagatccttgatcggacattacagaaggcaaattagcctgagcaatttatccatagatacattaaagattctcttgtcagtgtaggaatttgtgttatcagtcatcaggtcaataggagatttttattttccttttcccttcccagctagtatgtggttatacctttttgtttagacgktttgcaaaatgcagtgccgggtgtttctccatagtcttcttcattctctgtcctcttctggaagtttggtattttgaacactcctggtacttgaaatgccagaatgcctaaagcaacatactggtattttaagaacaagcgtgcagtggtcaaatgtcaagatgcatgcgatcaaaatgtctgtctgatactaatgaggagatatccagctgtgtgtgctcttcgaatgaaaaatggttgaatacaaatggctggaagctgagacagatggcactgcaggattggttagaagcagaggct

SEQ ID NO: 17055 - DNA, 600 bp, Chicken  19866894224928_1
tagggaggggatgcgtggctggcagcagcagatgatatttcactttgtttgggtttgtccccctcccttctgggggctgtagaagaaaacagttcaaggtgcagttgcatggagggaaaaaaacgacaacacaaaacaaccccaaaccaaagcaacaaggcagcaagaggcgagcgagcgcagtgcaaggcgctgcaggcacgtgacagctccatggggcacctgctcagcatcgccccggcacctttgtctgcccactgcaaggagcagggatgtgggtgtgtttgcttcccaaattamtgatttgattaccgatttgattcctgctcagtttgggggtgccccgttgagccagcggggagaaaaggagacaggatttggggaataaatggcatgagatgggtttcaggtgaacggcgggggctgcttgctgacaacatcctggcaatcagggttgtctgtttttaaacctctccaaaatatatatgtacacaggccatattctcaatgagataatgctctgttccttcccctcgccccccagtagtgcataagatattaaaacatgtttattcacctggtttgagaaactaagatgct

SEQ ID NO: 17056 - DNA, 600 bp, Chicken  19866894224930_1
tgtaatcaagcacgaccatagttacaggcaaaccacaaaagtgagcagggtaaaggaattatccagctatcacaggcacattaatgctggtcgcattccagagcgctcgttacagcactccagcgtggctccctgtacagctggtcaaataatgctcatcaaataaatgatttgacaaattttgcagagtttcaaaaataaattgtccaaaaagcgtgctttttaattattcccacagctgtagtcttgtaagcctagaaatatgctcaaactcacctcttttcctcagcttgctcgctstctacattttcttaattcatgctccccagttgcactttctgagcaaccctggtaaagtctctgggtgcacattgcagccttcctaacaactcaaaatagcaacacagcatacctcactcagttctcctgagcacccctaagttttactaataaatcagcatgtcagtacacatggcaaagccctggactttgggtgttcctcacagatgagtcaggaatccacttctagtacctcatcatcgctccgctgaatccaatggcaccgtcttgatttccacggagtgaggatctgttctatca

SEQ ID NO: 17057 - DNA, 600 bp, Chicken  19866894224931_1
tgacattgaaaggaggttaaaagctatgttagccagagactgacaaaatctaaaaggcatgcataagtaaagctctaattaagacaatgaagacagagttcctgacccagcactgcagtaatattctggaaatgagagctatctgcactttgccaccaaggattatagagagactgaacctgtcttcaatcaagagatgaagaaatgatattcttcaaatgagattttgttgtttcctccgggtcttgctgttgcagaagacttattcatttcattagctgtaacttcagtaagtcttcsaggcagctccattttgctccttgctacactcactytcaatattttccaaaattttccttcaactccagggataccttcacctgccacatttgtcataggggtggagcgagtgtgaacacagaccacaagtggtctgaatggcactgccatcacaaacatgcacttcagtgtgcctgttactcagcaaagcactttgtatactgggaaaactgtagmgagcrattgccagctgtacttctgtaaaactgaggaagctccatagaagtgatcttcaacagcaattgctttaagacagcagga

SEQ ID NO: 17058 - DNA, 600 bp, Chicken  19866894224931_2
gagactgacaaaatctaaaaggcatgcataagtaaagctctaattaagacaatgaagacagagttcctgacccagcactgcagtaatattctggaaatgagagctatctgcactttgccaccaaggattatagagagactgaacctgtcttcaatcaagagatgaagaaatgatattcttcaaatgagattttgttgtttcctccgggtcttgctgttgcagaagacttattcatttcattagctgtaacttcagtaagtcttcsaggcagctccattttgctccttgctacactcactytcaatattttccaaaattttccttcaactccagggataccttcacctgccacatttgtcataggggtggagcgagtgtgaacacagaccacaagtggtctgaatggcactgccatcacaaacatgcacttcagtgtgcctgttactcagcaaagcactttgtatactgggaaaactgtagmgagcrattgccagctgtacttctgtaaaactgaggaagctccatagaagtgatcttcaacagcaattgctttaagacagcaggatactctgtatgccacttcaaattattcatgttatg

SEQ ID NO: 17059 - DNA, 481 bp, Chicken  19866894224931_3
aaatgagattttgttgtttcctccgggtcttgctgttgcagaagacttattcatttcattagctgtaacttcagtaagtcttcsaggcagctccattttgctccttgctacactcactytcaatattttccaaaattttccttcaactccagggataccttcacctgccacatttgtcataggggtggagcgagtgtgaacacagaccacaagtggtctgaatggcactgccatcacaaacatgcacttcagtgtgcctgttactcagcaaagcactttgtatactgggaaaactgtagmgagcrattgccagctgtacttctgtaaaactgaggaagctccatagaagtgatcttcaacagcaattgctttaagacagcaggatactctgtatgccacttcaaattattcatgttatgattaaatctggccagagttaggtcttccaactgagatgccatcctaatgctgggattatttt

SEQ ID NO: 17060 - DNA, 476 bp, Chicken  19866894224931_4
agattttgttgtttcctccgggtcttgctgttgcagaagacttattcatttcattagctgtaacttcagtaagtcttcsaggcagctccattttgctccttgctacactcactytcaatattttccaaaattttccttcaactccagggataccttcacctgccacatttgtcataggggtggagcgagtgtgaacacagaccacaagtggtctgaatggcactgccatcacaaacatgcacttcagtgtgcctgttactcagcaaagcactttgtatactgggaaaactgtagmgagcrattgccagctgtacttctgtaaaactgaggaagctccatagaagtgatcttcaacagcaattgctttaagacagcaggatactctgtatgccacttcaaattattcatgttatgattaaatctggccagagttaggtcttccaactgagatgccatcctaatgctgggattatttt

SEQ ID NO: 17061 - DNA, 600 bp, Chicken  19866894224933_1
atctgcacctgtgtgagcggccacagtctgtcactgcaggaatgcatcgccctcccctcgctgtgctcacacccactgtttggtctccacaaacattcagcaagcattgatgaatgtcagtgagtgctgtatctttccacatggaggaattcaatttcacacctttcttttgcacacacttccaatgtcagataccacttcgtcagagtgcccctctgctgccatctgccacatggcaacaacgtgtcacaggtaattgctggggaaggttcagcctcagctgccatcccccccagcatycacctcacattgcggaccaacaaaataaaataggaggcattactttcggagcatcctttatattactcccatcctaaaatcttgtatgcattgagagaatatttttctggtttccgaacttccagtgatccccgagattaaagagatttcaatttatttgtagtgaacgtatcccttgaaaataaaacatgttaatcataaacatttatttttcagataattactgttgttacatgaacatgtgtggaccataacacttagccagacattctttactcgttaagttctgatttaagtttg

SEQ ID NO: 17062 - DNA, 521 bp, Chicken  19866894224933_2
ccttgaaaataaaacatgttaatcataaacatttatttttcagataattactgttgttacatgaacatgtgtggaccataacacttagccagacattctttactcgttaagttctgatttaagtttgtaaaccaccgtgtccttcattttaaaagtggaacaaaaatctctcaattcccctagaattagttaataaatatttttgaattcctgaaatgccttaggatgcaaacagcaccggaagaataaaacacgttattgttatagcgaggaaaaaactgatctgccatacgtgttaakagcttaggttagactgtgagaatgtaggtcctggaaatggtaggttagggaattcgatgatagagaaagaaattaaataatttaatttataattaacatttactatttggacatgtttaattgggtgatacgacctttagcaaagatcacccgtatcatcttcattgaaaaaatactatttacttcatcaaggatagcactgttacttctttgtgcagaaa

SEQ ID NO: 17063 - DNA, 600 bp, Chicken  19866894224938_1
cagctgcagccagtctcaattttaaggccaaggagcgaaaagtcacttttatcgtcgttggttaacttgactaatacaggaaatgtttttgtactcaaacagtgatttgtttacatggttctgtaaccaaacagctgtattgtcctcatgttaaaatcgacgtgggaagaactggtgaggctgcagagctttagggacaatctggaaggtgctccactcatccagaccacagcacgagtttgcaccctctgcacttgcagcagtcctttcagtaaaagtgtgtgctttggatcgcttttstttttcttcccaaagatgttgctggaaaccgttctgcacacactttatttgtaattaaaatgggaaagtttttctgtcggtagaaaccrtaaagcacgyagtataactaaacaaaatrtcttttatatagtctggatggctatatgaagtatctggacggctgtttcatttctggaygatgagaaagcagtgatgagatagcacggtttgctacagcagattggtttttaacatgtaggcattttggtctgtgacctctgtacttcacagaggtctgcagtcctcattttttattcatgc

SEQ ID NO: 17064 - DNA, 600 bp, Chicken  19866894224938_2
tgtactcaaacagtgatttgtttacatggttctgtaaccaaacagctgtattgtcctcatgttaaaatcgacgtgggaagaactggtgaggctgcagagctttagggacaatctggaaggtgctccactcatccagaccacagcacgagtttgcaccctctgcacttgcagcagtcctttcagtaaaagtgtgtgctttggatcgcttttstttttcttcccaaagatgttgctggaaaccgttctgcacacactttatttgtaattaaaatgggaaagtttttctgtcggtagaaaccrtaaagcacgyagtataactaaacaaaatrtcttttatatagtctggatggctatatgaagtatctggacggctgtttcatttctggaygatgagaaagcagtgatgagatagcacggtttgctacagcagattggtttttaacatgtaggcattttggtctgtgacctctgtacttcacagaggtctgcagtcctcattttttattcatgccaaattactttggaaagccaaagccaaaagcaggcactgccagcgcagcagagtactgcaggctccttgctatacctgcagcacagcga

SEQ ID NO: 17065 - DNA, 600 bp, Chicken  19866894224938_3
cagtgatttgtttacatggttctgtaaccaaacagctgtattgtcctcatgttaaaatcgacgtgggaagaactggtgaggctgcagagctttagggacaatctggaaggtgctccactcatccagaccacagcacgagtttgcaccctctgcacttgcagcagtcctttcagtaaaagtgtgtgctttggatcgcttttstttttcttcccaaagatgttgctggaaaccgttctgcacacactttatttgtaattaaaatgggaaagtttttctgtcggtagaaaccrtaaagcacgyagtataactaaacaaaatrtcttttatatagtctggatggctatatgaagtatctggacggctgtttcatttctggaygatgagaaagcagtgatgagatagcacggtttgctacagcagattggtttttaacatgtaggcattttggtctgtgacctctgtacttcacagaggtctgcagtcctcattttttattcatgccaaattactttggaaagccaaagccaaaagcaggcactgccagcgcagcagagtactgcaggctccttgctatacctgcagcacagcgaagtaatggct

SEQ ID NO: 17066 - DNA, 600 bp, Chicken  19866894224938_4
ttctgtaaccaaacagctgtattgtcctcatgttaaaatcgacgtgggaagaactggtgaggctgcagagctttagggacaatctggaaggtgctccactcatccagaccacagcacgagtttgcaccctctgcacttgcagcagtcctttcagtaaaagtgtgtgctttggatcgcttttstttttcttcccaaagatgttgctggaaaccgttctgcacacactttatttgtaattaaaatgggaaagtttttctgtcggtagaaaccrtaaagcacgyagtataactaaacaaaatrtcttttatatagtctggatggctatatgaagtatctggacggctgtttcatttctggaygatgagaaagcagtgatgagatagcacggtttgctacagcagattggtttttaacatgtaggcattttggtctgtgacctctgtacttcacagaggtctgcagtcctcattttttattcatgccaaattactttggaaagccaaagccaaaagcaggcactgccagcgcagcagagtactgcaggctccttgctatacctgcagcacagcgaagtaatggctgttgcactttggtatttgt

SEQ ID NO: 17067 - DNA, 600 bp, Chicken  19866894224938_5
aggctgcagagctttagggacaatctggaaggtgctccactcatccagaccacagcacgagtttgcaccctctgcacttgcagcagtcctttcagtaaaagtgtgtgctttggatcgcttttstttttcttcccaaagatgttgctggaaaccgttctgcacacactttatttgtaattaaaatgggaaagtttttctgtcggtagaaaccrtaaagcacgyagtataactaaacaaaatrtcttttatatagtctggatggctatatgaagtatctggacggctgtttcatttctggaygatgagaaagcagtgatgagatagcacggtttgctacagcagattggtttttaacatgtaggcattttggtctgtgacctctgtacttcacagaggtctgcagtcctcattttttattcatgccaaattactttggaaagccaaagccaaaagcaggcactgccagcgcagcagagtactgcaggctccttgctatacctgcagcacagcgaagtaatggctgttgcactttggtatttgtgtgtgacaaagctgaggaaccgtgcgaggtttggctcttctcgctggcagctctcgggt

SEQ ID NO: 17068 - DNA, 600 bp, Chicken  19866894224941_1
gtgtatctgtaggaaatttccttctctctgtgctttgggtaatggtctaaaacatctcttgtagggaaaaatgatacctggctgtgctgaagcttttaaagtgctttttaaacatagacgacgttttgatgcagctataatgtgtgttcacagagctccaagttcttttcaggctctgtgccccagtctgtcccttgcagcagtaatatttccagggtattaccacagccccataaatgcacttgaaatctgccggcattaaacacctgagctcatctgccgttgaatcatatcagcacyggctttcatggtgacacaattagctggctctatcttagctcggcctatacatttgggtgaagtccaaacctgccactgtgggagcctcctgtgatccttccctttatcagcaaatcagatgcctgtgttgtacataggactcggaactaatgatccccatgggtcccttccaactgcggatgttctacgattttgtgattctatttgttcttcggcaactcaaagggtcagggctagatccatagaatttattcgcctggtttttggctggagcgtcttggctgccaggtgaaggagtgt

SEQ ID NO: 17069 - DNA, 600 bp, Chicken  19866894224944_1
cagttgggctcccactcagctgctcgctcactcccctcaccaagggaggggaagaaagcacaaagaaggtgaggagacttgtggatctagataacaacagcttaacagggaaaggaaaagcaacaggcaatgacaaagcaaattaaatgtgtttattcactactttccactggcaggaaggtgttcagccactttctggaaagcagggcctcagcatgtctagcagttacttgggaagacaaatgtcataatcatgagcatcccttcttcctttgcctgctgcacgtgatgctgtatggyatggaatacccctctatgcagctggggtcagctgtcctggctgtgtcccctcccagctccttgccyaccacccacagccaactcgctgaggtgagcagagtaggaaagaaggaaaccttgatgccatgcaatctctgctcagcaacagccaaggctctgatgtgttaccagtacttttcagccacaaatctaaagcacagcaccatatgggcggctgtggagaaagttaacttcctcccagccagacctgggctagcaagatccttaagaacccagatggaccggagaagctggcagaag

SEQ ID NO: 17070 - DNA, 600 bp, Chicken  19866894224944_2
aggtgaggagacttgtggatctagataacaacagcttaacagggaaaggaaaagcaacaggcaatgacaaagcaaattaaatgtgtttattcactactttccactggcaggaaggtgttcagccactttctggaaagcagggcctcagcatgtctagcagttacttgggaagacaaatgtcataatcatgagcatcccttcttcctttgcctgctgcacgtgatgctgtatggyatggaatacccctctatgcagctggggtcagctgtcctggctgtgtcccctcccagctccttgccyaccacccacagccaactcgctgaggtgagcagagtaggaaagaaggaaaccttgatgccatgcaatctctgctcagcaacagccaaggctctgatgtgttaccagtacttttcagccacaaatctaaagcacagcaccatatgggcggctgtggagaaagttaacttcctcccagccagacctgggctagcaagatccttaagaacccagatggaccggagaagctggcagaagttcataaacacgttcataaaagttgttgtgttcttatttacaagccattatggaaatggatgtcag

SEQ ID NO: 17071 - DNA, 600 bp, Chicken  19866894224944_3
aaagagattgctacatttctacgtaggcacaaacagcacccacttagccacagtgctttgtatgatgtgaacagcttgcagacctttgttttcacagatcttcttgcttgaatagattatagtgaaactaagagcttttcacagtggtcaactatttatgagcctggaaacatggcaaatatatttctttgcaagttaatgtgaatccagctgggatcttaaaaaatttaacagatgagcttccaaaacctacacttcttgcatcaagacaagtggaaatgtggagatacctccatttasagctccctcaacgtgcagggagggtacactcatcctgagctggaaaggctgtgtcaagggggatgtgtcactgcagcagctactcatttctagttgctcatgtcatctgtctgcccggcagcccatcgtgctgttaactacatttgcctttaaggacatttatcttctcagcaatgccgcaatggtgagatatgccacgaccaactgcaaaatgccggcagaccttcagaagtgactgcagagtgttacgtacacttgcataacagagttaaatgaggccgtttttctcccttgttccag

SEQ ID NO: 17072 - DNA, 600 bp, Chicken  19866894224945_1
ggagacaccaacatcacaggggctttatgaggggtgtgggaaacccctctcgtgtcattcagatgtcagtttacataatttccaggcatcaccttggggcagtgtcaagcgcagagtaattaccgctgccattggtgtggctgactttggttgttaaatgttaatgcatattaagatatgtcaccctgcaggcaaagtcctgcctacctgatatccccttgactttgctttcagggatcatttgtaaaactcagtgatctggagctccgggagatttggagatagcatcagatgtgctgsggaatggcaagtaaatgactggagaagaagcatggaggcagcagctctcacccaagccccagcccaaggttagggatgctgtgaaggagggtgagcagggccggggtaggctcagggccagcacttctccaggggctgtgcacttttcctccatcacttattcactgaattccggctccagccccctctgggatgaaagcaaacaccccttttaattagcttccctcctccttttctttacaattcgtaaccctttttttgtacagcaagttgagagtcagtcaagagccatttaattcc

SEQ ID NO: 17073 - DNA, 600 bp, Chicken  19866894224946_1
gaaggtatgaaatgtagaaggaacagaagctatcacatagatgagaaaaagatttattcggtatatgtttcgcttaggctctcttattctgtgcaaaatcattattcactaaaaggagaggcatagccactcttttgccctcataagctggaacattttgctcctgcagcataatcagattttccaagcaaaactcctggttatttcagtcacatttatgcagctgtacaaggccttggcaaaattcaagcactgccgagcatgttaacatttcaaagtataaaatttagatcaatatcktatagttaaatttaaaggccaaattaaagaatatatatgttgcgtctacaagatatgcatacaggtaactgattgcgttttccatgcactgagtgtacaatctacagtagcgtagggagaacctgcaacaatgatatccagaattgaaatggatctatttggcatgccttcatttcctggcaggttttggcttgtattttggacrtgcaaaggtttaagatcaaatctttctaaagaagggagaataatttagaaacaggaaacaaaagactccagaaaaatttgtaccagagatgttat

SEQ ID NO: 17074 - DNA, 600 bp, Chicken  19866894224946_2
tcagtcacatttatgcagctgtacaaggccttggcaaaattcaagcactgccgagcatgttaacatttcaaagtataaaatttagatcaatatcktatagttaaatttaaaggccaaattaaagaatatatatgttgcgtctacaagatatgcatacaggtaactgattgcgttttccatgcactgagtgtacaatctacagtagcgtagggagaacctgcaacaatgatatccagaattgaaatggatctatttggcatgccttcatttcctggcaggttttggcttgtattttggacrtgcaaaggtttaagatcaaatctttctaaagaagggagaataatttagaaacaggaaacaaaagactccagaaaaatttgtaccagagatgttattttccaacacacatttttttccaacattgtttgggactcgacgttaaattaattgattaaatgaaacagtggaactgcatgtgttgttgtgaggtgtaactgcaggttcagagcacgagggtgaatgcagtacagaccttgggaacctggctcagttaaaggataacagcctaattatatgaaccgaatatcaaattcatgccat

SEQ ID NO: 17075 - DNA, 599 bp, Chicken  19866894224947_1
  misc_feature (1)..(12): n is any nucleotide
nnnnnnnnnnnntgcaggaagcaataaacgtaggcaagagacgggttgggttgatttccttaggtcagggcacaggctgggcttgctgtcctggcctgaacacactttgtcctgcagttttcagatagcaattccgtacagttcattttgaaagccgtttcaggttggcactgatccgtcacagcgagcaaaatagcggcgaagactcgttattttgggaagaaaggaaatatttcctgcagaggttcattgcagaagagcgatatgaggtagcacgcgtgatttactgctttcactatragagctaaatgaatctcctcctttcccagctcttgaatacagagttatgctggcagagtggattacatctgatctatgtaccatgacaagtactgaaaattgtgggcttcattgctgtattcacccactccttcctgaagatargaagaaagtgtcaatacagagagcagcctttgctccattccgtcagtgtaagaaagcacaaagctgctctgaagatctaatgagtatacagtctgacaccatagaaaccaaggtaaactcctttttaactctttcagctaatgtgctgggtgtgg

SEQ ID NO: 17076 - DNA, 600 bp, Chicken  19866894224947_2
attttgaaagccgtttcaggttggcactgatccgtcacagcgagcaaaatagcggcgaagactcgttattttgggaagaaaggaaatatttcctgcagaggttcattgcagaagagcgatatgaggtagcacgcgtgatttactgctttcactatragagctaaatgaatctcctcctttcccagctcttgaatacagagttatgctggcagagtggattacatctgatctatgtaccatgacaagtactgaaaattgtgggcttcattgctgtattcacccactccttcctgaagatargaagaaagtgtcaatacagagagcagcctttgctccattccgtcagtgtaagaaagcacaaagctgctctgaagatctaatgagtatacagtctgacaccatagaaaccaaggtaaactcctttttaactctttcagctaatgtgctgggtgtggcaagaggcagaagttctcctattygtgaacattttatttgcatatatcacagctcatgacaggcttgcattaatgctaacagaagctttttttaagcatatggatgaaatttcaatcaccgtggaagcaagcgacttatctgatt

SEQ ID NO: 17077 - DNA, 514 bp, Chicken  19866894224947_3
tcccagctcttgaatacagagttatgctggcagagtggattacatctgatctatgtaccatgacaagtactgaaaattgtgggcttcattgctgtattcacccactccttcctgaagatargaagaaagtgtcaatacagagagcagcctttgctccattccgtcagtgtaagaaagcacaaagctgctctgaagatctaatgagtatacagtctgacaccatagaaaccaaggtaaactcctttttaactctttcagctaatgtgctgggtgtggcaagaggcagaagttctcctattygtgaacattttatttgcatatatcacagctcatgacaggcttgcattaatgctaacagaagctttttttaagcatatggatgaaatttcaatcaccgtggaagcaagcgacttatctgattcaatctgttttctgggtcatttgaaaaggaaagtatttaaacacattgtaattgcctcagaggaagaagatgagtttgctgcactgctaagca

SEQ ID NO: 17078 - DNA, 600 bp, Chicken  19866894224953_1
tgagggattattcaatcctgcatttaaaagccacaagtaaaagctccttgttgctccactggggaaattattccacagattatcataattcatgttcaggaagcatttcttgatacttggtgcatgttttggcttttcagtcacatctactgactcttagctgttccctgtgaatcccactgaaaaatgcctttccttcaccggtggtcttcttcaaatatttgtaggctgttatcatgtccaccattaatcatttcttagctgagcaatttatatatttaactcttctaatctctcctyataaatcaatccttctagtctttggatcatgtttggtgctcttctctgaactctctaatttgtcaatatccacaaatgtgtataatattccagatggagctgtactagcgcccatacagaaagtgctgatttcttcctttcgcagtgatttgatactgttttctctctgcagtgttgtactggccttttcacaccatatcatgttgccaattcatgtcatttagcatgcgctatctcacttagatctctttcatcattattgcatcccagatttctccttcctgttattccctctcagat

SEQ ID NO: 17079 - DNA, 600 bp, Chicken  19866894224953_2
catacagaaagtgctgatttcttcctttcgcagtgatttgatactgttttctctctgcagtgttgtactggccttttcacaccatatcatgttgccaattcatgtcatttagcatgcgctatctcacttagatctctttcatcattattgcatcccagatttctccttcctgttattccctctcagatgccctcctagcctgcactttttcaaagctgagtctcgtttagttattttctttccatggttctatctgctttaggaaatgtgcagctattttctttgtacatcgatctttcrttctttcatacttgtatttgagagtttcatcaaagtgctgtgcactcccttttccagctcattaatacagaagtcagacacagactrttcctagtagtcacgcacgtggtagcttggasacacttcccaccactttactacattgcatcytatttcctataattccattacagtttcattgaaagccatatggaaatggccaagccagtgtgaattactttttcagctgagatcctgtgagacacaccatcatagctttatgaaagctgatacacaatgtgcttgctgtagctccctgtc

SEQ ID NO: 17080 - DNA, 600 bp, Chicken  19866894224953_3
catgttgccaattcatgtcatttagcatgcgctatctcacttagatctctttcatcattattgcatcccagatttctccttcctgttattccctctcagatgccctcctagcctgcactttttcaaagctgagtctcgtttagttattttctttccatggttctatctgctttaggaaatgtgcagctattttctttgtacatcgatctttcrttctttcatacttgtatttgagagtttcatcaaagtgctgtgcactcccttttccagctcattaatacagaagtcagacacagactrttcctagtagtcacgcacgtggtagcttggasacacttcccaccactttactacattgcatcytatttcctataattccattacagtttcattgaaagccatatggaaatggccaagccagtgtgaattactttttcagctgagatcctgtgagacacaccatcatagctttatgaaagctgatacacaatgtgcttgctgtagctccctgtccttgctacaggctctacagcccaagctcgctgaagtcggcagtgactattaggaataagaattgtgtttacaagagggtgtctgggt

SEQ ID NO: 17081 - DNA, 600 bp, Chicken  19866894224953_4
tatctcacttagatctctttcatcattattgcatcccagatttctccttcctgttattccctctcagatgccctcctagcctgcactttttcaaagctgagtctcgtttagttattttctttccatggttctatctgctttaggaaatgtgcagctattttctttgtacatcgatctttcrttctttcatacttgtatttgagagtttcatcaaagtgctgtgcactcccttttccagctcattaatacagaagtcagacacagactrttcctagtagtcacgcacgtggtagcttggasacacttcccaccactttactacattgcatcytatttcctataattccattacagtttcattgaaagccatatggaaatggccaagccagtgtgaattactttttcagctgagatcctgtgagacacaccatcatagctttatgaaagctgatacacaatgtgcttgctgtagctccctgtccttgctacaggctctacagcccaagctcgctgaagtcggcagtgactattaggaataagaattgtgtttacaagagggtgtctgggtgcagtacccttgctattgtgaaagttggtaat

SEQ ID NO: 17082 - DNA, 600 bp, Chicken  19866894224953_5
catcccagatttctccttcctgttattccctctcagatgccctcctagcctgcactttttcaaagctgagtctcgtttagttattttctttccatggttctatctgctttaggaaatgtgcagctattttctttgtacatcgatctttcrttctttcatacttgtatttgagagtttcatcaaagtgctgtgcactcccttttccagctcattaatacagaagtcagacacagactrttcctagtagtcacgcacgtggtagcttggasacacttcccaccactttactacattgcatcytatttcctataattccattacagtttcattgaaagccatatggaaatggccaagccagtgtgaattactttttcagctgagatcctgtgagacacaccatcatagctttatgaaagctgatacacaatgtgcttgctgtagctccctgtccttgctacaggctctacagcccaagctcgctgaagtcggcagtgactattaggaataagaattgtgtttacaagagggtgtctgggtgcagtacccttgctattgtgaaagttggtaatattaatctttccctctgctctatctttcttc

SEQ ID NO: 17083 - DNA, 599 bp, Chicken  19866894224954_1
  misc_feature (1)..(110): n is any nucleotide
nnnnnnnnnnnnnnnnnnnnnnnnnnnnnnnnnnnnnnnnnnnnnnnnnnnnnnnnnnnnnnnnnnnnnnnnnnnnnnnnnnnnnnnnnnnnnnnnnnnnnnnnnnnnnnatcagcatttgcagtgctgggaggcatatatggattgccctgcccttggagaaagtcatccttttgtacagacgctaccagatttgacttttatcgtgcttcacaaatctttctacagccccaaactgttttgcctgaaagggcattgcatggcatttgcactatttccccagggcggagcacagcaagrgctcacttcacaggactgtttgaacagccagcatttcattgattgctgggtggtgtgaggacagaagtgctatggtagtgcttaatgttctcacaactttttwaatgattatttgtatcaccatcacaactgcaatgccacatgtctaagaaaggaatgcagcttttgtgggtgctccggggcatagacttaagaactagacwctgcatttagctttcaaggcatatgcttctgctaagtcatatccytgtagaatgtcggccttggggacataatgccaggagtgccagaggggagga

SEQ ID NO: 17084 - DNA, 599 bp, Chicken  19866894224954_2
  misc_feature (1)..(7): n is any nucleotide
nnnnnnnatcagcatttgcagtgctgggaggcatatatggattgccctgcccttggagaaagtcatccttttgtacagacgctaccagatttgacttttatcgtgcttcacaaatctttctacagccccaaactgttttgcctgaaagggcattgcatggcatttgcactatttccccagggcggagcacagcaagrgctcacttcacaggactgtttgaacagccagcatttcattgattgctgggtggtgtgaggacagaagtgctatggtagtgcttaatgttctcacaactttttwaatgattatttgtatcaccatcacaactgcaatgccacatgtctaagaaaggaatgcagcttttgtgggtgctccggggcatagacttaagaactagacwctgcatttagctttcaaggcatatgcttctgctaagtcatatccytgtagaatgtcggccttggggacataatgccaggagtgccagaggggaggacataatagtgcattttcttcccagggtatatcatagaatcatagaayggtgtgggttggaagggacttcaaagactaattccaagcccttggtcatgggcagg

SEQ ID NO: 17085 - DNA, 600 bp, Chicken  19866894224954_3
tcgtgcttcacaaatctttctacagccccaaactgttttgcctgaaagggcattgcatggcatttgcactatttccccagggcggagcacagcaagrgctcacttcacaggactgtttgaacagccagcatttcattgattgctgggtggtgtgaggacagaagtgctatggtagtgcttaatgttctcacaactttttwaatgattatttgtatcaccatcacaactgcaatgccacatgtctaagaaaggaatgcagcttttgtgggtgctccggggcatagacttaagaactagacwctgcatttagctttcaaggcatatgcttctgctaagtcatatccytgtagaatgtcggccttggggacataatgccaggagtgccagaggggaggacataatagtgcattttcttcccagggtatatcatagaatcatagaayggtgtgggttggaagggacttcaaagactaattccaagcccttggtcatgggcagggttgccaaccactaaatcagacactagatcattttgcccagggcccgatccaacctggccttgaacacctccagggatgaggcatccacaacttctcttgg

SEQ ID NO: 17086 - DNA, 600 bp, Chicken  19866894224954_4
aagggcattgcatggcatttgcactatttccccagggcggagcacagcaagrgctcacttcacaggactgtttgaacagccagcatttcattgattgctgggtggtgtgaggacagaagtgctatggtagtgcttaatgttctcacaactttttwaatgattatttgtatcaccatcacaactgcaatgccacatgtctaagaaaggaatgcagcttttgtgggtgctccggggcatagacttaagaactagacwctgcatttagctttcaaggcatatgcttctgctaagtcatatccytgtagaatgtcggccttggggacataatgccaggagtgccagaggggaggacataatagtgcattttcttcccagggtatatcatagaatcatagaayggtgtgggttggaagggacttcaaagactaattccaagcccttggtcatgggcagggttgccaaccactaaatcagacactagatcattttgcccagggcccgatccaacctggccttgaacacctccagggatgaggcatccacaacttctcttgggcagtctattgcagcacctcactgcactctcagtgaaaataccct

SEQ ID NO: 17087 - DNA, 600 bp, Chicken  19866894224954_5
tgggtggtgtgaggacagaagtgctatggtagtgcttaatgttctcacaactttttwaatgattatttgtatcaccatcacaactgcaatgccacatgtctaagaaaggaatgcagcttttgtgggtgctccggggcatagacttaagaactagacwctgcatttagctttcaaggcatatgcttctgctaagtcatatccytgtagaatgtcggccttggggacataatgccaggagtgccagaggggaggacataatagtgcattttcttcccagggtatatcatagaatcatagaayggtgtgggttggaagggacttcaaagactaattccaagcccttggtcatgggcagggttgccaaccactaaatcagacactagatcattttgcccagggcccgatccaacctggccttgaacacctccagggatgaggcatccacaacttctcttgggcagtctattgcagcacctcactgcactctcagtgaaaatacccttggcattgttaaaatgtagtgtctccttagatgtttctgctcccagagttcctccttgggtgtctaccctgtctaatattaaatattcaaattaagac

SEQ ID NO: 17088 - DNA, 600 bp, Chicken  19866894224965_1
cccttccatagctgaaactcttcagtaaagcacagagttcaaagaattctctgttgaaagacattgctcaatgtattaaaaaaataaaaagatgagattttcagagtctggcaccaagcaatacagctagagaagaagaactattattcgctattggaagatgggtatttctgataagactctattgcatatcacatacctggagacactgtagctgtaagttgcttaaagggcaggcagaattaagctttgggtttgtaactatctttcaaattattgctactgtttgaatttaccacstattgttgtaaatcagcacagtaccttccttaactggtctttcctggggaaatttgcctggagtttctgccttcagtggtgacattacttcatatgtctccctgtgtttattccttaattcctcatacgtgacrcttttttttttacgactttcttctggaattggaggagtttctataaacacaacaaacacaaaaataccagaaatggcgtcacacaactggtctacaagttctacaacctcttccagagcaccagttaattacagctcaatctcaaacgaaaacgagcgtgacagct

SEQ ID NO: 17089 - DNA, 600 bp, Chicken  19866894224965_2
gaagaactattattcgctattggaagatgggtatttctgataagactctattgcatatcacatacctggagacactgtagctgtaagttgcttaaagggcaggcagaattaagctttgggtttgtaactatctttcaaattattgctactgtttgaatttaccacstattgttgtaaatcagcacagtaccttccttaactggtctttcctggggaaatttgcctggagtttctgccttcagtggtgacattacttcatatgtctccctgtgtttattccttaattcctcatacgtgacrcttttttttttacgactttcttctggaattggaggagtttctataaacacaacaaacacaaaaataccagaaatggcgtcacacaactggtctacaagttctacaacctcttccagagcaccagttaattacagctcaatctcaaacgaaaacgagcgtgacagctgcaactctaaatgcaactgagaatgtgtgtggtccttttatccattccttttatccttttcattttgtctatctggtttagatctattttaacttatttttgcaattttacccaatggaaagcctaacaarcac

SEQ ID NO: 17090 - DNA, 600 bp, Chicken  19866894224965_3
acrcttttttttttacgactttcttctggaattggaggagtttctataaacacaacaaacacaaaaataccagaaatggcgtcacacaactggtctacaagttctacaacctcttccagagcaccagttaattacagctcaatctcaaacgaaaacgagcgtgacagctgcaactctaaatgcaactgagaatgtgtgtggtccttttatccattccttttatccttttcattttgtctatctggtttagatctattttaacttatttttgcaattttacccaatggaaagcctaacaarcacaatacctgatagatagaagagttctggtcactttatacaagattaatgctcaacatacatttaatacatttgtaatttctgatgagaaatctggatgaatctaaagtgtttctagtaaggcttttaaactctgctatcaaaggatgaggaccacaaccatcatacatagcatgatatacacttcaatttacacttgtaatgcagcaccttggttctataattaaggctttacattgatatttgtgatgaagtattattataattcccttgacacatcaacatataaaacttttatac

SEQ ID NO: 17091 - DNA, 599 bp, Chicken  19866894224969_1
  misc_feature (1)..(115): n is any nucleotide
nnnnnnnnnnnnnnnnnnnnnnnnnnnnnnnnnnnnnnnnnnnnnnnnnnnnnnnnnnnnnnnnnnnnnnnnnnnnnnnnnnnnnnnnnnnnnnnnnnnnnnnnnnnnnnnnnnntgaattggaaacactccccttctgaaaatttgctaccttctttttttccccactcttctctctctgggaggcaattcaagggacactactgtagaaatctttgctttcaacatcctaaacctttgtgtctgtaacttcattcctgtcctttgccataggaagactagccacaaggatcacagctktagagtctagaacttcctatgggtctgtataggcacttttcaaggcttaacagctggataaagtaatagaagacaagtggacacggtgttcttaaaataaagacttgtttattaaaaaaatctcattgcatctaatatctataaggactgagagaatgacagatttacaaaataatgcatggtgctataaacgtgaagaaattctatttagactctatatgctgttttctaaaggttatatgcgcctgtagtcctcatgagactggatcaacatggtgctgtctgaagatctgtgacag

SEQ ID NO: 17092 - DNA, 600 bp, Chicken  19866894224969_2
aagtggacacggtgttcttaaaataaagacttgtttattaaaaaaatctcattgcatctaatatctataaggactgagagaatgacagatttacaaaataatgcatggtgctataaacgtgaagaaattctatttagactctatatgctgttttctaaaggttatatgcgcctgtagtcctcatgagactggatcaacatggtgctgtctgaagatctgtgacagtacgaagagttttcaaaattaccatttctccttgcctgtgcttttaagcatgcagactgggacaagcaacacacrtctgccaataccaaagttcctctcaaggaaatggggtgaaaaaatgattggtcactcatttccatggacagccagtaggaagatcacttggaactgccaagtgaaaattcaagaagccaaaatcttgagatgtcgttgttctaattgatgttttcgctgttgtttttaatttttaatgcctcagattacctatcttgaaaggaatcgtgatttactttataaacacatttctgtaacatagaataagatactgtacgtgtttcatgttgtaataagattgctcttggcaaaacttctgtg

SEQ ID NO: 17093 - DNA, 600 bp, Chicken  19866894224970_1
agacagccatttcccacaactagtttatagataaggcaacgttctccaaagtgaaacaattggactgaactacaagtcagggacacattaatgctaagaacaatgatggagaaaatacagttaggctcccactgaaaaggctttcaacattatttgccttggctgtaactgtttgttattctgcctcacagaatttggaaacaggaaaggaatagtttcagtagaaaactttagctttagtcttgctatagactgttgggattttagacaaattctgatgaactgggcttaaaatatatrctttcttgtcagaattccccatgcttcccaagatattcgacccttttcatagacatactgatatgcaattgtcaatactacatttgtacatctagtatgtctcaaattttgcctattcaattctttcatcaaagcagcattttttttcaatgccatatatacatatatattgtaatttacattttctcataaataytcctcttcaaatgattggaatttttcaacattttctccatatttacagattaaatccttcttacttttagtcagccactgaattttcgcaattatatataatat

SEQ ID NO: 17094 - DNA, 600 bp, Chicken  19866894224970_2
gacagccatttcccacaactagtttatagataaggcaacgttctccaaagtgaaacaattggactgaactacaagtcagggacacattaatgctaagaacaatgatggagaaaatacagttaggctcccactgaaaaggctttcaacattatttgccttggctgtaactgtttgttattctgcctcacagaatttggaaacaggaaaggaatagtttcagtagaaaactttagctttagtcttgctatagactgttgggattttagacaaattctgatgaactgggcttaaaatatattrtttcttgtcagaattccccatgcttcccaagatattcgacccttttcatagacatactgatatgcaattgtcaatactacatttgtacatctagtatgtctcaaattttgcctattcaattctttcatcaaagcagcattttttttcaatgccatatatacatatatattgtaatttacattttctcataaataytcctcttcaaatgattggaatttttcaacattttctccatatttacagattaaatccttcttacttttagtcagccactgaattttcgcaattatatataatata

SEQ ID NO: 17095 - DNA, 600 bp, Chicken  19866894224970_3
ggaaacaggaaaggaatagtttcagtagaaaactttagctttagtcttgctatagactgttgggattttagacaaattctgatgaactgggcttaaaatatattctttcttgtcagaattccccatgcttcccaagatattcgacccttttcatagacatactgatatgcaattgtcaatactacatttgtacatctagtatgtctcaaattttgcctattcaattctttcatcaaagcagcattttttttcaatgccatatatacatatatattgtaatttacattttctcataaataytcctcttcaaatgattggaatttttcaacattttctccatatttacagattaaatccttcttacttttagtcagccactgaattttcgcaattatatataatatataaaattktatataaatataaatagaattgaaagaaactgaatcaagctgttacctaaatttctgtagaaggccagcacctgatttttgtcttttaatcatgctacaaggttagagaaactctaaaataaggatttctgaattaaatattaaaatgcatgctagtccaaactttatgcagcaattattttaattc

SEQ ID NO: 17096 - DNA, 600 bp, Chicken  19866894224970_4
cagaattccccatgcttcccaagatattcgacccttttcatagacatactgatatgcaattgtcaatactacatttgtacatctagtatgtctcaaattttgcctattcaattctttcatcaaagcagcattttttttcaatgccatatatacatatatattgtaatttacattttctcataaataytcctcttcaaatgattggaatttttcaacattttctccatatttacagattaaatccttcttacttttagtcagccactgaattttcgcaattatatataatatataaaattktatataaatataaatagaattgaaagaaactgaatcaagctgttacctaaatttctgtagaaggccagcacctgatttttgtcttttaatcatgctacaaggttagagaaactctaaaataaggatttctgaattaaatattaaaatgcatgctagtccaaactttatgcagcaattattttaattcagcaccaaaacaagcttgctgatttacttcattctgcctcaagaatttcagctcactgtggtgctgagattggaccagacttcattccactgtagcactcatccaagaagaaa

SEQ ID NO: 17097 - DNA, 599 bp, Chicken  19866894224972_1
  misc_feature (1)..(103): n is any nucleotide
nnnnnnnnnnnnnnnnnnnnnnnnnnnnnnnnnnnnnnnnnnnnnnnnnnnnnnnnnnnnnnnnnnnnnnnnnnnnnnnnnnnnnnnnnnnnnnnnnnnnnnngtttgcacaaggttagggagaaccactaccagtgttgaatgtgaggataatctgtaatagcagaaatatggttttaacacacttgtgctcagcattgctgaagattctgtagcaggctgtgtagttgaaaggatgccaatggggagaagttaaagaagtattgaagagggtaaaggtcagtgtagttctgttaggargattttgataaaggaagggactttctctagaggatggcaaacacaaaatggaaagcttacttcctcaaatcctgggtattgtggttctcaatcatgtagtctgctatcaaatccaattttgatgggcttcctgtggctgcttacagtgctctgccagattgtaattaaagataattatatgctgggtttgtgacctgcgaaacctattctcgctgttaaaatctgtcagaatcaacctcaaattaagaractacaataagaaagccttgcaccatcaaacrctgaagttcattagtatg

SEQ ID NO: 17098 - DNA, 600 bp, Chicken  19866894224972_2
aagttaaagaagtattgaagagggtaaaggtcagtgtagttctgttaggargattttgataaaggaagggactttctctagaggatggcaaacacaaaatggaaagcttacttcctcaaatcctgggtattgtggttctcaatcatgtagtctgctatcaaatccaattttgatgggcttcctgtggctgcttacagtgctctgccagattgtaattaaagataattatatgctgggtttgtgacctgcgaaacctattctcgctgttaaaatctgtcagaatcaacctcaaattaagaractacaataagaaagccttgcaccatcaaacrctgaagttcattagtatgaaagtacaaagatcaaggagaagacaggaargctgtcagaggatttaactacttaatatggaacattacaagttgtcgtcttccttatgggaatgagtaaaaaagaataccacgaggtattaatttgcatttcttagatatgtaccactttctgaagttattcactttttaaaactttccattataaaatattgattaaaacttaacatttaggcacatcagcctcccartctaatgaaaagaattagct

SEQ ID NO: 17099 - DNA, 600 bp, Chicken  19866894224972_3
agtgtagttctgttaggargattttgataaaggaagggactttctctagaggatggcaaacacaaaatggaaagcttacttcctcaaatcctgggtattgtggttctcaatcatgtagtctgctatcaaatccaattttgatgggcttcctgtggctgcttacagtgctctgccagattgtaattaaagataattatatgctgggtttgtgacctgcgaaacctattctcgctgttaaaatctgtcagaatcaacctcaaattaagaractacaataagaaagccttgcaccatcaaacrctgaagttcattagtatgaaagtacaaagatcaaggagaagacaggaargctgtcagaggatttaactacttaatatggaacattacaagttgtcgtcttccttatgggaatgagtaaaaaagaataccacgaggtattaatttgcatttcttagatatgtaccactttctgaagttattcactttttaaaactttccattataaaatattgattaaaacttaacatttaggcacatcagcctcccartctaatgaaaagaattagctcagggattattttatagatattttttttgata

SEQ ID NO: 17100 - DNA, 600 bp, Chicken  19866894224972_4
aggatggcaaacacaaaatggaaagcttacttcctcaaatcctgggtattgtggttctcaatcatgtagtctgctatcaaatccaattttgatgggcttcctgtggctgcttacagtgctctgccagattgtaattaaagataattatatgctgggtttgtgacctgcgaaacctattctcgctgttaaaatctgtcagaatcaacctcaaattaagaractacaataagaaagccttgcaccatcaaacrctgaagttcattagtatgaaagtacaaagatcaaggagaagacaggaargctgtcagaggatttaactacttaatatggaacattacaagttgtcgtcttccttatgggaatgagtaaaaaagaataccacgaggtattaatttgcatttcttagatatgtaccactttctgaagttattcactttttaaaactttccattataaaatattgattaaaacttaacatttaggcacatcagcctcccartctaatgaaaagaattagctcagggattattttatagatattttttttgatataaggcattatttaatataccatagagggtagccacataaaatgtcatg

SEQ ID NO: 17101 - DNA, 509 bp, Chicken  19866894224972_5
aatcaacctcaaattaagaractacaataagaaagccttgcaccatcaaacrctgaagttcattagtatgaaagtacaaagatcaaggagaagacaggaargctgtcagaggatttaactacttaatatggaacattacaagttgtcgtcttccttatgggaatgagtaaaaaagaataccacgaggtattaatttgcatttcttagatatgtaccactttctgaagttattcactttttaaaactttccattataaaatattgattaaaacttaacatttaggcacatcagcctcccartctaatgaaaagaattagctcagggattattttatagatattttttttgatataaggcattatttaatataccatagagggtagccacataaaatgtcatggtttgtcctagattaataataaatctcagtaaaaatgctctaataatgtattgaatgagttagtcattgttgaatgtgttactgttatgggtaaaagtcaccatccag

SEQ ID NO: 17102 - DNA, 600 bp, Chicken  19866894224976_1
caaaataacaaacttctgaatagtttaactgcaaatatattaattgatgcttcaggcatagaaaattcaataaactggcaaagtacaaagtaaaaaacctcccattagccttcaacttaattcacagaattatcataaagataactttgagagaaatgaactccatctgactaacaaacatagtatttatttagagaataactacattttgcttgatttactatcagcatgtccaacagctctagcagttgcacatgccaatttgcttttattttacaactagatttttcagtatcaaargagggccacactttactaaattgttacctaatataatactaaatttcttctaagtctacctttccacagtgaatgtatgctttgattgtaacaagagaagaaacatcagcatctcctacacagcatgtgtttgtataagaatatacgcaaaagaagaagagagagaacttgacatgtccttggggtatgattaaaagcccataaaagaaaacatttcaaaaaagacagcgctgactttaaccactgctgtggacaagagctctttcacctaagacatgtcagtcattcataagtgcagct

SEQ ID NO: 17103 - DNA, 599 bp, Chicken  19866894224980_1
  misc_feature (1)..(148): n is any nucleotide
nnnnnnnnnnnnnnnnnnnnnnnnnnnnnnnnnnnnnnnnnnnnnnnnnnnnnnnnnnnnnnnnnnnnnnnnnnnnnnnnnnnnnnnnnnnnnnnnnnnnnnnnnnnnnnnnnnnnnnnnnnnnnnnnnnnnnnnnnnnnnnnnnnnnagaaaatctggtgagacatttctttacttgtcgcctattcgtgagaaagctggacaagggccaagtgaacaaagtgacatttttccccatcagcccagaagcagtgtaactagaaaattaacaatgcaaacaaaaccccctttctgaaagcwaacatttggcagaaaagacagtgagcaaagtcaagcaatcagggaagtgatcatccctgtgcactcagcactggtgaggctgcacctcaagtgctktgttcagttttgggccactcactacaagaaagacatggaggccctgaagtatgtccagagaaggacaacgaagctggtgaggggtstggagcacaggtgtgatggggagcgactgagggaactgggatggtttggtctacagaagaggaggcacatgcagtgcttaccgccagctggctcctggctgagatgaggctgtgtaa

SEQ ID NO: 17104 - DNA, 599 bp, Chicken  19866894224980_2
  misc_feature (1)..(52): n is any nucleotide
nnnnnnnnnnnnnnnnnnnnnnnnnnnnnnnnnnnnnnnnnnnnnnnnnnnnagaaaatctggtgagacatttctttacttgtcgcctattcgtgagaaagctggacaagggccaagtgaacaaagtgacatttttccccatcagcccagaagcagtgtaactagaaaattaacaatgcaaacaaaaccccctttctgaaagcwaacatttggcagaaaagacagtgagcaaagtcaagcaatcagggaagtgatcatccctgtgcactcagcactggtgaggctgcacctcaagtgctktgttcagttttgggccactcactacaagaaagacatggaggccctgaagtatgtccagagaaggacaacgaagctggtgaggggtstggagcacaggtgtgatggggagcgactgagggaactgggatggtttggtctacagaagaggaggcacatgcagtgcttaccgccagctggctcctggctgagatgaggctgtgtaatggtcatcaccctgaccagttctgggacaggggaaggatacacagaagctgtgtgtgatgatcggtcctggcactgggaccacacagaaagctgta

SEQ ID NO: 17105 - DNA, 541 bp, Chicken  19866894224980_3
agaaaatctggtgagacatttctttacttgtcgcctattcgtgagaaagctggacaagggccaagtgaacaaagtgacatttttccccatcagcccagaagcagtgtaactagaaaattaacaatgcaaacaaaaccccctttctgaaagcwaacatttggcagaaaagacagtgagcaaagtcaagcaatcagggaagtgatcatccctgtgcactcagcactggtgaggctgcacctcaagtgctktgttcagttttgggccactcactacaagaaagacatggaggccctgaagtastggagcacaggtgtgatggggagcgactgagggaactgggatggtttggtctacagaagaggaggcacatgcagtgcttaccgccagctggctcctggctgagatgaggctgtgtaatggtcatcaccctgaccagttctgggacaggggaaggatacacagaagctgtgtgtgatgatcggtcctggcactgggaccacacagaaagctgtagtgctgctccaccagtgcttccaaaata

SEQ ID NO: 17106 - DNA, 600 bp, Chicken  19866894224982_1
acccatcaagccactcaatctcatgcagttttactttaacacaatctaatctgctcctatgctgtaagatgcactttctttcccctctctgccgttctttcccctcaaccatttcctgttaacatcaccccttgtgccaatagcacagtgcaaacaactgctgaactgatgtaatgtgtttctctttcggttggagaacactgtcaggcagtacagtgccctggccttgcctactgcatggcagcatgagcccagcacaggcaaggcatgaaaacagggatggaaatcccaaggaggaargaaagaaggtattaccagcagaactgctgtaggtttgtgtcaggttattaagaaaagcgtatgtaaccacagactctgcattaagcatcacatgatccaagctttgccttctcctttctgaaaagaaaatacaattcattatgagaaaagctctgctctttatcagggaagtcctaccagctatcacgttgatgctttgaggctggaaattttcagaagattctgaaactgagaagtcacagttcttgagagaagtaaggacagcgagacagatagctgagacagaacagggcataaaaa

SEQ ID NO: 17107 - DNA, 377 bp, Chicken  19866894224983_1
taataaagctactacctaaagagagatttggcattacggtacctaccaattatgacatactacacagttccagctctcaaatccactttctctgatggatgagaccagtaagcgtctccatgaccaaatcatatctgtcatttgactaaacgctgcagttacacaaacagtgtctgaaatccagtttctcagtcacagggtttaggacaatatctgtacttacaccttagaacttctctgggtaagcgatacacagaattgtatttccatttatgcctttgagccttctaaattgacttygtctgatcctacaagcagtaagaacacatgcattccctatgcctttctctacagcagtgctacttctcatttccata

SEQ ID NO: 17108 - DNA, 599 bp, Chicken  19866894224992_1
  misc_feature (1)..(103): n is any nucleotide
nnnnnnnnnnnnnnnnnnnnnnnnnnnnnnnnnnnnnnnnnnnnnnnnnnnnnnnnnnnnnnnnnnnnnnnnnnnnnnnnnnnnnnnnnnnnnnnnnnnnnnnctgaaagactgaaagcatgagttatttttgtgctagctgacggagcaggtggtgggtggtatggaagcgttggttaaggaacaaatagagacttagaggttggactatggaagaacctcatgccaagcaatgaagttgcctgtttaagtaaaggcatgtgagatcaaatgttctgtgaggatgggtttgttgttgtygataccacacatctaaaattataattccttcgttgattgtgctccaacgttctgctcatcttttgttagacaatactgttcctactataaacttttcctttaccaagactaattggttaaaatatgtgggttgtgtcttgtaatctaaatctgtgctgtgagccatctgttgtgttttgaaaaagctttttttgtagttatccacacgtatgaactgcatctgaaaacgaagaagtagctgggagagggggaaaacaagtctgtcatttctattgtattagttgattaagtgcaggagc

SEQ ID NO: 17109 - DNA, 600 bp, Chicken  19866894224992_10
tctacmtgatcacccttgtcttttttccccctccaatttggtgtatgaarcttgaggataaagcttacctgtggtataacaagtcttctacctaacttcagaaatatccgtgagcttcatctagtagttcttccagagttggcccttggcgcaatagacaccatcaagttaggtcagttgctttaatttcatttcctggcttcttgytgcctaaccatcttctttcaggtttcacagcttgccttacggtgcatcttatcactcagtccaaattcagactgcattgaccatgacggatgyttgyagcttgatgcttcatgtgctcaaagagggttttggtccacgtgaaatcacttgaagttgtaatcttattttctcagttctggattccttttcagacagacaggattccattaaaccaagtggtactggagacagacagtgtcaactgtacgtaaggaatcaaaataaggataaaaggacttcaagcttgaacctgcaactgagtgaaaaggctgtgtttggatcagttgtgagggacagcgtgcagagctgctggcagccaggaggtttcctctgccctgttcctgtgctgtggaa

SEQ ID NO: 17110 - DNA, 600 bp, Chicken  19866894224992_11
cmtgatcacccttgtcttttttccccctccaatttggtgtatgaarcttgaggataaagcttacctgtggtataacaagtcttctacctaacttcagaaatatccgtgagcttcatctagtagttcttccagagttggcccttggcgcaatagacaccatcaagttaggtcagttgctttaatttcatttcctggcttcttgytgcctaaccatcttctttcaggtttcacagcttgccttacggtgcatcttatcactcagtccaaattcagactgcattgaccatgacggatgyttgyagcttgatgcttcatgtgctcaaagagggttttggtccacgtgaaatcacttgaagttgtaatcttattttctcagttctggattccttttcagacagacaggattccattaaaccaagtggtactggagacagacagtgtcaactgtacgtaaggaatcaaaataaggataaaaggacttcaagcttgaacctgcaactgagtgaaaaggctgtgtttggatcagttgtgagggacagcgtgcagagctgctggcagccaggaggtttcctctgccctgttcctgtgctgtggaaggtt

SEQ ID NO: 17111 - DNA, 600 bp, Chicken  19866894224992_12
gtgaaaaatgaggtatttttgtgactaaatgttgtgatacttgaatttttcaagctgttagcaggaaatgtgcgttttcatgtttaactcctttttgaataatgctaacatttatgctgctccttgttctgtttcctgcttctgacacagtagaatcttaatctgactttcttccttggagagaacaaatgccttggccaagagaaggggcttttatatttgtagatggcaaaataagaattaaaaagacgtatgaataattgttatttcagtgtaggctctaaaaagagactcatcagyatgccatgagataaatagttgagatcaaagttttgtggttgsaaattarttgtcaggagagttgccagcaatatttgtgtgtattcgtgtgtctgctttgaattgtgttatgcaatacgtagggatgggttctatttattgctgctttctttctgcttttcatagttaaattactttccctggagcccttaacccactatgactgaatgaagtggtggtgttcatccttgaaggacacmttgaactgatttgcagactggttctggtactggttttgtgcgtaggaacctcttggtgcag

SEQ ID NO: 17112 - DNA, 600 bp, Chicken  19866894224992_13
gaatttttcaagctgttagcaggaaatgtgcgttttcatgtttaactcctttttgaataatgctaacatttatgctgctccttgttctgtttcctgcttctgacacagtagaatcttaatctgactttcttccttggagagaacaaatgccttggccaagagaaggggcttttatatttgtagatggcaaaataagaattaaaaagacgtatgaataattgttatttcagtgtaggctctaaaaagagactcatcagcatgccatgagataaatagttgagatcaaagttttgtggttgsaaattarttgtcaggagagttgccagcaatatttgtgtgtattcgtgtgtctgctttgaattgtgttatgcaatacgtagggatgggttctatttattgctgctttctttctgcttttcatagttaaattactttccctggagcccttaacccactatgactgaatgaagtggtggtgttcatccttgaaggacacmttgaactgatttgcagactggttctggtactggttttgtgcgtaggaacctcttggtgcaggacatgatttctttcttgccttctggagcttcgattgttcaa

SEQ ID NO: 17113 - DNA, 600 bp, Chicken  19866894224992_14
tcaagctgttagcaggaaatgtgcgttttcatgtttaactcctttttgaataatgctaacatttatgctgctccttgttctgtttcctgcttctgacacagtagaatcttaatctgactttcttccttggagagaacaaatgccttggccaagagaaggggcttttatatttgtagatggcaaaataagaattaaaaagacgtatgaataattgttatttcagtgtaggctctaaaaagagactcatcagcatgccatgagataaatagttgagatcaaagttttgtggttgsaaattarttgtcaggagagttgccagcaatatttgtgtgtattcgtgtgtctgctttgaattgtgttatgcaatacgtagggatgggttctatttattgctgctttctttctgcttttcatagttaaattactttccctggagcccttaacccactatgactgaatgaagtggtggtgttcatccttgaaggacacmttgaactgatttgcagactggttctggtactggttttgtgcgtaggaacctcttggtgcaggacatgatttctttcttgccttctggagcttcgattgttcaataattga

SEQ ID NO: 17114 - DNA, 600 bp, Chicken  19866894224992_15
attaaaaagacgtatgaataattgttatttcagtgtaggctctaaaaagagactcatcagcatgccatgagataaatagttgagatcaaagttttgtggttgsaaattarttgtcaggagagttgccagcaatatttgtgtgtattcgtgtgtctgctttgaattgtgttatgcaatacgtagggatgggttctatttattgctgctttctttctgcttttcatagttaaattactttccctggagcccttaacccactatgactgaatgaagtggtggtgttcatccttgaaggacacmttgaactgatttgcagactggttctggtactggttttgtgcgtaggaacctcttggtgcaggacatgatttctttcttgccttctggagcttcgattgttcaataattgaatgargagcagaagttaaattccaggctgctagaagttgcactgaagkagagctgcttgagattcgtgcagggaggttgtcttgtggatttgttcacttcagaattggtttactactgtgttgcagatgcagcattactgctgcttggtcaataggggcaagggaaatgggagccatatacgagtgctta

SEQ ID NO: 17115 - DNA, 600 bp, Chicken  19866894224992_16
aggagagttgccagcaatatttgtgtgtattcgtgtgtctgctttgaattgtgttatgcaatacgtagggatgggttctatttattgctgctttctttctgcttttcatagttaaattactttccctggagcccttaacccactatgactgaatgaagtggtggtgttcatccttgaaggacacmttgaactgatttgcagactggttctggtactggttttgtgcgtaggaacctcttggtgcaggacatgatttctttcttgccttctggagcttcgattgttcaataattgaatgargagcagaagttaaattccaggctgctagaagttgcactgaagkagagctgcttgagattcgtgcagggaggttgtcttgtggatttgttcacttcagaattggtttactactgtgttgcagatgcagcattactgctgcttggtcaataggggcaagggaaatgggagccatatacgagtgcttaggttactggtttggtatgtattgatgcccatgctgctatccaaagctgcacgtgtttttgccacgtgatgctryatgggtgtgaggcatgttatttgttggctttgcatgtctgt

SEQ ID NO: 17116 - DNA, 600 bp, Chicken  19866894224992_17
ttgaattgtgttatgcaatacgtagggatgggttctatttattgctgctttctttctgcttttcatagttaaattactttccctggagcccttaacccactatgactgaatgaagtggtggtgttcatccttgaaggacacmttgaactgatttgcagactggttctggtactggttttgtgcgtaggaacctcttggtgcaggacatgatttctttcttgccttctggagcttcgattgttcaataattgaatgargagcagaagttaaattccaggctgctagaagttgcactgaagkagagctgcttgagattcgtgcagggaggttgtcttgtggatttgttcacttcagaattggtttactactgtgttgcagatgcagcattactgctgcttggtcaataggggcaagggaaatgggagccatatacgagtgcttaggttactggtttggtatgtattgatgcccatgctgctatccaaagctgcacgtgtttttgccacgtgatgctryatgggtgtgaggcatgttatttgttggctttgcatgtctgtcagcttttatacagcaagaatgtcagcacaaggtgcatccaag

SEQ ID NO: 17117 - DNA, 600 bp, Chicken  19866894224992_18
ttcttgccttctggagcttcgattgttcaataattgaatgargagcagaagttaaattccaggctgctagaagttgcactgaagkagagctgcttgagattcgtgcagggaggttgtcttgtggatttgttcacttcagaattggtttactactgtgttgcagatgcagcattactgctgcttggtcaataggggcaagggaaatgggagccatatacgagtgcttaggttactggtttggtatgtattgatgcccatgctgctatccaaagctgcacgtgtttttgccacgtgatgctryatgggtgtgaggcatgttatttgttggctttgcatgtctgtcagcttttatacagcaagaatgtcagcacaaggtgcatccaagtgaaaatgaagttgaccacaggagagagtagcaactgttgctatttgcaatccacacagtgattccttctctgcaatgtagttttggactacggtcctgctcagggagtcagcatctggtagagtgattacattttgaagggaattctgtaaccgtgttttcagagacttcagtgcaacatgttaagatcataatgcctgaaatggaaagagtgg

SEQ ID NO: 17118 - DNA, 600 bp, Chicken  19866894224992_19
tcttgccttctggagcttcgattgttcaataattgaatgargagcagaagttaaattccaggctgctagaagttgcactgaagkagagctgcttgagattcgtgcagggaggttgtcttgtggatttgttcacttcagaattggtttactactgtgttgcagatgcagcattactgctgcttggtcaataggggcaagggaaatgggagccatatacgagtgcttaggttactggtttggtatgtattgatgcccatgctgctatccaaagctgcacgtgtttttgccacgtgatgctryatgggtgtgaggcatgttatttgttggctttgcatgtctgtcagcttttatacagcaagaatgtcagcacaaggtgcatccaagtgaaaatgaagttgaccacaggagagagtagcaactgttgctatttgcaatccacacagtgattccttctctgcaatgtagttttggactacggtcctgctcagggagtcagcatctggtagagtgattacattttgaagggaattctgtaaccgtgttttcagagacttcagtgcaacatgttaagatcataatgcctgaaatggaaagagtggg

SEQ ID NO: 17119 - DNA, 600 bp, Chicken  19866894224992_2
aaatatgtgggttgtgtcttgtaatctaaatctgtgctgtgagccatctgttgtgttttgaaaaagctttttttgtagttatccacacgtatgaactgcatctgaaaacgaagaagtagctgggagagggggaaaacaagtctgtcatttctattgtattagttgattaagtgcaggagcacaactggcattgttctctgtgtttgggggagtgtgggaacagaagtgatatgagaatctgttatgttactgggtattgggccataggtcactctttatccattcttgcccctctagtcytccaattgtgttaatggcacaggatctctttggataagaagactgcaagaaagtcatggcaacctttctaaagctttagagcccacttctggttttggaagttacactgttacgggagcagtacccatgagctgtgttttaggattctgaatttgggttctgaattgctctttgggaatctaatgttctccttcctcagagatgactgtgattgcttattctgatctgttgttagagttactcagttgtgtatgytttgtatgcttctcagacacgtattctggcaagttatatgcatgg

SEQ ID NO: 17120 - DNA, 600 bp, Chicken  19866894224992_3
attgggccataggtcactctttatccattcttgcccctctagtcytccaattgtgttaatggcacaggatctctttggataagaagactgcaagaaagtcatggcaacctttctaaagctttagagcccacttctggttttggaagttacactgttacgggagcagtacccatgagctgtgttttaggattctgaatttgggttctgaattgctctttgggaatctaatgttctccttcctcagagatgactgtgattgcttattctgatctgttgttagagttactcagttgtgtatgytttgtatgcttctcagacacgtattctggcaagttatatgcatggagtatggactatagactgagatgacaactgctgatttgtgtatcatcatttcatagtgtgcttcagaaaatcrcatttgcaaaagagatcagaataacacaattgcttatgtaawgatacacaacttgaggttatttggcctgaggaagcttagtgtaaagctgttggtttccttacattcttgtcagtgctatgtaaaaattcctgtagaatttgcttctctttgttgggacggcacgcttctgaactagttgt

SEQ ID NO: 17121 - DNA, 600 bp, Chicken  19866894224992_4
ctttagagcccacttctggttttggaagttacactgttacgggagcagtacccatgagctgtgttttaggattctgaatttgggttctgaattgctctttgggaatctaatgttctccttcctcagagatgactgtgattgcttattctgatctgttgttagagttactcagttgtgtatgytttgtatgcttctcagacacgtattctggcaagttatatgcatggagtatggactatagactgagatgacaactgctgatttgtgtatcatcatttcatagtgtgcttcagaaaatcrcatttgcaaaagagatcagaataacacaattgcttatgtaawgatacacaacttgaggttatttggcctgaggaagcttagtgtaaagctgttggtttccttacattcttgtcagtgctatgtaaaaattcctgtagaatttgcttctctttgttgggacggcacgcttctgaactagttgtatgtaacttgtttcagtagcagtggtgtaggaaatggtgattttgtagagcatcccctgccaatttctgttcgatgtagaatccttatcttgtggaaagctgtaggattccaaatgag

SEQ ID NO: 17122 - DNA, 600 bp, Chicken  19866894224992_5
gagcagtacccatgagctgtgttttaggattctgaatttgggttctgaattgctctttgggaatctaatgttctccttcctcagagatgactgtgattgcttattctgatctgttgttagagttactcagttgtgtatgytttgtatgcttctcagacacgtattctggcaagttatatgcatggagtatggactatagactgagatgacaactgctgatttgtgtatcatcatttcatagtgtgcttcagaaaatcrcatttgcaaaagagatcagaataacacaattgcttatgtaawgatacacaacttgaggttatttggcctgaggaagcttagtgtaaagctgttggtttccttacattcttgtcagtgctatgtaaaaattcctgtagaatttgcttctctttgttgggacggcacgcttctgaactagttgtatgtaacttgtttcagtagcagtggtgtaggaaatggtgattttgtagagcatcccctgccaatttctgttcgatgtagaatccttatcttgtggaaagctgtaggattccaaatgagcgcagaaattggctcttggtaaagcagggggcctgaaaaagg

SEQ ID NO: 17123 - DNA, 600 bp, Chicken  19866894224992_6
agataaaaaggccattaatgtgttcctgctgtgatcgtttgccttattgcctttctcatttcctgaggctctgtaattaaaccattagcttgtgtaccatgccgtgagtctgctgtggtgagaggggatagatgatgacctgtttcgtgattcactaatatggcacgtcttggccttgcacagtttaagaaccaaacagaataactgaaaagcttttactgttcttgtgggtgttggagacactggaagcaatgcttttacttcttaattctatttgttttcttgttagctgaaaaaaamagctcactgaataacttggtgcatgaaatcagcgttgtctggctcagtctaatttctacmtgatcacccttgtcttttttccccctccaatttggtgtatgaarcttgaggataaagcttacctgtggtataacaagtcttctacctaacttcagaaatatccgtgagcttcatctagtagttcttccagagttggcccttggcgcaatagacaccatcaagttaggtcagttgctttaatttcatttcctggcttcttgytgcctaaccatcttctttcaggtttcacagcttgcctta

SEQ ID NO: 17124 - DNA, 600 bp, Chicken  19866894224992_7
tcctgaggctctgtaattaaaccattagcttgtgtaccatgccgtgagtctgctgtggtgagaggggatagatgatgacctgtttcgtgattcactaatatggcacgtcttggccttgcacagtttaagaaccaaacagaataactgaaaagcttttactgttcttgtgggtgttggagacactggaagcaatgcttttacttcttaattctatttgttttcttgttagctgaaaaaaamagctcactgaataacttggtgcatgaaatcagcgttgtctggctcagtctaatttctacmtgatcacccttgtcttttttccccctccaatttggtgtatgaarcttgaggataaagcttacctgtggtataacaagtcttctacctaacttcagaaatatccgtgagcttcatctagtagttcttccagagttggcccttggcgcaatagacaccatcaagttaggtcagttgctttaatttcatttcctggcttcttgytgcctaaccatcttctttcaggtttcacagcttgccttacggtgcatcttatcactcagtccaaattcagactgcattgaccatgacggatgyttgyag

SEQ ID NO: 17125 - DNA, 600 bp, Chicken  19866894224992_8
tgagtctgctgtggtgagaggggatagatgatgacctgtttcgtgattcactaatatggcacgtcttggccttgcacagtttaagaaccaaacagaataactgaaaagcttttactgttcttgtgggtgttggagacactggaagcaatgcttttacttcttaattctatttgttttcttgttagctgaaaaaaamagctcactgaataacttggtgcatgaaatcagcgttgtctggctcagtctaatttctacmtgatcacccttgtcttttttccccctccaatttggtgtatgaarcttgaggataaagcttacctgtggtataacaagtcttctacctaacttcagaaatatccgtgagcttcatctagtagttcttccagagttggcccttggcgcaatagacaccatcaagttaggtcagttgctttaatttcatttcctggcttcttgytgcctaaccatcttctttcaggtttcacagcttgccttacggtgcatcttatcactcagtccaaattcagactgcattgaccatgacggatgyttgyagcttgatgcttcatgtgctcaaagagggttttggtccacgtgaaa

SEQ ID NO: 17126 - DNA, 600 bp, Chicken  19866894224992_9
ttcttaattctatttgttttcttgttagctgaaaaaaamagctcactgaataacttggtgcatgaaatcagcgttgtctggctcagtctaatttctacmtgatcacccttgtcttttttccccctccaatttggtgtatgaarcttgaggataaagcttacctgtggtataacaagtcttctacctaacttcagaaatatccgtgagcttcatctagtagttcttccagagttggcccttggcgcaatagacaccatcaagttaggtcagttgctttaatttcatttcctggcttcttgytgcctaaccatcttctttcaggtttcacagcttgccttacggtgcatcttatcactcagtccaaattcagactgcattgaccatgacggatgyttgyagcttgatgcttcatgtgctcaaagagggttttggtccacgtgaaatcacttgaagttgtaatcttattttctcagttctggattccttttcagacagacaggattccattaaaccaagtggtactggagacagacagtgtcaactgtacgtaaggaatcaaaataaggataaaaggacttcaagcttgaacctgcaactgag

SEQ ID NO: 17127 - DNA, 599 bp, Chicken  19866894225005_1
  misc_feature (1)..(101): n is any nucleotide
nnnnnnnnnnnnnnnnnnnnnnnnnnnnnnnnnnnnnnnnnnnnnnnnnnnnnnnnnnnnnnnnnnnnnnnnnnnnnnnnnnnnnnnnnnnnnnnnnnnnntgctgatgacgtttttgttctgtcctcaataggactgtacataaatcagtaaactagagatgaaatggcccagattatgtttgtaatctcctgtgccatctgatctccatttaggaatgtagatttaattgttcttgtgtaggctggtagatattcatctatgatgtgggataggcagtcattaatattgttttggatygtgtatttcattttttgcactcttctgcccagagcataggatgcacatcaaatgctagtagatctgacttccactgaagtcartaacagtgagggcaaggcttgcctctaatgcaacattttattattccaaagaagtaattgttattgcatgctccgttttgccaagtatttttaataacttattaaaaaagaaraaaaaagaaaaaaaaaaagaaaaacaaaagaaaaacaaatgccttgtttagaaacgcttgtaatacttgtatcaaagctgtatcacaaattgaaatgcaatgt

SEQ ID NO: 17128 - DNA, 599 bp, Chicken  19866894225005_2
  misc_feature (1)..(18): n is any nucleotide
nnnnnnnnnnnnnnnnnntgctgatgacgtttttgttctgtcctcaataggactgtacataaatcagtaaactagagatgaaatggcccagattatgtttgtaatctcctgtgccatctgatctccatttaggaatgtagatttaattgttcttgtgtaggctggtagatattcatctatgatgtgggataggcagtcattaatattgttttggatygtgtatttcattttttgcactcttctgcccagagcataggatgcacatcaaatgctagtagatctgacttccactgaagtcartaacagtgagggcaaggcttgcctctaatgcaacattttattattccaaagaagtaattgttattgcatgctccgttttgccaagtatttttaataacttattaaaaaagaaraaaaaagaaaaaaaaaaagaaaaacaaaagaaaaacaaatgccttgtttagaaacgcttgtaatacttgtatcaaagctgtatcacaaattgaaatgcaatgttgctttttagagcgtcatacttgctggcactctttgttcccaaacacttacacgttttaaaacagagaatatcaacatgttgc

SEQ ID NO: 17129 - DNA, 600 bp, Chicken  19866894225005_3
ccatctgatctccatttaggaatgtagatttaattgttcttgtgtaggctggtagatattcatctatgatgtgggataggcagtcattaatattgttttggatygtgtatttcattttttgcactcttctgcccagagcataggatgcacatcaaatgctagtagatctgacttccactgaagtcartaacagtgagggcaaggcttgcctctaatgcaacattttattattccaaagaagtaattgttattgcatgctccgttttgccaagtatttttaataacttattaaaaaagaaraaaaaagaaaaaaaaaaagaaaaacaaaagaaaaacaaatgccttgtttagaaacgcttgtaatacttgtatcaaagctgtatcacaaattgaaatgcaatgttgctttttagagcgtcatacttgctggcactctttgttcccaaacacttacacgttttaaaacagagaatatcaacatgttgcaatagtatgtactctctttagaagtataaggctaagagatgagagcaagggggggaaatgtgtgtgtacattcttttaaagcaggacactatatcgtgagaaaactgctgtact

SEQ ID NO: 17130 - DNA, 599 bp, Chicken  19866894225020_1
  misc_feature (1)..(123): n is any nucleotide
nnnnnnnnnnnnnnnnnnnnnnnnnnnnnnnnnnnnnnnnnnnnnnnnnnnnnnnnnnnnnnnnnnnnnnnnnnnnnnnnnnnnnnnnnnnnnnnnnnnnnnnnnnnnnnnnnnnnnnnnnnngcagttcccttctcaccaccactttttagccatggccactaaaatgatcagagggctggagcacctctcctatgaggaaaggttgagagaactggtccttttcatcccaggccattctatgattctataacagttctaagatagctttgaatacttcttcatttgcctcttgagttraaggtactctttgctccttgggagcaacatggagatgtcagctggcagtgttcctgcttgtgtccaggatgatgrgattgcagcaagcagccctgggtctgtaagggtggcagccttgtgttactaccctgtcaatataacagccagtgctgctgtggttgatggatcgtaagagcagaaaattactctgcatttttagctaggctgctttcctttctcagcaagatgtaaatcagcttttgaagccatgtttctgatagcactgggatgtgggatgcagaaacctgtagggggggagt

SEQ ID NO: 17131 - DNA, 599 bp, Chicken  19866894225020_2
  misc_feature (1)..(48): n is any nucleotide
nnnnnnnnnnnnnnnnnnnnnnnnnnnnnnnnnnnnnnnnnnnnnnnngcagttcccttctcaccaccactttttagccatggccactaaaatgatcagagggctggagcacctctcctatgaggaaaggttgagagaactggtccttttcatcccaggccattctatgattctataacagttctaagatagctttgaatacttcttcatttgcctcttgagttraaggtactctttgctccttgggagcaacatggagatgtcagctggcagtgttcctgcttgtgtccaggatgatgrgattgcagcaagcagccctgggtctgtaagggtggcagccttgtgttactaccctgtcaatataacagccagtgctgctgtggttgatggatcgtaagagcagaaaattactctgcatttttagctaggctgctttcctttctcagcaagatgtaaatcagcttttgaagccatgtttctgatagcactgggatgtgggatgcagaaacctgtagggggggagtgcttcctcatccacctatactgcttgcatccttaaactgtgattaaccaggagcagctgaagatttataaaaaat

SEQ ID NO: 17132 - DNA, 600 bp, Chicken  19866894225020_3
atataacagccagtgctgctgtggttgatggatcgtaagagcagaaaattactctgcatttttagctaggctgctttcctttctcagcaagatgtaaatcagcttttgaagccatgtttctgatagcactgggatgtgggatgcagaaacctgtagggggggagtgcttcctcatccacctatactgcttgcatccttaaactgtgattaaccaggagcagctgaagatttataaaaaatagtaatgtatttcatattttaagacacaataatgagaaagaatagcaataacgatcagtstctggtatcattaattagaatttctggtaagtccattgaggaccaccaccctgtacttgtcctaacagcagaatgtgatttccgtgtgacactggcactgagatgagtgatgacccataagggctgagggaaagggtgacagagcagtaaggcaaaataattctttgttgctttattcttagaagttcagttcttttatgctcctcttcccccttgaggaaagcagaggttcttgtctccagctcattgagtcctgtgctgaaaattatggttgatcttaaccatgtcttcatagtccat

SEQ ID NO: 17133 - DNA, 569 bp, Chicken  19866894225021_1
gcaagcgtccctggtgcaaaaagcaagcaagcgtccctggtgcaaaaagcaagcaagcgtccctggtgcaaaaagcaagcaagcgtccctggtgcaaaatgcaactgctaccagtgcaaaaagcaagcatccctggtgcaaaatgcaaagcccacaggtataaaatgcaagtgttcctggtgcaaaatgcatctgctacccccagtgcaaaatggacaacaccactggtgcaaaaagcaagcatcccaggtagaaaatgcaaccgccccctccagtgcaaaatggaaacacctctggtgygagatgcaaccgcccaccggtgcaaaacggaaacatccccggtggaaaacgcaactgcccccgcctcggtgcaaaatgcaaacagctccggtgaaaaatgcaaccccccggtgcaaaatgcaggaggggagcaggctgcacgcacgtgcatgcacacgtgtgccggccgcgggcagcgcagcagtgccggcagcaccgcaggcagcggtggggttgagggttgctaagagactcgctgcctccggagggatgtggcacccggggggggg

SEQ ID NO: 17134 - DNA, 600 bp, Chicken  19866894225023_1
ggtctaacagcacatggatctattaaaacgctgaggcccagccatctaactgggtggttctcagagcaaatgaaagcagtgcagctcacactgcttccagaagcaccctcctggaaataagcaccttaacttgaaaccttacagtcttaaaatggaagtgaaggctaagtcacagtccacattctctccagctgaattcatttgataataggggcataatgcacagcacacgtatttattatcattacacatgaaagaggaaggatggcaaagctgacaggagtctacacaaatttattrccataggcttagctagtagaacacctcttcccttggtaaaagtactgtggcctccaagarcaccaaacttagtgatttaggcaaccactgmaatgacagccactggarcagttatgacttgcattgggcacaacctgcatgcaaaggagagctaggacaagtgcctgctgcattatcaagcacaggagggcacccatataagtgctacagcttaaaagatgagcatgcaaatgcccacaactttagagacttggaaaaggaaacttgaggtaaattggactgcacaggtaaacatgggtt

SEQ ID NO: 17135 - DNA, 600 bp, Chicken  19866894225023_2
tcagagcaaatgaaagcagtgcagctcacactgcttccagaagcaccctcctggaaataagcaccttaacttgaaaccttacagtcttaaaatggaagtgaaggctaagtcacagtccacattctctccagctgaattcatttgataataggggcataatgcacagcacacgtatttattatcattacacatgaaagaggaaggatggcaaagctgacaggagtctacacaaatttattrccataggcttagctagtagaacacctcttcccttggtaaaagtactgtggcctccaagarcaccaaacttagtgatttaggcaaccactgmaatgacagccactggarcagttatgacttgcattgggcacaacctgcatgcaaaggagagctaggacaagtgcctgctgcattatcaagcacaggagggcacccatataagtgctacagcttaaaagatgagcatgcaaatgcccacaactttagagacttggaaaaggaaacttgaggtaaattggactgcacaggtaaacatgggttcagatgtaatggcataagtaagagggatttagcactgactgcgactcctcacttatgctg

SEQ ID NO: 17136 - DNA, 569 bp, Chicken  19866894225023_3
tgcttccagaagcaccctcctggaaataagcaccttaacttgaaaccttacagtcttaaaatggaagtgaaggctaagtcacagtccacattctctccagctgaattcatttgataataggggcataatgcacagcacacgtatttattatcattacacatgaaagaggaaggatggcaaagctgacaggagtctacacaaatttattrccataggcttagctagtagaacacctcttcccttggtaaaagtactgtggcctccaagarcaccaaacttagtgatttaggcaaccactgmaatgacagccactggarcagttatgacttgcattgggcacaacctgcatgcaaaggagagctaggacaagtgcctgctgcattatcaagcacaggagggcacccatataagtgctacagcttaaaagatgagcatgcaaatgcccacaactttagagacttggaaaaggaaacttgaggtaaattggactgcacaggtaaacatgggttcagatgtaatggcataagtaagagggatttagcactgactgcgactcctcacttatgctg

SEQ ID NO: 17137 - DNA, 552 bp, Chicken  19866894225023_4
tcctggaaataagcaccttaacttgaaaccttacagtcttaaaatggaagtgaaggctaagtcacagtccacattctctccagctgaattcatttgataataggggcataatgcacagcacacgtatttattatcattacacatgaaagaggaaggatggcaaagctgacaggagtctacacaaatttattrccataggcttagctagtagaacacctcttcccttggtaaaagtactgtggcctccaagarcaccaaacttagtgatttaggcaaccactgmaatgacagccactggarcagttatgacttgcattgggcacaacctgcatgcaaaggagagctaggacaagtgcctgctgcattatcaagcacaggagggcacccatataagtgctacagcttaaaagatgagcatgcaaatgcccacaactttagagacttggaaaaggaaacttgaggtaaattggactgcacaggtaaacatgggttcagatgtaatggcataagtaagagggatttagcactgactgcgactcctcacttatgctg

SEQ ID NO: 17138 - DNA, 599 bp, Chicken  19866894225025_1
  misc_feature (1)..(62): n is any nucleotide
nnnnnnnnnnnnnnnnnnnnnnnnnnnnnnnnnnnnnnnnnnnnnnnnnnnnnnnnnnnnnncattgcctgggtatgcagaggcaaaattctgtcactgcaatcacaggaaaccacatcatagtccagaaacaaacagaacatttctaggtccttcccacacaccacaagccacagaagagttacagaatcctatcacaaaagtgcacagaaaactggaacacggcacagagaagccacagatactgaagacaacagcagtgcattgggcctcagtcgcagcagggaatttgatagacamgtgcacataaaagtctcataagtatgatttcctatgttacccagagaagcacagaccaccatgtagattaaaatatatcacatacacagggacagtctgtaagacagcactgctactgtgttgtgtggcttggaaatactctttttctgagctaaaatataaaagcagaataaaagggctccttccagctcctgagatttctgamagcaactggcactacttgttcactaagagagctaaaagtycatttgagaaagagttaacaagaggataattasaattagtagaactgtagtttt

SEQ ID NO: 17139 - DNA, 600 bp, Chicken  19866894225025_2
cacagaaaactggaacacggcacagagaagccacagatactgaagacaacagcagtgcattgggcctcagtcgcagcagggaatttgatagacamgtgcacataaaagtctcataagtatgatttcctatgttacccagagaagcacagaccaccatgtagattaaaatatatcacatacacagggacagtctgtaagacagcactgctactgtgttgtgtggcttggaaatactctttttctgagctaaaatataaaagcagaataaaagggctccttccagctcctgagatttctgamagcaactggcactacttgttcactaagagagctaaaagtycatttgagaaagagttaacaagaggataattasaattagtagaactgtagtttttatagatgtctcagccattaaatatgtggtaaatgatgtgtaatagaagctctgacacctcctgacrtattcaagctcatgagaaacaaactctctcacrtgtttccctccatgaggagaaaccccagcagaaacctctattctacagttctgcctttctgttcactaattatgtggctcatttagcgtgcctttcccaaatttta

SEQ ID NO: 17140 - DNA, 600 bp, Chicken  19866894225025_3
tgaagacaacagcagtgcattgggcctcagtcgcagcagggaatttgatagacamgtgcacataaaagtctcataagtatgatttcctatgttacccagagaagcacagaccaccatgtagattaaaatatatcacatacacagggacagtctgtaagacagcactgctactgtgttgtgtggcttggaaatactctttttctgagctaaaatataaaagcagaataaaagggctccttccagctcctgagatttctgamagcaactggcactacttgttcactaagagagctaaaagtycatttgagaaagagttaacaagaggataattasaattagtagaactgtagtttttatagatgtctcagccattaaatatgtggtaaatgatgtgtaatagaagctctgacacctcctgacrtattcaagctcatgagaaacaaactctctcacrtgtttccctccatgaggagaaaccccagcagaaacctctattctacagttctgcctttctgttcactaattatgtggctcatttagcgtgcctttcccaaattttacattaccatcctttcacaagcctttcaaatgagaaacagg

SEQ ID NO: 17141 - DNA, 600 bp, Chicken  19866894225025_4
cagcagggaatttgatagacamgtgcacataaaagtctcataagtatgatttcctatgttacccagagaagcacagaccaccatgtagattaaaatatatcacatacacagggacagtctgtaagacagcactgctactgtgttgtgtggcttggaaatactctttttctgagctaaaatataaaagcagaataaaagggctccttccagctcctgagatttctgamagcaactggcactacttgttcactaagagagctaaaagtycatttgagaaagagttaacaagaggataattasaattagtagaactgtagtttttatagatgtctcagccattaaatatgtggtaaatgatgtgtaatagaagctctgacacctcctgacrtattcaagctcatgagaaacaaactctctcacrtgtttccctccatgaggagaaaccccagcagaaacctctattctacagttctgcctttctgttcactaattatgtggctcatttagcgtgcctttcccaaattttacattaccatcctttcacaagcctttcaaatgagaaacaggtgttaaaatgatagctgagaaagttaggatatg

SEQ ID NO: 17142 - DNA, 600 bp, Chicken  19866894225025_5
attaaaatatatcacatacacagggacagtctgtaagacagcactgctactgtgttgtgtggcttggaaatactctttttctgagctaaaatataaaagcagaataaaagggctccttccagctcctgagatttctgamagcaactggcactacttgttcactaagagagctaaaagtycatttgagaaagagttaacaagaggataattasaattagtagaactgtagtttttatagatgtctcagccattaaatatgtggtaaatgatgtgtaatagaagctctgacacctcctgacrtattcaagctcatgagaaacaaactctctcacrtgtttccctccatgaggagaaaccccagcagaaacctctattctacagttctgcctttctgttcactaattatgtggctcatttagcgtgcctttcccaaattttacattaccatcctttcacaagcctttcaaatgagaaacaggtgttaaaatgatagctgagaaagttaggatatgtttatcaatggtatagacttacattgaagaaattggtcttgttcctctcacagaagaggccctgtgcaggcatgtgcttcagctgctg

SEQ ID NO: 17143 - DNA, 600 bp, Chicken  19866894225025_6
taagacagcactgctactgtgttgtgtggcttggaaatactctttttctgagctaaaatataaaagcagaataaaagggctccttccagctcctgagatttctgamagcaactggcactacttgttcactaagagagctaaaagtycatttgagaaagagttaacaagaggataattasaattagtagaactgtagtttttatagatgtctcagccattaaatatgtggtaaatgatgtgtaatagaagctctgacacctcctgacrtattcaagctcatgagaaacaaactctctcacrtgtttccctccatgaggagaaaccccagcagaaacctctattctacagttctgcctttctgttcactaattatgtggctcatttagcgtgcctttcccaaattttacattaccatcctttcacaagcctttcaaatgagaaacaggtgttaaaatgatagctgagaaagttaggatatgtttatcaatggtatagacttacattgaagaaattggtcttgttcctctcacagaagaggccctgtgcaggcatgtgcttcagctgctgccagggcacgccacttcccagcagcacatcacg

SEQ ID NO: 17144 - DNA, 600 bp, Chicken  19866894225026_1
tggtttaaattttcaataccttagaggagactgaattgttacaactgcaactacttggtgtggtttgcttcttcagagctgcatttaattctcattctgacatctcttgtatcatgtctgtagttgtcacttaaatcagaaagaacaaattctaagcaactgctgcactgaaatgagagcaaagcttgttctctatggggattcacaactgcctgagagatgcattcacattgcaatggacagggagaaattaaaatagtaagtaatataactacctgaagggaggttgtagtgagctgrgtggtcagcctcttttcttgtgtaactagtgataggacgagagggaatggcttcaagctgctccaggggagatcaggctgaacattaggaaatactacttctctgaaagggtggtcaggcactggaatgggctgcccagggaggtgrtggagtcactgaccctggaggtgttcaaggaacatttggacgttgtgttgagggacatggtttagtgagaactattggtgatgggtggatggttggactgggtgatcctgtgggtcttttccaaccttggtgattctatgattctaaggaata

SEQ ID NO: 17145 - DNA, 600 bp, Chicken  19866894225026_2
aattctaagcaactgctgcactgaaatgagagcaaagcttgttctctatggggattcacaactgcctgagagatgcattcacattgcaatggacagggagaaattaaaatagtaagtaatataactacctgaagggaggttgtagtgagctgrgtggtcagcctcttttcttgtgtaactagtgataggacgagagggaatggcttcaagctgctccaggggagatcaggctgaacattaggaaatactacttctctgaaagggtggtcaggcactggaatgggctgcccagggaggtgrtggagtcactgaccctggaggtgttcaaggaacatttggacgttgtgttgagggacatggtttagtgagaactattggtgatgggtggatggttggactgggtgatcctgtgggtcttttccaaccttggtgattctatgattctaaggaataagtatccacaggcttaatagctcagatatagatcagctcttgcttccatgtgtatgataattgttgagtcacgacctatagtaactgttgagtcatggttcagccactgattgagcacctgggaaaaggaccatttcagtcctggga

SEQ ID NO: 17146 - DNA, 600 bp, Chicken  19866894225026_3
atggttggactgggtgatcctgtgggtcttttccaaccttggtgattctatgattctaaggaataagtatccacaggcttaatagctcagatatagatcagctcttgcttccatgtgtatgataattgttgagtcacgacctatagtaactgttgagtcatggttcagccactgattgagcacctgggaaaaggaccatttcagtcctgggagcacaggtgaaggcaattcacctgtatgactggaagggacaaagcctggccccacctttcttagacctcatttaagggctgactgccrctggggaaggatttttggttggagatctctcctttgtggacttttccctgtgagcctagatctttggagatgggtgagtgcttttcctttgaaacaccrttccatctgcactagtccctttgctgttacagtcttgtatcatccttccactgcattaatctttctgattgtaacaccatgccagcctgaattcagcagtactggaattgcttttgcctaaaatgtagccaaagctaaacaaaccttacaaaacacagctggttctctgtaaaaaggtagctcaggggctcggtatcgctg

SEQ ID NO: 17147 - DNA, 600 bp, Chicken  19866894225026_4
agctcttgcttccatgtgtatgataattgttgagtcacgacctatagtaactgttgagtcatggttcagccactgattgagcacctgggaaaaggaccatttcagtcctgggagcacaggtgaaggcaattcacctgtatgactggaagggacaaagcctggccccacctttcttagacctcatttaagggctgactgccrctggggaaggatttttggttggagatctctcctttgtggacttttccctgtgagcctagatctttggagatgggtgagtgcttttcctttgaaacaccrttccatctgcactagtccctttgctgttacagtcttgtatcatccttccactgcattaatctttctgattgtaacaccatgccagcctgaattcagcagtactggaattgcttttgcctaaaatgtagccaaagctaaacaaaccttacaaaacacagctggttctctgtaaaaaggtagctcaggggctcggtatcgctgaggactggctccaatattgtgatgatagataagatagtaagtgctccttcaggctgctaaactggtcagtactgcgcacagagacatctgcataggtac

SEQ ID NO: 17148 - DNA, 600 bp, Chicken  19866894225037_1
agaatatagccctccttcaatcttccagccacataatccctctggacagagcaagcctttgccacttccttggaaaagccaaatttctgtcatcactgctgacaaggaatctataggaaagaggagcaggcacagagagagcatcaacagcagtctcaggcattccacctagccaaaagctccatccacccttgggtttaaccagtggaaagaagaggaactgcaacatctgcctcaagaggaattaaagaagtggaaagaagaggaagcaagtgaagaaacatcagcagtatggtgtaygtaatattaggaaccaaatctgagatttggatataggagtgcagtgagtccctaacattcatccaagcaagacagactgccaagccatctcattgcaaagctgtgaaagagatcacaaaacaataaccattccaattacagtattgcctgataatctcagctgggagccaagttyccatgcagtggtccctctgtttgccccacagcacaaggatatgggagactcctgcacaggtgggatgcccagctacacaaatgttctttcacaggcatggctccactcctgcaaccctagaaagg

SEQ ID NO: 17149 - DNA, 498 bp, Chicken  19866894225037_2
aaagctccatccacccttgggtttaaccagtggaaagaagaggaactgcaacatctgcctcaagaggaattaaagaagtggaaagaagaggaagcaagtgaagaaacatcagcagtatggtgtaygtaatattaggaaccaaatctgagatttggatataggagtgcagtgagtccctaacattcatccaagcaagacagactgccaagccatctcattgcaaagctgtgaaagagatcacaaaacaataaccattccaattacagtattgcctgataatctcagctgggagccaagttyccatgcagtggtccctctgtttgccccacagcacaaggatatgggagactcctgcacaggtgggatgcccagctacacaaatgttctttcacaggcatggctccactcctgcaaccctagaaaggtttgaaacctagcatgagtttctctgaagaatgtgggggtgggtggaatgcctctcttgtcatctggaaagag

SEQ ID NO: 17150 - DNA, 600 bp, Chicken  19866894225040_1
gtgatctggcagaactgagaatcaaacagaatgccccaactggatctaagaacatcttgtcaaatttttatttcttgggaaataacaggacaaggtcccattacaatacagtatttgaagtcagtcattctctttacaaagagcttcaatcacttccagcctgctgggtcagtgggagaggtgctcaaacaccaacctcaaaaccaagccacacacgatgagtaacagagctagattttgatcaacttgttttgatcaaagcatggcttgcctgatcaggtcctgccatcctccccatcyctctgactcaaaaaggagaagtcctcactggtaacagaactgacagtgtttctacttagtaaagcactcacatgcagagcagagtatccccttttgtaccttctgctccggggaagattaagagaagtggcagtaaaaactgtgaatcaaaatctggtactgactctagactctacagttccctttggaaattaatcttattaaactgcatgacctcagtgcattgagccacagagcctgagattgaacacccatgcatttagtggtctagaagcaggattctcctatgcttacctgtct

SEQ ID NO: 17151 - DNA, 600 bp, Chicken  19866894225045_1
tgtgaggagaaggtggttggtgatgatggactgaagcacagcctggctgcatggaggcctttctggacaagtccaagtatgtctgagaaggatgcttggatgtgtgctggtgacaccatggcagtgggaggcagctgtgtggggaggtttctgccttaaccttattcttgctggaagcgagaagagccagttctttctgaaggcacatttggcttctgtggctgttagctgcttctcaccagtttagctggtggtctgtgtgtagggcatggagggtagcacgtggggctcagctcttcyccattcctgcctgtgggtgcaggaagcactgcctgcaagccctgccatgctgctttctgcctgtggtatgttggcgtgggtgcctcatctgactgcacggcatctgggtgaggccctgyagagccctgctgcgttgtgctggcagcaccccggggctgggctgggcagsctggtgtgctcctgctcccctcttgtctcaggatgctgtttttggctgcccctgagtgccacgggcagcccctgccccttcctggggggtggctgtgagtccctttgtctgctcaccgagcagctgctggg

SEQ ID NO: 17152 - DNA, 600 bp, Chicken  19866894225045_2
ggcagtgggaggcagctgtgtggggaggtttctgccttaaccttattcttgctggaagcgagaagagccagttctttctgaaggcacatttggcttctgtggctgttagctgcttctcaccagtttagctggtggtctgtgtgtagggcatggagggtagcacgtggggctcagctcttcyccattcctgcctgtgggtgcaggaagcactgcctgcaagccctgccatgctgctttctgcctgtggtatgttggcgtgggtgcctcatctgactgcacggcatctgggtgaggccctgyagagccctgctgcgttgtgctggcagcaccccggggctgggctgggcagsctggtgtgctcctgctcccctcttgtctcaggatgctgtttttggctgcccctgagtgccacgggcagcccctgccccttcctggggggtggctgtgagtccctttgtctgctcaccgagcagctgctggggatgctctgtcttctgcctcccacctgtgctctgcccatgggaggtgatggggctccaagggctgatttggggccgcttctgcagggcttttggctccctttctgggctggagctgccc

SEQ ID NO: 17153 - DNA, 600 bp, Chicken  19866894225045_3
gctggaagcgagaagagccagttctttctgaaggcacatttggcttctgtggctgttagctgcttctcaccagtttagctggtggtctgtgtgtagggcatggagggtagcacgtggggctcagctcttcyccattcctgcctgtgggtgcaggaagcactgcctgcaagccctgccatgctgctttctgcctgtggtatgttggcgtgggtgcctcatctgactgcacggcatctgggtgaggccctgyagagccctgctgcgttgtgctggcagcaccccggggctgggctgggcagsctggtgtgctcctgctcccctcttgtctcaggatgctgtttttggctgcccctgagtgccacgggcagcccctgccccttcctggggggtggctgtgagtccctttgtctgctcaccgagcagctgctggggatgctctgtcttctgcctcccacctgtgctctgcccatgggaggtgatggggctccaagggctgatttggggccgcttctgcagggcttttggctccctttctgggctggagctgcccgtactcccacgtggcgctggctgagcaagtgctgctgctgcctgccttcc

SEQ ID NO: 17154 - DNA, 585 bp, Chicken  19866894225046_1
atcagtagcacagagtctggctggaagccaatcactggtggtgcaccccaggggctgacactgaggccaatattgtttagcatcttcattaacaatgtgggttatgggatggattttgcagatacaaaactgggaggagtggctgacagatcaggccagctgggacctcatgaagttaatcaaggaaaacactgtgtccttcacatgaatgggaataatgtcacacacactgaaacaagctgggggccaaatgacctggggaaacctctgcagagaaggagctaggggttctggtggacmccaggtggaatataagccagcaatatgacagaaaatgccaacagccccctgggatgcattagaaggagcactatcaacaggtagaggaaggttgacttcctgtcaactctgcactggcaaggctacatcaggagtactgagaccatttctgggacaagagacagatgtacacactggagtgagcacacccaaaggccacaaagaatatcaggggtttggggcatctgatatatgtggtgggactaaacagctgggactcttcagcttgtaacagaaaaggcccca

SEQ ID NO: 17155 - DNA, 599 bp, Chicken  19866894225047_1
  misc_feature (1)..(133): n is any nucleotide
nnnnnnnnnnnnnnnnnnnnnnnnnnnnnnnnnnnnnnnnnnnnnnnnnnnnnnnnnnnnnnnnnnnnnnnnnnnnnnnnnnnnnnnnnnnnnnnnnnnnnnnnnnnnnnnnnnnnnnnnnnnnnnnnnnnnnaaatttgtaaaagaaatatgcatgtaatggttttgttttaaaaagaataatttgaggtacattattcagcaacatgaattcaatcaaataaataattttaaaaatggcccttataatagatatgagttaatgagtatagtacaattaaggagactttgtttaatcayatatttagatgctagaaaatatcttccttccaaatgcactcctgaagaatatgcacacaattttaattttagtcttggaggcatttctcccaacagattagttttaaatgtcaatgttccagactctagccaaatgcagcacatgaaactgtgataataagaaatgtgaaggctgtacagcatctataatgcattaatatacactgccttctaacatttcttacatgaaatatctaggtagaacactgaggctttttccatcagtttctcatcagttgctaattggtagtcagaatgat

SEQ ID NO: 17156 - DNA, 600 bp, Chicken  19866894225047_2
tatgcacacaattttaattttagtcttggaggcatttctcccaacagattagttttaaatgtcaatgttccagactctagccaaatgcagcacatgaaactgtgataataagaaatgtgaaggctgtacagcatctataatgcattaatatacactgccttctaacatttcttacatgaaatatctaggtagaacactgaggctttttccatcagtttctcatcagttgctaattggtagtcagaatgattattatctctattatttcctcatgctctttttctccatatttctgcacartcttactccttctccaaatctatcattactcagtctttcagagaaaagctaaacaaaaccttggggatttattttctcttctctgttcagacctctttcccatttacctcaggtgaaccatcttggctaccttcatggacaaagtgaaatagcctctgttggactattctgaagggaaggtcacagctcctagtctcacagaaacatgaagttttcaaatgccgtcacacataggcaccatggtttccctatttcatagccaaagcttgtacttatcatcacatatattcagtcattaaa

SEQ ID NO: 17157 - DNA, 600 bp, Chicken  19866894225048_1
tatgtcactgctgggcctgacattttccataatgacactaggtaaagatctattgtttctgcagagcaagtgggtttcatagatattgttgaatagctccagtggaggtgactttcaagcacagggtacttatgcatttaacagactgggatgcaattcatcttgctttgcacaccggttcccagccaaactgacaaggagtgaagaaggccatttccctgccagcttcctccctttttccttccagtcttggaggtggtttgtaggatgatctgattgccctgccctgggaaactgtcytaatccaaacgctgctgtgtttctaaagcactttctaaaaggaccagtggaaaaagtgagtgttcagattataatcagaaggaaaggcatggtgaaagctctggaaaatgccttacagagagtggtttagatcacatcttggtgaaaagaatattgagaggtcttttaataacaatgtaattttacaggaataaaacaaaggatactaaaaggctgttcaaatcctttgggaataggcataataagtttggagtgcctgaatagcacttgcacatggatagattctccatctctcaatgt

SEQ ID NO: 17158 - DNA, 599 bp, Chicken  19866894225050_1
  misc_feature (1)..(109): n is any nucleotide
nnnnnnnnnnnnnnnnnnnnnnnnnnnnnnnnnnnnnnnnnnnnnnnnnnnnnnnnnnnnnnnnnnnnnnnnnnnnnnnnnnnnnnnnnnnnnnnnnnnnnnnnnnnnnttctttcccccctttaatctaaataaaactgagctgcttttttttttttcccccttggctggaactggctgaagttgcaacatcttctcctctggggtccctcggctcccatgacaccgcgtttactcacaggccagattatcatcacagagcccttttttttcccagcacatggctagaattaggcagcrcgcacatggggagcccgtcgtccccagcctgtaaacagccaatgataaaacacagaggttggaaatctgaaactgcggggacygggaagccctcggggtcccacgggccatccctggagcataaacctcctttkgcacatcagcttgcagatgcaaacgtggtcctgacgcttcacccccgtgccggtgacgccaagggatgctcagccctaatccccccctctttccccctctggtttaagcccacgggagacagaggaaatgagtgacccatctagcgcgagttcaaaataaaatga

SEQ ID NO: 17159 - DNA, 599 bp, Chicken  19866894225050_2
  misc_feature (1)..(26): n is any nucleotide
nnnnnnnnnnnnnnnnnnnnnnnnnnttctttcccccctttaatctaaataaaactgagctgcttttttttttttcccccttggctggaactggctgaagttgcaacatcttctcctctggggtccctcggctcccatgacaccgcgtttactcacaggccagattatcatcacagagcccttttttttcccagcacatggctagaattaggcagcrcgcacatggggagcccgtcgtccccagcctgtaaacagccaatgataaaacacagaggttggaaatctgaaactgcggggacygggaagccctcggggtcccacgggccatccctggagcataaacctcctttkgcacatcagcttgcagatgcaaacgtggtcctgacgcttcacccccgtgccggtgacgccaagggatgctcagccctaatccccccctctttccccctctggtttaagcccacgggagacagaggaaatgagtgacccatctagcgcgagttcaaaataaaatgaaacatctgtttggagyrgggccagcgttataaataatccccccagccttgagtgttggtattcgtggccctttgggttgcgca

SEQ ID NO: 17160 - DNA, 600 bp, Chicken  19866894225050_3
aaactgagctgcttttttttttttcccccttggctggaactggctgaagttgcaacatcttctcctctggggtccctcggctcccatgacaccgcgtttactcacaggccagattatcatcacagagcccttttttttcccagcacatggctagaattaggcagcrcgcacatggggagcccgtcgtccccagcctgtaaacagccaatgataaaacacagaggttggaaatctgaaactgcggggacygggaagccctcggggtcccacgggccatccctggagcataaacctcctttkgcacatcagcttgcagatgcaaacgtggtcctgacgcttcacccccgtgccggtgacgccaagggatgctcagccctaatccccccctctttccccctctggtttaagcccacgggagacagaggaaatgagtgacccatctagcgcgagttcaaaataaaatgaaacatctgtttggagyrgggccagcgttataaataatccccccagccttgagtgttggtattcgtggccctttgggttgcgcaygctccccccgcttccgctggtggaaagaaggccgggcacggggctgctccc

SEQ ID NO: 17161 - DNA, 600 bp, Chicken  19866894225050_4
cgtcgtccccagcctgtaaacagccaatgataaaacacagaggttggaaatctgaaactgcggggacygggaagccctcggggtcccacgggccatccctggagcataaacctcctttkgcacatcagcttgcagatgcaaacgtggtcctgacgcttcacccccgtgccggtgacgccaagggatgctcagccctaatccccccctctttccccctctggtttaagcccacgggagacagaggaaatgagtgacccatctagcgcgagttcaaaataaaatgaaacatctgtttggagyrgggccagcgttataaataatccccccagccttgagtgttggtattcgtggccctttgggttgcgcaygctccccccgcttccgctggtggaaagaaggccgggcacggggctgctccccggagccaacagacctggcgccggctgtgggaaaaccctgggaagggagcaaggagctcacttgtggtcaggaaggagggatggggggccttgctcttcgtcccttttggtcacctggaccaagctgtggcattgcacacaatgtgagatgctcgtgtgggcggtaggatgtgctgagccc

SEQ ID NO: 17162 - DNA, 600 bp, Chicken  19866894225050_5
gtcgtccccagcctgtaaacagccaatgataaaacacagaggttggaaatctgaaactgcggggacygggaagccctcggggtcccacgggccatccctggagcataaacctcctttkgcacatcagcttgcagatgcaaacgtggtcctgacgcttcacccccgtgccggtgacgccaagggatgctcagccctaatccccccctctttccccctctggtttaagcccacgggagacagaggaaatgagtgacccatctagcgcgagttcaaaataaaatgaaacatctgtttggagyrgggccagcgttataaataatccccccagccttgagtgttggtattcgtggccctttgggttgcgcaygctccccccgcttccgctggtggaaagaaggccgggcacggggctgctccccggagccaacagacctggcgccggctgtgggaaaaccctgggaagggagcaaggagctcacttgtggtcaggaaggagggatggggggccttgctcttcgtcccttttggtcacctggaccaagctgtggcattgcacacaatgtgagatgctcgtgtgggcggtaggatgtgctgagcccc

SEQ ID NO: 17163 - DNA, 600 bp, Chicken  19866894225050_6
gggaagccctcggggtcccacgggccatccctggagcataaacctcctttkgcacatcagcttgcagatgcaaacgtggtcctgacgcttcacccccgtgccggtgacgccaagggatgctcagccctaatccccccctctttccccctctggtttaagcccacgggagacagaggaaatgagtgacccatctagcgcgagttcaaaataaaatgaaacatctgtttggagyrgggccagcgttataaataatccccccagccttgagtgttggtattcgtggccctttgggttgcgcaygctccccccgcttccgctggtggaaagaaggccgggcacggggctgctccccggagccaacagacctggcgccggctgtgggaaaaccctgggaagggagcaaggagctcacttgtggtcaggaaggagggatggggggccttgctcttcgtcccttttggtcacctggaccaagctgtggcattgcacacaatgtgagatgctcgtgtgggcggtaggatgtgctgagccccagagttcactccctgcaggcagtgaccccccccaggggtacaaatgtgcctcctgggagcgtttcat

SEQ ID NO: 17164 - DNA, 600 bp, Chicken  19866894225062_1
ggaaaaggcacaacaacgcatacattctcgtcaaggagatttacagaaaacagcggagtgctagcaaattatatcagcggtcatgctgcacatgcaagattggtcctgcaaagtactcaagaaaacaatcttccccaccaaaactccaaaacaaaacctcaaaaatagcattccaaattagagctgcttttcaccacatggctgagaaacacatctgcaaacttggacttcctctctgacacatttcaaacttctgccatctactaactactgacatgctcaaactgttaaaaaatgtaytttttttttttagtaatggaaaaagtatttttcacccctcatttccaaaaacagctggagcagtttggcataaatgttcaaaaaatacctcaactagtaaaggactgccaaattccaaaagaaaggtaaaacgactgggaagaaggacaagccactgaaaatctttccttaaaatggaaacacttgtgcaatttcaactacctaatamaagcattattatgtcctctgaaagtgaaaaattcaaaagctctctttcaagtggacacttaggctacagtctgaaggcctctcaatttcagt

SEQ ID NO: 17165 - DNA, 600 bp, Chicken  19866894225062_2
acacatctgcaaacttggacttcctctctgacacatttcaaacttctgccatctactaactactgacatgctcaaactgttaaaaaatgtattttttttttttagtaatggaaaaagtatttttcacccctcatttccaaaaacagctggagcagtttggcataaatgttcaaaaaatacctcaactagtaaaggactgccaaattccaaaagaaaggtaaaacgactgggaagaaggacaagccactgaaaatctttccttaaaatggaaacacttgtgcaatttcaactacctaatamaagcattattatgtcctctgaaagtgaaaaattcaaaagctctctttcaagtggacacttaggctacagtctgaaggcctctcaatttcagtcttargaaaaatcaaaggagtttatcttaaaagacrgagcttaaaagcagcaggttctgctttagcataaagactttcccgtatcctgcaatctttcacacaagcatttgaaaaacaatacagaaacctgtattttgtagaagccttaaacttttactgatctccatttctctttagtccccgttttgttagagtctttgcaagacrt

SEQ ID NO: 17166 - DNA, 600 bp, Chicken  19866894225062_3
ttttttagtaatggaaaaagtatttttcacccctcatttccaaaaacagctggagcagtttggcataaatgttcaaaaaatacctcaactagtaaaggactgccaaattccaaaagaaaggtaaaacgactgggaagaaggacaagccactgaaaatctttccttaaaatggaaacacttgtgcaatttcaactacctaatamaagcattattatgtcctctgaaagtgaaaaattcaaaagctctctttcaagtggacacttaggctacagtctgaaggcctctcaatttcagtcttargaaaaatcaaaggagtttatcttaaaagacrgagcttaaaagcagcaggttctgctttagcataaagactttcccgtatcctgcaatctttcacacaagcatttgaaaaacaatacagaaacctgtattttgtagaagccttaaacttttactgatctccatttctctttagtccccgttttgttagagtctttgcaagacrtgccacaggctcaggattaagaaataacaacaacaacaacagacagcgactatatagaaaaagaatccaattcaaccgccctttcaacttacaaaaac

SEQ ID NO: 17167 - DNA, 600 bp, Chicken  19866894225062_4
cctcatttccaaaaacagctggagcagtttggcataaatgttcaaaaaatacctcaactagtaaaggactgccaaattccaaaagaaaggtaaaacgactgggaagaaggacaagccactgaaaatctttccttaaaatggaaacacttgtgcaatttcaactacctaatamaagcattattatgtcctctgaaagtgaaaaattcaaaagctctctttcaagtggacacttaggctacagtctgaaggcctctcaatttcagtcttargaaaaatcaaaggagtttatcttaaaagacrgagcttaaaagcagcaggttctgctttagcataaagactttcccgtatcctgcaatctttcacacaagcatttgaaaaacaatacagaaacctgtattttgtagaagccttaaacttttactgatctccatttctctttagtccccgttttgttagagtctttgcaagacrtgccacaggctcaggattaagaaataacaacaacaacaacagacagcgactatatagaaaaagaatccaattcaaccgccctttcaacttacaaaaacgtgcctcatagggaccataaaatccatgtaa

SEQ ID NO: 17168 - DNA, 469 bp, Chicken  19866894225062_5
maagcattattatgtcctctgaaagtgaaaaattcaaaagctctctttcaagtggacacttaggctacagtctgaaggcctctcaatttcagtcttargaaaaatcaaaggagtttatcttaaaagacrgagcttaaaagcagcaggttctgctttagcataaagactttcccgtatcctgcaatctttcacacaagcatttgaaaaacaatacagaaacctgtattttgtagaagccttaaacttttactgatctccatttctctttagtccccgttttgttagagtctttgcaagacrtgccacaggctcaggattaagaaataacaacaacaacaacagacagcgactatatagaaaaagaatccaattcaaccgccctttcaacttacaaaaacgtgcctcatagggaccataaaatccatgtaattacctgctgcagggatctgtaactgcctgactggtgatg

SEQ ID NO: 17169 - DNA, 600 bp, Chicken  19866894225074_1
cccgcatatcaccacctacctgctgacatcagtgcttgcagaggacgagcatctccaggaggcacaaacaggcagcccaggctctttccctgcccttaaatcacctccaacccaaccaagctgcagtgcctgcccagcaggttggatgctgagggttcccggccatcagtgccaaattgaccccacctgggaggggagcacaggtggggatggatggctgagagcctcgttggcccaggtgctgctggttctgctggtgctgagcccctgcactggagttaaagagcttctgtgctgacygaggctgtcattgtgtttggctgctaaggcagcacggtttgctttgcagggattttcttgcctcatagaccgaacggtgcttcaagtcctgctagctgtggaaaagcccttctctctagcaagtgtgactgatgggctctctgtccgtccccaccgctctttccatgccaccacgcacggctgctccttccatttcacgtatgcactttgctcagcactgcattatgtgcatcacattcgtgctttcgctttgcttccaataggcctgagtgaaggttctgcaggatgagctctgtgcta

SEQ ID NO: 17170 - DNA, 600 bp, Chicken  19866894225086_1
ggatggactttgatgtgcatgccaacagcagagttataaagccgtaattccattgctagtggtctctagctagaggttcctttaccagaaatacagtttatggcatgcttgcctctagctggtgtgctacacagaacaggcaggaagtctttcccttgtcttttatccttggacatgctaccctaacatcccacatcatttgcaaatacaaaattcctaagggatgctcagacaaacatgcctgctgaaaaagatctctacacacccataaagaatacagtttaaaaacaaaacaagccsattctctctctttatctctaatcttttatacaagcacttactcaggtcaaggttgaactaacttaagagaaggtctctaagtcctctgaaaggcactgtgagtattatcttgtgtttgcatttaattactcagccaaagctctccaatctgtactattacctgtttagtagagcagcaccctgaaggctgagcaccacaacccatgggacgttctgatgcaaaccatcaccaaccacagctcccaaattcatggcagctctgcgtgacatgaggaacacgaacaaaagagctccaagtcc

SEQ ID NO: 17171 - DNA, 600 bp, Chicken  19866894225087_1
tgcagcctcagtagttgaactttccctctcacttttctcttctaagcctcattgttttagatgtgggcacggaagaatgtggtctgaggaaacttaagccccatgaaaacaatacacttaagcatgccaccactcttaccttcccatcttgcatactcatacccttctttaggttgtctcatgttgttgttaatcacggcatttcatgctaggtgctataatgctgctgtgaatgagtggctcagtgggacagaaaggatattagggacatagcagttttcagactgtctagtctgtaayggttttgagcaaacaattgtgcttacrtgtttggactttgctgtcactgctctytgaaagcattaaaaaaaatccaatatcctatcaagacaattatatgtagttaaagcaagaggctttgaaagcatcgtgtatgtgctcaagtaactcatttactgcaascgttattattggataaatagagtaaacagtcatgatgcttaaatgcatgtaaggttgttttttcaagtgacttcagaagaaaagtttgagacctaatttgcacattcatcttactagtgtgagtattcaatttaaaaa

SEQ ID NO: 17172 - DNA, 600 bp, Chicken  19866894225087_2
ctcacttttctcttctaagcctcattgttttagatgtgggcacggaagaatgtggtctgaggaaacttaagccccatgaaaacaatacacttaagcatgccaccactcttaccttcccatcttgcatactcatacccttctttaggttgtctcatgttgttgttaatcacggcatttcatgctaggtgctataatgctgctgtgaatgagtggctcagtgggacagaaaggatattagggacatagcagttttcagactgtctagtctgtaayggttttgagcaaacaattgtgcttacrtgtttggactttgctgtcactgctctytgaaagcattaaaaaaaatccaatatcctatcaagacaattatatgtagttaaagcaagaggctttgaaagcatcgtgtatgtgctcaagtaactcatttactgcaascgttattattggataaatagagtaaacagtcatgatgcttaaatgcatgtaaggttgttttttcaagtgacttcagaagaaaagtttgagacctaatttgcacattcatcttactagtgtgagtattcaatttaaaaatatcattatatttagactgcttgtgat

SEQ ID NO: 17173 - DNA, 600 bp, Chicken  19866894225087_3
ttttagatgtgggcacggaagaatgtggtctgaggaaacttaagccccatgaaaacaatacacttaagcatgccaccactcttaccttcccatcttgcatactcatacccttctttaggttgtctcatgttgttgttaatcacggcatttcatgctaggtgctataatgctgctgtgaatgagtggctcagtgggacagaaaggatattagggacatagcagttttcagactgtctagtctgtaayggttttgagcaaacaattgtgcttacrtgtttggactttgctgtcactgctctytgaaagcattaaaaaaaatccaatatcctatcaagacaattatatgtagttaaagcaagaggctttgaaagcatcgtgtatgtgctcaagtaactcatttactgcaascgttattattggataaatagagtaaacagtcatgatgcttaaatgcatgtaaggttgttttttcaagtgacttcagaagaaaagtttgagacctaatttgcacattcatcttactagtgtgagtattcaatttaaaaatatcattatatttagactgcttgtgatctgattcggaatattgagtttaagcct

SEQ ID NO: 17174 - DNA, 600 bp, Chicken  19866894225087_4
ccttctttaggttgtctcatgttgttgttaatcacggcatttcatgctaggtgctataatgctgctgtgaatgagtggctcagtgggacagaaaggatattagggacatagcagttttcagactgtctagtctgtaayggttttgagcaaacaattgtgcttacrtgtttggactttgctgtcactgctctytgaaagcattaaaaaaaatccaatatcctatcaagacaattatatgtagttaaagcaagaggctttgaaagcatcgtgtatgtgctcaagtaactcatttactgcaascgttattattggataaatagagtaaacagtcatgatgcttaaatgcatgtaaggttgttttttcaagtgacttcagaagaaaagtttgagacctaatttgcacattcatcttactagtgtgagtattcaatttaaaaatatcattatatttagactgcttgtgatctgattcggaatattgagtttaagcctcaaagagtgttctgtcttcaaagagagcctcaggatccaaaatttccacattctacctttgagtcaagcttttactactctcagatttgcaaaggtttaaacaactat

SEQ ID NO: 17175 - DNA, 600 bp, Chicken  19866894225094_1
agtgatgggcactcctgaatgctgccccttctgctcttcatagtttgaagaattcctcagcatatgagcacgatcacttctcaggtggtaaggcagagcacagtcctacaagtggtttggggtgaaaagcaagtaccaccaaggcccacattcctctgcaagaagaacatcttaagccaataaccacacttcccagaaatgcagctgacagtagcaggactggttgtgtgcaggcagtgtggcatagttatatcttggtgtttgtgaggccaggactggcagaaaaatctttcttgtggygctcacgtgaacaagaaccccatgcaacaaagcgtgtgggggagagaagcagatcctcactgcagtgagatgtggctttcaacagctggaggtctccgttcgtcccaaggtaagagagggcagtgacttcccatatggcactttacctatgccatgggattattttccaggggggggaagagggaggtgtttttaaaataagatggagtaacttcaaaccccaaatatttctgtgaaactaagagaagggagagtttacccgcagttgctgagaggtgctctcatggggctagtcatagg

SEQ ID NO: 17176 - DNA, 600 bp, Chicken  19866894225095_1
atttattctctgaaagaggggtcagttgctggaatggctgcccagggagtggtgcagacaccatccctggaggagttcaagcaatatgtggagacattgcacaaagggacatggtttagtggggaaatatggactagatgatcgtggaggtcttttccaaccttggtgattctatgattctaagacaaaacttggaagaagcttagctcttactctgagatttacctaacgaaccaacagcaagccaattgaagcattaaactgaggtttctatgctacaagcccaaagctcagctctgwcacagaaccccagtgaaactgcagcagttcatgtgttctccctaggtcacagtttktccaccaacagtatggtttagtaataaggtctgcctttctgccaatgggaaggcaactgttcaaagcaygaagagatttttaggctattttccagactagtttcctatttactatatgtaattctccctggaacgatacgctaatgaagtactttactttagagcatcacttatgcatgaaagccttgcctgtaacaggagtcctttgctgggcgctgccttttctctctgcagttcgtagaat

SEQ ID NO: 17177 - DNA, 600 bp, Chicken  19866894225095_2
gacaccatccctggaggagttcaagcaatatgtggagacattgcacaaagggacatggtttagtggggaaatatggactagatgatcgtggaggtcttttccaaccttggtgattctatgattctaagacaaaacttggaagaagcttagctcttactctgagatttacctaacgaaccaacagcaagccaattgaagcattaaactgaggtttctatgctacaagcccaaagctcagctctgwcacagaaccccagtgaaactgcagcagttcatgtgttctccctaggtcacagtttktccaccaacagtatggtttagtaataaggtctgcctttctgccaatgggaaggcaactgttcaaagcaygaagagatttttaggctattttccagactagtttcctatttactatatgtaattctccctggaacgatacgctaatgaagtactttactttagagcatcacttatgcatgaaagccttgcctgtaacaggagtcctttgctgggcgctgccttttctctctgcagttcgtagaatcataccatagaatcatagaaccaccaaggytggaaaagatctctaagatcatccag

SEQ ID NO: 17178 - DNA, 600 bp, Chicken  19866894225095_3
aatatggactagatgatcgtggaggtcttttccaaccttggtgattctatgattctaagacaaaacttggaagaagcttagctcttactctgagatttacctaacgaaccaacagcaagccaattgaagcattaaactgaggtttctatgctacaagcccaaagctcagctctgwcacagaaccccagtgaaactgcagcagttcatgtgttctccctaggtcacagtttktccaccaacagtatggtttagtaataaggtctgcctttctgccaatgggaaggcaactgttcaaagcaygaagagatttttaggctattttccagactagtttcctatttactatatgtaattctccctggaacgatacgctaatgaagtactttactttagagcatcacttatgcatgaaagccttgcctgtaacaggagtcctttgctgggcgctgccttttctctctgcagttcgtagaatcataccatagaatcatagaaccaccaaggytggaaaagatctctaagatcatccagtccagccgtccacctatcaccaatagttctcactaaaccatgcccctcagtacaacatataaacatttc

SEQ ID NO: 17179 - DNA, 600 bp, Chicken  19866894225095_4
atgtgttctccctaggtcacagtttktccaccaacagtatggtttagtaataaggtctgcctttctgccaatgggaaggcaactgttcaaagcaygaagagatttttaggctattttccagactagtttcctatttactatatgtaattctccctggaacgatacgctaatgaagtactttactttagagcatcacttatgcatgaaagccttgcctgtaacaggagtcctttgctgggcgctgccttttctctctgcagttcgtagaatcataccatagaatcatagaaccaccaaggytggaaaagatctctaagatcatccagtccagccgtccacctatcaccaatagttctcactaaaccatgcccctcagtacaacatataaacatttcttgaacacctccagggacagtgactccatcacctccctggcagcccattccagcacctcaccactcttttggagtagaaattgttcctaacatccaacctatccagttatcacgacaaagatgtttaaagaggagttttcaaagggaccayggcgatgacctttccacaaggctccccgagaggtaggaggggatggattcacaa

SEQ ID NO: 17180 - DNA, 600 bp, Chicken  19866894225095_5
ttttctctctgcagttcgtagaatcataccatagaatcatagaaccaccaaggytggaaaagatctctaagatcatccagtccagccgtccacctatcaccaatagttctcactaaaccatgcccctcagtacaacatataaacatttcttgaacacctccagggacagtgactccatcacctccctggcagcccattccagcacctcaccactcttttggagtagaaattgttcctaacatccaacctatccagttatcacgacaaagatgtttaaagaggagttttcaaagggaccayggcgatgacctttccacaaggctccccgagaggtaggaggggatggattcacaaaagaagcaaaataacagtgcagaaacctgaaaataaataaacaaataaatcctcaagcaggcaaatatgatgtaaagaggtaatccttaatcttggatttcacttgcaccttccaggcctataagctctaccatttctttatacgttgtgtgacaacatactcccttcccttattttagatctgatgatgcagtttcattttgtacctcttctcctgtacaccgtgaaatgatcattccccaccta

SEQ ID NO: 17181 - DNA, 600 bp, Chicken  19866894225112_1
cgaggcaaaccttccctggcacctcctgccctcccctgggctgttctcctttgccacagtgttaataagatctgtttcactgcccatcgcagtcccacctgagagccatctgtcttttaccatgctgcaaaactggggtgcagaggaggaaccctgaaataagaggagggaagggacagcatgtcgagaatacatgaaaggagttgtacaagagactgataaatttgtaaagtcattcatgctgtaatcccactgcatgtaatgaagtaactgcaaataaaagctcactttcatgcccasgggctcccataactctctcctgtggtctcaactcaaaggctattgaaatcaatgcatctctttcctgtgacttcaatgatcttgaggttaccttggcatcttttcttctgtttcccatcttctcttctatattttctctctgctgtaaatttttaatgctttaaatatgctgtgaattatgaaccagctacaaaaatctgattccttcaggagcatgtaatactttctgccagataattcatctgtgcaaatcagtctgaaaatgggagtttagccctactgaaattaagctgggaaaaa

SEQ ID NO: 17182 - DNA, 600 bp, Chicken  19866894225119_1
ccttcactgttaggactgattcgttcttgtctagctccatgatcttcacgcattgtaggtatgctatagagaatgcagaccctaaatttaaggtttggtgtgtagagtatagtcaagctgcctttctacactcaaaactgtactggattattttgcatatacttacatatatcatccattgtcacttaggattgcattgtggagattttgaaaaggtaattaaaaacaaattttgtaaacatataatattttggcgccactgtactaaatttaatatttgagcttttttcacagttacawataggtataaccacccagtgcattatkggaattaactaggataaaaagaagtgtcacttcacrcaagagggatatttacaatgtacagtcagcatttytgggcatttatgacaggcacttttatttgaggttattaaggaggtcttgatatgattaataagtcctcagaaagttaaacctgatagattgataacaccatgtaattccttgtttccctagctgtttttttttataattcctagtactcctccttccttgttttttataaaatacattatcttgatctcatctttgtaataa

SEQ ID NO: 17183 - DNA, 600 bp, Chicken  19866894225119_2
tgtctagctccatgatcttcacgcattgtaggtatgctatagagaatgcagaccctaaatttaaggtttggtgtgtagagtatagtcaagctgcctttctacactcaaaactgtactggattattttgcatatacttacatatatcatccattgtcacttaggattgcattgtggagattttgaaaaggtaattaaaaacaaattttgtaaacatataatattttggcgccactgtactaaatttaatatttgagcttttttcacagttacawataggtataaccacccagtgcattatkggaattaactaggataaaaagaagtgtcacttcacrcaagagggatatttacaatgtacagtcagcatttytgggcatttatgacaggcacttttatttgaggttattaaggaggtcttgatatgattaataagtcctcagaaagttaaacctgatagattgataacaccatgtaattccttgtttccctagctgtttttttttataattcctagtactcctccttccttgttttttataaaatacattatcttgatctcatctttgtaataacgttgaactaaacttgccttttatata

SEQ ID NO: 17184 - DNA, 600 bp, Chicken  19866894225119_3
ctatagagaatgcagaccctaaatttaaggtttggtgtgtagagtatagtcaagctgcctttctacactcaaaactgtactggattattttgcatatacttacatatatcatccattgtcacttaggattgcattgtggagattttgaaaaggtaattaaaaacaaattttgtaaacatataatattttggcgccactgtactaaatttaatatttgagcttttttcacagttacawataggtataaccacccagtgcattatkggaattaactaggataaaaagaagtgtcacttcacrcaagagggatatttacaatgtacagtcagcatttytgggcatttatgacaggcacttttatttgaggttattaaggaggtcttgatatgattaataagtcctcagaaagttaaacctgatagattgataacaccatgtaattccttgtttccctagctgtttttttttataattcctagtactcctccttccttgttttttataaaatacattatcttgatctcatctttgtaataacgttgaactaaacttgccttttatatatctgggttacattttcacctattattttttttgact

SEQ ID NO: 17185 - DNA, 600 bp, Chicken  19866894225119_4
tgtgtagagtatagtcaagctgcctttctacactcaaaactgtactggattattttgcatatacttacatatatcatccattgtcacttaggattgcattgtggagattttgaaaaggtaattaaaaacaaattttgtaaacatataatattttggcgccactgtactaaatttaatatttgagcttttttcacagttacawataggtataaccacccagtgcattatkggaattaactaggataaaaagaagtgtcacttcacrcaagagggatatttacaatgtacagtcagcatttytgggcatttatgacaggcacttttatttgaggttattaaggaggtcttgatatgattaataagtcctcagaaagttaaacctgatagattgataacaccatgtaattccttgtttccctagctgtttttttttataattcctagtactcctccttccttgttttttataaaatacattatcttgatctcatctttgtaataacgttgaactaaacttgccttttatatatctgggttacattttcacctattattttttttgactaagtctctcatatctgcaatttcctttacaataat

SEQ ID NO: 17186 - DNA, 600 bp, Chicken  19866894225120_1
cgtccctggacaaagtagacatatcaagagggagatggagaacaaaacagagcactgctaatggaatttaagtggcttttatttctcattttcaaaataaatacagaaatgaaggatttccggaagacagtgaaaaaccatcagaaaccatcaaggaccaccagaaagcagtgacaggattgatcaatgtctcctttttattagaataacaggaaaagcattcaatgtcctgagataatattcagaatagatgaggaaaagaagtttattaaagttcttttgaagaattctgatcccttyatgagaagtgttcggctactaattagaaagcattaaagaatgtctaaattctgttttttgaagacaaaaaaagcttccctcatacaacattagaatactacagataacacagacagtcatggaaataagatgtcagtctcaatgcatcttcattactgctgaaccaaacttcaggtaagactgggtgcattgctaaggcttgggggagtaattaacatcatccctgtgcaacaggaatcttggccatactttcagttatgcaagggggtacaagttcagactggatctctgagcatatat

SEQ ID NO: 17187 - DNA, 600 bp, Chicken  19866894225124_1
gacctctataaacttatgaacagtttcccttcacctgttaagatgcaaatgctaccattttcccccaaaaccgtgatcttcaacaaaactatccttttatgctaatatacagagttattagcattcaacagtagacactctggagagctatttctaacagtttaaaaatagaatttataaatgttcctttaaacatcaccaagggaaactacatagtcagtagagaaattgcaacagttattcagaaacctttggtacttaaaagaaaataaggccttcagtcacagaatacctgtttgygtccttgggaacacaaagaaaggggaaagaacttgaagctaagcgtgtctatttgagagtggattcagaggactttgtgcaaaacagatgttcagatatagtaaaaagagtacagaactgcgtgcaagggatgaacagctcactacaaaggacatcgccttttgttgcataagtaggtcaggagactcatctgttatggtcattcaaagaagaaaaatttcttctgaggtcatctttacctttcggatcataggaarcttccaaataatggagatgaacatgaacctcgcctaagtaact

SEQ ID NO: 17188 - DNA, 600 bp, Chicken  19866894225124_2
cttaaaagaaaataaggccttcagtcacagaatacctgtttgygtccttgggaacacaaagaaaggggaaagaacttgaagctaagcgtgtctatttgagagtggattcagaggactttgtgcaaaacagatgttcagatatagtaaaaagagtacagaactgcgtgcaagggatgaacagctcactacaaaggacatcgccttttgttgcataagtaggtcaggagactcatctgttatggtcattcaaagaagaaaaatttcttctgaggtcatctttacctttcggatcataggaarcttccaaataatggagatgaacatgaacctcgcctaagtaacttcctcttttctgggcactcttggttcatgaagaagcattgtagcataaacatacaaggactcatggctcagaactcacatccagtgacgaacatgatctgaaggtgagaagtggagcatatgaatcaaattgtggtgtgttggctactgaaattcatgggagccctcctgctgagcccccattcacaaaataatgagtactcatgtgccagagtaaagcatatactgtggcattttaagaaaatgtgctactctata

SEQ ID NO: 17189 - DNA, 580 bp, Chicken  19866894225130_1
ttgttgtcgtggaacaggtggcagcagagaggcagtctgacagaatggcatctgatatggtagtgcatatgaagcagaagtgtagaattaattcttccatgtggaaacagtggcacccattgatgcttgctgaacatttatgaaaaccgaacagtgaatgtgagcacagtgaggtggtgggtggtgcatttcagcagtggcaatagtaggtcacctttgctggaacagattgttacaagtgtggcatgcagactcttgttcatcactgatgaaaatacatagctaatgctggtgactgtkgaaaaagttgttttttttttttttttgtagctggaaatttatcaagtagtgttattatgctcattcatctgttttttccatggaagtaattaggagtcattacttcaggagcaaccttcatggatacagccctggacagttcctctttgctccatgtggcccaggcaggccaacagattggacacccatgcctttagttatcttgcctcttctatcgctatcatttcagaaaggtgtgggtcttatttgcttgctagatatagcttcccatgctcactga

SEQ ID NO: 17190 - DNA, 600 bp, Chicken  19866894225131_1
ttctgagagctcatctcaaagctgataccaggcggtacgacccttttcctgctggcaggctgaaaaagtcaattgcaattgtaattgttctgggtcatcagtgtagtctccttggaagttagacgtggttacttttgaaaataagccaattttcagaagttatttggaaagtttcaagtcttgttcaagtagctggaatcacagccttgtttatacaaaagaaaatctgaacatttctaaccctcggattaaactggaagagtgcatctgttttgctgtgtttaaggaagtttcagccaytgcccttggtgttaatggtacagcagtgcactgatttgayagtactttggccaaagaccttaagtgcaaaaagtacagtccatcgggggcattttactgtatgacaccagaagatgtaccagaatttacggaatcaatgggatttcaagccaaacagacaggattcctgccaagaaatcccataatttgtctaatttatttagtcagcactgtttttaaaacacatggtccaactgcaatccaagagcacacagaaaaaaagaactcagccttgttccagcccctgcttccacccacaaa

SEQ ID NO: 17191 - DNA, 600 bp, Chicken  19866894225131_2
cccttttcctgctggcaggctgaaaaagtcaattgcaattgtaattgttctgggtcatcagtgtagtctccttggaagttagacgtggttacttttgaaaataagccaattttcagaagttatttggaaagtttcaagtcttgttcaagtagctggaatcacagccttgtttatacaaaagaaaatctgaacatttctaaccctcggattaaactggaagagtgcatctgttttgctgtgtttaaggaagtttcagccaytgcccttggtgttaatggtacagcagtgcactgatttgayagtactttggccaaagaccttaagtgcaaaaagtacagtccatcgggggcattttactgtatgacaccagaagatgtaccagaatttacggaatcaatgggatttcaagccaaacagacaggattcctgccaagaaatcccataatttgtctaatttatttagtcagcactgtttttaaaacacatggtccaactgcaatccaagagcacacagaaaaaaagaactcagccttgttccagcccctgcttccacccacaaatggcctaaatgtcatatgtgggcacacagaaacccactgg

SEQ ID NO: 17192 - DNA, 600 bp, Chicken  19866894225137_1
ccaccatccctggaggttttcaagtgaagagcgagtgtcataatgagtgacatatttgtgactgctctaaaacatgggttgatagctggactagatcttagaggtctttccaacctttatgattctatgatcgaagataaaagcacagaataatatgctttcaaaattttcaagttttccattccacaggaaatgcttccttaattgtaacctgtcgtttgcagggcagctgtagagaatatatgtgtgaactgctactgggtgtttaaaaagaactaatgagaccagttcatcaccttyttgaaagccggacatgtagcctagcaaatatcagaaaatcaagttcagaacatgataaatcccaaccccatatggacaaaatgggctacagatttgaacaaaacaatttcacgtatgagacatcaccatctaactgtgcagactctgaaccctgagcaaaacccgttgttagcagtgaaatttcctgtatctgcagtaggatttgaatgagccccacacttctttactttcggctgaggatattctttaaaatctttaatttacttgttcagaagtttgaatccatgacctgttccatgc

SEQ ID NO: 17193 - DNA, 600 bp, Chicken  19866894225138_1
ggcagtaatttcatctgagttcttggtaatgatactggcacccatctgtatgttgttatacttggctatcactgttgctggcaaagaggtcctggccagaacgagggcaagcccaggaacctggtggcagaagtgtgctgtctggtctgaggagtctaccagtgctcaggtggtagacaaactcagctccagctactcgagcgtggtttcgggggagactcccagccagctcaatgctgcaagcgtgcgcatacttattactgaaattaattgctctaatgccaaagaacagatggaatmagrcacgagggagaaagaggagggattatgtgtagatttggttcaggtttgcgtactggttctctcagcttgaagagctctgcaagcctgtgtggctgctgtccatgttcagccaaatgcrtgctgtgttggatggtggcagtgaaatggttaagatgccttagctgggctgctttggaaatccagtgcagcagtaacggggacccttaaaactgggactaattgtagtggttggcttatgtggacaaagtcagcggggagactttaatttcacccgtactcaggaatggaaaagaaatg

SEQ ID NO: 17194 - DNA, 600 bp, Chicken  19866894225138_2
agtaatttcatctgagttcttggtaatgatactggcacccatctgtatgttgttatacttggctatcactgttgctggcaaagaggtcctggccagaacgagggcaagcccaggaacctggtggcagaagtgtgctgtctggtctgaggagtctaccagtgctcaggtggtagacaaactcagctccagctactcgagcgtggtttcgggggagactcccagccagctcaatgctgcaagcgtgcgcatacttattactgaaattaattgctctaatgccaaagaacagatggaatmagrcacgagggagaaagaggagggattatgtgtagatttggttcaggtttgcgtactggttctctcagcttgaagagctctgcaagcctgtgtggctgctgtccatgttcagccaaatgcrtgctgtgttggatggtggcagtgaaatggttaagatgccttagctgggctgctttggaaatccagtgcagcagtaacggggacccttaaaactgggactaattgtagtggttggcttatgtggacaaagtcagcggggagactttaatttcacccgtactcaggaatggaaaagaaatgaaa

SEQ ID NO: 17195 - DNA, 600 bp, Chicken  19866894225138_3
tggtggcagaagtgtgctgtctggtctgaggagtctaccagtgctcaggtggtagacaaactcagctccagctactcgagcgtggtttcgggggagactcccagccagctcaatgctgcaagcgtgcgcatacttattactgaaattaattgctctaatgccaaagaacagatggaatmagrcacgagggagaaagaggagggattatgtgtagatttggttcaggtttgcgtactggttctctcagcttgaagagctctgcaagcctgtgtggctgctgtccatgttcagccaaatgcrtgctgtgttggatggtggcagtgaaatggttaagatgccttagctgggctgctttggaaatccagtgcagcagtaacggggacccttaaaactgggactaattgtagtggttggcttatgtggacaaagtcagcggggagactttaatttcacccgtactcaggaatggaaaagaaatgaaagctggcacatgattctgtttccacttatgaagcacccatctgcctttttaaaattcaatttatgggaatggtgagtaaggctggaccagttcgtagctattagatccatgccattaac

SEQ ID NO: 17196 - DNA, 470 bp, Chicken  19866894225139_1
ggcactgcctgcagaggcaacacaggtggaactgcttgggccaggcactgctggacctggtgtaagaggactggatgatccccagaggtccctcccaacccccactgttctgtgatgctatgagtttccaaaagctgaaccctgctcccagtacgcagagctgagccctccaccaatctaaccaacccttcagacacagcagaagccagcccacctggctcagaaacatctgcttaatctatattttatcttcaataaataaaatatatcttctgcctgtttctgcagacaatcccatgytaggtttccccacacacacacatcagcagatgaaccgacccagcgcacagcacccaaaccccaaacttattagaagataagttaggaagagataagcaaaagcagcagcaaagcagttgctgggctgtgcagaatgccgagcgccgcatctctgctatatgtttgtggat

SEQ ID NO: 17197 - DNA, 565 bp, Chicken  19866894225141_1
agccacagatagcaggagctgtctggccctcatttccttcgtggatggtctgctactgagctacaggcagcagctctgctagctgaaactcactggatatttcctattatcacagaaaggaattctgttgagtaatgctttcattcaatttgctcacaatgttctctgtcgatgaatatatctgatttcatgtaaatgtgattaaataaatcaagacaatgccaggctgtgtcagcctcaagaggttctagttcaagatgtgaaacacttgtcccagtaagcacaacctgaactaaaccycaygcgttatggattttcattacctcttaatcaccaaaataccctgctcacctccttgctgaccccaytgtaccaccagaaccacacactgtgtgtgtgctgccacgtggactccaggtttttcacagtattgaaggaccggagggaaaggaaaggagaaggaaaaaaagcacagaagatggaaacattcctgtgaagtaatttgacttatttggagctcatggctttcagcacacagaaggatcaggtaacagggaaagcaggg

SEQ ID NO: 17198 - DNA, 562 bp, Chicken  19866894225141_2
cacagatagcaggagctgtctggccctcatttccttcgtggatggtctgctactgagctacaggcagcagctctgctagctgaaactcactggatatttcctattatcacagaaaggaattctgttgagtaatgctttcattcaatttgctcacaatgttctctgtcgatgaatatatctgatttcatgtaaatgtgattaaataaatcaagacaatgccaggctgtgtcagcctcaagaggttctagttcaagatgtgaaacacttgtcccagtaagcacaacctgaactaaaccycaygcgttatggattttcattacctcttaatcaccaaaataccctgctcacctccttgctgaccccaytgtaccaccagaaccacacactgtgtgtgtgctgccacgtggactccaggtttttcacagtattgaaggaccggagggaaaggaaaggagaaggaaaaaaagcacagaagatggaaacattcctgtgaagtaatttgacttatttggagctcatggctttcagcacacagaaggatcaggtaacagggaaagcaggg

SEQ ID NO: 17199 - DNA, 497 bp, Chicken  19866894225141_3
agcagctctgctagctgaaactcactggatatttcctattatcacagaaaggaattctgttgagtaatgctttcattcaatttgctcacaatgttctctgtcgatgaatatatctgatttcatgtaaatgtgattaaataaatcaagacaatgccaggctgtgtcagcctcaagaggttctagttcaagatgtgaaacacttgtcccagtaagcacaacctgaactaaaccycaygcgttatggattttcattacctcttaatcaccaaaataccctgctcacctccttgctgaccccaytgtaccaccagaaccacacactgtgtgtgtgctgccacgtggactccaggtttttcacagtattgaaggaccggagggaaaggaaaggagaaggaaaaaaagcacagaagatggaaacattcctgtgaagtaatttgacttatttggagctcatggctttcagcacacagaaggatcaggtaacagggaaagcaggg

SEQ ID NO: 17200 - DNA, 599 bp, Chicken  19866894225143_1
  misc_feature (1)..(138): n is any nucleotide
nnnnnnnnnnnnnnnnnnnnnnnnnnnnnnnnnnnnnnnnnnnnnnnnnnnnnnnnnnnnnnnnnnnnnnnnnnnnnnnnnnnnnnnnnnnnnnnnnnnnnnnnnnnnnnnnnnnnnnnnnnnnnnnnnnnnnnnnnngaactgctcacagctgtgacacagctgggtttcgtgcctgcctccctacaggagctttgtcccactctggagctcctgaagactcagacagaacccaggccaagctgatggtgaccctgggtctgtgctgggtctggatttctgcatctcaccagcacctgygttgtgtctcctgacatctcctggtacagcaatggcaaagcaccacacagcccttgtgatacttggagcaaaatgctgcacgctgcccctctggttggcagcacccatttatygtgcttaaattctggctgagctgctgaagagctcttttccaaacatctgtggtgctgtaaattcgagtgcatgttccatctatgggaagctgtgggcactgtggaagcattatcctcacttctcagttgtccttcatcctggatgtgacctttcaggctctggcagcagagtacagatcatcactg

SEQ ID NO: 17201 - DNA, 599 bp, Chicken  19866894225143_2
  misc_feature (1)..(25): n is any nucleotide
nnnnnnnnnnnnnnnnnnnnnnnnngaactgctcacagctgtgacacagctgggtttcgtgcctgcctccctacaggagctttgtcccactctggagctcctgaagactcagacagaacccaggccaagctgatggtgaccctgggtctgtgctgggtctggatttctgcatctcaccagcacctgygttgtgtctcctgacatctcctggtacagcaatggcaaagcaccacacagcccttgtgatacttggagcaaaatgctgcacgctgcccctctggttggcagcacccatttatygtgcttaaattctggctgagctgctgaagagctcttttccaaacatctgtggtgctgtaaattcgagtgcatgttccatctatgggaagctgtgggcactgtggaagcattatcctcacttctcagttgtccttcatcctggatgtgacctttcaggctctggcagcagagtacagatcatcactgtgcatttttgggaccaagcggcagctcagctgtgytcacttcatgggaacctcgcatcccaagagcctgtccacagcagcctgaggatgatgtctgcacctgaagcctcccgc

SEQ ID NO: 17202 - DNA, 600 bp, Chicken  19866894225143_3
gcaaagcaccacacagcccttgtgatacttggagcaaaatgctgcacgctgcccctctggttggcagcacccatttatygtgcttaaattctggctgagctgctgaagagctcttttccaaacatctgtggtgctgtaaattcgagtgcatgttccatctatgggaagctgtgggcactgtggaagcattatcctcacttctcagttgtccttcatcctggatgtgacctttcaggctctggcagcagagtacagatcatcactgtgcatttttgggaccaagcggcagctcagctgtgytcacttcatgggaacctcgcatcccaagagcctgtccacagcagcctgaggatgatgtctgcacctgaagcctcccgctgaagtattgctcaaatgctgctgtgaagatattcctcacaaagcatcatcccttcctaggaaagggaaatctcctggggagccccacaggagggtcagggcggttcgtcttcgctctggggctgggaggaagcctggctgccagcactgacctctccttgggctgctccgtgccccagcagggtgctggctggctcaccttggcctctgcaccgagaccca

SEQ ID NO: 17203 - DNA, 600 bp, Chicken  19866894225146_1
cactaatacattgaaggcagaggaatagagaacagtttcagtgcccttcctaaagctgctgtgtgaaatcgctttttctattatcggctgcccaatcactgtacacatctataaacaggtctggttgctaagactgaaatgtaattatttcatccatgcagacgcattgcaactcaggggaaaaagcttgtcatttattgcaaatacagtagtagctgtttgtgtggtggaggagcagatatagcatacagacttgcagaagcaagaatgtgagccgggctgacttgtgattcttaataytrtttctttcagtcctttgctgagaatgctgtattccttcagcgcaggcacatttgtgtgctatacagacagcttgagtatgtacaggaaacttttatagggctgtatatgcatttttcacagtaagtgctgtgtggttgcagcacttccaacaaaccattgtcccctctggtgcgtggttgatctgcttaygtgtaccagctacttacttgggatttccagactttgtgcctgaagaaagaaggcatttctgtttatgtctttccattatgatagtgctcattgccgccacttggaaag

SEQ ID NO: 17204 - DNA, 600 bp, Chicken  19866894225146_2
ctaatacattgaaggcagaggaatagagaacagtttcagtgcccttcctaaagctgctgtgtgaaatcgctttttctattatcggctgcccaatcactgtacacatctataaacaggtctggttgctaagactgaaatgtaattatttcatccatgcagacgcattgcaactcaggggaaaaagcttgtcatttattgcaaatacagtagtagctgtttgtgtggtggaggagcagatatagcatacagacttgcagaagcaagaatgtgagccgggctgacttgtgattcttaataytrtttctttcagtcctttgctgagaatgctgtattccttcagcgcaggcacatttgtgtgctatacagacagcttgagtatgtacaggaaacttttatagggctgtatatgcatttttcacagtaagtgctgtgtggttgcagcacttccaacaaaccattgtcccctctggtgcgtggttgatctgcttaygtgtaccagctacttacttgggatttccagactttgtgcctgaagaaagaaggcatttctgtttatgtctttccattatgatagtgctcattgccgccacttggaaagat

SEQ ID NO: 17205 - DNA, 600 bp, Chicken  19866894225146_3
atttattgcaaatacagtagtagctgtttgtgtggtggaggagcagatatagcatacagacttgcagaagcaagaatgtgagccgggctgacttgtgattcttaataytrtttctttcagtcctttgctgagaatgctgtattccttcagcgcaggcacatttgtgtgctatacagacagcttgagtatgtacaggaaacttttatagggctgtatatgcatttttcacagtaagtgctgtgtggttgcagcacttccaacaaaccattgtcccctctggtgcgtggttgatctgcttaygtgtaccagctacttacttgggatttccagactttgtgcctgaagaaagaaggcatttctgtttatgtctttccattatgatagtgctcattgccgccacttggaaagatgcttcactagcatttgcacctgcaaacctgctatttaggagactcttgtctttatccctctttgaaaagaggaagaaaacattcctggccattatcagaggcatttagagctgcataatgataatatgtaccacgtaaagtgctggttcctcttatgtatgtgtgtaaaggttggtatttactgcccttt

SEQ ID NO: 17206 - DNA, 599 bp, Chicken  19866894225148_1
  misc_feature (1)..(150): n is any nucleotide
nnnnnnnnnnnnnnnnnnnnnnnnnnnnnnnnnnnnnnnnnnnnnnnnnnnnnnnnnnnnnnnnnnnnnnnnnnnnnnnnnnnnnnnnnnnnnnnnnnnnnnnnnnnnnnnnnnnnnnnnnnnnnnnnnnnnnnnnnnnnnnnnnnnnnngcctgtgctacgtatgctccagatctctatttgtgcagaattcttttctctagatgtatgttagctgtacaaatacccaaaacgaatctacctccttgcagcagaaatcaattactctttcagggtatccctttcaatatttctctcccmaatgagaacagtccctaagctaaagatggcacagtgtcacactttgccaattgcttcccttggaagggtccaaatgccccgacagaccaaataggagtgacaaatccaagctaaactgctaatataaaatccttagtttgtaattatttccctcattgggacagggtatgaatacaatcattcagcataagtattaataactgcttattacattgtgttggctgctggtttttttccagtttagrcttcagagggaattagagaaatgcaaagcaatttcttttcatttattcagtscc

SEQ ID NO: 17207 - DNA, 600 bp, Chicken  19866894225148_2
aaacgaatctacctccttgcagcagaaatcaattactctttcagggtatccctttcaatatttctctcccmaatgagaacagtccctaagctaaagatggcacagtgtcacactttgccaattgcttcccttggaagggtccaaatgccccgacagaccaaataggagtgacaaatccaagctaaactgctaatataaaatccttagtttgtaattatttccctcattgggacagggtatgaatacaatcattcagcataagtattaataactgcttattacattgtgttggctgctggmttttttccagtttagrcttcagagggaattagagaaatgcaaagcaatttcttttcatttattcagtsccagttaacttctttcacaggctgtataaygggatgctcatgtgaagcacaagtagggtattttctggtttctttcagggctcagaaagtggccaaaggtctgctttgcacagaaagcaagactgaaccactcctgcttggttgggtatttttcctggctgtataacgtgtgtatctgagatttggtgctacacatggacatcttctattcagtatccaactactgcaacta

SEQ ID NO: 17208 - DNA, 600 bp, Chicken  19866894225148_3
ttgcagcagaaatcaattactctttcagggtatccctttcaatatttctctcccmaatgagaacagtccctaagctaaagatggcacagtgtcacactttgccaattgcttcccttggaagggtccaaatgccccgacagaccaaataggagtgacaaatccaagctaaactgctaatataaaatccttagtttgtaattatttccctcattgggacagggtatgaatacaatcattcagcataagtattaataactgcttattacattgtgttggctgctggtttttttccagtttagrcttcagagggaattagagaaatgcaaagcaatttcttttcatttattcagtsccagttaacttctttcacaggctgtataaygggatgctcatgtgaagcacaagtagggtattttctggtttctttcagggctcagaaagtggccaaaggtctgctttgcacagaaagcaagactgaaccactcctgcttggttgggtatttttcctggctgtataacgtgtgtatctgagatttggtgctacacatggacatcttctattcagtatccaactactgcaactaatgacactctgggaat

SEQ ID NO: 17209 - DNA, 600 bp, Chicken  19866894225148_4
ccmaatgagaacagtccctaagctaaagatggcacagtgtcacactttgccaattgcttcccttggaagggtccaaatgccccgacagaccaaataggagtgacaaatccaagctaaactgctaatataaaatccttagtttgtaattatttccctcattgggacagggtatgaatacaatcattcagcataagtattaataactgcttattacattgtgttggctgctggtttttttccagtttagrcttcagagggaattagagaaatgcaaagcaatttcttttcatttattcagtsccagttaacttctttcacaggctgtataaygggatgctcatgtgaagcacaagtagggtattttctggtttctttcagggctcagaaagtggccaaaggtctgctttgcacagaaagcaagactgaaccactcctgcttggttgggtatttttcctggctgtataacgtgtgtatctgagatttggtgctacacatggacatcttctattcagtatccaactactgcaactaatgacactctgggaatatcactgacacacagctgctgtttcggacaactacaatgacaaattctgctg

SEQ ID NO: 17210 - DNA, 600 bp, Chicken  19866894225148_5
ggcacagtgtcacactttgccaattgcttcccttggaagggtccaaatgccccgacagaccaaataggagtgacaaatccaagctaaactgctaatataaaatccttagtttgtaattatttccctcattgggacagggtatgaatacaatcattcagcataagtattaataactgcttattacattgtgttggctgctggtttttttccagtttagrcttcagagggaattagagaaatgcaaagcaatttcttttcatttattcagtsccagttaacttctttcacaggctgtataaygggatgctcatgtgaagcacaagtagggtattttctggtttctttcagggctcagaaagtggccaaaggtctgctttgcacagaaagcaagactgaaccactcctgcttggttgggtatttttcctggctgtataacgtgtgtatctgagatttggtgctacacatggacatcttctattcagtatccaactactgcaactaatgacactctgggaatatcactgacacacagctgctgtttcggacaactacaatgacaaattctgctgttgtcaaagtcagtgttctttaagcagaac

SEQ ID NO: 17211 - DNA, 600 bp, Chicken  19866894225153_1
ttgccttcggcccaagagttaagggagtgctcaggactgtttactggactgtttactggcggaagatctgtcctgtgaccaaattactcttgtttgctatgggagattgggggatgataccatcatatcttgtgaaggcaagatactagttggcatctccatactccctcttatctgctggcaaggccagggagataggaacaaaaggaatttctgctgagatccaaaagccagaaactgtcattccaaaaggctgactcaaccactttggacttataaatacgtttgtactgccattgyaatcgcagtcttcgccatcattatcatcatcacagtggtcactatgctcatcaatggaacaacacccaacagcccacctctaccgaagatcaacaactgaactatgaaccacgctggactaatggtggtgactatctccctcttgtttcctatagagacgccttgctcctatttcctattttttctagtgcccttcttccccatcacccctaatttgtacctataaagactcctttgcttctattttctatcttttctattctctttcttcccttccccattactccaatctgtaatagt

SEQ ID NO: 17212 - DNA, 592 bp, Chicken  19866894225156_1
gccacctctctgggcaacctatttgcacgatatgactagcaaagcctgttgaaatggaaagctttttagtatagccagatgcctgggtctgtgtcttgggaagaagaaagaagcaccagaccttcagaacaagatttctgcatccttaaaaacaacaatcccagaagggctgagacaccacagtctccgaacaactgaacaagagacttcagtgaaatgtcatgggaactcctaatcgcttcccagcagggtttgataattgaacagtgctggctggcttggtgcccccacagggaaacrctgttcttccaataatagtaactgggtggaatgtaacagcctgtgaaattgaggaggccaaagtagataatctcatagggtcttctgttcttactaatctaatatgaattaggagaatgaagtggtgcctgtaaaactcagggatctcgttgttttgctttgttttatactctatgtatcctgtttagtttcctttttgttggtttgttaatttggctgttttagtccacgcaaattctactgttaaaatctgttgctctcctagtttgtgtttggttctaaatcaaatgtg

SEQ ID NO: 17213 - DNA, 600 bp, Chicken  19866894225160_1
atattctttgggccaccctggtgtggttatagtcccatttagctttgtcagaagtcctccgcaagcagctggaaaatgaaaagggagagcatcatttctggaatgaaactgtgttttactataaacagaagcacactgagcagattcagtcatctctttacttacactgctgtaatgcccagacagactaatcagaatcttgttttatcatgcttggtgcaaacaaagagaaagagacagcccctatcttgaacagcttgcaggtttgtggacagagataagtttcaagactacacatgrctttatcatattcattcttttcccttccctcaagagactctggttattctctcacagcctttcccatgcaagtctgacctgacttctctcctcaggaccttgatcacccttttcagacagacagactactcaagatgcagttcacgttgccctggcttcttttactgattactgatccagaatctgctctacctgtttcagctcatatatatgcctcccgataacctacaaggcatggtcatttctttaggacagcaatcatgtactgttcaaatataattacgtttgctggaagtacag

SEQ ID NO: 17214 - DNA, 599 bp, Chicken  19866894225174_1
  misc_feature (1)..(28): n is any nucleotide
nnnnnnnnnnnnnnnnnnnnnnnnnnnnaatctgagccttttttcctgtcagtgatagtgttactgctatcaagatacttgaaaaattactttgacaatgtggttcaaatacaaaatgcacagtgggtgtatgtaaaactgggtcaagtccagtacctgggaggtagttgacatggggtaacttgatgacgttattcctggtgttaacatctgcagtgtgcagaaacatgtcgtggctgcagtgctggaaatggaaggccgaaagacttcttgagtgatcagaactcttatatggagaamatgttacttacatagtgaataaggctgtactatttttgttttagagggactctgaatatgtctggcatagctctaagtagacttgcacaggagagaaaagcctggaggaaagatcatccatttgtaagtatatatgagcactgttaacattctggcttgtacggttatgttcatgttacgattatctttttccctgatgtgttagaataattgaattaatttttaaataagaaactgcttaaaactgtgttttgcacaaagaaataactgtgtatacattagacatggcatgaagtgtt

SEQ ID NO: 17215 - DNA, 599 bp, Chicken  19866894225180_1
  misc_feature (1)..(63): n is any nucleotide
nnnnnnnnnnnnnnnnnnnnnnnnnnnnnnnnnnnnnnnnnnnnnnnnnnnnnnnnnnnnnnntatgggacttgctctttctttctgaagttggccttagttgctaataatccttatctttctgttaatcctttgtctttctgtttctgcattaatcctttgtctttctgcttctttttctttggtcctgttcacatgaacccgcctcagcactggttgctgagaattttaagggaccgaggtattaaaatataaaggggtttgaacaccagactgctatgaatatcgtggtttgtaatrtatactatagatctacattttatcacactctgttaagttagtggaattattcacttatttgyccttgtattcaccagatacttttcatatactgaagtcacatatgtgttaaaatccaaatacctcttgtataccacttcaggaaatgcaaataatgtttagtattaatgttcaataactgcaaaaagcaaaaaaacaaaacaaacaaaaaamcaaactaaaacaaacaaacaaacaaaaaaacccaacatactacatatttttggtagcgtatttaaaatcagattgcagtaaacaac

SEQ ID NO: 17216 - DNA, 599 bp, Chicken  19866894225180_2
  misc_feature (1)..(1): n is any nucleotide
ntatgggacttgctctttctttctgaagttggccttagttgctaataatccttatctttctgttaatcctttgtctttctgtttctgcattaatcctttgtctttctgcttctttttctttggtcctgttcacatgaacccgcctcagcactggttgctgagaattttaagggaccgaggtattaaaatataaaggggtttgaacaccagactgctatgaatatcgtggtttgtaatrtatactatagatctacattttatcacactctgttaagttagtggaattattcacttatttgyccttgtattcaccagatacttttcatatactgaagtcacatatgtgttaaaatccaaatacctcttgtataccacttcaggaaatgcaaataatgtttagtattaatgttcaataactgcaaaaagcaaaaaaacaaaacaaacaaaaaamcaaactaaaacaaacaaacaaacaaaaaaacccaacatactacatatttttggtagcgtatttaaaatcagattgcagtaaacaactagcagccagtgaaataaataatatgatttctttagcttatctgagaataaaatggtttctt

SEQ ID NO: 17217 - DNA, 600 bp, Chicken  19866894225180_3
tggttgctgagaattttaagggaccgaggtattaaaatataaaggggtttgaacaccagactgctatgaatatcgtggtttgtaatrtatactatagatctacattttatcacactctgttaagttagtggaattattcacttatttgyccttgtattcaccagatacttttcatatactgaagtcacatatgtgttaaaatccaaatacctcttgtataccacttcaggaaatgcaaataatgtttagtattaatgttcaataactgcaaaaagcaaaaaaacaaaacaaacaaaaaamcaaactaaaacaaacaaacaaacaaaaaaacccaacatactacatatttttggtagcgtatttaaaatcagattgcagtaaacaactagcagccagtgaaataaataatatgatttctttagcttatctgagaataaaatggtttcttagtagctgtcaggtgttcatttcatgcccttttctagatctataaagaaaaatggtggaaccaatttaaattaaattttttgagaggaaaaatatatattgcatttgagttgactgattggagaataggttgcaagcttatggtattccaaa

SEQ ID NO: 17218 - DNA, 600 bp, Chicken  19866894225184_1
ggaaagaggcaacgctgcagtaaaagcaacaggatttcaggagggcagatttaagttatccagagggtcattaggtaagatttcctggaagactgatccgaggtaaaaggggaaattgaaagaaatcacataactttaaagaaatggtattaaagatgcaagtgcaaagtttccagttgcagaagataagcagggagtaagcactcagattggttaggtcattttgatcccatacattagaggaaattctacaggaactaggaagtataacggagtacaaaagacagattttcaacagcrcacagatcatcaggaaggccaaggctgaaaatgacattttctattttctattcctagaaaccttggctactgaaatcattctaacagtgatataggaaaatgaataggaaaagcagggttagtgaacttgtaaacagaagggaaagcctactagcagatgacattggaaggtaatatacataatgctttttttttttttaatcgatattccctaagaagtggattttgcaattaaaatcaatagcaaaggaaataatctgtccctcatacagagcagagataggttagagagcactttgc

SEQ ID NO: 17219 - DNA, 600 bp, Chicken  19866894225185_1
cagtttcatgaagccaagctgctgaaaacactggactgtgctaattacaccctataaaataaaacaaactaagagatacagaaaggttgttctaaagtttatagttaccgatcacctaaatgtaaatctaccctgaagacactgtgtgaattcacttgcttccttgcaaaattctgggttgacacactcaggatagcacaaaaaaaagttgcagtaagataacatcatgatgcactgaaatgcctttactcatgacagggagggttattcagctctgaggcagaaatccaggtatatcayggatgagtcatgacatcttgtgatggtagaagaacctagtcatgggaaattcaggctcggaacaccaagtcagcaaggtatgtaaacatatgccttctaatttgaagtcagttgaaatatacccataattatccactaaaagagctaggaaactaccccattaagcacaaagccagcccaggagcctaagccttcatggtatggcctacctgcatccatgggctgggtcttggctatcccccgtttattccagtgctggtgaattaaacactgtgcaacagtgtaccttatctccatagt

SEQ ID NO: 17220 - DNA, 600 bp, Chicken  19866894225185_2
tcccccgtttattccagtgctggtgaattaaacactgtgcaacagtgtaccttatctccatagttaaattgtttgtaccatccagtcgctggaattgtccctggcatgggactcccatagcattccataaaccagacccaaactcttgcaacgcaaagattcagttcctttatcttgagtgggttttcaattagcagtccatgacaaaagtgaaggttgtgttgcagcccaacagctaagttaggcattgtgctacctttcctggaggggatggcatcagtacactcaggagaccttcarggtacaaagcttgctgatagaaaactcataccacttctacgttaaaagcatgaattgtccccaaaacctttgtagtcaagcactgtagacaaaatgrcctggaacagaacagagagagtattaatagttaataaagagaattaatagttaaataaaatttgaacctgagttgtaactttctttcattttacagtagatacatctattggatccattccagcttctttgtctccgatatagtcattcagtatgaaaatgtgcctgtcacatcttttactgtgtatttgtaaagggacttac

SEQ ID NO: 17221 - DNA, 600 bp, Chicken  19866894225185_3
tccctggcatgggactcccatagcattccataaaccagacccaaactcttgcaacgcaaagattcagttcctttatcttgagtgggttttcaattagcagtccatgacaaaagtgaaggttgtgttgcagcccaacagctaagttaggcattgtgctacctttcctggaggggatggcatcagtacactcaggagaccttcarggtacaaagcttgctgatagaaaactcataccacttctacgttaaaagcatgaattgtccccaaaacctttgtagtcaagcactgtagacaaaatgrcctggaacagaacagagagagtattaatagttaataaagagaattaatagttaaataaaatttgaacctgagttgtaactttctttcattttacagtagatacatctattggatccattccagcttctttgtctccgatatagtcattcagtatgaaaatgtgcctgtcacatcttttactgtgtatttgtaaagggacttacacactgggactctgctattagctaaacattgtagtgatataaataatatatataartttatgrtaatttttaagagattggacattcaaaactcttt

SEQ ID NO: 17222 - DNA, 600 bp, Chicken  19866894225185_4
gtccccaaaacctttgtagtcaagcactgtagacaaaatgrcctggaacagaacagagagagtattaatagttaataaagagaattaatagttaaataaaatttgaacctgagttgtaactttctttcattttacagtagatacatctattggatccattccagcttctttgtctccgatatagtcattcagtatgaaaatgtgcctgtcacatcttttactgtgtatttgtaaagggacttacacactgggactctgctattagctaaacattgtagtgatataaataatatatataartttatgrtaatttttaagagattggacattcaaaactctttattccaataktcatttaaaaatgtatgaacwttttttttttttttttacaaagatatatacataacatctccttgtagaaatatatgatggtttctgttagccctgaggacaaatattgaaaatccattaagctctgaaaattgggctataagtgatcaagttagttgatcatatagtacagtgaggaattatcatcaaacagtaagtcaagatttgcaggactgggataacaacctgcatttgtgagaatagtcaaaa

SEQ ID NO: 17223 - DNA, 600 bp, Chicken  19866894225185_5
aaacctttgtagtcaagcactgtagacaaaatgrcctggaacagaacagagagagtattaatagttaataaagagaattaatagttaaataaaatttgaacctgagttgtaactttctttcattttacagtagatacatctattggatccattccagcttctttgtctccgatatagtcattcagtatgaaaatgtgcctgtcacatcttttactgtgtatttgtaaagggacttacacactgggactctgctattagctaaacattgtagtgatataaataatatatataartttatgrtaatttttaagagattggacattcaaaactctttattccaataktcatttaaaaatgtatgaacwttttttttttttttttacaaagatatatacataacatctccttgtagaaatatatgatggtttctgttagccctgaggacaaatattgaaaatccattaagctctgaaaattgggctataagtgatcaagttagttgatcatatagtacagtgaggaattatcatcaaacagtaagtcaagatttgcaggactgggataacaacctgcatttgtgagaatagtcaaaaacagttt

SEQ ID NO: 17224 - DNA, 597 bp, Chicken  19866894225185_6
aacagagagagtattaatagttaataaagagaattaatagttaaataaaatttgaacctgagttgtaactttctttcattttacagtagatacatctattggatccattccagcttctttgtctccgatatagtcattcagtatgaaaatgtgcctgtcacatcttttactgtgtatttgtaaagggacttacacactgggactctgctattagctaaacattgtagtgatataaataatatatataartttatgrtaatttttaagagattggacattcaaaactctttattccaataktcatttaaaaatgtatgaacwttttttttttttttttacaaagatatatacataacatctccttgtagaaatatatgatggtttctgttagccctgaggacaaatattgaaaatccattaagctctgaaaattgggctataagtgatcaagttagttgatcatatagtacagtgaggaattatcatcaaacagtaagtcaagatttgcaggactgggataacaacctgcatttgtgagaatagtcaaaaacagttttaaaacaaacaaaaaataaaatatcttacttaattcatcat

SEQ ID NO: 17225 - DNA, 576 bp, Chicken  19866894225185_7
taataaagagaattaatagttaaataaaatttgaacctgagttgtaactttctttcattttacagtagatacatctattggatccattccagcttctttgtctccgatatagtcattcagtatgaaaatgtgcctgtcacatcttttactgtgtatttgtaaagggacttacacactgggactctgctattagctaaacattgtagtgatataaataatatatataartttatgrtaatttttaagagattggacattcaaaactctttattccaataktcatttaaaaatgtatgaacwttttttttttttttttacaaagatatatacataacatctccttgtagaaatatatgatggtttctgttagccctgaggacaaatattgaaaatccattaagctctgaaaattgggctataagtgatcaagttagttgatcatatagtacagtgaggaattatcatcaaacagtaagtcaagatttgcaggactgggataacaacctgcatttgtgagaatagtcaaaaacagttttaaaacaaacaaaaaataaaatatcttacttaattcatcat

SEQ ID NO: 17226 - DNA, 600 bp, Chicken  19866894225188_1
ctggtgattgtgctcttctcttcagaggtcatttcctagcagaaagaaagcagtgctttacattttcatatgagataatagagcttatcctacccttgacagtttcaacagggactacagatagataggttctcacaataagcccccaggaatcctcaaattcttgcacatgctgattccagctaaggtcaaacaaagacaaaagaaaaagaaatagagcgcatgcaacgttggccctccagtggtctgatctgtgtgagcaccgggagatgctgcaccaccttgcaaagtctctcaatygaacagctgctggggctgttgaaagtaaaatccagcagcttgtctaggagaactgtcagatgatccataggtttaycttgcagctaacaagttcactgaggacgttctggattcttggtctttggaaagggcttcctactrctataaagaatgctctctacagtcagatcagctatacccttcaagccgcaacaggcaaatttggtttggagaagtctgactttatcagtttaaaaacatatataaaataaaatatagatttatttcctggtgaaaccacaggatactctggaaactgca

SEQ ID NO: 17227 - DNA, 600 bp, Chicken  19866894225188_2
aatagagcttatcctacccttgacagtttcaacagggactacagatagataggttctcacaataagcccccaggaatcctcaaattcttgcacatgctgattccagctaaggtcaaacaaagacaaaagaaaaagaaatagagcgcatgcaacgttggccctccagtggtctgatctgtgtgagcaccgggagatgctgcaccaccttgcaaagtctctcaatygaacagctgctggggctgttgaaagtaaaatccagcagcttgtctaggagaactgtcagatgatccataggtttaycttgcagctaacaagttcactgaggacgttctggattcttggtctttggaaagggcttcctactrctataaagaatgctctctacagtcagatcagctatacccttcaagccgcaacaggcaaatttggtttggagaagtctgactttatcagtttaaaaacatatataaaataaaatatagatttatttcctggtgaaaccacaggatactctggaaactgcactttcagttgcctacagctaactctcctgtgcgtggaatatcagcccctttccattgcctagcactgaggggacac

SEQ ID NO: 17228 - DNA, 600 bp, Chicken  19866894225188_3
gcccccaggaatcctcaaattcttgcacatgctgattccagctaaggtcaaacaaagacaaaagaaaaagaaatagagcgcatgcaacgttggccctccagtggtctgatctgtgtgagcaccgggagatgctgcaccaccttgcaaagtctctcaatygaacagctgctggggctgttgaaagtaaaatccagcagcttgtctaggagaactgtcagatgatccataggtttaycttgcagctaacaagttcactgaggacgttctggattcttggtctttggaaagggcttcctactrctataaagaatgctctctacagtcagatcagctatacccttcaagccgcaacaggcaaatttggtttggagaagtctgactttatcagtttaaaaacatatataaaataaaatatagatttatttcctggtgaaaccacaggatactctggaaactgcactttcagttgcctacagctaactctcctgtgcgtggaatatcagcccctttccattgcctagcactgaggggacaccaactatgcctgcagtcatcgcagcccaggattacatgcatacctttctccagtccttaaaaaag

SEQ ID NO: 17229 - DNA, 600 bp, Chicken  19866894225189_1
agaccactggagggccaacgttgcatgcgctctatttctttttcttttgtctttgtttgaccttagctggaatcagcatgtgcaagaatttgaggattcctgggggcttactgtgagaacctatctatctgtagtccctgttgaaactgtcaagggtaggataagctctattatctcatatgaaaatgtaaagcactgctttctttctgctaggaaatgacctctgaagagaagagcacaatcaccagcctcagcaagtgtgacttcacccacatgagccagtatttcaaagctcagacrgaagctaggaaacagatgtccaaggaggagaaacaggtaccagaggggatctggaattgttgatgctgacttgtcagcatctttgtgtaattatctgtctactcactttgccaatgttcactagctttcaaaatattaactttcgtattaattgcaggaatattttctctgcagctcaggtagcacaaagcactgtgtttacagctgaaccttcatcgaaatgatattggtagggttaaggctcttgatcttgcttaagtaaatgatgggaatcagaggtgttatgtcaatgggagcctt

SEQ ID NO: 17230 - DNA, 490 bp, Chicken  19866894225189_2
atttttattttagtatgtccttaggtttggaggggaaaaatcagggatagtggaagggaggcagccatgacagtagtgaataaaatatagtcagaacaggtctctttaatgctgtcttccaactaaaaatgcaattttattttcagtagcatagctacagtagcttgtaaggagaagactagtgttttgcttgttttattttgaatgactgagatactacaaataaaagttggaaactcatctccaaattctcagttgatcctttgcaatgcaacagtaattctgaaaggtagtttgaaraagtatggcccttggagttagaggagtcctgccaaattagagagctcatgtcatattgctgtttcagttcagtaaacattgagtgagtctttcccagttcccagccttagtaattattacttagaatggagcagaagtggattttactgctaagtttcatagttggcacatcagtgctgtctgtgggtca

SEQ ID NO: 17231 - DNA, 600 bp, Chicken  19866894225197_1
gtttataaaagcaaattaagtggaaagatgctaatgagaactgaaaagagttcacaacacttccttaaatgcccaactggccacaatgcactaagaaagagtgggatttggctggttagcacatcaggctagcttacagaaattaaactgggataataggagtagtgcaaataaacatattcacattttaagctagaaatgtaagaaaattaaaaaggaaagcaaagccacaaagacagttccttgggcttcacacttacagataatctgctgagttttatgcatcttaggagaaagagraaattttaaaataattgaagtcctttactgtttataaatgttaatcctgggtaattacaaaaaactaagcagaagtgttcagtaaatattgttcttcatcaggaaaaacaaaataactactgatatcaaatgacgacaaagcaatttaattttaagaacaacaggggacaatgtcaatcaccatttatttaagtatatctgcataaataccacatgagagtttgaaggagccaaactaattgtttcctggctcattcacactgaagtatttaattcagtccttaagcaatgtgggcatta

SEQ ID NO: 17232 - DNA, 599 bp, Chicken  19866894225202_1
  misc_feature (1)..(152): n is any nucleotide
nnnnnnnnnnnnnnnnnnnnnnnnnnnnnnnnnnnnnnnnnnnnnnnnnnnnnnnnnnnnnnnnnnnnnnnnnnnnnnnnnnnnnnnnnnnnnnnnnnnnnnnnnnnnnnnnnnnnnnnnnnnnnnnnnnnnnnnnnnnnnnnnnnnnnnnntggatgttaggaaaggtattggtgataggtgaaagttggactacgtgatcttggagatcttttccaaccttggtgattctatgattctaatatccaacctcaacctccctggtgtaacttgagaccatctagttctgttgctagttaytatggagaagaggccaacacctcacctcaccacaacctcctttcgggtagttgtagagagcattaatgtcacctctgagcctcatcctctccggactaaacaatcccagttccctcagccactcctcgtaagacttgtgttccagacccctcatcagcattgttgcttttctctggatgcactccagggccttgatatatttcctttagtgaggggcagaaaacggaatacagtatttgaggtgcagcctcaccaaagccaagtacagaaggatgatctcctctctgctcttggtggct

SEQ ID NO: 17233 - DNA, 411 bp, Chicken  19866894225203_1
ttccaggtgctgcgtgcccacggctgtgcccccgacctctactgcgccttccagaatgggctctgctatgagttcctgcccggcatcgctctggggcctgaccatgtgcgggacccccgcatattcaggtgtgtgggacccgcagtgctgggacatatggggtcaggaagggagcagggtgaagtgggaccatgttttcagctctcttcctttctaccttcgctccaaactggcacccgtgatgctccagtcctatccttcccttgcccagacctgggtggtgatgggctcagaatcccyggtgctgtgcacccaagtggggcagctgtgattttacagctttttgtgaaaggagactgcatgaggatcgtggcttctgtctgagctcaccctggaaaggggaatgctgac

SEQ ID NO: 17234 - DNA, 599 bp, Chicken  19866894225206_1
  misc_feature (1)..(50): n is any nucleotide
nnnnnnnnnnnnnnnnnnnnnnnnnnnnnnnnnnnnnnnnnnnnnnnnnngtgattactttactgctaacatgggcaaggttggattagtctcagacaaactttaaaatcatgcgaccacaaaattttaatttggattttataccttactctcttctcaacagttgtataaattcactcttccaggtttacctcttctcttgctgtgttgcagttctcagctcatatttttaaagccacctctcatataggcagatgaggtgaatacagtcatttttctacttatttgaacaagtttggsgtataactgcattccctgtctaaactgtaaggacatcattatacataccaaaccagtcttcattctaaaggtccatatgtgatagtgttacagcagtatgaaaaacaaatcctttgttaacaccataaaggtcaaagataaacaggagagcttccacaaatatcgctgtgattgccaaacactttctgtattcatttgtccagtttttcccagcacttgaagagaaatgtgtattttcacagtagatactgaagcactttgtggtttctacacagagatcacctctcttccagactagc

SEQ ID NO: 17235 - DNA, 523 bp, Chicken  19866894225206_2
attatacataccaaaccagtcttcattctaaaggtccatatgtgatagtgttacagcagtatgaaaaacaaatcctttgttaacaccataaaggtcaaagataaacaggagagcttccacaaatatcgctgtgattgccaaacactttctgtattcatttgtccagtttttcccagcacttgaagagaaatgtgtattttcacagtagatactgaagcactttgtggtttctacacagagatcacctctcttccagactagctctcctgatcctgcaatgggagtgtctgatttccctcytactactcaggctgaactgttcaactgtccattttttccccacagaactagaaatttaaagagttgttttttctgtggatgtttctactggcgttatttctaagcacctgtggtagcctctggaagagtcataactgtgttgctgctgctggatgttcacatgttctctcaagttgcttgagctggcattaacatttggaaatatactgtataggcttgctca

SEQ ID NO: 17236 - DNA, 600 bp, Chicken  19866894225208_1
tgctgtgacacctagaatactttgcttccaaactgcttgtgatctttccttatagatgaaggccaagaattttcccgcaaatccagtgagaattaaattgaatatatagcaaacgcttgtcagtggtctgtattgttaatatcaacagatgtcttctgaagagaccatagttgaaatgaaattcctagctgggaggaaaggtctcatccagacagaacatctcccccatttccacccaagaaggaagcttcccatggtgccagtaagtctgagagcagagtaagcaattagcaagaaagsttcaaaattcctaagcaagaagcaaggctgctgaggagtggagacgcttgggatttttcagcctgattagctccactgacagagagatgatgtatgctaattacagctccttaacctccttagaagaagttgcataaaagcacacaacatctccatgttgaaatgtaaggcactacagcattccccgccttctctgcagtggtgtgcttggaccatctgcacaatccattgaccagcctggatgatgcataggaaggtgtgcctgtgagctgacccatgtggttgcgggtacaggagtga

SEQ ID NO: 17237 - DNA, 600 bp, Chicken  19866894225210_1
gcattggctggggaaaggagcagtaccagtctcctgaagaactctgaactctgtcctacccagagctgaaagagaacctgcaagacagagtaaggttagctccgtgcacctgaaacacagccagcctccaaaataaaagtgcagatacagaatgcaaaaatattcctcatcctaccatagaaaccactgaaaaaataagaaaatccactgagtatttttgaaggatatctctgaccatgtgggttcagatctagtgaacctcagatgaccattaattctccaatgaagtacattatataygcaattatgttcaaaagcttgtcagagacctaaattttcatattttcattaggcagtctcattatttgctataatcttcaaataccctacagcctaaaaagagctgccaaaattccagtggcagcaaagacattttttcctttataacattaggctataatttctaccatccacttaataattactgcattggcccacaaccaatcttgaaacaggagcctaattgcactctacttcaacaaaaaacattctacttctggagaaagctgacttaactcctttcttgagccaaagtgagaa

SEQ ID NO: 17238 - DNA, 600 bp, Chicken  19866894225210_2
ttcattaggcagtctcattatttgctataatcttcaaataccctacagcctaaaaagagctgccaaaattccagtggcagcaaagacattttttcctttataacattaggctataatttctaccatccacttaataattactgcattggcccacaaccaatcttgaaacaggagcctaattgcactctacttcaacaaaaaacattctacttctggagaaagctgacttaactcctttcttgagccaaagtgagaaatttcatgaatgccattaaagagctgcaagacacgaatcacaaygttttatatggtataaaagaagttaggcaaactgggaagaagcaaacccacaacttaacttcttaggatcttccacttcaaaatgaaatgagcagttttctttgtttagagaagacaattggctgtatgcaccacaacaactgaaacagattctcatgcagagcctgcatggatgtgcatctttctaggagcgattaccttgagtgcaggcaagctgaagccatccgtgagattgtgtgcctcctcttcagatacctgctcttcactcagtcccagacccaggtccttaaaagggactac

SEQ ID NO: 17239 - DNA, 600 bp, Chicken  19866894225210_3
taagagatagaacactgaataaacttctaatgcctaaatgtaaccacctcatccctggaggcattcaaggccagactggatgtggctctgggcagcctggtctgctggttggcgaccctgcacatagcaggggggttgaaactggatgatcactgtggtccttttcaacccaggccattctatgattccatgattatgattctaaaaagaaacaaatgcaatcagactgatgcaaaacctcagcattccttttaagtgaggaaattatccttaatcaacaaattcccaataaagagctcrtgtcagccttaacagagatcagagagaagatttacactttgatttacaaactgaatattctcatctcttgggtcacaaaaaagccattagaagtgcttctctcttatccaaccaatatgttttctggggaagccacaagttctactcactctcactcccaaattctccacctgctaaattctcttaggattgtacttgcaatagtgctgaagaaactgttgaccacttgcataggagcacagtgcataaagggaaatttttgtggctcagcaaacatcaatactaagtgctcaggccctg

SEQ ID NO: 17240 - DNA, 545 bp, Chicken  19866894225213_1
ctgcttgagaaaaaaaaattctgcttgctcccattatgagcaatcctcatatcatccttttgtttggacatccatctgttaccagtttcaaacttggttagctacatgcacttagctaaataagtttgtattttagaagcacagataagttccttaattgttcacacattctatgttaggtctctagatctggatatgagagccagagcttactttgatttgataggattgcatggcctgcttcttcaaacagtcatgctaagagtgaagttatttctcaccaatgactatataaggagsaaaaagaaaaaggaaccaactactaagccaaggtgctacagttaagttgttttgatttaatttagtgaatgcccaggcccacttaatcatccaaaaagcagagtaggtgccacaacactcaatactagctcattagtcagtagctatgagacacaatactgtactgtatttatgatgtgggtttggaatcagggctttttgtctatgatttaagttaatgcaaagcaaataaactgctggatgaa

SEQ ID NO: 17241 - DNA, 599 bp, Chicken  19866894225218_1
  misc_feature (1)..(61): n is any nucleotide
nnnnnnnnnnnnnnnnnnnnnnnnnnnnnnnnnnnnnnnnnnnnnnnnnnnnnnnnnnnnnaatgtcatatttcacacatactccctgcaaaccacgcttcttagtcttccccaaaacactgcagggtgtaaccagctctttcttcctccttcatgaaaagaatatttcacaatggaattgtgtgatgacaaaaaaaaaatagtaatgttggaaaagcatcgctgcccagagagacataaggaattgccacaggccactgcgtataatcacacacagtattaagtagtcattgtatctcmttccaaggcttcattcttcttttgtgacctacagcctcaaagagagtttttacagaaatagagagccatggaacaacaaatttgggaaccgtgtcatttgacataaaatgtatggcttagaatgttattattttttgcttaacgtgtctttcagctgctgtcattaaaattgttaaacaacattaggaacgtgttttgtcaattacctcggggacaagtataaaatatcgggctgttaaatgcgtgccacaaaaaataaagcagcgcacagcaaatgctgcatgaggaattttcttggg

SEQ ID NO: 17242 - DNA, 584 bp, Chicken  19866894225218_2
ttttgtgacctacagcctcaaagagagtttttacagaaatagagagccatggaacaacaaatttgggaaccgtgtcatttgacataaaatgtatggcttagaatgttattattttttgcttaacgtgtctttcagctgctgtcattaaaattgttaaacaacattaggaacgtgttttgtcaattacctcggggacaagtataaaatatcgggctgttaaatgcgtgccacaaaaaataaagcagcgcacagcaaatgctgcatgaggaattttcttgggtcggtgctgcagtgctgctygtgcatcagcacacctcggcatggagcttccacccagggacagccccgattagctgtgagcagatctttgcaaatcagagagatgctttccatgaaagtttgcttgtgcttgaaagcagattcctgcaaggattctggtgctgacagtttctctgcaggacctcttgcaaagtgcagatgctccatccacaaatgcgctacgtgtgcaatctgtggtgtgcagtgaggcccctccaccagctcagatctacatatttcttcaagcagggctttggtggggctca

SEQ ID NO: 17243 - DNA, 600 bp, Chicken  19866894225219_1
ctcgcttctcagcgctagcgaaaacaggaaccaaaagcaaagcagcaataagacactaaatccttgccacagcttcaagttgaacccttagaggtttctgattcgagatgacttttcagccaactgatttttctagctcggtgtgctgagccccacgctgcaccatccgcccagatgcagcactcagacattttgccagatgcaaatgctcctgtaaggtctgtgccaccaacccacactttttcccctcctttcaagtctggtgaaaagtgaagccagctgtgcaaagtgcatgtggcrtctctgttaaccttttctctcctctcctgcaaagcctgctgtttgattttttgctccgaggagattagatagcatgtcttcagggagaagagaaaaccacagagcgcgctgcacattgcacaaatgctcttgttattctgaggcctgaagaaacaaggaaggaagcttgaggctggtggtttggcaggtgtgaggccttttttacacagacatctgttttaagtggtagctctgggctgggggatgagcgcsatgccccgtcatcccctcactgtggagcagcacaagggtttggggctt

SEQ ID NO: 17244 - DNA, 456 bp, Chicken  19866894225219_2
ttcaagtctggtgaaaagtgaagccagctgtgcaaagtgcatgtggcrtctctgttaaccttttctctcctctcctgcaaagcctgctgtttgattttttgctccgaggagattagatagcatgtcttcagggagaagagaaaaccacagagcgcgctgcacattgcacaaatgctcttgttattctgaggcctgaagaaacaaggaaggaagcttgaggctggtggtttggcaggtgtgaggccttttttacacagacatctgttttaagtggtagctctgggctgggggatgagcgcsatgccccgtcatcccctcactgtggagcagcacaagggtttggggcttctgcaatgtctctgtgccaccaacttccttatactgtgacttgggacgccgctctgctgtatttgtggggtagggctgcaaagggagagaatttctgttgcaaaccga

SEQ ID NO: 17245 - DNA, 600 bp, Chicken  19866894225224_1
gacaaatatcaaaacacacctggacggcaggctgttcccctgcacatgctggctttctatctattcaagcactaggcaagctttcctcatgtgtattttaacattttccattgtcttctgctgtcacaaagcaagaaactgtcacagctttgatacctgcactgtgtgttaaacagcagcgattgagtctgtctgttctgatttcctgcagtcatgcaaaacaaaaccgtctcagaagcagtgctcattcctggcacacacagcagccgatcacagtgcagacaacagaacgcacagcgytcagcacagaacagaaataaaacatcatctcctgacttatttaatcacgctccttgtgggtatctgctccagaggaaatattaagcactcagataaagggacatttctttatctggaaagcatctaaatttaaatgcaagtatggcttgtttgccccagctttaattagctctcagcattagattcagcagcagcaaaacatgaaaacacaccccaggacctggctcacttttcctgtatcctcaccagtgatcactcaaaacctaaaatggaaagcttgtttacaagacaaaaaaggtt

SEQ ID NO: 17246 - DNA, 600 bp, Chicken  19866894225227_1
tgtctctgccccacgggctgtgcctgacacggagctagctgtcagcagctctgacagatgaagagcagggaaaccagctgcttggcaggcggttgcctataaaggaagagaccactgcctctctgtagaggctccatgctgcagagatctgtgctggccttgtgcctggctggaagtgtggaagtgagtaatactgctctgggggaggctgtaagactgaatgaatgtgaagacctagggctttaagtgtcccagaacatacttcttaaggtctcaacctcctcttgctcttcagtgccycatcctgatgcaggtacaggcatggagaacgatagtacaagtccccactctgctgggaatctctccagtgatctggagccaccccgcctgtcttctgtttttgcttttattcctaggaagatccctgggaagcaggcagagatttcaagctttcagtgttaagacccaccgaatggttgggggttgctaatgcctgacctggtgggctgacctggtgagcttaggcccatatcctgagaccctgcaagtgagccagtcytcatctacccatcatggcctgawtttgatacttcaagagga

SEQ ID NO: 17247 - DNA, 600 bp, Chicken  19866894225227_2
tacttcttaaggtctcaacctcctcttgctcttcagtgccycatcctgatgcaggtacaggcatggagaacgatagtacaagtccccactctgctgggaatctctccagtgatctggagccaccccgcctgtcttctgtttttgcttttattcctaggaagatccctgggaagcaggcagagatttcaagctttcagtgttaagacccaccgaatggttgggggttgctaatgcctgacctggtgggctgacctggtgagcttaggcccatatcctgagaccctgcaagtgagccagtcytcatctacccatcatggcctgawtttgatacttcaagaggagaactctattttgtgytccctgaccctgagccagccacttgccgtgacgtggggaaggactggatctgacaaactgggatggaaagactccctctgccattgatttctatggcctggggtaggagggtgttactcaatgcagtgtacaaatcccagagctcatctgcctagaatagaaccaaatagacatattaattcaaagcaaatctgccactctccactgcaatgcacacaggaatgctttgctaagaggatccca

SEQ ID NO: 17248 - DNA, 591 bp, Chicken  19866894225227_3
tcttgctcttcagtgccycatcctgatgcaggtacaggcatggagaacgatagtacaagtccccactctgctgggaatctctccagtgatctggagccaccccgcctgtcttctgtttttgcttttattcctaggaagatccctgggaagcaggcagagatttcaagctttcagtgttaagacccaccgaatggttgggggttgctaatgcctgacctggtgggctgacctggtgagcttaggcccatatcctgagaccctgcaagtgagccagtcytcatctacccatcatggcctgawtttgatacttcaagaggagaactctattttgtgytccctgaccctgagccagccacttgccgtgacgtggggaaggactggatctgacaaactgggatggaaagactccctctgccattgatttctatggcctggggtaggagggtgttactcaatgcagtgtacaaatcccagagctcatctgcctagaatagaaccaaatagacatattaattcaaagcaaatctgccactctccactgcaatgcacacaggaatgctttgctaagaggatcccagtaggaggcttttc

SEQ ID NO: 17249 - DNA, 557 bp, Chicken  19866894225227_4
caggcatggagaacgatagtacaagtccccactctgctgggaatctctccagtgatctggagccaccccgcctgtcttctgtttttgcttttattcctaggaagatccctgggaagcaggcagagatttcaagctttcagtgttaagacccaccgaatggttgggggttgctaatgcctgacctggtgggctgacctggtgagcttaggcccatatcctgagaccctgcaagtgagccagtcytcatctacccatcatggcctgawtttgatacttcaagaggagaactctattttgtgytccctgaccctgagccagccacttgccgtgacgtggggaaggactggatctgacaaactgggatggaaagactccctctgccattgatttctatggcctggggtaggagggtgttactcaatgcagtgtacaaatcccagagctcatctgcctagaatagaaccaaatagacatattaattcaaagcaaatctgccactctccactgcaatgcacacaggaatgctttgctaagaggatcccagtaggaggcttttc

SEQ ID NO: 17250 - DNA, 600 bp, Chicken  19866894225232_1
actttagatatctgtaaggctgtagttcagtgcttaacgtacaaaattggacaacatgtgtcagtatggtggcagttctgctatgtgcataaagagtggtttgtgccacctgtaaacctatgtgcaggactgtcactgttacagttaaatggcaatttatgatccagaatgtgaaatgctgacatctgagggaaaagaattaatttacatatacttgatcaaaagaaattttggtatgcatatttattctttcaggagggcatagaaaattcctatttatagttctgtatctttcatggygtacatagagctgggttttcaagaagtaaaaataaatccaaagatgtggatagtgtaatggggttggttggtttgttttataagctttgtctaattgtttctgcacactgtgcatgcagacgattttagtggcctcatgttttcttttgtaggttgacaggcttgaagccaaagttgttgaacctctgaaaagttatgggactatagtgaaactgaaaagggtaagtcagmtgtgctttctctcacaaagtatgctgtggtgctctggccactccrttgaaaatttctacactgtgatgg

SEQ ID NO: 17251 - DNA, 600 bp, Chicken  19866894225232_2
tggtatgcatatttattctttcaggagggcatagaaaattcctatttatagttctgtatctttcatggygtacatagagctgggttttcaagaagtaaaaataaatccaaagatgtggatagtgtaatggggttggttggtttgttttataagctttgtctaattgtttctgcacactgtgcatgcagacgattttagtggcctcatgttttcttttgtaggttgacaggcttgaagccaaagttgttgaacctctgaaaagttatgggactatagtgaaactgaaaagggtaagtcagmtgtgctttctctcacaaagtatgctgtggtgctctggccactccrttgaaaatttctacactgtgatgggggagtggttgtgatttttgtgtgtgtgtgtgctgcattaaccagtgtaactaaaaaattatataagaatgcatctgaattgatgctctctatgtgatggaggcaaaatgtttgtgaggtcaaggatattccagttgttggatcccaagcraatgctttaaaagaagaatagtggatagtgagaagcttcctgagtagtgcaaattcaggtggaagatgttctatttacaa

SEQ ID NO: 17252 - DNA, 600 bp, Chicken  19866894225232_3
ttatagttctgtatctttcatggygtacatagagctgggttttcaagaagtaaaaataaatccaaagatgtggatagtgtaatggggttggttggtttgttttataagctttgtctaattgtttctgcacactgtgcatgcagacgattttagtggcctcatgttttcttttgtaggttgacaggcttgaagccaaagttgttgaacctctgaaaagttatgggactatagtgaaactgaaaagggtaagtcagmtgtgctttctctcacaaagtatgctgtggtgctctggccactccrttgaaaatttctacactgtgatgggggagtggttgtgatttttgtgtgtgtgtgtgctgcattaaccagtgtaactaaaaaattatataagaatgcatctgaattgatgctctctatgtgatggaggcaaaatgtttgtgaggtcaaggatattccagttgttggatcccaagcraatgctttaaaagaagaatagtggatagtgagaagcttcctgagtagtgcaaattcaggtggaagatgttctatttacaaataatgccattcttgatttattcagacttccaaaagatgaattgc

SEQ ID NO: 17253 - DNA, 600 bp, Chicken  19866894225232_4
ggttgacaggcttgaagccaaagttgttgaacctctgaaaagttatgggactatagtgaaactgaaaagggtaagtcagmtgtgctttctctcacaaagtatgctgtggtgctctggccactccrttgaaaatttctacactgtgatgggggagtggttgtgatttttgtgtgtgtgtgtgctgcattaaccagtgtaactaaaaaattatataagaatgcatctgaattgatgctctctatgtgatggaggcaaaatgtttgtgaggtcaaggatattccagttgttggatcccaagcraatgctttaaaagaagaatagtggatagtgagaagcttcctgagtagtgcaaattcaggtggaagatgttctatttacaaataatgccattcttgatttattcagacttccaaaagatgaattgcatctattgcttttgtctcttagtcatatatatgctgcatttagcagcttctaactcacaactgcattctgctttgatgctcattacatagaaaaccttttctgaagctgcctaataggtagtggtgtgaatctatctccatcctgtgatttcatcaggatgaccattaaaataca

SEQ ID NO: 17254 - DNA, 600 bp, Chicken  19866894225232_5
gtggatagtgagaagcttcctgagtagtgcaaattcaggtggaagatgttctatttacaaataatgccattcttgatttattcagacttccaaaagatgaattgcatctattgcttttgtctcttagtcatatatatgctgcatttagcagcttctaactcacaactgcattctgctttgatgctcattacatagaaaaccttttctgaagctgcctaataggtagtggtgtgaatctatctccatcctgtgatttcatcaggatgaccattaaaatacacaaataagtgagatctcttygttccctataytcaggaaactgtatataagggttcaaagtattcccacaaaatagctgtaaattcctttccccaggtaggatagctagtttcctctgaacaatgaaatttcattgagcagatattgacttagaggatgaaagcaaattctttgtaacacttgtacatacatgtattacatagaggttattttcagcctgtaaacaaatctgtaattgacttggtatgtctttatcatagccctgtgtacatagaaaagtcgaatggtgaatactactagggtgggtgttttacctacaga

SEQ ID NO: 17255 - DNA, 600 bp, Chicken  19866894225232_6
gaagcttcctgagtagtgcaaattcaggtggaagatgttctatttacaaataatgccattcttgatttattcagacttccaaaagatgaattgcatctattgcttttgtctcttagtcatatatatgctgcatttagcagcttctaactcacaactgcattctgctttgatgctcattacatagaaaaccttttctgaagctgcctaataggtagtggtgtgaatctatctccatcctgtgatttcatcaggatgaccattaaaatacacaaataagtgagatctcttygttccctataytcaggaaactgtatataagggttcaaagtattcccacaaaatagctgtaaattcctttccccaggtaggatagctagtttcctctgaacaatgaaatttcattgagcagatattgacttagaggatgaaagcaaattctttgtaacacttgtacatacatgtattacatagaggttattttcagcctgtaaacaaatctgtaattgacttggtatgtctttatcatagccctgtgtacatagaaaagtcgaatggtgaatactactagggtgggtgttttacctacagaaatcctaaaaa

SEQ ID NO: 17256 - DNA, 599 bp, Chicken  19866894225234_1
  misc_feature (1)..(55): n is any nucleotide
nnnnnnnnnnnnnnnnnnnnnnnnnnnnnnnnnnnnnnnnnnnnnnnnnnnnnnntgcatgtatgtttttattgtttgggggaagggatggagctgacatggaataacttagttgctgaatgttgttcaaagcagttttggactcagtctaaatgtatttacttccagtgaagtgagactaaacaagtatttccattcccaaattctgtattctctttattgatgctgaccttgtattactgcatagggtaaaagccctgttcacagtactcatgaagcaacataagacaaaggagacaytgctcccatagtttgaaaagccatttcttcctgggtcactgacacggcctgggttcatagcgtcacgctcataagcgcacagcatttacagcaacggaatacttacggggcacaagagaattcaagcaaaattaagagctgggagaaaagccatccccaccttccttccctgctgctggcattggtgtctgaagcaacagctcggtgccacgtggagaactctgctgcccggctccttcctcctgcacgtgactttccagctcagcacacaatgctgcaatccccttccctctgccttc

SEQ ID NO: 17257 - DNA, 556 bp, Chicken  19866894225237_1
ttagtgtagctactgttatctgcagttaaatgttaggagaatcttcttatacagctacggcatgtcggtgactgggcgtttctgtttcaaagtgtcaatgagggacagcactcctctctttacgttggttgtgactctcctggtcaccgaatctgcaggtggtgggggaggccgaactttctgtgaaggaggcctggccactaagcacttctgataccgtaactgcaagaaagcagaagcgttctgcaatccttactgtagccattacttccagtgcatttaaaatacatttaaaaataytttctcgtgaaatacagtcaaactttcattttaactgtgacaaacagccctgatgaagttattgagacatcggcctgttagctttttagcagaaattgttcattagtacatgacagacactaaatcacagcaacaactctttgaaaactgaaaaatgagttttcttaaacaaggactatttttcagtacattgtcacaggggttacatagaaatattcagcattagataacttctgtaactgcagaacagatctta

SEQ ID NO: 17258 - DNA, 448 bp, Chicken  19866894225244_1
atcctatctctacacacacagacaacagccctgtattccttccaggctacacaaccctgcttccactttctgtacatttccatcttttctctcagtttaagctgcaggtccttgcacagccatgacggtcgcctgcctcccctgcttgacttctgttgggagatggagagccattgtgctttcagacaggtgtccttaaagagctgccagctctgttctgtacccatggccttaaggacagtttcccaggggatcccactcagcagttccttgagcagccagaattttgctctcctaaarcacagggtcctagctctgcttttagccagggctgcattcttcaagatcacaaactccaccaaggcatggtcactacagcccaggctgcctccagtcttaacctctctaatcctctcctctgcattagtgagcaccaggtccagtaagg

SEQ ID NO: 17259 - DNA, 600 bp, Chicken  19866894225245_1
ggaagttgtcctcaacagactctaggagtctcctggattgtcggccacccaccataccactatcccagcagatatttggatggttgaaatcccccatcaggacaagagccagtgagcgtgacacctcctgcagctgaagcaagaaggcctcctcctgatcaggtggtctgtagcagaccccagccactagatgccttttgctggaccgatcctttatttttacccacaagctctcgatctgatcgtggctgttcctcatacacagctcagtgataaacctcgctcaataataaagctgtyrtgagtgctaaaatcatttgaaaatgtctgcgtgaactatattagaccctcagaggaagaaacttaagtactgcacatctcaagaagagaatgtgcttaagtgcattcacttgtgtgcattcagtctgtttggggtggatccgagatgtaaaaattgcttcagcttccacgttctgattgccctccaatccctaacagtcctgcccccatcagcacaggcatgagtgtaggaaatctgtaattaaatctagataggtttttctgttgatgcaaattgaaatgaccccattataagtggtg

SEQ ID NO: 17260 - DNA, 600 bp, Chicken  19866894225245_2
gaagttgtcctcaacagactctaggagtctcctggattgtcggccacccaccataccactatcccagcagatatttggatggttgaaatcccccatcaggacaagagccagtgagcgtgacacctcctgcagctgaagcaagaaggcctcctcctgatcaggtggtctgtagcagaccccagccactagatgccttttgctggaccgatcctttatttttacccacaagctctcgatctgatcgtggctgttcctcatacacagctcagtgataaacctcgctcaataataaagctgtyrtgagtgctaaaatcatttgaaaatgtctgcgtgaactatattagaccctcagaggaagaaacttaagtactgcacatctcaagaagagaatgtgcttaagtgcattcacttgtgtgcattcagtctgtttggggtggatccgagatgtaaaaattgcttcagcttccacgttctgattgccctccaatccctaacagtcctgcccccatcagcacaggcatgagtgtaggaaatctgtaattaaatctagataggtttttctgttgatgcaaattgaaatgaccccattataagtggtgc

SEQ ID NO: 17261 - DNA, 599 bp, Chicken  19866894225253_1
  misc_feature (1)..(41): n is any nucleotide
nnnnnnnnnnnnnnnnnnnnnnnnnnnnnnnnnnnnnnnnnactgctttaatttgccttctcacactccagtccgccctctgggcgtgagaacaaaggctgttctgatttattctggctgtcagcggctcgtatacaccagtgggcattatggtacaaggaacttcaacaagtaatctgtttcaacactcctccaatgcagtctctttaagcctcagggcatttaatccagtgggtaatatagcttttgaagcactaaacatagtttatggcctatatgagttttccacaaaattaccaycacaaggtgtaagaaatgacaattcaaaaaaatctgtatttgatcatcataaaaataattctgtcattagctcacctatgtgagaacattgaacgatgccaggaaggaggctctcttattctctcatcaagaattcctatggtactcaattcctatagtactacgtagtatccattgttccgcacacactacatggcagattctagaactgacgtaaagcagcccagttctttcacctcagagctgccaaactggttggcactaggcagacatttgggtcatggcatcttttctgagga

SEQ ID NO: 17262 - DNA, 600 bp, Chicken  19866894225263_1
gtgtcaccactctgtgtgaaaaacttccttttaatatctaacctaaacctcccctgtctcagttaaagaccacttccccttgccctatcactatccaccctcgcaaacagccattccacctcctgtttatatgctgctttcaagaactagaaggctgcaatgaggtctccctggagccttctcttctccaagctaaacaaccccagttccctcaacctttcctcacaggggaggtgctccagccctctgatcatcttagtggccctcctctggacctactccaagagctccacttgccaygttttggtcaggctctatgtgtataggagaataaaatatctgccttttggaaaagcagcacagcggtggtgtaggcagtgctgtaattatttcctgggctgcagttacgcagaagtacagccaaaacaggaaggaaagaatgctctatgctaagatagctccaatcccggtaggcaagctgctccctgtaccacgtcccacccaggaaggcttacatatagcttaaaggtatgttggcatttgcttgacttgaactctggcttttcttggtttctggcttcatccctcaaagagggcatc

SEQ ID NO: 17263 - DNA, 599 bp, Chicken  19866894225270_1
  misc_feature (1)..(19): n is any nucleotide
nnnnnnnnnnnnnnnnnnnttgggagagttttgttgccttggagagatcctcttctttctgcccaaagcatgggcactccttccttcatcagtacaatcttgtgtaccatggagtatgcagaggtagaggtggaaggggttgggttggttttcccatctccagaggcccctgaagtcatcttctccaggcatttgctccaggctgcattagctctatatgctctgtcctcgtcagtccaccatgggactcatgcttcagggctttctgccccaccacgctttccttacctatttcttccmctccttagctggagaattgggtctccaaagcagatgctggctgataagcctcatgcctttgtgcgaggtcatcccggagcaaggggacgctgtcctggtcagccacagcattacccttgcagggatgcctcagccacatttacagtgagcttcaatgaccgcctgtgctggggaggtcaccccttgaaatgcctagccatgtctgtgcttcatttacaggagctgtaaacctgccacctggctggtggctttattgctttggatgttgctggtgtcaaagaaatttggtgcaggagcca

SEQ ID NO: 17264 - DNA, 600 bp, Chicken  19866894225273_1
tgctccttccccattaacccttcactttgggaagcagaggtttatgcatttcagctaacacttccagcatgatttgggctgccttcatatctgcgcacccaacacttgcacctgccttggggttgggatcggatgttgctttgcccaaagccccgagacaggttctcagacatgaaggcatgcaaaatcatctcggaaagaacatctcccaccccacttccctttggatttcctttgtttgtggtcctgcagcgcaggcaccattacctgcgctcactgcctgccctgctgcggctctcrggctgctcaggcacccagcagtagttgtccgccgcgcttttggcttttgttttctcctgcctggatgccctcttcctgcaggccagcagggccagggcgaaggccagcagcagcaggatggccaccaggctgcccaggatgtagtagaggagcagccgggggccatcagcgccgtgctcggggctgtgctctgacaccaccaccgtgggggctggtggtgccaacccaccgggaatggctgcagggctgggggtgcccacggtccacgtggtgctggcagtctggaggatggcggtggtc

SEQ ID NO: 17265 - DNA, 600 bp, Chicken  19866894225273_2
aggctgcccaggatgtagtagaggagcagccgggggccatcagcgccgtgctcggggctgtgctctgacaccaccaccgtgggggctggtggtgccaacccaccgggaatggctgcagggctgggggtgcccacggtccacgtggtgctggcagtctggaggatggcggtggtccccatggtgcctgccagctgctctccagtggtgggtgcagtgaggcagccatgtccgtcatcctgggggaggaagccaggcaggcagatgcattcgaagctcccagggaggttgcggcagggcccrgggcaggggttccgcaggcactcrtctatgtccargcaggcatcgctgccaggctgctgctggtagccagccttgcagaggcagcggaaggagccggcgatgttgaggcagagctgggggcaggcgttgggctgggcgcactcatcctcatcacggcagtcatggccatcaggccctgctggctggtagccgggctggcaggagcagaagaagctgccggccgtgttgtggcactcgtgcttgcagggcccctccaggcactcatccacatccacgcagcggtagccatcaggtgccacg

SEQ ID NO: 17266 - DNA, 600 bp, Chicken  19866894225273_3
agcagccgggggccatcagcgccgtgctcggggctgtgctctgacaccaccaccgtgggggctggtggtgccaacccaccgggaatggctgcagggctgggggtgcccacggtccacgtggtgctggcagtctggaggatggcggtggtccccatggtgcctgccagctgctctccagtggtgggtgcagtgaggcagccatgtccgtcatcctgggggaggaagccaggcaggcagatgcattcgaagctcccagggaggttgcggcagggcccrgggcaggggttccgcaggcactcrtctatgtccargcaggcatcgctgccaggctgctgctggtagccagccttgcagaggcagcggaaggagccggcgatgttgaggcagagctgggggcaggcgttgggctgggcgcactcatcctcatcacggcagtcatggccatcaggccctgctggctggtagccgggctggcaggagcagaagaagctgccggccgtgttgtggcactcgtgcttgcagggcccctccaggcactcatccacatccacgcagcggtagccatcaggtgccacgatgtagccagcctcgcagatgcac

SEQ ID NO: 17267 - DNA, 600 bp, Chicken  19866894225273_4
gccatcagcgccgtgctcggggctgtgctctgacaccaccaccgtgggggctggtggtgccaacccaccgggaatggctgcagggctgggggtgcccacggtccacgtggtgctggcagtctggaggatggcggtggtccccatggtgcctgccagctgctctccagtggtgggtgcagtgaggcagccatgtccgtcatcctgggggaggaagccaggcaggcagatgcattcgaagctcccagggaggttgcggcagggcccrgggcaggggttccgcaggcactcrtctatgtccargcaggcatcgctgccaggctgctgctggtagccagccttgcagaggcagcggaaggagccggcgatgttgaggcagagctgggggcaggcgttgggctgggcgcactcatcctcatcacggcagtcatggccatcaggccctgctggctggtagccgggctggcaggagcagaagaagctgccggccgtgttgtggcactcgtgcttgcagggcccctccaggcactcatccacatccacgcagcggtagccatcaggtgccacgatgtagccagcctcgcagatgcactcgaagcctcc

SEQ ID NO: 17268 - DNA, 600 bp, Chicken  19866894225275_1
gttttagatgcatttctcctgtatcagccactagaaacagaagtatgactgcccagcaccttgccaccttcctttaacatctcagatcctggaatagcaagaccacggctctcctttcccattcccaacgtgaaccatcagtgctttcagatgctttagatcaagcttcacttcagcacaccgtaaggcaacctaccaattgctgcagctctcgataagttcaaagctggaggatcccgctctgggggacaggagtcacagaagtcccagcaggcagggcagatcagattcccaacatgyacccagccattcatctgaatgctcacagttaacacctgaccmgagcggctgcacaaatatgcagtgtccttgacccaaacatgcagcccttgtggagaacaagaaaccttaaaataaaagaataacagtgagatctgtattacgatttactggaaatacatttttggatgtgggagctctttcaacaaggaaatcaggtgttcagtaaacagtctgtayatagcacagattaagtacaagtattttaatgcacttgcagcaactattgaaagaaaatgcactaactgcactctttcatgt

SEQ ID NO: 17269 - DNA, 600 bp, Chicken  19866894225275_2
gtatgactgcccagcaccttgccaccttcctttaacatctcagatcctggaatagcaagaccacggctctcctttcccattcccaacgtgaaccatcagtgctttcagatgctttagatcaagcttcacttcagcacaccgtaaggcaacctaccaattgctgcagctctcgataagttcaaagctggaggatcccgctctgggggacaggagtcacagaagtcccagcaggcagggcagatcagattcccaacatgyacccagccattcatctgaatgctcacagttaacacctgaccmgagcggctgcacaaatatgcagtgtccttgacccaaacatgcagcccttgtggagaacaagaaaccttaaaataaaagaataacagtgagatctgtattacgatttactggaaatacatttttggatgtgggagctctttcaacaaggaaatcaggtgttcagtaaacagtctgtayatagcacagattaagtacaagtattttaatgcacttgcagcaactattgaaagaaaatgcactaactgcactctttcatgtcattacacacataaccaactgagactgagtaaagttctgctt

SEQ ID NO: 17270 - DNA, 600 bp, Chicken  19866894225275_3
ttcaaagctggaggatcccgctctgggggacaggagtcacagaagtcccagcaggcagggcagatcagattcccaacatgyacccagccattcatctgaatgctcacagttaacacctgaccmgagcggctgcacaaatatgcagtgtccttgacccaaacatgcagcccttgtggagaacaagaaaccttaaaataaaagaataacagtgagatctgtattacgatttactggaaatacatttttggatgtgggagctctttcaacaaggaaatcaggtgttcagtaaacagtctgtayatagcacagattaagtacaagtattttaatgcacttgcagcaactattgaaagaaaatgcactaactgcactctttcatgtcattacacacataaccaactgagactgagtaaagttctgcttctgctacaaactgcattttggagttgtgctgtcattgaaagagacacctccagctgagacagtcacggagtggtaggaggatgatgagaagtgacgtgtgcacagtgcttcctaccgcagacaaatcaaagtcatttaactcatgtaaaactttgacaacgcacaattccaacgtaa

SEQ ID NO: 17271 - DNA, 600 bp, Chicken  19866894225281_1
acagtctgtccagatctgtgcagcaagaagactggagctttgtgtcactgtacctttttcttcttttctcttcttttgtgtcacttttcccactttcactgtctggaagccgggcttctctctctcctgtctgcagatttaaccgaacgtgtgaccctgcaggaacagcttgacctataaacaaaagtgaggttattttaggccatgtgcactattgcaggtttgtattcaaagggctaaagtcaaatgctcctgctccaaagaaccacaaagaaacccatcctgcactgcagagacacyaagttgctcactgctgagcactcaaccctcctgccatggccttgtgacaccggggctgcttcaaccctgcagaaatgccacactgaccttactygccagttcctaagcaagcattaaaaacctacatcaggagtgaattcggagactatttggagaaaggggaatagactgctgaataaaacgcagctgccgaaatgaaatcaaagcacacatctgagtacagcctggtgtgctgaatatcaagtgtaccgatgtgaggttgtgtttggtttggaaatattgtattaaaaggaataactg

SEQ ID NO: 17272 - DNA, 600 bp, Chicken  19866894225281_2
ttcactgtctggaagccgggcttctctctctcctgtctgcagatttaaccgaacgtgtgaccctgcaggaacagcttgacctataaacaaaagtgaggttattttaggccatgtgcactattgcaggtttgtattcaaagggctaaagtcaaatgctcctgctccaaagaaccacaaagaaacccatcctgcactgcagagacacyaagttgctcactgctgagcactcaaccctcctgccatggccttgtgacaccggggctgcttcaaccctgcagaaatgccacactgaccttactygccagttcctaagcaagcattaaaaacctacatcaggagtgaattcggagactatttggagaaaggggaatagactgctgaataaaacgcagctgccgaaatgaaatcaaagcacacatctgagtacagcctggtgtgctgaatatcaagtgtaccgatgtgaggttgtgtttggtttggaaatattgtattaaaaggaataactgatcactgctacctgccaacaaaaatacacagaatacattaagttttgcttttaaatgcacaaaagatgggaaattcagagtatttttcttggtc

SEQ ID NO: 17273 - DNA, 600 bp, Chicken  19866894225282_1
cttctagtattaaaagtagtaaaagcagcccccccccccccccccaagcttcatgtttcttaagagaaatgttaccacttcctctgtaaggtaatagcatctcagatcatttaagaggatgatatattttagtctggttactgaatggtaacttttgtatattggatctgaaatggtcatcttggaaatggtgatgtactattaactaagaattgttttattttctgcctaattttactgccctttcgagggtatattaattcagttacccaggggactgtaaagaaagtgaaaaatagytgctcaagagataytrctttcakctatttagcagtgttactaaagttactgctttcatttatttcagcaagcttttattttaatcacttgcaatgccttacatctwttctccattttattaattagttcctatttttataaaaataacatcactggtatttagtttgtatttcaaacttaaatacatttcatcttgaagccttcgaaactggtgtttttgggggggaaaaaatcacactcctttctttctgaattaaaatgggacacgtgtcatacctcttcatataattgtttttcttt

SEQ ID NO: 17274 - DNA, 600 bp, Chicken  19866894225282_2
agtagtaaaagcagcccccccccccccccccaagcttcatgtttcttaagagaaatgttaccacttcctctgtaaggtaatagcatctcagatcatttaagaggatgatatattttagtctggttactgaatggtaacttttgtatattggatctgaaatggtcatcttggaaatggtgatgtactattaactaagaattgttttattttctgcctaattttactgccctttcgagggtatattaattcagttacccaggggactgtaaagaaagtgaaaaatagytgctcaagagataytrctttcakctatttagcagtgttactaaagttactgctttcatttatttcagcaagcttttattttaatcacttgcaatgccttacatctwttctccattttattaattagttcctatttttataaaaataacatcactggtatttagtttgtatttcaaacttaaatacatttcatcttgaagccttcgaaactggtgtttttgggggggaaaaaatcacactcctttctttctgaattaaaatgggacacgtgtcatacctcttcatataattgtttttctttctttgtagctggga

SEQ ID NO: 17275 - DNA, 600 bp, Chicken  19866894225282_3
tagtaaaagcagcccccccccccccccccaagcttcatgtttcttaagagaaatgttaccacttcctctgtaaggtaatagcatctcagatcatttaagaggatgatatattttagtctggttactgaatggtaacttttgtatattggatctgaaatggtcatcttggaaatggtgatgtactattaactaagaattgttttattttctgcctaattttactgccctttcgagggtatattaattcagttacccaggggactgtaaagaaagtgaaaaatagytgctcaagagataytrctttcakctatttagcagtgttactaaagttactgctttcatttatttcagcaagcttttattttaatcacttgcaatgccttacatctwttctccattttattaattagttcctatttttataaaaataacatcactggtatttagtttgtatttcaaacttaaatacatttcatcttgaagccttcgaaactggtgtttttgggggggaaaaaatcacactcctttctttctgaattaaaatgggacacgtgtcatacctcttcatataattgtttttctttctttgtagctgggaag

SEQ ID NO: 17276 - DNA, 600 bp, Chicken  19866894225282_4
agcagcccccccccccccccccaagcttcatgtttcttaagagaaatgttaccacttcctctgtaaggtaatagcatctcagatcatttaagaggatgatatattttagtctggttactgaatggtaacttttgtatattggatctgaaatggtcatcttggaaatggtgatgtactattaactaagaattgttttattttctgcctaattttactgccctttcgagggtatattaattcagttacccaggggactgtaaagaaagtgaaaaatagytgctcaagagataytrctttcakctatttagcagtgttactaaagttactgctttcatttatttcagcaagcttttattttaatcacttgcaatgccttacatctwttctccattttattaattagttcctatttttataaaaataacatcactggtatttagtttgtatttcaaacttaaatacatttcatcttgaagccttcgaaactggtgtttttgggggggaaaaaatcacactcctttctttctgaattaaaatgggacacgtgtcatacctcttcatataattgtttttctttctttgtagctgggaagagtttaa

SEQ ID NO: 17277 - DNA, 600 bp, Chicken  19866894225282_5
tcatttaagaggatgatatattttagtctggttactgaatggtaacttttgtatattggatctgaaatggtcatcttggaaatggtgatgtactattaactaagaattgttttattttctgcctaattttactgccctttcgagggtatattaattcagttacccaggggactgtaaagaaagtgaaaaatagytgctcaagagataytrctttcakctatttagcagtgttactaaagttactgctttcatttatttcagcaagcttttattttaatcacttgcaatgccttacatctwttctccattttattaattagttcctatttttataaaaataacatcactggtatttagtttgtatttcaaacttaaatacatttcatcttgaagccttcgaaactggtgtttttgggggggaaaaaatcacactcctttctttctgaattaaaatgggacacgtgtcatacctcttcatataattgtttttctttctttgtagctgggaagagtttaaacaggtaaatgctttaaaaatttatcattacttccttagctttgaaaactggaatagtcagaggtgagctgagaatagtaact

SEQ ID NO: 17278 - DNA, 600 bp, Chicken  19866894225291_1
ttccttttctctgaggtgaatcacacaaaattctgctgcccctttgctccagaaacccacataaacaaaaggaggaaaaaaaaagtctgccttggttcaatgcctgaatccaacaaatcaaccgtaggaggtttcaaaactaaaatttatatccagatgctaactgtttgccaaaaggcaaattagctaattatataatgaacatgaagtgcctcataagcagtcgcgcagggcttggcagctctgtcttccaaagtaagggaaacaaattcccctgcaaaaccagcctgagcttggccycagccatgctaataactgtttggaaacatcagatcgtaaaagcatcagatwggatccttcctctcctttctgttaccgttatatctgtttcctgactgtctccctctctgtaattttctggaaataatttaaaaaaaaaaaaaaaaaaaggacagattgtgattactaccaaattcttccttcaagagcatttgcagagctcatattgagggtgccatctactggctcacagagctggtaacgctgggcagcaaagggtttctacctggaaatcccaaggcagcaacttttgtacattat

SEQ ID NO: 17279 - DNA, 600 bp, Chicken  19866894225291_2
gaaacccacataaacaaaaggaggaaaaaaaaagtctgccttggttcaatgcctgaatccaacaaatcaaccgtaggaggtttcaaaactaaaatttatatccagatgctaactgtttgccaaaaggcaaattagctaattatataatgaacatgaagtgcctcataagcagtcgcgcagggcttggcagctctgtcttccaaagtaagggaaacaaattcccctgcaaaaccagcctgagcttggccycagccatgctaataactgtttggaaacatcagatcgtaaaagcatcagatwggatccttcctctcctttctgttaccgttatatctgtttcctgactgtctccctctctgtaattttctggaaataatttaaaaaaaaaaaaaaaaaaaggacagattgtgattactaccaaattcttccttcaagagcatttgcagagctcatattgagggtgccatctactggctcacagagctggtaacgctgggcagcaaagggtttctacctggaaatcccaaggcagcaacttttgtacattatgcctttcagattctgcacaatctcactgtgctctacaggcaagacaaaaac

SEQ ID NO: 17280 - DNA, 599 bp, Chicken  19866894225293_1
  misc_feature (1)..(114): n is any nucleotide
nnnnnnnnnnnnnnnnnnnnnnnnnnnnnnnnnnnnnnnnnnnnnnnnnnnnnnnnnnnnnnnnnnnnnnnnnnnnnnnnnnnnnnnnnnnnnnnnnnnnnnnnnnnnnnnnnntgggatggaaaccagctcctggcctccgctattggtggggggaatcaccacttctacctcacgtcagcagtttccagatggagctggggcatgcagtatgtagggcttggaagagccctgcctttgcagaaggtcttctgggctttagctgcaggcattcgactgtcacagaagcaatgcagcacrtctgcctccgtggggttctgcagtaggatttttcatccagcattttatacatccatcaaccgtctgggcatatagatggggatgggaggtgctgagctggccatgwagagagcagcctgtggtcagccacttttttatattgccattttaaaatgttccttatcacctacacccaggtgcacacactctgaaatgcaggcttctcccccaggaggagggggacagcccatggcagggcttgcagcaagcggtgacaaagcactcacgtgcttttccatgctcgccttcccctcagccac

SEQ ID NO: 17281 - DNA, 599 bp, Chicken  19866894225293_2
  misc_feature (1)..(8): n is any nucleotide
nnnnnnnntgggatggaaaccagctcctggcctccgctattggtggggggaatcaccacttctacctcacgtcagcagtttccagatggagctggggcatgcagtatgtagggcttggaagagccctgcctttgcagaaggtcttctgggctttagctgcaggcattcgactgtcacagaagcaatgcagcacrtctgcctccgtggggttctgcagtaggatttttcatccagcattttatacatccatcaaccgtctgggcatatagatggggatgggaggtgctgagctggccatgwagagagcagcctgtggtcagccacttttttatattgccattttaaaatgttccttatcacctacacccaggtgcacacactctgaaatgcaggcttctcccccaggaggagggggacagcccatggcagggcttgcagcaagcggtgacaaagcactcacgtgcttttccatgctcgccttcccctcagccacccggctcctcttgttttagctttgtttaaacagtctccttggtaacgggaaggaaaagcagaattctttcatcctcctcctgcctatctcagcaccaggaggaggc

SEQ ID NO: 17282 - DNA, 600 bp, Chicken  19866894225304_1
aagggaggtaagcagctatgaagaatagcagaaggacctgaggactggaagtaagctgctaagaaagtggcggatgaaattgcacgcagataaacagaaaacgatgcatgcgacaacaaaaatcccattttgcactaaagagcaaagcaccctgagatggcctcagcacagaaggagatcctggggttggcaggctgctccatggcagcttcaccactgctcagcgcttccagaaagcaaacaggacctcaccggcatccagcaaagggtgcgcagagcgctgttgcagcaccaggagcrcygcctctggcacacacacmgctctgtcaccttgctgctccctgccatggggacaaagctggctgatgggggaagcacagaggaacgagagaagcccccatttcaggccctgcttgtagcccagctgccagcaacgcggctcccccgtgcttcccattctgttatcgtgccttgcttcctcgcagcctttgcggtttctaccagactgtaaaccttctgggcaaggattccttatcagtttggcaagggcccgtgccacaacgctgtgtactttacggcacctataaaagattagagctt

SEQ ID NO: 17283 - DNA, 600 bp, Chicken  19866894225304_2
gggaggtaagcagctatgaagaatagcagaaggacctgaggactggaagtaagctgctaagaaagtggcggatgaaattgcacgcagataaacagaaaacgatgcatgcgacaacaaaaatcccattttgcactaaagagcaaagcaccctgagatggcctcagcacagaaggagatcctggggttggcaggctgctccatggcagcttcaccactgctcagcgcttccagaaagcaaacaggacctcaccggcatccagcaaagggtgcgcagagcgctgttgcagcaccaggagcrcygcctctggcacacacacmgctctgtcaccttgctgctccctgccatggggacaaagctggctgatgggggaagcacagaggaacgagagaagcccccatttcaggccctgcttgtagcccagctgccagcaacgcggctcccccgtgcttcccattctgttatcgtgccttgcttcctcgcagcctttgcggtttctaccagactgtaaaccttctgggcaaggattccttatcagtttggcaagggcccgtgccacaacgctgtgtactttacggcacctataaaagattagagcttta

SEQ ID NO: 17284 - DNA, 600 bp, Chicken  19866894225304_3
aagaatagcagaaggacctgaggactggaagtaagctgctaagaaagtggcggatgaaattgcacgcagataaacagaaaacgatgcatgcgacaacaaaaatcccattttgcactaaagagcaaagcaccctgagatggcctcagcacagaaggagatcctggggttggcaggctgctccatggcagcttcaccactgctcagcgcttccagaaagcaaacaggacctcaccggcatccagcaaagggtgcgcagagcgctgttgcagcaccaggagcrcygcctctggcacacacacmgctctgtcaccttgctgctccctgccatggggacaaagctggctgatgggggaagcacagaggaacgagagaagcccccatttcaggccctgcttgtagcccagctgccagcaacgcggctcccccgtgcttcccattctgttatcgtgccttgcttcctcgcagcctttgcggtttctaccagactgtaaaccttctgggcaaggattccttatcagtttggcaagggcccgtgccacaacgctgtgtactttacggcacctataaaagattagagctttattggccacttcagtgtcc

SEQ ID NO: 17285 - DNA, 600 bp, Chicken  19866894225304_4
ttcaggccctgcttgtagcccagctgccagcaacgcggctcccccgtgcttcccattctgttatcgtgccttgcttcctcgcagcctttgcggtttctaccagactgtaaaccttctgggcaaggattccttatcagtttggcaagggcccgtgccacaacgctgtgtactttacggcacctataaaagattagagctttattggccacttcagtgtcccgcaccaataacctcagagcggcagtggtaacccggccgtgaacagcacacagccgccgagccgaggcaaacaaacagtgwgaagccgcccctctgtaaaaataactgatttccaccccagctttcaggcttggcaagaaagcgatcacactgacactgagcactgaacaactcagacccgtacgtgtccctaaagcagacattacacacaacagccatcacacccgacaaccatcaaccgaacgacaatcacacacaacaaccatcacagacaacagtcatcacacccaacaaccattgcatccaacagctatcacagccagcaaacatcgcacccaacaaccatcacacacaacagccatcacccaacagccatcgcac

SEQ ID NO: 17286 - DNA, 600 bp, Chicken  19866894225308_1
ctattcaactgtgcaccatcttccactcagatggaccactgacctaatcagaatgttagataccatgcattggatatgatggacagccactcacactcccaaattatgggcttatttgagggacagacagatcagccagaaaactacaagtcagcagttctgttaaaaacttcaaaaactgacttctcattataaggaaacacataaaatacagaacaagaatttcaaatgtagaatgaaactcagaaaagtaacaaaagtctgttagtaagcatagtgaatggtattccaatatactcyttacaagcattctacaacattatacattaaaagtatgttaaaatattaaaattatgttagtatcatgtaatttctaaaatgcttaaaatcagtacttgtgttaatttttgttaatgctaacaatttcagtaatttagcagcttttgtaacatatacattatatagtgatattttagtatcatctatataggtgatacgtacaaacacagagcttgttctctctgtatactttttcccctcaaaaaatgactattcttagttgaatcttggactgtgataaagggagaggaagaagaggag

SEQ ID NO: 17287 - DNA, 600 bp, Chicken  19866894225310_1
cctgaaaacacagaaatacaacctgaaagttcagaaacacttttatacggatttgcttatataccattcctcaggaggaatgcttcagtaatcacactgcatctcaatctcacttatatctgcttgaattcaaacagctaatatgctgtaattcgagactttacccgtgtaatctgaggacaatatttaagaagcgtgcttttcacctcaatctccctgtacgctaattaagccatcggtctcagatacaacagctgccaacacaggctgttattactgacacttcagagcaccaagagygtgccctgagcctgtactccaagcactctgtgccccatccctcagctcctagccctgttccagcacccatctcttcgccctctcacctggttttagcttcgacaccaacggaggcagtggagcttgcagactcctcagatactgagcgctgaaggactggtgttagctgcttggtgctgtccacttccacctgggcatcctcttctgcagattgctctttgacttctgtttgaaaaatacagataacaattatttatttcaactactaaaaccaggcctgtaagcaggcaatgcaaatac

SEQ ID NO: 17288 - DNA, 600 bp, Chicken  19866894225310_2
actctgtgccccatccctcagctcctagccctgttccagcacccatctcttcgccctctcacctggttttagcttcgacaccaacggaggcagtggagcttgcagactcctcagatactgagcgctgaaggactggtgttagctgcttggtgctgtccacttccacctgggcatcctcttctgcagattgctctttgacttctgtttgaaaaatacagataacaattatttatttcaactactaaaaccaggcctgtaagcaggcaatgcaaatacctatttatagacaaattaactcayatcatcaaacgtgayaaaakagatgagggagaaaacaccatctttatgcacataactaaaacaagaaactgaatgctcgtgaagttatttacataacacggtgtatgatggtcagctggagatgttccataagccatgaggcaggggagggctgctcactgacaaccctctcctgagagacagcaggtttacacgcatttccagctgtaagaagctgcactctctttctcccctcacctccttttctgccctttcagctcagaacaaatattgaggtgacaacgttaacctgggctataa

SEQ ID NO: 17289 - DNA, 600 bp, Chicken  19866894225310_3
cctcagctcctagccctgttccagcacccatctcttcgccctctcacctggttttagcttcgacaccaacggaggcagtggagcttgcagactcctcagatactgagcgctgaaggactggtgttagctgcttggtgctgtccacttccacctgggcatcctcttctgcagattgctctttgacttctgtttgaaaaatacagataacaattatttatttcaactactaaaaccaggcctgtaagcaggcaatgcaaatacctatttatagacaaattaactcayatcatcaaacgtgayaaaakagatgagggagaaaacaccatctttatgcacataactaaaacaagaaactgaatgctcgtgaagttatttacataacacggtgtatgatggtcagctggagatgttccataagccatgaggcaggggagggctgctcactgacaaccctctcctgagagacagcaggtttacacgcatttccagctgtaagaagctgcactctctttctcccctcacctccttttctgccctttcagctcagaacaaatattgaggtgacaacgttaacctgggctataacacaacgtttttctc

SEQ ID NO: 17290 - DNA, 600 bp, Chicken  19866894225310_4
gctcctagccctgttccagcacccatctcttcgccctctcacctggttttagcttcgacaccaacggaggcagtggagcttgcagactcctcagatactgagcgctgaaggactggtgttagctgcttggtgctgtccacttccacctgggcatcctcttctgcagattgctctttgacttctgtttgaaaaatacagataacaattatttatttcaactactaaaaccaggcctgtaagcaggcaatgcaaatacctatttatagacaaattaactcayatcatcaaacgtgayaaaakagatgagggagaaaacaccatctttatgcacataactaaaacaagaaactgaatgctcgtgaagttatttacataacacggtgtatgatggtcagctggagatgttccataagccatgaggcaggggagggctgctcactgacaaccctctcctgagagacagcaggtttacacgcatttccagctgtaagaagctgcactctctttctcccctcacctccttttctgccctttcagctcagaacaaatattgaggtgacaacgttaacctgggctataacacaacgtttttctcccaga

SEQ ID NO: 17291 - DNA, 600 bp, Chicken  19866894225314_1
aagaaattcctggaggtcagacgattagaaaaagaaaggaaaaaaaaaaagcacacggccgtggtctgatgggcccaatgcagcagctccttcagagacataacagagtttccttcaatgcttgttctgtaaatatttaagctgctctgtaacatttttacaatgtacttaggaagcgtaaatcccagcagcacagcacggcacgccgtcggcgtggcacatgctgggatgctccaggaacacaaacacggacatctcccatgctaacactgcactctgggccaggagggcacaaccacracgctgctgggatggagggcccaccgagctcagggtcttcccagcaccaaagcaaggagggaayaatcaccttcacccccagacggagggtgcctatgcaccgcactacgtataacccccaacaggacgacttacagctgcacgccggctggcagcttctatccaaagccgcatttctgcccattgccttctgcacacrcagcacctgagatggcttctcacaggtgagtgtgccctcgtgatggaaaaacagcatcacgccgactgacgcatccatactcagggtggttcccagatgga

SEQ ID NO: 17292 - DNA, 600 bp, Chicken  19866894225314_2
tctgatgggcccaatgcagcagctccttcagagacataacagagtttccttcaatgcttgttctgtaaatatttaagctgctctgtaacatttttacaatgtacttaggaagcgtaaatcccagcagcacagcacggcacgccgtcggcgtggcacatgctgggatgctccaggaacacaaacacggacatctcccatgctaacactgcactctgggccaggagggcacaaccacracgctgctgggatggagggcccaccgagctcagggtcttcccagcaccaaagcaaggagggaayaatcaccttcacccccagacggagggtgcctatgcaccgcactacgtataacccccaacaggacgacttacagctgcacgccggctggcagcttctatccaaagccgcatttctgcccattgccttctgcacacrcagcacctgagatggcttctcacaggtgagtgtgccctcgtgatggaaaaacagcatcacgccgactgacgcatccatactcagggtggttcccagatggaaacgtggcgtagctttatgagctttgcttggacacggtggtttccaataaatgcacatcttccc

SEQ ID NO: 17293 - DNA, 505 bp, Chicken  19866894225314_3
ggcacgccgtcggcgtggcacatgctgggatgctccaggaacacaaacacggacatctcccatgctaacactgcactctgggccaggagggcacaaccacracgctgctgggatggagggcccaccgagctcagggtcttcccagcaccaaagcaaggagggaayaatcaccttcacccccagacggagggtgcctatgcaccgcactacgtataacccccaacaggacgacttacagctgcacgccggctggcagcttctatccaaagccgcatttctgcccattgccttctgcacacrcagcacctgagatggcttctcacaggtgagtgtgccctcgtgatggaaaaacagcatcacgccgactgacgcatccatactcagggtggttcccagatggaaacgtggcgtagctttatgagctttgcttggacacggtggtttccaataaatgcacatcttcccaactaaccaacaccgttagcagttctgtgctgtcatttag

SEQ ID NO: 17294 - DNA, 599 bp, Chicken  19866894225316_1
  misc_feature (1)..(96): n is any nucleotide
nnnnnnnnnnnnnnnnnnnnnnnnnnnnnnnnnnnnnnnnnnnnnnnnnnnnnnnnnnnnnnnnnnnnnnnnnnnnnnnnnnnnnnnnnnnnnnnngatcagaggaacagagggagaagtgatcttggttgggtatgctgcttacaccaggcagcagtgattagctctttctatgtgatgtaataaacgtttgtgagagaccaaataggcatagaacagagcaggttgggtgacaagactaaccctgcgatgaagaacttgaggaagaagggttgggccagagaccaggtaaaggtaggrctctgagaaggcatagaacataatagagcataattccaggggtaagcatgtttgagatccctgtggtgtaagtcattgatgattaataactctcttagagccagaaggtggttaacaagtcaggtcttgctgtcttgtgttctctgtagtgctatgataagtaacactgytgtggctgaagagggatagccaggatggggcacgggaaggatgagaagaagaggacaaaaatgggagatgtgcagyttccaggcagcctgctctggagatggcagcctgtacrcagtgactatcccctg

SEQ ID NO: 17295 - DNA, 600 bp, Chicken  19866894225316_2
ctatgtgatgtaataaacgtttgtgagagaccaaataggcatagaacagagcaggttgggtgacaagactaaccctgcgatgaagaacttgaggaagaagggttgggccagagaccaggtaaaggtaggrctctgagaaggcatagaacataatagagcataattccaggggtaagcatgtttgagatccctgtggtgtaagtcattgatgattaataactctcttagagccagaaggtggttaacaagtcaggtcttgctgtcttgtgttctctgtagtgctatgataagtaacactgytgtggctgaagagggatagccaggatggggcacgggaaggatgagaagaagaggacaaaaatgggagatgtgcagyttccaggcagcctgctctggagatggcagcctgtacrcagtgactatcccctgagaggctattgcaggtctgactgggcttgaggaagacagttttgtagatccaagcaaacaccttgagctgtaagtggaaacaacatcctatgttcttgttatacaatacctaggaaaatcttacctgaatacagttgtgacagtgcattgggtatgaagaagttgtgttgt

SEQ ID NO: 17296 - DNA, 567 bp, Chicken  19866894225316_3
gcgatgaagaacttgaggaagaagggttgggccagagaccaggtaaaggtaggrctctgagaaggcatagaacataatagagcataattccaggggtaagcatgtttgagatccctgtggtgtaagtcattgatgattaataactctcttagagccagaaggtggttaacaagtcaggtcttgctgtcttgtgttctctgtagtgctatgataagtaacactgytgtggctgaagagggatagccaggatggggcacgggaaggatgagaagaagaggacaaaaatgggagatgtgcagyttccaggcagcctgctctggagatggcagcctgtacrcagtgactatcccctgagaggctattgcaggtctgactgggcttgaggaagacagttttgtagatccaagcaaacaccttgagctgtaagtggaaacaacatcctatgttcttgttatacaatacctaggaaaatcttacctgaatacagttgtgacagtgcattgggtatgaagaagttgtgttgttcagagtgctgctctgcttcattcactgtgcctttgaacacat

SEQ ID NO: 17297 - DNA, 530 bp, Chicken  19866894225316_4
accaggtaaaggtaggrctctgagaaggcatagaacataatagagcataattccaggggtaagcatgtttgagatccctgtggtgtaagtcattgatgattaataactctcttagagccagaaggtggttaacaagtcaggtcttgctgtcttgtgttctctgtagtgctatgataagtaacactgytgtggctgaagagggatagccaggatggggcacgggaaggatgagaagaagaggacaaaaatgggagatgtgcagyttccaggcagcctgctctggagatggcagcctgtacrcagtgactatcccctgagaggctattgcaggtctgactgggcttgaggaagacagttttgtagatccaagcaaacaccttgagctgtaagtggaaacaacatcctatgttcttgttatacaatacctaggaaaatcttacctgaatacagttgtgacagtgcattgggtatgaagaagttgtgttgttcagagtgctgctctgcttcattcactgtgcctttgaacacat

SEQ ID NO: 17298 - DNA, 600 bp, Chicken  19866894225323_1
caccaatccagcagccggacgctatgcacggggtccagcaccacctgcactccttggtcaaggcgtggcttcttgccattgtgaacaggggcgtcctggaagaccagacgcacgcgatgatgcctcatatctgtgctcacattgatggtgaactgcaaaagagagacacggaggtgctggaggaggcagacacgcagaaacatgcatttgtttgcaggtaagtgcaattgcagactgatcactgacactgggtatcagaattaattctttgtgttacattgggtgatgcaatagttacamtccaaaccagttccctgtggctggaaaccccaaataagagaactggtcacacttgaaagaacctctcagacttacaagaacagacacatgtgctgtcccgtgcattagcacacctgctctgctgctttctcacacaacacttctgtctggagctgagtttgtgttgtttttcccaacagtcagggactgaagrcacactgcagaactttggtcatacacgttttgttctcagaatttgctgccttcaggcaagaacagattccattttcctgcatcccacctcctgttccctgctggggt

SEQ ID NO: 17299 - DNA, 499 bp, Chicken  19866894225323_2
gcagaaacatgcatttgtttgcaggtaagtgcaattgcagactgatcactgacactgggtatcagaattaattctttgtgttacattgggtgatgcaatagttacamtccaaaccagttccctgtggctggaaaccccaaataagagaactggtcacacttgaaagaacctctcagacttacaagaacagacacatgtgctgtcccgtgcattagcacacctgctctgctgctttctcacacaacacttctgtctggagctgagtttgtgttgtttttcccaacagtcagggactgaagrcacactgcagaactttggtcatacacgttttgttctcagaatttgctgccttcaggcaagaacagattccattttcctgcatcccacctcctgttccctgctggggtattgactattctgctcccagctgctgcacacacacaggctcagcttcttgaagaagctctacacaaaccacacctcctgcatcgaatacaga

SEQ ID NO: 17300 - DNA, 600 bp, Chicken  19866894225337_1
actgcccaaacatatttaaaagtttaatgaaattataaacaaagaagactaggatttatagcaagcagctaagcactgctagacctcttcaaagtggcacacgatataacatctatacaaaagtttctccacgcagggttcaaagctattaagtgtaggactgatgttttatgaagacctacattttcctgaagacattcactgagattagactgacaccaagagttgcaatgaactaaatccacaaccagaaagtgatagtgtctcttgcttaatgtgaatatccagtatgctcagatkgagtcactagagttctgttccgcactaaaaaatgtgtakgattaattcatggactatagttgttgacagattgaaccaaagtgataacaaatattcctaaaaatcagcttctttcctcctgtggatggtcacttcagaaatgttggtgtttacttgcaggaagccttatttgaaagagaaaggaaaagcattatcttgacactaacttcttttgtgtgagcattgcctctctttacctgcttctccctttctaagggttaaaatgtgggaactctaaacagtaactcagataaggttctg

SEQ ID NO: 17301 - DNA, 600 bp, Chicken  19866894225337_2
caaagaagactaggatttatagcaagcagctaagcactgctagacctcttcaaagtggcacacgatataacatctatacaaaagtttctccacgcagggttcaaagctattaagtgtaggactgatgttttatgaagacctacattttcctgaagacattcactgagattagactgacaccaagagttgcaatgaactaaatccacaaccagaaagtgatagtgtctcttgcttaatgtgaatatccagtatgctcagatkgagtcactagagttctgttccgcactaaaaaatgtgtakgattaattcatggactatagttgttgacagattgaaccaaagtgataacaaatattcctaaaaatcagcttctttcctcctgtggatggtcacttcagaaatgttggtgtttacttgcaggaagccttatttgaaagagaaaggaaaagcattatcttgacactaacttcttttgtgtgagcattgcctctctttacctgcttctccctttctaagggttaaaatgtgggaactctaaacagtaactcagataaggttctggttaagaaacctaattctacatagctatactttcatatt

SEQ ID NO: 17302 - DNA, 600 bp, Chicken  19866894225346_1
aacaaatgtaagcattatttatgataaaagtcatgaaatcaggtaaaacatcagttaccgctgtaggtctaacagtgtgcactagcaaaaatgttacaccaccagttttgggtggctaaacatcatcattcttttaaaaggtttctttttgttgtgattaacacaatgttactgaaaatatttgtgtatttttcatgtgcttagaagcacaaagttttcattaattgggaaatttacttttccctatcagtgactgccaaatattcacagagcactttgaggatatcagtgtatcatttyacattgaatactggacagtgaagagcagtgaatgtacttattatgggaggccttcacataatgaagttacaaggaggataaataatttgacaatagataaatacaaaaacttyggtgctctgaaattttttataagtattcaactgatgaggtcattagaatcatctctaaagtttcatcggtgtcaaatcaaaaggtagatttacctttttaaaagcatttcaaaggtgaaccatcggcagtcacctcaattgagttaatttctcgctacccttaaatgctttgagagatgagaacaag

SEQ ID NO: 17303 - DNA, 600 bp, Chicken  19866894225346_2
ggctaaacatcatcattcttttaaaaggtttctttttgttgtgattaacacaatgttactgaaaatatttgtgtatttttcatgtgcttagaagcacaaagttttcattaattgggaaatttacttttccctatcagtgactgccaaatattcacagagcactttgaggatatcagtgtatcatttyacattgaatactggacagtgaagagcagtgaatgtacttattatgggaggccttcacataatgaagttacaaggaggataaataatttgacaatagataaatacaaaaacttyggtgctctgaaattttttataagtattcaactgatgaggtcattagaatcatctctaaagtttcatcggtgtcaaatcaaaaggtagatttacctttttaaaagcatttcaaaggtgaaccatcggcagtcacctcaattgagttaatttctcgctacccttaaatgctttgagagatgagaacaaggatggctgaatattcaggaagttcatctacgtagctaaaccgaaggacagcttaaaggccagctcaacagcgacttccgcgactgagtcatggaaacaaacataaaactcctg

SEQ ID NO: 17304 - DNA, 599 bp, Chicken  19866894225349_1
  misc_feature (1)..(115): n is any nucleotide
nnnnnnnnnnnnnnnnnnnnnnnnnnnnnnnnnnnnnnnnnnnnnnnnnnnnnnnnnnnnnnnnnnnnnnnnnnnnnnnnnnnnnnnnnnnnnnnnnnnnnnnnnnnnnnnnnnntatccccgctgcaattttgctcaacgcccaaaattgattaaacaagccacgtgctcaagcctggagctggagaccaaagggcaacagagagaccgagaaacagctgtggacaatacggcttactttatatagctcttcctctccgcactgcccaaataggccacttcttggctaataaactggcraggacaagaaggcaggcaggctcagccccgggccggcagctcctcccccgctctcacctcgcagccgtgagccagcagaggccgctacagaccgcccggcrctgctgccgaatgcacggcttttctcccctcccatcccaacacaaaatccaattccggcatttttcttccactccttaatttcacacctgctttccctcccacacgaattacttcgatgaagcccagtccccgcagtggcaactctttgttcccgcagcaaatcgcaacctgcaggctgctgcacacagacatctatc

SEQ ID NO: 17305 - DNA, 599 bp, Chicken  19866894225349_2
  misc_feature (1)..(14): n is any nucleotide
nnnnnnnnnnnnnntatccccgctgcaattttgctcaacgcccaaaattgattaaacaagccacgtgctcaagcctggagctggagaccaaagggcaacagagagaccgagaaacagctgtggacaatacggcttactttatatagctcttcctctccgcactgcccaaataggccacttcttggctaataaactggcraggacaagaaggcaggcaggctcagccccgggccggcagctcctcccccgctctcacctcgcagccgtgagccagcagaggccgctacagaccgcccggcrctgctgccgaatgcacggcttttctcccctcccatcccaacacaaaatccaattccggcatttttcttccactccttaatttcacacctgctttccctcccacacgaattacttcgatgaagcccagtccccgcagtggcaactctttgttcccgcagcaaatcgcaacctgcaggctgctgcacacagacatctatccaaatgatggccttgaccactgctgtgcacccacatttcttcccccagaagtttctccgtgacacttcagagcacgcagtcctttcatttagtcagagacc

SEQ ID NO: 17306 - DNA, 600 bp, Chicken  19866894225354_1
acggtgagggagaaacaaacaaggaataaagaaagatactcagtctggggaaacaggagacataagtgcaacatttctgaagataaaatggttttatattccatctcaggtgctaaaatggctttgtgtccatcctagaagctatcagtcttctcatcagccaaccttggcatctgttccactgcatacgtatttactcttcccagattcactagaggaatctcagttggaaaaataaagcaggcatctatctcctgcttttaattattagcacaaagatttgttgttacaaagagaacytgcccctcttttttacgattaaagattctgctggctttgctgttttgtggttagctggttgcttgtgtttgtgtgtggaaatctttgttttcgcgccgtgttgtttctctggaatgctatgagcagttgtttttgtttgctcatacatgggtggagctaactatctaattgggtaaatatttgcaatgttatgattgcatgcacagaagacaaagagggcctgattcctactgacacgagtggccttttacactggcctrrcaatgtaaaggcttacataaaattgataactatgagctc

SEQ ID NO: 17307 - DNA, 600 bp, Chicken  19866894225354_2
ttaattattagcacaaagatttgttgttacaaagagaacytgcccctcttttttacgattaaagattctgctggctttgctgttttgtggttagctggttgcttgtgtttgtgtgtggaaatctttgttttcgcgccgtgttgtttctctggaatgctatgagcagttgtttttgtttgctcatacatgggtggagctaactatctaattgggtaaatatttgcaatgttatgattgcatgcacagaagacaaagagggcctgattcctactgacacgagtggccttttacactggcctrrcaatgtaaaggcttacataaaattgataactatgagctcacttcttatggtcacaccatgtaaagtggatttagtataaataatcgtcctgcttgtatttatttcacatttcagatggactggtattcttyggatgggaggccttgtggttacagccacaaaggaggaaactgtcccatgcattgactttgtgttcagaagtgcacaactrcccctagccttagtcggacttgrtgctaggcactgctgaaaagcaaggcatgtatttaccagcctgtcttccracgtgtgagttttcc

SEQ ID NO: 17308 - DNA, 600 bp, Chicken  19866894225354_3
taattattagcacaaagatttgttgttacaaagagaacytgcccctcttttttacgattaaagattctgctggctttgctgttttgtggttagctggttgcttgtgtttgtgtgtggaaatctttgttttcgcgccgtgttgtttctctggaatgctatgagcagttgtttttgtttgctcatacatgggtggagctaactatctaattgggtaaatatttgcaatgttatgattgcatgcacagaagacaaagagggcctgattcctactgacacgagtggccttttacactggcctrrcaatgtaaaggcttacataaaattgataactatgagctcacttcttatggtcacaccatgtaaagtggatttagtataaataatcgtcctgcttgtatttatttcacatttcagatggactggtattcttyggatgggaggccttgtggttacagccacaaaggaggaaactgtcccatgcattgactttgtgttcagaagtgcacaactrcccctagccttagtcggacttgrtgctaggcactgctgaaaagcaaggcatgtatttaccagcctgtcttccracgtgtgagttttcca

SEQ ID NO: 17309 - DNA, 600 bp, Chicken  19866894225354_4
gcgccgtgttgtttctctggaatgctatgagcagttgtttttgtttgctcatacatgggtggagctaactatctaattgggtaaatatttgcaatgttatgattgcatgcacagaagacaaagagggcctgattcctactgacacgagtggccttttacactggcctrrcaatgtaaaggcttacataaaattgataactatgagctcacttcttatggtcacaccatgtaaagtggatttagtataaataatcgtcctgcttgtatttatttcacatttcagatggactggtattcttyggatgggaggccttgtggttacagccacaaaggaggaaactgtcccatgcattgactttgtgttcagaagtgcacaactrcccctagccttagtcggacttgrtgctaggcactgctgaaaagcaaggcatgtatttaccagcctgtcttccracgtgtgagttttccacagatgtttcctaagtgaacgttaaggccagatagatgagtccaaatacctgaagctgctttgaaaattgcaagttgtttgtgctcatgaaaggcgtatttatatcagtgataaatacggtgttgaaacct

SEQ ID NO: 17310 - DNA, 600 bp, Chicken  19866894225354_5
gtaaatatttgcaatgttatgattgcatgcacagaagacaaagagggcctgattcctactgacacgagtggccttttacactggcctrrcaatgtaaaggcttacataaaattgataactatgagctcacttcttatggtcacaccatgtaaagtggatttagtataaataatcgtcctgcttgtatttatttcacatttcagatggactggtattcttyggatgggaggccttgtggttacagccacaaaggaggaaactgtcccatgcattgactttgtgttcagaagtgcacaactrcccctagccttagtcggacttgrtgctaggcactgctgaaaagcaaggcatgtatttaccagcctgtcttccracgtgtgagttttccacagatgtttcctaagtgaacgttaaggccagatagatgagtccaaatacctgaagctgctttgaaaattgcaagttgtttgtgctcatgaaaggcgtatttatatcagtgataaatacggtgttgaaaccttaccaggtgtccgctgcatgtgttattattagcaaatctacaaagtacactgtaaagatctaagatctacacacttacga

SEQ ID NO: 17311 - DNA, 600 bp, Chicken  19866894225354_6
tgcatgcacagaagacaaagagggcctgattcctactgacacgagtggccttttacactggcctrrcaatgtaaaggcttacataaaattgataactatgagctcacttcttatggtcacaccatgtaaagtggatttagtataaataatcgtcctgcttgtatttatttcacatttcagatggactggtattcttyggatgggaggccttgtggttacagccacaaaggaggaaactgtcccatgcattgactttgtgttcagaagtgcacaactrcccctagccttagtcggacttgrtgctaggcactgctgaaaagcaaggcatgtatttaccagcctgtcttccracgtgtgagttttccacagatgtttcctaagtgaacgttaaggccagatagatgagtccaaatacctgaagctgctttgaaaattgcaagttgtttgtgctcatgaaaggcgtatttatatcagtgataaatacggtgttgaaaccttaccaggtgtccgctgcatgtgttattattagcaaatctacaaagtacactgtaaagatctaagatctacacacttacgaagagaacgtaatgaacagttaga

SEQ ID NO: 17312 - DNA, 600 bp, Chicken  19866894225354_7
ttttacactggcctrrcaatgtaaaggcttacataaaattgataactatgagctcacttcttatggtcacaccatgtaaagtggatttagtataaataatcgtcctgcttgtatttatttcacatttcagatggactggtattcttyggatgggaggccttgtggttacagccacaaaggaggaaactgtcccatgcattgactttgtgttcagaagtgcacaactrcccctagccttagtcggacttgrtgctaggcactgctgaaaagcaaggcatgtatttaccagcctgtcttccracgtgtgagttttccacagatgtttcctaagtgaacgttaaggccagatagatgagtccaaatacctgaagctgctttgaaaattgcaagttgtttgtgctcatgaaaggcgtatttatatcagtgataaatacggtgttgaaaccttaccaggtgtccgctgcatgtgttattattagcaaatctacaaagtacactgtaaagatctaagatctacacacttacgaagagaacgtaatgaacagttagaactgatctactgttaacagataattgagcctttctttgtacaagggttaa

SEQ ID NO: 17313 - DNA, 569 bp, Chicken  19866894225362_1
agtagatatgtaccaatcagcttgctttctgaaaggctatgttggcacttgatctccattactcataatgatgttcatggtgtatttctcaagaataaagtctataaaaatatgtaatggtgcctactgctggtagaagctatatacttgtgaagtactctatgatgctatctttgccatagagggggggaaaaaaaagcattatctgtcactgtcacactggaaaactgtatttctatgtcatgacctacttgtaacaggtttcacttagcaaataacaagattctgcagaatagcacraatttcccactgagcaatttcttgctttcatagtagtatgcttatgtatgggttgttttgttgwtggtgttttttgttttatttttaacccagtgaatgttcttgcacgtgtgtcgcacatagaaattggagtttgtgatactgatggcttattgcttctacctaacagtcctaacattgggaaaattgaccaaatttagtattggcaaaagctagtgaaaacccactggtttcactgaagcttctcatgcaagttcactccacaaatg

SEQ ID NO: 17314 - DNA, 505 bp, Chicken  19866894225362_2
ataatgatgttcatggtgtatttctcaagaataaagtctataaaaatatgtaatggtgcctactgctggtagaagctatatacttgtgaagtactctatgatgctatctttgccatagagggggggaaaaaaaagcattatctgtcactgtcacactggaaaactgtatttctatgtcatgacctacttgtaacaggtttcacttagcaaataacaagattctgcagaatagcacraatttcccactgagcaatttcttgctttcatagtagtatgcttatgtatgggttgttttgttgwtggtgttttttgttttatttttaacccagtgaatgttcttgcacgtgtgtcgcacatagaaattggagtttgtgatactgatggcttattgcttctacctaacagtcctaacattgggaaaattgaccaaatttagtattggcaaaagctagtgaaaacccactggtttcactgaagcttctcatgcaagttcactccacaaatg

SEQ ID NO: 17315 - DNA, 600 bp, Chicken  19866894225364_1
ctagataacatcttcctttttccagctgccagtagttacgaggacgtcatgcaagagcaataactaactggtatgaactggtgccttggcctcgcaaatcttgtagtcttgactcctgttctgatgagctgtgctatttccttagtgggttctgtacttttgatttcaaggggattacttgtaggagggaggcatgaggagctgaggtctttgtgaggaaaaccatggatgctttgtgctcaagtgaactttctatgctttaaaatcatactattaattctttctatgtcatacgttagrtgtgtatgtctaagtcttatcttgatcataaaatcaaagccaagccactcaggagcttccaggactgaggtttcattatccatccctactcccactacaagcttatagttttggaaacaaaaaaagcttgttgtgatggattaactccatttggatggattaagtttgaggagctccaatgatgcagcagtatgcaaaccaaatgtagacccatcatttaaaaggtttttacctatcacttctcttgaatattatttctgacagcaaaagtcttaaaaggacagttatagctaaactgaa

SEQ ID NO: 17316 - DNA, 599 bp, Chicken  19866894225371_1
  misc_feature (1)..(211): n is any nucleotide
nnnnnnnnnnnnnnnnnnnnnnnnnnnnnnnnnnnnnnnnnnnnnnnnnnnnnnnnnnnnnnnnnnnnnnnnnnnnnnnnnnnnnnnnnnnnnnnnnnnnnnnnnnnnnnnnnnnnnnnnnnnnnnnnnnnnnnnnnnnnnnnnnnnnnnnnnnnnnnnnnnnnnnnnnnnnnnnnnnnnnnnnnnnnnnnnnnnnnnnnnnnnnnnnnnnactgtggctggctccgctcctgaagctgtcctggtgcctgggagtcctgtagagctgcactgcttcctatctgacacagccgtggggaygtgagggagggctcacagccataccatgtgttccctgcccttggagtggctgcaggacaggcaggtgaggaatggggtcaccatgcccaaaattctcaggggcagctcacggaaagggatttctgccttacctaacatctgcacagattcattcctggtggagggttcacatgggtatgaatgaaatgtagaaagagaaggcagcctttgtgttccactggacgtgaaagctacttccattacaaagaaaatgcagaggtgatcgtgaaatctgcaaatactttacttactgtgagtct

SEQ ID NO: 17317 - DNA, 600 bp, Chicken  19866894225379_1
ggaagccccaacggtctgactgcatataatacatatctaatgtgtgtggttcctttttaaattcagacagtgctacactcatgttctttgtgacagagtggtataatggtaagatgccttcagataaagcaggacacaagctgagccatgcgaagcaagaaggctgctgggctgaaatgcaactttctagaaatcaacagggtgcagctataccaaataccaagcccataatttgaatgttctcttttctctagataatagccctatgaataataagtttttcttctttaaaatgtcagkctttgagagagtacatagcaagaaagcaagggcattaatggcctgattaactgaagagtctgcttctcctcctctgtgatcagcattattagttctgggaaaaatggccaaatgattagaccaaatttgtgacctcccacactaagaggaaagaaagcctcagtggcaagatctttttattgttcacattcttaaaaaaaaaaaaataagaagtggtgcaaatgttctccttggctaagtagaaaggcttctctgctgagaggaaaatgatgcatttggtcaaaataaacagctgatgct

SEQ ID NO: 17318 - DNA, 600 bp, Chicken  19866894225381_1
ccataacatgcctggaaaatggcagcagggattacctgagcacacagaaggcagattaaaaagtcacaaaccagtggcaggtggtgtttgtgccatcataatttgcacaagacagtgctgcacatgtgagccataaaaagggatgaaaggaagcgctgctggcaatgggttgtgttgactaaactagaacagaaatctgaattttgtcaatgcgggggcaaagctggcacctgctgataaaaaagggctgtctgcttattcatggcaaagatgtcagctgctctgccagcagagatggarcccattgccgtgtcttcagatggagctctctggggtgggagcagttaggctggtgtgctgcaagcactaggccgggctccggtccattggcaragctgttggtgggaaaggcaattctggctttgctttttctttccacgtggatttgcagtgatttttccttcctcaggccgtgcagggagaatgaacaaaggcaccacattggcctcagctgaaggaggatccctgggcttggctcttcttgtcttcgtgtttcttggctcactacctggctctgaagtcccagggatggcagtggtg

SEQ ID NO: 17319 - DNA, 600 bp, Chicken  19866894225381_2
catcataatttgcacaagacagtgctgcacatgtgagccataaaaagggatgaaaggaagcgctgctggcaatgggttgtgttgactaaactagaacagaaatctgaattttgtcaatgcgggggcaaagctggcacctgctgataaaaaagggctgtctgcttattcatggcaaagatgtcagctgctctgccagcagagatggarcccattgccgtgtcttcagatggagctctctggggtgggagcagttaggctggtgtgctgcaagcactaggccgggctccggtccattggcaragctgttggtgggaaaggcaattctggctttgctttttctttccacgtggatttgcagtgatttttccttcctcaggccgtgcagggagaatgaacaaaggcaccacattggcctcagctgaaggaggatccctgggcttggctcttcttgtcttcgtgtttcttggctcactacctggctctgaagtcccagggatggcagtggtggtgctgaccaggttcatcagtgagccccattcaggcaaggatctactaacatgcatgagcaaaagattaatgattgggtcaaattctgaccag

SEQ ID NO: 17320 - DNA, 562 bp, Chicken  19866894225381_3
ctggctttgctttttctttccacgtggatttgcagtgatttttccttcctcaggccgtgcagggagaatgaacaaaggcaccacattggcctcagctgaaggaggatccctgggcttggctcttcttgtcttcgtgtttcttggctcactacctggctctgaagtcccagggatggcagtggtggtgctgaccaggttcatcagtgagccccattcaggcaaggatctactaacatgcatgagcaaaagattaatgattgggtcaaattctgaccagcttctagaaaagaaatttgagtraaattttttttttttgcatatgatgagtattagattgttatcctggtcatgtgaaactctcacgctgatttaatctctcagtcttctgaagtggaagatttcagaaggatgcaagaggaagatctgcctctcctattaatcatagagtagaatcagcgagtggcttgggttgggagagacctcaaggatcatcaagcttccaatttgttcttagtttggtatagcatctccaatgcatttgttaacaataaaataataaaaa

SEQ ID NO: 17321 - DNA, 600 bp, Chicken  19866894225383_1
aaataacaggaggagagaagcaagagttaatcaagaaattcctacctctaccacagtcagggcccaaaaagccaaggaagcaatggcaagttccagacacgcagtctccattcccatagcaattactgggacaattatccactgattctggaaagaaacaaaagttagattaggcaagaaaacaccactgagtttggtagggttctggatggcaggacagctgaaacctctaaacaaccattgcagctgggaatagaagcatcagccttgagctgctgtaatgggagctcatccattcayagcaacggatggttcagcatctcacatcattgcctatggactgcaaaccctatgaccaaaaccacagccactcagcacccaccaaattttttcctcactcaggacctgagaacttttcaccctgcttgtttttcggaccattttcccttgctgaaggtactggagagaaacaataaacacagtttatgtcctggcagaacgtgcatttttggtctgatattgttgagtggaaaaagtgaaatggggcatttctttgcacccaacacaggtgatttatgaaagacatattcccctatgaag

SEQ ID NO: 17322 - DNA, 600 bp, Chicken  19866894225384_1
ctgccgaatggaaatctttaataaaacttagactggggctgaaaagtacaacaagagcagggttcatttgtggatatattttatttttttcctctcctttctaaataagcccttgctcttgaagcacggtgactcctttgcttgctgatgtacagcactggctgcaggctcccccagatgattcacttcctcattgtgaagctagtggtgacctggggtgctggctaggtcagaacacggctcatgcgggcagctgctccccagcgatgttattacagagctccttaatggctatgcacrtctcaagcccacagatgcgccgctctcgcagcacgcagcgcttgcagttgggccagaagggaaaacctacatcttgcagcacgtctgaaggagatgtgtggctgggactgtgcgaagcagacaactgatgggaactgaagcaccaggctaatagcaatgatggctgcagcagtttgtgacacgaaggatttctgtgtgcattaaggcgtaactgatacatacagagcgctcgagccattactgatgtgcagcgggctttggaataaaacattgctggttttcagcaacaagtaacaatgc

SEQ ID NO: 17323 - DNA, 600 bp, Chicken  19866894225386_1
ggatttgtttcaaatccaacgcttgatttacggtgctaccctgactgccaaagccttgggagacaagggaaaaaacatttacaacagcactggacggaaggagaaaacagaacttgggacagcatcacggccttcaggacagtcacccttacaaggaatccagtgcagcaggtcagtgaggtacaggcttactgctggtactgaattacaggctggctcatgaggtatcgacattacatctactctcaaaacagaggcagggagaaggagaaggctggctgtatttctaagcccagcttygtgagattgtgcttttcctctcccttcccgccagcgttttgtttctaacttgcctgtgtagttttggggtgcttttacartggcagcaatgacaagcatgcatcgtcctgtaaacattaactacagaaacttcatatacaatgcagaatgatgcaaggcagcaaagacgtacgatgtcacacttccaaaggaaggaccctgcagacaggttttctgcacagcaggtacatcagaaggttcacagaaagcctgtctcagtaccaaaaggtttctttgcaacaatcctaacgtacctgcagc

SEQ ID NO: 17324 - DNA, 600 bp, Chicken  19866894225386_2
acaacagcactggacggaaggagaaaacagaacttgggacagcatcacggccttcaggacagtcacccttacaaggaatccagtgcagcaggtcagtgaggtacaggcttactgctggtactgaattacaggctggctcatgaggtatcgacattacatctactctcaaaacagaggcagggagaaggagaaggctggctgtatttctaagcccagcttygtgagattgtgcttttcctctcccttcccgccagcgttttgtttctaacttgcctgtgtagttttggggtgcttttacartggcagcaatgacaagcatgcatcgtcctgtaaacattaactacagaaacttcatatacaatgcagaatgatgcaaggcagcaaagacgtacgatgtcacacttccaaaggaaggaccctgcagacaggttttctgcacagcaggtacatcagaaggttcacagaaagcctgtctcagtaccaaaaggtttctttgcaacaatcctaacgtacctgcagcagctacaaacccaacagagcaaagcagggaggcaaaactggcatgagtggagttctactttccttcacggcaaaacacaa

SEQ ID NO: 17325 - DNA, 600 bp, Chicken  19866894225390_1
aggctcagccacaccacaaaggagggctttgcacagccccggaggtgcaaatagtgctgagcacacagaggcatcgtggcccttcacacctgcactgggttttaaggccagaacagcactggtccagggctcaggttaacacctcagatggtatggagtgaaagcaacagaagaagaaagggaaaagagtttcctgcagccagaacatcccaggtctgtcacctgaaagggaaactgaggcaaatcactgttaggctcacgctgggatctacagcagtgccatggcagcaccttccctgskcctgctggagcctggggagatcaggagcacagatttttgctgtgaggctgtttgctgctgagctgaaccagttggtggtgggcaggggctgctgctgcaccgagctgcagtgacacggtggcacagtgcagtgccactggctccatgtcacctcggaggggcacagcgctgggcccagaggtgaccaccagccacgctcagaggctgtaggactgcatctccggtggcagatctgcccagcgctggtttaacaatccccctggccctgctccagacgggattgggaaatgagctggggt

SEQ ID NO: 17326 - DNA, 600 bp, Chicken  19866894225390_2
ggctcagccacaccacaaaggagggctttgcacagccccggaggtgcaaatagtgctgagcacacagaggcatcgtggcccttcacacctgcactgggttttaaggccagaacagcactggtccagggctcaggttaacacctcagatggtatggagtgaaagcaacagaagaagaaagggaaaagagtttcctgcagccagaacatcccaggtctgtcacctgaaagggaaactgaggcaaatcactgttaggctcacgctgggatctacagcagtgccatggcagcaccttccctgskcctgctggagcctggggagatcaggagcacagatttttgctgtgaggctgtttgctgctgagctgaaccagttggtggtgggcaggggctgctgctgcaccgagctgcagtgacacggtggcacagtgcagtgccactggctccatgtcacctcggaggggcacagcgctgggcccagaggtgaccaccagccacgctcagaggctgtaggactgcatctccggtggcagatctgcccagcgctggtttaacaatccccctggccctgctccagacgggattgggaaatgagctggggtt

SEQ ID NO: 17327 - DNA, 600 bp, Chicken  19866894225395_1
tgcgacgtgtctgacttaacgtagatcacaggagtgatgaatggtcacagggggtcacgtgccaccttatctgtagagccaagtcagcactggaacagcaggcgggatagggcttagctaagctgagtctggccctgtgcagagggaggagagcagcagcagctgtgcaaggtggcacgtcagcttgttcagcagcaagcagtgagtgacacctggaattgtgtcagcccttctgagcctgggcacggcctgaaagggaaaaggaaaagaaggaagcgtgcattttatttttaaaaacaygaacatyggrgagctgyggaactattttgaagtgaaaagacttttttccttttctcctcaattaatagaagttcttcaatrttaagttcactgtcatacattttcgagtcagcctcaaaaagcaagaacttattgtgatgagattaaaacaacctgctgccacagaaagctcgcgagaaagcaaaggctctgcaatgtgttgaagctgaaatattttccattagatcttggaatgatgggcaaatgagttcttgaggatattggcattgtcagaatgtgccacgtcactgtcggagcaaa

SEQ ID NO: 17328 - DNA, 600 bp, Chicken  19866894225395_2
tgtctgacttaacgtagatcacaggagtgatgaatggtcacagggggtcacgtgccaccttatctgtagagccaagtcagcactggaacagcaggcgggatagggcttagctaagctgagtctggccctgtgcagagggaggagagcagcagcagctgtgcaaggtggcacgtcagcttgttcagcagcaagcagtgagtgacacctggaattgtgtcagcccttctgagcctgggcacggcctgaaagggaaaaggaaaagaaggaagcgtgcattttatttttaaaaacaygaacatyggrgagctgyggaactattttgaagtgaaaagacttttttccttttctcctcaattaatagaagttcttcaatrttaagttcactgtcatacattttcgagtcagcctcaaaaagcaagaacttattgtgatgagattaaaacaacctgctgccacagaaagctcgcgagaaagcaaaggctctgcaatgtgttgaagctgaaatattttccattagatcttggaatgatgggcaaatgagttcttgaggatattggcattgtcagaatgtgccacgtcactgtcggagcaaaaattcct

SEQ ID NO: 17329 - DNA, 600 bp, Chicken  19866894225395_3
ctgacttaacgtagatcacaggagtgatgaatggtcacagggggtcacgtgccaccttatctgtagagccaagtcagcactggaacagcaggcgggatagggcttagctaagctgagtctggccctgtgcagagggaggagagcagcagcagctgtgcaaggtggcacgtcagcttgttcagcagcaagcagtgagtgacacctggaattgtgtcagcccttctgagcctgggcacggcctgaaagggaaaaggaaaagaaggaagcgtgcattttatttttaaaaacaygaacatyggrgagctgyggaactattttgaagtgaaaagacttttttccttttctcctcaattaatagaagttcttcaatrttaagttcactgtcatacattttcgagtcagcctcaaaaagcaagaacttattgtgatgagattaaaacaacctgctgccacagaaagctcgcgagaaagcaaaggctctgcaatgtgttgaagctgaaatattttccattagatcttggaatgatgggcaaatgagttcttgaggatattggcattgtcagaatgtgccacgtcactgtcggagcaaaaattcctgaa

SEQ ID NO: 17330 - DNA, 600 bp, Chicken  19866894225395_4
aacgtagatcacaggagtgatgaatggtcacagggggtcacgtgccaccttatctgtagagccaagtcagcactggaacagcaggcgggatagggcttagctaagctgagtctggccctgtgcagagggaggagagcagcagcagctgtgcaaggtggcacgtcagcttgttcagcagcaagcagtgagtgacacctggaattgtgtcagcccttctgagcctgggcacggcctgaaagggaaaaggaaaagaaggaagcgtgcattttatttttaaaaacaygaacatyggrgagctgyggaactattttgaagtgaaaagacttttttccttttctcctcaattaatagaagttcttcaatrttaagttcactgtcatacattttcgagtcagcctcaaaaagcaagaacttattgtgatgagattaaaacaacctgctgccacagaaagctcgcgagaaagcaaaggctctgcaatgtgttgaagctgaaatattttccattagatcttggaatgatgggcaaatgagttcttgaggatattggcattgtcagaatgtgccacgtcactgtcggagcaaaaattcctgaaggggaaa

SEQ ID NO: 17331 - DNA, 600 bp, Chicken  19866894225395_5
agtcagcactggaacagcaggcgggatagggcttagctaagctgagtctggccctgtgcagagggaggagagcagcagcagctgtgcaaggtggcacgtcagcttgttcagcagcaagcagtgagtgacacctggaattgtgtcagcccttctgagcctgggcacggcctgaaagggaaaaggaaaagaaggaagcgtgcattttatttttaaaaacaygaacatyggrgagctgyggaactattttgaagtgaaaagacttttttccttttctcctcaattaatagaagttcttcaatrttaagttcactgtcatacattttcgagtcagcctcaaaaagcaagaacttattgtgatgagattaaaacaacctgctgccacagaaagctcgcgagaaagcaaaggctctgcaatgtgttgaagctgaaatattttccattagatcttggaatgatgggcaaatgagttcttgaggatattggcattgtcagaatgtgccacgtcactgtcggagcaaaaattcctgaaggggaaaacttgtggcatgtgcatgcaatctctaaatcttttcttagtgctgcaaaaaacaaatgttttaa

SEQ ID NO: 17332 - DNA, 600 bp, Chicken  19866894225395_6
atattttccattagatcttggaatgatgggcaaatgagttcttgaggatattggcattgtcagaatgtgccacgtcactgtcggagcaaaaattcctgaaggggaaaacttgtggcatgtgcatgcaatctctaaatcttttcttagtgctgcaaaaaacaaatgttttaaggcattactgcactaagtagatgtaactttctcctctttttattttacacagcacccacgtatcacaagtcagtagtaacattcctgctacaggagagtaagtgtctcttttactattttgcagctttytttyttgcttttgctttttttttaaatatatttaaagcttttgaagtattattgaagctgttattctttgatttctccrtaagagttgttcttacacaaacaaaagggacattgtttcccaaacctgaacatctacgatgatcataaatcacctcctcctgaaaaattcttaggtccttctttttttcattgcactgtgcctgtgatgttttggttaggcagatcctgcatatgtattcgtgctgtcctcgtgctcttgtttgcatcctgtcctgtctcagcaaaggacaggacttgatc

SEQ ID NO: 17333 - DNA, 600 bp, Chicken  19866894225395_7
tttccattagatcttggaatgatgggcaaatgagttcttgaggatattggcattgtcagaatgtgccacgtcactgtcggagcaaaaattcctgaaggggaaaacttgtggcatgtgcatgcaatctctaaatcttttcttagtgctgcaaaaaacaaatgttttaaggcattactgcactaagtagatgtaactttctcctctttttattttacacagcacccacgtatcacaagtcagtagtaacattcctgctacaggagagtaagtgtctcttttactattttgcagctttytttyttgcttttgctttttttttaaatatatttaaagcttttgaagtattattgaagctgttattctttgatttctccrtaagagttgttcttacacaaacaaaagggacattgtttcccaaacctgaacatctacgatgatcataaatcacctcctcctgaaaaattcttaggtccttctttttttcattgcactgtgcctgtgatgttttggttaggcagatcctgcatatgtattcgtgctgtcctcgtgctcttgtttgcatcctgtcctgtctcagcaaaggacaggacttgatctctt

SEQ ID NO: 17334 - DNA, 600 bp, Chicken  19866894225395_8
gtcggagcaaaaattcctgaaggggaaaacttgtggcatgtgcatgcaatctctaaatcttttcttagtgctgcaaaaaacaaatgttttaaggcattactgcactaagtagatgtaactttctcctctttttattttacacagcacccacgtatcacaagtcagtagtaacattcctgctacaggagagtaagtgtctcttttactattttgcagctttytttyttgcttttgctttttttttaaatatatttaaagcttttgaagtattattgaagctgttattctttgatttctccrtaagagttgttcttacacaaacaaaagggacattgtttcccaaacctgaacatctacgatgatcataaatcacctcctcctgaaaaattcttaggtccttctttttttcattgcactgtgcctgtgatgttttggttaggcagatcctgcatatgtattcgtgctgtcctcgtgctcttgtttgcatcctgtcctgtctcagcaaaggacaggacttgatctctttgcactaattccagtgccggtgagagcagcagagctgatgagttggcgcccctgccagaggttggtgggactgca

SEQ ID NO: 17335 - DNA, 507 bp, Chicken  19866894225403_1
attgcccgagtaatccttcaataatagcgtatatgtcgacaaggcggtgctcagacgcttacagaacgaacagacagaccacacagttgatgttgatgctgcagtgatctattttaccgaaccccacaggcgcagtgctggggagctggcatgaagcacagccccctgactcaagaaacaccactacagaagaggagagccacgactgttctcccgtctgtgagagcagcaggatcacagtgcagcacacacacaatcctgctcgccagcaaggcttccctgcacccgccttggcttgcrgagaggatgagagcatcacacaagctctggaaaaccataagtcccactgatgaggagcaggaagaagcagaaaggtttatcagcctcrgcagaatgggaacygacaaggacagtgagacacttggcgctgctctctgttgctattaaaatcagcaagcgctgactcctgctatcatcacggctgaactcaacctcataaaatacaca

SEQ ID NO: 17336 - DNA, 419 bp, Chicken  19866894225403_2
gatgttgatgctgcagtgatctattttaccgaaccccacaggcgcagtgctggggagctggcatgaagcacagccccctgactcaagaaacaccactacagaagaggagagccacgactgttctcccgtctgtgagagcagcaggatcacagtgcagcacacacacaatcctgctcgccagcaaggcttccctgcacccgccttggcttgcrgagaggatgagagcatcacacaagctctggaaaaccataagtcccactgatgaggagcaggaagaagcagaaaggtttatcagcctcrgcagaatgggaacygacaaggacagtgagacacttggcgctgctctctgttgctattaaaatcagcaagcgctgactcctgctatcatcacggctgaactcaacctcataaaatacaca

SEQ ID NO: 17337 - DNA, 405 bp, Chicken  19866894225403_3
agtgatctattttaccgaaccccacaggcgcagtgctggggagctggcatgaagcacagccccctgactcaagaaacaccactacagaagaggagagccacgactgttctcccgtctgtgagagcagcaggatcacagtgcagcacacacacaatcctgctcgccagcaaggcttccctgcacccgccttggcttgcrgagaggatgagagcatcacacaagctctggaaaaccataagtcccactgatgaggagcaggaagaagcagaaaggtttatcagcctcrgcagaatgggaacygacaaggacagtgagacacttggcgctgctctctgttgctattaaaatcagcaagcgctgactcctgctatcatcacggctgaactcaacctcataaaatacaca

SEQ ID NO: 17338 - DNA, 574 bp, Chicken  19866894225409_1
aacaggaagctgctggagtcccacaacctctagcatgtgtttactcagcaccctgtgaaattaaagcaacacagaaagcagctcttaaatgggagcctcccctgctcctgggcccctgctgtctgccccagtgagtacctcctgccctagcacacccgagctctgctgtcaaatgtggcctgagggtgttgtgcagctctttcatccaatgtttgcggcaggcatgtttgcagctgcttaagtgggagaatcccagataaactcagctgcaggtgctgaagttctgcagccaggccttcrgcaaatgcattctgtaccctctgatgacagttcagcaatggttacctcacctggcagtccctgctgctgcagtgctgtgtctacaggagagcatgctgtggttgtgccaactgggcaaatcaatgctgctatctcaaaataggctgctttggagctgtcctgtggaaagactaataaatcagcagtagacttaatttggcgtgtctaacttagacatcttagctctgcaaaactaataaagttttgaggtgtcagcacaaggatgctttttggt

SEQ ID NO: 17339 - DNA, 600 bp, Chicken  19866894225417_1
catcacagctaaagctctatctggcattttggggtgggaaggaaaacagaggaagtattctctctgttttgaccttttttcttgccaaatgtccaaggtctttcaatagacatgttaggtgggcaacttagagctcctcaaaatgaggatgaagagaacgatgaagtgtgaggaggaagaagacgttatcacagaaaagcttcaaggaaggtacacaaatggttgtttcactacctgatccatcacagtttgcatgcaagtcaacaagactgaatgcttaaactgagctgtatgcaaaayggagctaacaaatgggttgtgaatgaaaatcaggaagatgtgtcattaatggagaaacctctgaggcgagtgtgggaaactgataagcaggtgtgagaagtgaagagggttggtgaaaggaatggaggcagtgcagggctggagagctgagagaagcaagcagataccaagccttgaaagcagtgacaagaaacagaagtctgccccaccagaactgctaagcccaggaggtagctcagagtttaagaactgcaatggtggattttagaattttactatgcgagcaaactacttcaaatt

SEQ ID NO: 17340 - DNA, 599 bp, Chicken  19866894225421_1
  misc_feature (1)..(150): n is any nucleotide
nnnnnnnnnnnnnnnnnnnnnnnnnnnnnnnnnnnnnnnnnnnnnnnnnnnnnnnnnnnnnnnnnnnnnnnnnnnnnnnnnnnnnnnnnnnnnnnnnnnnnnnnnnnnnnnnnnnnnnnnnnnnnnnnnnnnnnnnnnnnnnnnnnnnnnccctcccacccagtatagtagatagctgagtaggaaattagaccgggatttcctttaaagaaatcaaacacccagattgcttggtgtagaaaaaatgcttggtttagaaatgggtggtttcctgctaaattttcttcagtaatgagtgcyrtaagatgacagataacacacagtaacatcaaggaagggagctcctgatgttgcacaagaaaaygtctgttgaggggaggggcaggacctgggacaattttcctaaaatttttacattcttatctcattacacctctcatacacgtcttcctctaagagtttaaatacaagagacgcaatctgttgagtgaataattttctcttatcaccaaacacctacagctgtccttgggtaggtaacaaggaaatacrggacaggaattgctccaactcccagctggtggaagcattagttttat

SEQ ID NO: 17341 - DNA, 599 bp, Chicken  19866894225421_2
  misc_feature (1)..(149): n is any nucleotide
nnnnnnnnnnnnnnnnnnnnnnnnnnnnnnnnnnnnnnnnnnnnnnnnnnnnnnnnnnnnnnnnnnnnnnnnnnnnnnnnnnnnnnnnnnnnnnnnnnnnnnnnnnnnnnnnnnnnnnnnnnnnnnnnnnnnnnnnnnnnnnnnnnnnnccctcccacccagtatagtagatagctgagtaggaaattagaccgggatttcctttaaagaaatcaaacacccagattgcttggtgtagaaaaaatgcttggtttagaaatgggtggtttcctgctaaattttcttcagtaatgagtgcyrtaagatgacagataacacacagtaacatcaaggaagggagctcctgatgttgcacaagaaaaygtctgttgaggggaggggcaggacctgggacaattttcctaaaatttttacattcttatctcattacacctctcatacacgtcttcctctaagagtttaaatacaagagacgcaatctgttgagtgaataattttctcttatcaccaaacacctacagctgtccttgggtaggtaacaaggaaatacrggacaggaattgctccaactcccagctggtggaagcattagttttata

SEQ ID NO: 17342 - DNA, 599 bp, Chicken  19866894225421_3
  misc_feature (1)..(86): n is any nucleotide
nnnnnnnnnnnnnnnnnnnnnnnnnnnnnnnnnnnnnnnnnnnnnnnnnnnnnnnnnnnnnnnnnnnnnnnnnnnnnnnnnnnnnnccctcccacccagtatagtagatagctgagtaggaaattagaccgggatttcctttaaagaaatcaaacacccagattgcttggtgtagaaaaaatgcttggtttagaaatgggtggtttcctgctaaattttcttcagtaatgagtgcyrtaagatgacagataacacacagtaacatcaaggaagggagctcctgatgttgcacaagaaaaygtctgttgaggggaggggcaggacctgggacaattttcctaaaatttttacattcttatctcattacacctctcatacacgtcttcctctaagagtttaaatacaagagacgcaatctgttgagtgaataattttctcttatcaccaaacacctacagctgtccttgggtaggtaacaaggaaatacrggacaggaattgctccaactcccagctggtggaagcattagttttataaatagatttcagcattttaaactcaactctcttttacactaagacattaacaagaagtatatt

SEQ ID NO: 17343 - DNA, 600 bp, Chicken  19866894225421_4
tttagaaatgggtggtttcctgctaaattttcttcagtaatgagtgcyrtaagatgacagataacacacagtaacatcaaggaagggagctcctgatgttgcacaagaaaaygtctgttgaggggaggggcaggacctgggacaattttcctaaaatttttacattcttatctcattacacctctcatacacgtcttcctctaagagtttaaatacaagagacgcaatctgttgagtgaataattttctcttatcaccaaacacctacagctgtccttgggtaggtaacaaggaaatacrggacaggaattgctccaactcccagctggtggaagcattagttttataaatagatttcagcattttaaactcaactctcttttacactaagacattaacaagaagtatattgatcatactgtagacagcattggcatctccagctttccatgctgccatggtatcggataatggtggatgactctcaaaccactgcagggygytcccagttggatagtccattatgcttctccagcctaggacctgacagccaccaagaaattaaaccttactgaaagcaacaactttcagcggtttaga

SEQ ID NO: 17344 - DNA, 600 bp, Chicken  19866894225421_5
taagagtttaaatacaagagacgcaatctgttgagtgaataattttctcttatcaccaaacacctacagctgtccttgggtaggtaacaaggaaatacrggacaggaattgctccaactcccagctggtggaagcattagttttataaatagatttcagcattttaaactcaactctcttttacactaagacattaacaagaagtatattgatcatactgtagacagcattggcatctccagctttccatgctgccatggtatcggataatggtggatgactctcaaaccactgcagggygytcccagttggatagtccattatgcttctccagcctaggacctgacagccaccaagaaattaaaccttactgaaagcaacaactttcagcggtttagactaagactggtaacttttcatgttactgcaaagcttcttggaataaacagctatatgcagctacagtagcggtggctgaaaaatagcttttccttgcaaactgaggtccaggaaggaaatacaagtaacactatccatcctattcaattaggcacaagttgatactatctctggtttggttctttggtatagatagaacaa

SEQ ID NO: 17345 - DNA, 600 bp, Chicken  19866894225421_6
agagtttaaatacaagagacgcaatctgttgagtgaataattttctcttatcaccaaacacctacagctgtccttgggtaggtaacaaggaaatacrggacaggaattgctccaactcccagctggtggaagcattagttttataaatagatttcagcattttaaactcaactctcttttacactaagacattaacaagaagtatattgatcatactgtagacagcattggcatctccagctttccatgctgccatggtatcggataatggtggatgactctcaaaccactgcagggygytcccagttggatagtccattatgcttctccagcctaggacctgacagccaccaagaaattaaaccttactgaaagcaacaactttcagcggtttagactaagactggtaacttttcatgttactgcaaagcttcttggaataaacagctatatgcagctacagtagcggtggctgaaaaatagcttttccttgcaaactgaggtccaggaaggaaatacaagtaacactatccatcctattcaattaggcacaagttgatactatctctggtttggttctttggtatagatagaacaatt

SEQ ID NO: 17346 - DNA, 527 bp, Chicken  19866894225429_1
gcatatcaacaggagggggaacggttgtttaggaggacggatagtgttaggacaagggggaatggttttaaactgagacgggaggtttaggttggatattaggaagaagtttttcacccagagggtggtgacacactggaagagcttgcccaaagaggttgtggatgccgcatccctggaggcattcaaggccaggctggatgtggttctgggcagcctggtatagtgattggggaccctgcacatagcagggggttgaaactcgatgatcgctgtggtccttttcaacccaggccattygatgwttctatgattctagatactaaaaaaaatacttcaaagaaatacctcagaagaggctttacagaatggaatactattaaaaaaggaataattctttcatttttactgcttcaagcatagccattttggtcttgtgtttatgcagcagtgaaacctagactgctatgaaccacaatcattgcaaacacaattttaaacattattctagcacatgctgcaaacta

SEQ ID NO: 17347 - DNA, 522 bp, Chicken  19866894225429_2
tcaacaggagggggaacggttgtttaggaggacggatagtgttaggacaagggggaatggttttaaactgagacgggaggtttaggttggatattaggaagaagtttttcacccagagggtggtgacacactggaagagcttgcccaaagaggttgtggatgccgcatccctggaggcattcaaggccaggctggatgtggttctgggcagcctggtatagtgattggggaccctgcacatagcagggggttgaaactcgatgatcgctgtggtccttttcaacccaggccattygatgwttctatgattctagatactaaaaaaaatacttcaaagaaatacctcagaagaggctttacagaatggaatactattaaaaaaggaataattctttcatttttactgcttcaagcatagccattttggtcttgtgtttatgcagcagtgaaacctagactgctatgaaccacaatcattgcaaacacaattttaaacattattctagcacatgctgcaaacta

SEQ ID NO: 17348 - DNA, 600 bp, Chicken  19866894225430_1
taacctctctacagaatgcaagaagcttctttacgcagaagtgactattctgtgtttctgggtcacaacaagcaaattcctcttgtttttagctaaacgtcaggtactggtaacaactatcccttgtggagtgtgtgtcctggcttaaagagaatagtgagacgcagtcaagttagtagtaccatccgtgctatgttgccttcagggtccctccttgtggttatgattcctggatttggcctcttttgtcctcttgctgcacagccgtcagtatcacaaggacttagagatatgatttakyagagggttgttagggtactatggttaggctgcagttggacttgatgatctttgaagtcctttccaacctgagtaattctatgattctatgactttataagccattaacatgccttaggatttttcagaacctgagaaaagatgcagttttgataaaggagcagcgagggtgagccccagcacatgctatgggcagcaccagccattatcagtacggggtaggctcactgcagccaagtgaatgcagggtccttccctgctcagccagcagcagaactcgtggcatgcacagtgtatgca

SEQ ID NO: 17349 - DNA, 600 bp, Chicken  19866894225430_2
aacctctctacagaatgcaagaagcttctttacgcagaagtgactattctgtgtttctgggtcacaacaagcaaattcctcttgtttttagctaaacgtcaggtactggtaacaactatcccttgtggagtgtgtgtcctggcttaaagagaatagtgagacgcagtcaagttagtagtaccatccgtgctatgttgccttcagggtccctccttgtggttatgattcctggatttggcctcttttgtcctcttgctgcacagccgtcagtatcacaaggacttagagatatgatttakyagagggttgttagggtactatggttaggctgcagttggacttgatgatctttgaagtcctttccaacctgagtaattctatgattctatgactttataagccattaacatgccttaggatttttcagaacctgagaaaagatgcagttttgataaaggagcagcgagggtgagccccagcacatgctatgggcagcaccagccattatcagtacggggtaggctcactgcagccaagtgaatgcagggtccttccctgctcagccagcagcagaactcgtggcatgcacagtgtatgcag

SEQ ID NO: 17350 - DNA, 600 bp, Chicken  19866894225435_1
accatagatgcacagaatatccacccatggaatcactgaatgctcaagtcatagacacagacccacacaatgccctgtgttcgatggacccacaaggatcatcaagtccaacacctggatccacagaacaccagccatgttccaaccatacatgttgaccaatttctctccatttcaatgtggttacctctgaaacgcatcgcttcacaatagactgtgcaaagctaaatatagagtgagcatttggtctgaagcataagccggatccttcgcagtgagcatgaggcactgcagaaagcrtcgcaagaatattatccttcggattttaccatctgggccttcaggttttcacaggaagttcaaatatgctttataatcttaaaatattttctgagggctaaaaagatgcttgagttttctctgatgaaaagctccagccacaagctgcataaaccaaaattatcwcccaagttaaaaataaatgtctatccactatttctttgtttcctttgcagagtttttgccagaagcactatgtgacaagcaaccaatgggattggaattaaaaagrgttattcttttgttcactgttttgcttca

SEQ ID NO: 17351 - DNA, 600 bp, Chicken  19866894225435_2
ctctccatttcaatgtggttacctctgaaacgcatcgcttcacaatagactgtgcaaagctaaatatagagtgagcatttggtctgaagcataagccggatccttcgcagtgagcatgaggcactgcagaaagcrtcgcaagaatattatccttcggattttaccatctgggccttcaggttttcacaggaagttcaaatatgctttataatcttaaaatattttctgagggctaaaaagatgcttgagttttctctgatgaaaagctccagccacaagctgcataaaccaaaattatcwcccaagttaaaaataaatgtctatccactatttctttgtttcctttgcagagtttttgccagaagcactatgtgacaagcaaccaatgggattggaattaaaaagrgttattcttttgttcactgttttgcttcagtagcctttaatccaggcagctttggcttttagtggactgcattcaaaactccaatggtggagagccaaaggtgtgcagctstccagctcctcmgtcctcggtactcttcaggttgggactcagctcagcattctgtctcatgaaatcatagaatcacaggatat

SEQ ID NO: 17352 - DNA, 600 bp, Chicken  19866894225435_3
gcagtgagcatgaggcactgcagaaagcrtcgcaagaatattatccttcggattttaccatctgggccttcaggttttcacaggaagttcaaatatgctttataatcttaaaatattttctgagggctaaaaagatgcttgagttttctctgatgaaaagctccagccacaagctgcataaaccaaaattatcwcccaagttaaaaataaatgtctatccactatttctttgtttcctttgcagagtttttgccagaagcactatgtgacaagcaaccaatgggattggaattaaaaagrgttattcttttgttcactgttttgcttcagtagcctttaatccaggcagctttggcttttagtggactgcattcaaaactccaatggtggagagccaaaggtgtgcagctstccagctcctcmgtcctcggtactcttcaggttgggactcagctcagcattctgtctcatgaaatcatagaatcacaggatattctgagttggaagggacctataaatgtcactgggtcaaattcctggttccacacagcaccacccaaaaatcagaccgtcttactgagagctttgtccagatacttc

SEQ ID NO: 17353 - DNA, 492 bp, Chicken  19866894225435_4
aatattttctgagggctaaaaagatgcttgagttttctctgatgaaaagctccagccacaagctgcataaaccaaaattatcwcccaagttaaaaataaatgtctatccactatttctttgtttcctttgcagagtttttgccagaagcactatgtgacaagcaaccaatgggattggaattaaaaagrgttattcttttgttcactgttttgcttcagtagcctttaatccaggcagctttggcttttagtggactgcattcaaaactccaatggtggagagccaaaggtgtgcagctstccagctcctcmgtcctcggtactcttcaggttgggactcagctcagcattctgtctcatgaaatcatagaatcacaggatattctgagttggaagggacctataaatgtcactgggtcaaattcctggttccacacagcaccacccaaaaatcagaccgtcttactgagagctttgtccagatacttcttg

SEQ ID NO: 17354 - DNA, 480 bp, Chicken  19866894225435_5
gggctaaaaagatgcttgagttttctctgatgaaaagctccagccacaagctgcataaaccaaaattatcwcccaagttaaaaataaatgtctatccactatttctttgtttcctttgcagagtttttgccagaagcactatgtgacaagcaaccaatgggattggaattaaaaagrgttattcttttgttcactgttttgcttcagtagcctttaatccaggcagctttggcttttagtggactgcattcaaaactccaatggtggagagccaaaggtgtgcagctstccagctcctcmgtcctcggtactcttcaggttgggactcagctcagcattctgtctcatgaaatcatagaatcacaggatattctgagttggaagggacctataaatgtcactgggtcaaattcctggttccacacagcaccacccaaaaatcagaccgtcttactgagagctttgtccagatacttcttg

SEQ ID NO: 17355 - DNA, 600 bp, Chicken  19866894225437_1
tgcatttatgtaatataatagatccgtgggtggaaatgtctctgtaggaagggacatatgcttcaggttgtttcctttctgttactttttttccctttttttcttaattttggcctatttttctcaccggaaccctcagttcccgggcgccgctgcccttctctgagccaaaacccagctatgtctctgcactgaggaacagccttctgctcattgtgtaacggtgttccccccttgcaacaaatgcttcattaggaggcagcatctgcgtgctgcgtgtgggatgaaggtgtgtttgaygctttgtactgagtaagcaggcttcgataggagctaatgtatttgcagccctattttgggttttatcatcaacgatgaagcaagacccggtacttgattcagagtcctcctcctcttgcttgaagacattcctcgccagcgtcacagggagctctgggaactcttcccttcctccgtacgtattctgcttgttccttaagccttattttgtwtggtttgcttaattagcaccgcgtctttctataatactcaatgatggaacgtttctgattatctctgaaatagttgacttctgtcacc

SEQ ID NO: 17356 - DNA, 600 bp, Chicken  19866894225437_2
attgtgtaacggtgttccccccttgcaacaaatgcttcattaggaggcagcatctgcgtgctgcgtgtgggatgaaggtgtgtttgaygctttgtactgagtaagcaggcttcgataggagctaatgtatttgcagccctattttgggttttatcatcaacgatgaagcaagacccggtacttgattcagagtcctcctcctcttgcttgaagacattcctcgccagcgtcacagggagctctgggaactcttcccttcctccgtacgtattctgcttgttccttaagccttattttgtwtggtttgcttaattagcaccgcgtctttctataatactcaatgatggaacgtttctgattatctctgaaatagttgacttctgtcacctgcattcctctctggagggaacatctccaactgaatactgagcaatgtgaagcgtccttcacgaggagggttttaatccgtgctaagtgttaagaactgctwatgcttttattctgcagtggtgatttgacaagtttttcttgctgtttaaaactacagcaaataagcaaagcagtgtgtgagcgaataatgagagaagggcatacgtgaat

SEQ ID NO: 17357 - DNA, 600 bp, Chicken  19866894225437_3
agtcctcctcctcttgcttgaagacattcctcgccagcgtcacagggagctctgggaactcttcccttcctccgtacgtattctgcttgttccttaagccttattttgtwtggtttgcttaattagcaccgcgtctttctataatactcaatgatggaacgtttctgattatctctgaaatagttgacttctgtcacctgcattcctctctggagggaacatctccaactgaatactgagcaatgtgaagcgtccttcacgaggagggttttaatccgtgctaagtgttaagaactgctwatgcttttattctgcagtggtgatttgacaagtttttcttgctgtttaaaactacagcaaataagcaaagcagtgtgtgagcgaataatgagagaagggcatacgtgaatttctgcactgggaattcagctcctcttctgagaaccttcctatgcctttctgttatgtaaatgcagtcagttgaactggaggcgcacaaatctcatcgttataactcttctgctctgacgtgcgtggattatttcatctgatgagcagttctggagtactggcagagccatcccaggagagcagaagatc

SEQ ID NO: 17358 - DNA, 600 bp, Chicken  19866894225444_1
cttcagggtggtaacatgattccttgggggataagttgcaattttatcaagtttgctaccctctgtgatattcttgacgcccacagcatagactgtaacactttcacgtcttagttttgatgctggttcaatgtaatcatccaaggattgtccatcagtgataaccacagcaatctgttgcactccttgtttttttctgctgcctgcctcttgagtgaaaaccttattcctcaggaattcaatcgctattccagtatatgcttgcccacctcgatatggtaaattcttcaggtagttcartatttccagtttatccttgaatgtgtcgagagtgaactctagtcttggttcattactgtacaacaccagcccaactcttacattgcttggagcaatatcaagggcattaacaatttttaacagaaaagctctaatcagctggaagttttttgacccaattttgctggattcatccacaagaaacacaatatctgccacagttgcactggaacacactacaagtaaggtaaataaaaggaaaataagattactgtaggtcacactgtgggactatggttaaatacaaaaccccctatggcc

SEQ ID NO: 17359 - DNA, 599 bp, Chicken  19866894225459_1
  misc_feature (1)..(164): n is any nucleotide
nnnnnnnnnnnnnnnnnnnnnnnnnnnnnnnnnnnnnnnnnnnnnnnnnnnnnnnnnnnnnnnnnnnnnnnnnnnnnnnnnnnnnnnnnnnnnnnnnnnnnnnnnnnnnnnnnnnnnnnnnnnnnnnnnnnnnnnnnnnnnnnnnnnnnnnnnnnnnnnnnnnnctggtttgtagcagctgaggaattttaactttccatcagcactgtgaattgacggggctccccagacatggtctgacctctgctgcaggacaacatgatgtcttcccccagctctgtctccttggagcgcttcccrctgtcgctcrctgtgctacctctgcagcactggcatcatgtctaacccgaattccccttctgcagctcagctgcccttattcatccacagcatctggaaaacaatgtattttcttctgcttggcatatgtgggaacacttccagttgtgcagtcctcttctgttccatcccagcttccctcggctggttcctcctggccttgcagcaaactcattgctcttggctgctccacatcctctgtggagcgcggtgcctggagctgggcrcaggattcgggctgaggctttcagcacccagca

SEQ ID NO: 17360 - DNA, 599 bp, Chicken  19866894225459_2
  misc_feature (1)..(154): n is any nucleotide
nnnnnnnnnnnnnnnnnnnnnnnnnnnnnnnnnnnnnnnnnnnnnnnnnnnnnnnnnnnnnnnnnnnnnnnnnnnnnnnnnnnnnnnnnnnnnnnnnnnnnnnnnnnnnnnnnnnnnnnnnnnnnnnnnnnnnnnnnnnnnnnnnnnnnnnnnnctggtttgtagcagctgaggaattttaactttccatcagcactgtgaattgacggggctccccagacatggtctgacctctgctgcaggacaacatgatgtcttcccccagctctgtctccttggagcgcttcccrctgtcgctcrctgtgctacctctgcagcactggcatcatgtctaacccgaattccccttctgcagctcagctgcccttattcatccacagcatctggaaaacaatgtattttcttctgcttggcatatgtgggaacacttccagttgtgcagtcctcttctgttccatcccagcttccctcggctggttcctcctggccttgcagcaaactcattgctcttggctgctccacatcctctgtggagcgcggtgcctggagctgggcrcaggattcgggctgaggctttcagcacccagcagagtgggagg

SEQ ID NO: 17361 - DNA, 600 bp, Chicken  19866894225459_3
ttcccccagctctgtctccttggagcgcttcccrctgtcgctcrctgtgctacctctgcagcactggcatcatgtctaacccgaattccccttctgcagctcagctgcccttattcatccacagcatctggaaaacaatgtattttcttctgcttggcatatgtgggaacacttccagttgtgcagtcctcttctgttccatcccagcttccctcggctggttcctcctggccttgcagcaaactcattgctcttggctgctccacatcctctgtggagcgcggtgcctggagctgggcrcaggattcgggctgaggctttcagcacccagcagagtgggaggattatttcacacatctcacatatggcactcctgttcatatatccccacatgacattcattttttgcagcagcagtctgaagtggttggtgttcggtttgtggcaygcggtaattcaccgaccatccgtgctgcttcctgccgtgtgtgcacaaccgatgtttccaacacgaggtttacccttgtccttgctgaatgaccaatttatgtcacaccgccactcccgtttgctaagttccccctgatgtcatcactgcta

SEQ ID NO: 17362 - DNA, 600 bp, Chicken  19866894225459_4
tctgcttggcatatgtgggaacacttccagttgtgcagtcctcttctgttccatcccagcttccctcggctggttcctcctggccttgcagcaaactcattgctcttggctgctccacatcctctgtggagcgcggtgcctggagctgggcrcaggattcgggctgaggctttcagcacccagcagagtgggaggattatttcacacatctcacatatggcactcctgttcatatatccccacatgacattcattttttgcagcagcagtctgaagtggttggtgttcggtttgtggcaygcggtaattcaccgaccatccgtgctgcttcctgccgtgtgtgcacaaccgatgtttccaacacgaggtttacccttgtccttgctgaatgaccaatttatgtcacaccgccactcccgtttgctaagttccccctgatgtcatcactgctattccaagatasgttcactgacgctggtcggcaatgttttgcagtcacccgctttatcctatttttgggagcaccttttggagtagctcaagtcatttgtccagccgtaagtttgtgctaatcatttagacaatacggctgcagagccc

SEQ ID NO: 17363 - DNA, 443 bp, Chicken  19866894225459_5
ctgaggctttcagcacccagcagagtgggaggattatttcacacatctcacatatggcactcctgttcatatatccccacatgacattcattttttgcagcagcagtctgaagtggttggtgttcggtttgtggcaygcggtaattcaccgaccatccgtgctgcttcctgccgtgtgtgcacaaccgatgtttccaacacgaggtttacccttgtccttgctgaatgaccaatttatgtcacaccgccactcccgtttgctaagttccccctgatgtcatcactgctattccaagatasgttcactgacgctggtcggcaatgttttgcagtcacccgctttatcctatttttgggagcaccttttggagtagctcaagtcatttgtccagccgtaagtttgtgctaatcatttagacaatacggctgcagagccctcggtt

SEQ ID NO: 17364 - DNA, 599 bp, Chicken  19866894225461_1
  misc_feature (1)..(43): n is any nucleotide
nnnnnnnnnnnnnnnnnnnnnnnnnnnnnnnnnnnnnnnnnnnatttggttcaaataataatgataataataataataatcaaaacagaagacctattacacactggatctgccattaaatatacaacagagctgcttcttccctgccctaaaaggtgacagcactgtgccaaaggatctaaccaacttgttctctctgcttcacttcttattcaagtcttttgtaaaaagtcatcaggatgccaccaattgaagtatactatattaattatttcatgatgctacttaaaagaacaattwtaagaaatcctgtttccagtttcttacactgtgccacaactattttttacaagaattcaaacactgaaatacataggcatgaaagttcaaagaaagctagcattagatgaatgctaacattcgtaagggcaagaactgtgtttctccttgacttagaacttcttattggtacaatatacaaagcattaaaaaatagcagggaatatgaatttgaacaagaaagctgctgactgggagaacaaatgttctgctggtctgctatgagggagggaagaggaaggccccattcactttccatt

SEQ ID NO: 17365 - DNA, 600 bp, Chicken  19866894225462_1
caagcaccccgtcgctttctgaccatccttctctgtgctgctcccatactgccagtgttgtgccatctccctgtgtgcagtgaggggctttctttctttcctggcataacttttattaatacaaagccagaggcccagcgccagacttgtcctttctgtacgtatcaagagacaccgctggaggtgcttatagccagccacagtttgataggagcttggcagctgcacaaacagtgaggaaagctccttgcttcccacttgttagggggttgggtttgcatctcctgtgcagcagcaatygggrctgttttccctgctcttcaggtgtgttaacttcatggcttcaatcgcatcagtagcttaggcaagcagtgtacgcgtgtggggtttttaaatatacggagttgtgtataaggcatgcaagttctgaactttacacagggagattctcagtaatrtgtataactgataactgtaaaggttaggattactttttcttcctgtaagatcatagggatttaaaaaaataagagtggacatttcctgcataccagatgcacgttgttaactggtgtgctatttcttctayttaggatctga

SEQ ID NO: 17366 - DNA, 600 bp, Chicken  19866894225462_2
caccccgtcgctttctgaccatccttctctgtgctgctcccatactgccagtgttgtgccatctccctgtgtgcagtgaggggctttctttctttcctggcataacttttattaatacaaagccagaggcccagcgccagacttgtcctttctgtacgtatcaagagacaccgctggaggtgcttatagccagccacagtttgataggagcttggcagctgcacaaacagtgaggaaagctccttgcttcccacttgttagggggttgggtttgcatctcctgtgcagcagcaatygggrctgttttccctgctcttcaggtgtgttaacttcatggcttcaatcgcatcagtagcttaggcaagcagtgtacgcgtgtggggtttttaaatatacggagttgtgtataaggcatgcaagttctgaactttacacagggagattctcagtaatrtgtataactgataactgtaaaggttaggattactttttcttcctgtaagatcatagggatttaaaaaaataagagtggacatttcctgcataccagatgcacgttgttaactggtgtgctatttcttctayttaggatctgaacgt

SEQ ID NO: 17367 - DNA, 600 bp, Chicken  19866894225462_3
tacgtatcaagagacaccgctggaggtgcttatagccagccacagtttgataggagcttggcagctgcacaaacagtgaggaaagctccttgcttcccacttgttagggggttgggtttgcatctcctgtgcagcagcaatygggrctgttttccctgctcttcaggtgtgttaacttcatggcttcaatcgcatcagtagcttaggcaagcagtgtacgcgtgtggggtttttaaatatacggagttgtgtataaggcatgcaagttctgaactttacacagggagattctcagtaatrtgtataactgataactgtaaaggttaggattactttttcttcctgtaagatcatagggatttaaaaaaataagagtggacatttcctgcataccagatgcacgttgttaactggtgtgctatttcttctayttaggatctgaacgtgcaccgggagcctgctggccagaggcacctccttcatcccagctggaggcagatcctatgggcatgcccctcctgtgctttctctggcaatactcaagctgtagtgtgaagttcagaaggcaacttctgtcctttgttgggctctataaaaccg

SEQ ID NO: 17368 - DNA, 600 bp, Chicken  19866894225462_4
cagcagcaatygggrctgttttccctgctcttcaggtgtgttaacttcatggcttcaatcgcatcagtagcttaggcaagcagtgtacgcgtgtggggtttttaaatatacggagttgtgtataaggcatgcaagttctgaactttacacagggagattctcagtaatrtgtataactgataactgtaaaggttaggattactttttcttcctgtaagatcatagggatttaaaaaaataagagtggacatttcctgcataccagatgcacgttgttaactggtgtgctatttcttctayttaggatctgaacgtgcaccgggagcctgctggccagaggcacctccttcatcccagctggaggcagatcctatgggcatgcccctcctgtgctttctctggcaatactcaagctgtagtgtgaagttcagaaggcaacttctgtcctttgttgggctctataaaaccggactgctttccataagcgctaaaatggctttttggctagagttaactttttctttctcctgagagatttctgtgcagctgcttaacaggtctgttaaggtaactgtctggagagcctttggctgtcttaat

SEQ ID NO: 17369 - DNA, 599 bp, Chicken  19866894225466_1
  misc_feature (1)..(10): n is any nucleotide
nnnnnnnnnnttaagatatgcacagttctgaggacttagcaaacactatttttttttcattttatttcactgttaagtaaaatattctccatgtgcctaaatttacatagggatagtaaatgatgaattagcaacgaaattaaaatataaggctatctttatatttttctacttatgttgacaaaagaattctgcctaactgaggtttatgtcgtaagatgtgtactgagaaataagttgcatgacaataaaaatattctgcgtaaacatttacatatacaagatgctttttgctacaaytgtgttttacaggccatgaaagaattagttcaacaaacagtgaaatatcatcccctctagagtaaaatgtggcagttgtttagcagtgtacataaattacacaagatagtatattgcgaatcaaaagtatttaaatactttattcaattgaaactagagagaatatttaagttggcataatgtatttactcagtttggattttgtccagaatgctgcagttaacaattttagctcttatgaaacgtgccaggggatatctaattagcccacttggtcagcagcttagatttatgtatcg

SEQ ID NO: 17370 - DNA, 600 bp, Chicken  19866894225469_1
atactgggcactggcagggctgcaccttgagtattgtgttcaggtttgggccccgcactacaagaaagacattgaagacctggagcatgtccagagaagggcaacaaagctatgaagggtctgaagcacaggtcttatggggggcagctgacagaactggcattgctcagtctggagaagaggaggctcaggggagacctcatcactatctacaatgacctgaaaggagattgtagtgaggtgagggttggcctctcctcctaggtaccagcaatagaacgagaaggaatggctttgagytatgccaggaaaggttcaggttggatattagccacagtttctcctcagaaggagttgtgatgtattgaagcaggctgcccaggaaggtggtggagtcactgtccctggaggtgttcaagaaaaacatgaggatgtggccatccgcagcctgggatgagtcctagcgtggaaccgagctctatccgatgcttgcagggtcaggagctgcgaagtgcttggactttcctcacagcagagggcaccattgaacgcaggaatcgcttctttgctccccgcagctgaggaaagggaagggatggg

SEQ ID NO: 17371 - DNA, 600 bp, Chicken  19866894225469_2
gctgaggaaagggaagggatgggtttatttaaggtaaagagaaaaatacttctttctctttcttccagaagctgcagctcgagcatttatttatgcctgtgtgagattcaaaggtcttatcaataatttagcattattactgtaggtaggctaatgggatccaagtttaattaaggactgaatttaatttggtttgtttattattacttcaaaaaaactaacaaaaaaccctaaaccagccatccatcaaacatgctcctattgcaagtggcattttctgtacttctggaaaagaccaartactctgcaatccaaactgcacctttctgagttgctgctggaaatgatcttcacaaagtcctttatctctctactgcattgctgaatttttcatcctttattacctctcaaagactgttctacctcaggtatatatctctgctacagtcataaacctgtgggtctatttcatagctccctttctgaccttttcctgtaaggtatctctgtgtactgtaggaagagaagcagggggaaaataatgtttagacagagacagccagggcatagcggcatgggcagagcagatgaggctccatc

SEQ ID NO: 17372 - DNA, 599 bp, Chicken  19866894225471_1
  misc_feature (1)..(27): n is any nucleotide
nnnnnnnnnnnnnnnnnnnnnnnnnnncaaattcaaaggagccgagtgacaaacttctttttttttttttttctcatatatttatatttttttccttcctttttggaaaagctttggagatgtttctcaaagggctgttctcagcaacttcctttctgcttcatcactccaagcactgcaacatcatcaaattagtcaaaagaaaacagtggtgcctctcattttcccaaacagccagatgctccttccgaggtgagacagcaatctgcatggctgggggaggataggattcctctgccyttttttaagcagtcattttactttcagaaccacagaaaaaccygaggtcccttcccaaaatcctgctctgatccaagcatgaaagttytgagtgcgttggaagtgctgccttgtggctggcacaggtctccaggccagaagcattctgcgtgggcagctcatcctggggatggggccaagggaggaaagcaatgggttcgagagaccctgctgctgcctacacacagggcagcttcaaggaacgggcaggaaatatctgtaaaatgaagctattgatttttgttttatttttttccccc

SEQ ID NO: 17373 - DNA, 600 bp, Chicken  19866894225471_2
gagtgacaaacttctttttttttttttttctcatatatttatatttttttccttcctttttggaaaagctttggagatgtttctcaaagggctgttctcagcaacttcctttctgcttcatcactccaagcactgcaacatcatcaaattagtcaaaagaaaacagtggtgcctctcattttcccaaacagccagatgctccttccgaggtgagacagcaatctgcatggctgggggaggataggattcctctgccyttttttaagcagtcattttactttcagaaccacagaaaaaccygaggtcccttcccaaaatcctgctctgatccaagcatgaaagttytgagtgcgttggaagtgctgccttgtggctggcacaggtctccaggccagaagcattctgcgtgggcagctcatcctggggatggggccaagggaggaaagcaatgggttcgagagaccctgctgctgcctacacacagggcagcttcaaggaacgggcaggaaatatctgtaaaatgaagctattgatttttgttttatttttttccccccatctgggttaggactggagcaaggctctgaatgggcttttctc

SEQ ID NO: 17374 - DNA, 600 bp, Chicken  19866894225471_3
tttttccttcctttttggaaaagctttggagatgtttctcaaagggctgttctcagcaacttcctttctgcttcatcactccaagcactgcaacatcatcaaattagtcaaaagaaaacagtggtgcctctcattttcccaaacagccagatgctccttccgaggtgagacagcaatctgcatggctgggggaggataggattcctctgccyttttttaagcagtcattttactttcagaaccacagaaaaaccygaggtcccttcccaaaatcctgctctgatccaagcatgaaagttytgagtgcgttggaagtgctgccttgtggctggcacaggtctccaggccagaagcattctgcgtgggcagctcatcctggggatggggccaagggaggaaagcaatgggttcgagagaccctgctgctgcctacacacagggcagcttcaaggaacgggcaggaaatatctgtaaaatgaagctattgatttttgttttatttttttccccccatctgggttaggactggagcaaggctctgaatgggcttttctctcctctcttttctctctgaaagagccggatacttgtgggcaatcc

SEQ ID NO: 17375 - DNA, 451 bp, Chicken  19866894225471_4
agagccggatacttgtgggcaatccaacaagatctgctcttgctcagtcggggcagagatgctttgttgtgggggcagccccctcccagactcagcactggcttcagctgatggtttagctgcagcttctgcaatgggtcccaccctgctgtgagtacaggcgaaggagcagcatgcaacctggtgctgtcccaggtgcaaatgtgtaaaggacatagagctctgagtgtccaaccccaatgcccgcatggatctcgctgtgagacggtgcctctcatattttttctcaatcaaatccaygttgcttctgtctactycctcttcccaggagcagtgatgcagtggcacagctgctcaggaggtgatggggtcaccatccctggaggtgttcagtatgggagaagtagcatggaaggacacagtcagtgggcacggtgtggttgggatgggg

SEQ ID NO: 17376 - DNA, 434 bp, Chicken  19866894225471_5
ggcaatccaacaagatctgctcttgctcagtcggggcagagatgctttgttgtgggggcagccccctcccagactcagcactggcttcagctgatggtttagctgcagcttctgcaatgggtcccaccctgctgtgagtacaggcgaaggagcagcatgcaacctggtgctgtcccaggtgcaaatgtgtaaaggacatagagctctgagtgtccaaccccaatgcccgcatggatctcgctgtgagacggtgcctctcatattttttctcaatcaaatccaygttgcttctgtctactycctcttcccaggagcagtgatgcagtggcacagctgctcaggaggtgatggggtcaccatccctggaggtgttcagtatgggagaagtagcatggaaggacacagtcagtgggcacggtgtggttgggatgggg

SEQ ID NO: 17377 - DNA, 600 bp, Chicken  19866894225472_1
gtcctgagggtggcacctggtgtggggaccaccgatgtccccacagtactgacgtccccaaatctgagccaggcgcacggccccagccctgaaatcacagccctgcaaggacacatctgtgcaaaacgtggcactggggcacagctgaggggcgagggcagcagggtgagctccccacgttgtaccccgctgctccccatcagctcctgccccacactgcacggtgctgggggtcaggatcccaatgggggggcgcaaccgggctctgggattgcacagcgagatgagaaaacattgcarcctcrtgtccaacctgcaaatctcctgcaaatttgggaaaatcgctcccctgtgcccaccctgcggtggggatcatggggatggtgatgggtgcgcagcgctggggctgcttcggggtgccaacagccggaccccccccttgtgcacagcccttggctgtgatgccggtgccgcttccctgctaatctgggcagctccgtcttgatttcctgcccggtccccgagaggggacagaggtgagcagggggaaggggaggaagtccctaagcagggacagacagctgagtggggcacaatgtc

SEQ ID NO: 17378 - DNA, 600 bp, Chicken  19866894225472_2
gagggtggcacctggtgtggggaccaccgatgtccccacagtactgacgtccccaaatctgagccaggcgcacggccccagccctgaaatcacagccctgcaaggacacatctgtgcaaaacgtggcactggggcacagctgaggggcgagggcagcagggtgagctccccacgttgtaccccgctgctccccatcagctcctgccccacactgcacggtgctgggggtcaggatcccaatgggggggcgcaaccgggctctgggattgcacagcgagatgagaaaacattgcarcctcrtgtccaacctgcaaatctcctgcaaatttgggaaaatcgctcccctgtgcccaccctgcggtggggatcatggggatggtgatgggtgcgcagcgctggggctgcttcggggtgccaacagccggaccccccccttgtgcacagcccttggctgtgatgccggtgccgcttccctgctaatctgggcagctccgtcttgatttcctgcccggtccccgagaggggacagaggtgagcagggggaaggggaggaagtccctaagcagggacagacagctgagtggggcacaatgtcaccct

SEQ ID NO: 17379 - DNA, 600 bp, Chicken  19866894225474_1
taaaaaaggcacttaaaacagacacgtgagtccttcacaagtaggtcttctaaaatccaagagaatatttatggaggaattttcatgatgtttggctcctgctctgaccaggaaagaaagaatttcagtttggaggcaagcaggcaccagaaaatagttgtgtttttccgggtcttatccaattctcttcaataactcacaacacgaaggtagacaatacttttgacttttaagacctaggatgtttcactttaattactagtcaaattttaccaggaaacttaaaattatttcaagccmatattagaaatactaaacagaaaattaagcacattcaccaggaaggcccttctttgatggatctgattcctgcaagagaatccaagacacatgtggccccatatcctgcagacatttaaccaggtctacccttcacaacatcaatatgatgttacatatgcaagtaaaatatgtggatgtgagccaggttaacatctaaggacgtatgccagatcctaattgagcaataagacagggtgtagactctgatcccatgctttggtatgttgctaagcaaagggcaacaaccccgcactgtca

SEQ ID NO: 17380 - DNA, 600 bp, Chicken  19866894225474_2
gaaggcccttctttgatggatctgattcctgcaagagaatccaagacacatgtggccccatatcctgcagacatttaaccaggtctacccttcacaacatcaatatgatgttacatatgcaagtaaaatatgtggatgtgagccaggttaacatctaaggacgtatgccagatcctaattgagcaataagacagggtgtagactctgatcccatgctttggtatgttgctaagcaaagggcaacaaccccgcactgtcactcaacaaggtgtgctatcattgcacaataacttccaaccrtatactgtgatgactacacygtgctatttccagagtacagaacatattttatttatgtgtattttattctgctgacatgcaaaggaaatagttgcttgttaaatgccacgttatagtaagtgcatagtgtatttttatctggacaataatgtgaaaggggatgttgtttataggtcactgcaggtgtgcatggccttacatacaaaggctaggtgaataacctgagggcctgaaaaaccaatgcctcattcttgcctrsagctatgggcatgtagaatcttacctacacaggacactgag

SEQ ID NO: 17381 - DNA, 600 bp, Chicken  19866894225474_3
tctgattcctgcaagagaatccaagacacatgtggccccatatcctgcagacatttaaccaggtctacccttcacaacatcaatatgatgttacatatgcaagtaaaatatgtggatgtgagccaggttaacatctaaggacgtatgccagatcctaattgagcaataagacagggtgtagactctgatcccatgctttggtatgttgctaagcaaagggcaacaaccccgcactgtcactcaacaaggtgtgctatcattgcacaataacttccaaccrtatactgtgatgactacacygtgctatttccagagtacagaacatattttatttatgtgtattttattctgctgacatgcaaaggaaatagttgcttgttaaatgccacgttatagtaagtgcatagtgtatttttatctggacaataatgtgaaaggggatgttgtttataggtcactgcaggtgtgcatggccttacatacaaaggctaggtgaataacctgagggcctgaaaaaccaatgcctcattcttgcctrsagctatgggcatgtagaatcttacctacacaggacactgaggagtggggagtccagcacct

SEQ ID NO: 17382 - DNA, 584 bp, Chicken  19866894225474_4
actcaacaaggtgtgctatcattgcacaataacttccaaccrtatactgtgatgactacacygtgctatttccagagtacagaacatattttatttatgtgtattttattctgctgacatgcaaaggaaatagttgcttgttaaatgccacgttatagtaagtgcatagtgtatttttatctggacaataatgtgaaaggggatgttgtttataggtcactgcaggtgtgcatggccttacatacaaaggctaggtgaataacctgagggcctgaaaaaccaatgcctcattcttgcctrsagctatgggcatgtagaatcttacctacacaggacactgaggagtggggagtccagcaccttgctatttctgacactgaacataaagcaaaaaaattgccaatgcattttgtgtggaaaatcaggatatgcagaaagataactgctccttggaaaacaatttctcataggaagcagcatgaaattgcgttcagcttcacagttatcttgtttgttttgctaatccttacaaagattaataaaggaatgatgagacaacagcaaactgtaagcacaggaaacga

SEQ ID NO: 17383 - DNA, 583 bp, Chicken  19866894225474_5
ctcaacaaggtgtgctatcattgcacaataacttccaaccrtatactgtgatgactacacygtgctatttccagagtacagaacatattttatttatgtgtattttattctgctgacatgcaaaggaaatagttgcttgttaaatgccacgttatagtaagtgcatagtgtatttttatctggacaataatgtgaaaggggatgttgtttataggtcactgcaggtgtgcatggccttacatacaaaggctaggtgaataacctgagggcctgaaaaaccaatgcctcattcttgcctrsagctatgggcatgtagaatcttacctacacaggacactgaggagtggggagtccagcaccttgctatttctgacactgaacataaagcaaaaaaattgccaatgcattttgtgtggaaaatcaggatatgcagaaagataactgctccttggaaaacaatttctcataggaagcagcatgaaattgcgttcagcttcacagttatcttgtttgttttgctaatccttacaaagattaataaaggaatgatgagacaacagcaaactgtaagcacaggaaacga

SEQ ID NO: 17384 - DNA, 600 bp, Chicken  19866894225493_1
tcagaaggtatagggtaaaacaggcttgattaaaaaaaaggaatcaacaacaaaggacaaatgcagtccttgataacaacagaaaaaaattatcttcaaatattttaaaaaagaaaagatgcctttaagcctttttctaaaaaagaccaacctggaagagcgaagaagcatacagcaaggtcccatctccccccaggcatatgataaagtctatttgattggagatatcatcataatctagaaggaacagtgaaatacaagttctgaattatgttttatcaaaggtcaaatttctgatgyaagatgtgtagcatgccagcattcattcacaaatgtaaaaaaaactgcaaataaggtgtaacaccagtttgcaagagacagattggtttcacaaccttgattcaacgctaggaaacatcaagacaaataaaccctaygcctcaactttattttcaagaattcgttaccataccttctcgaaaagtacaaaatttcttcttcactggtccaaaattatcatcattagctatagcagggtcttccaatacttttttttctacatacactatcatgttgttctcctaaaaggaggtaagatga

SEQ ID NO: 17385 - DNA, 600 bp, Chicken  19866894225493_2
aaggaatcaacaacaaaggacaaatgcagtccttgataacaacagaaaaaaattatcttcaaatattttaaaaaagaaaagatgcctttaagcctttttctaaaaaagaccaacctggaagagcgaagaagcatacagcaaggtcccatctccccccaggcatatgataaagtctatttgattggagatatcatcataatctagaaggaacagtgaaatacaagttctgaattatgttttatcaaaggtcaaatttctgatgyaagatgtgtagcatgccagcattcattcacaaatgtyaaaaaaactgcaaataaggtgtaacaccagtttgcaagagacagattggtttcacaaccttgattcaacgctaggaaacatcaagacaaataaaccctaygcctcaactttattttcaagaattcgttaccataccttctcgaaaagtacaaaatttcttcttcactggtccaaaattatcatcattagctatagcagggtcttccaatacttttttttctacatacactatcatgttgttctcctaaaaggaggtaagatgagcttgttaacaacctcttaaatatcgaaatatttgat

SEQ ID NO: 17386 - DNA, 600 bp, Chicken  19866894225493_3
taaaaaagaccaacctggaagagcgaagaagcatacagcaaggtcccatctccccccaggcatatgataaagtctatttgattggagatatcatcataatctagaaggaacagtgaaatacaagttctgaattatgttttatcaaaggtcaaatttctgatgyaagatgtgtagcatgccagcattcattcacaaatgtaaaaaaaactgcaaataaggtgtaacaccagtttgcaagagacagattggtttcacaaccttgattcaacgctaggaaacatcaagacaaataaaccctaygcctcaactttattttcaagaattcgttaccataccttctcgaaaagtacaaaatttcttcttcactggtccaaaattatcatcattagctatagcagggtcttccaatacttttttttctacatacactatcatgttgttctcctaaaaggaggtaagatgagcttgttaacaacctcttaaatatcgaaatatttgattccttccatagtttgaatcaggtaaaaacacaaataaaaacacattatttttattgaagtgacctgcatctttgggttgcagggcttttttttttttact

SEQ ID NO: 17387 - DNA, 600 bp, Chicken  19866894225501_1
acttttattgaaagggggaggagacagaggaaacttttattttgacttaattatgtgctgaggtcctttacagagacaaggccatgagaagcttttattttgttccttctcttgagattggttcatatttctgcccaggggagtttcaaagagagcttgcacagtgcttggaggggagacaacgcaccacaatttaaccataaacactgtcttcagtccctaaatgttaaaaacaggtcaagtggcaccactcccaatagtcacttaagcctgaggtggaaaatgcctgttgggtcgcayggttcactttctgttgttggtgaagtcatgtccctctgtgacaacctccaaacttttatcctgcatatttttgaagacaacttaaacattttttccttcatcctttggaaactgaaagctacagaaactgccttacaaacagcccaatctctcaggtaagttgctgggcacaagctgtgcctagcatggttttgcatatccacggtgtcctatatccacagtctgcttcactgcctcacaccatacagatggaaaaaaaaaacccaaacattatgagtcccaaagaaacaaatgagaaca

SEQ ID NO: 17388 - DNA, 600 bp, Chicken  19866894225502_1
accgtatgtttcaagaaagcctttgttgggataatatagctcaaccgagagatcactggctttggatcccaagtggggatcctttaaaggatgctgtgttcataaggaatgtgctcagcccttctgagataacgacaggtcccctcctgatttctgcagctcctggccatataaaagaacagggcacacagtatggtgtggctgttaaagatacggtactaaacagactggacagactgtcctataatgcatttgattagcaaagaaacactttccttgcagtgttgtcattacaaagakgctttatccttcctcttttaggaaaggaggctccccacgtccctctttcccagttcaagtaaaagcacaggtctctactgccatgccaccaaaggcaccatttcttccacaaaagtctagactctaaacatgaatagctatcaatcatcatgggaaatcagagagctaaatacttctgatttctgggcagctgcactggctacacctgccaagtactagaaatgaaagaaaaaatgctgtttgaccagtgaggataaaatctaagtgatcttcagtgcttcttcacctggcttaaaaccc

SEQ ID NO: 17389 - DNA, 600 bp, Chicken  19866894225508_1
tgctggtgaggcagaaggctgcagccgtcatcattcactcctcagaaaacactgcaaaaacatcaagtgagagtgccctgatcccatttggccacctgatgctgacccagcactactgcttctgcacagagaaggctgctgaatggcaccgttaacaggaaaggcctcgcaggaaacaacaggcacagaccaggatattaaaattgcatttcggatgtattttttcttttaataaaagaattaaagacagtagcagcatttgtctgaagagaaacaaacaaacgttccaaagagaacacygacagtcaaacatgaggcaatgatagctctacaagctgaggaagcagtgatggtgagatctcagtcacaagaggagccccactgcagtgtgaggctgctgggcccctgggagccacctgccttcaggcaatggcgggtcgggttgtataggcagaggaccaaagtgcaaccaaagggcttccaaagaacaccactggtggtgtttaagagtcacaaattcattctgaacctaaaagtctttttatataagcagagtttctgatcagaaataattattttcaggcctaagtacagcacata

SEQ ID NO: 17390 - DNA, 600 bp, Chicken  19866894225519_1
ttgtaattgacaacaaatgtaatttcaatttttttttgaacaaaagactgaaatgatcaactgagaaagacaagtttttatgggtggctgattaaaatagtcaatttatgatacagaaaactgtttcccatgtctgaatggctacagacagttgctaactcttatcttgctgtgtataggtgtatttatgtaatgaactttttattttccactcctactgatgatgcctttgatttagatcagctgtagctcctgtttgctttcattgtgaaggaactccataagacagcagtctgtgayctaaaagcaacccttcctgttatgtaaattcaagagatacagctgagtccatrctccagagaaagcatcccctccaagaaaacatgaccactgatttgaaaacaatttgaaacttcacctatcaaaattgagatacttttattcctacagaatttatccaaaaaataataataataataaaaaaataagtataaaaccctatatagttgtagatttttttcccctttatttcatacaattattgtgataaacttcaaactacttctaggctggtagcattctctctttctaacctccact

SEQ ID NO: 17391 - DNA, 600 bp, Chicken  19866894225519_2
tgatcaactgagaaagacaagtttttatgggtggctgattaaaatagtcaatttatgatacagaaaactgtttcccatgtctgaatggctacagacagttgctaactcttatcttgctgtgtataggtgtatttatgtaatgaactttttattttccactcctactgatgatgcctttgatttagatcagctgtagctcctgtttgctttcattgtgaaggaactccataagacagcagtctgtgayctaaaagcaacccttcctgttatgtaaattcaagagatacagctgagtccatrctccagagaaagcatcccctccaagaaaacatgaccactgatttgaaaacaatttgaaacttcacctatcaaaattgagatacttttattcctacagaatttatccaaaaaataataataataataaaaaaataagtataaaaccctatatagttgtagatttttttcccctttatttcatacaattattgtgataaacttcaaactacttctaggctggtagcattctctctttctaacctccactggctgtttcttttttaacagtcaaggggatctcaatagttaagtttctcctat

SEQ ID NO: 17392 - DNA, 600 bp, Chicken  19866894225520_1
agggctggcaagtgtggaatgtctgtactacacagagtggctccaagccacatcaggctttacatttcacacgataatttataagctgtccttcactgttctaaaaaaaaaaaacacaagtactcatgtgttctccatatatgtgagccactttcaagaattagcttgtaaatctccacaaccaaaatcctgaaaattcacctttgctggagtcattctctcaagatctcttcctttaaaaacaattaggtgaagagatctcaaatagtttagaataatcacatccagcataccaaatgyacattccactccatcttcaaaagaaacagctgggtctgtcttgctaggaagacttcctcctcttcaaagtgaaacgctgatctcctgtccagaagcagattagccaataccccaccattatccaggtgacmtatagttaactcttctgtcaactcctgacaggctaaggacagcagacagtcatgtagatatcccaagatggaattactataatttctccagcccttaaggacctgaggacttaccagcctgggctcaaattcaaagcctcatgaagcagggacgctcactcagatgccc

SEQ ID NO: 17393 - DNA, 600 bp, Chicken  19866894225520_2
tctccatatatgtgagccactttcaagaattagcttgtaaatctccacaaccaaaatcctgaaaattcacctttgctggagtcattctctcaagatctcttcctttaaaaacaattaggtgaagagatctcaaatagtttagaataatcacatccagcataccaaatgyacattccactccatcttcaaaagaaacagctgggtctgtcttgctaggaagacttcctcctcttcaaagtgaaacgctgatctcctgtccagaagcagattagccaataccccaccattatccaggtgacmtatagttaactcttctgtcaactcctgacaggctaaggacagcagacagtcatgtagatatcccaagatggaattactataatttctccagcccttaaggacctgaggacttaccagcctgggctcaaattcaaagcctcatgaagcagggacgctcactcagatgccctgaagaagagaaacaaatggcttagcatctatcaaaaagtcagtttgaaaccttactctgtaaacgtctaaagaggggaatgtttataatgaagcacaacaggatatttaccacactacaagtacctgttc

SEQ ID NO: 17394 - DNA, 600 bp, Chicken  19866894225522_1
cctgttttcttgagggaacaggtggcagcttgtggagtcctttttttgttaagttttattcacagttcgtttttgtctttcctttcccatctgcagttgagtacgacaaggagttcacccctcaccagcagcaccacaaggagttcaagttcaatttgtctcagattcccgagggcgaggctgtcacagctgctgagtttcggatctacaaggactgcgtggtggagagctttaaaaaccaaacttttcttatcagcatctaccaagtgctgcaggaacatccaaacaggtaggccatcrcctcctgtcctrgggagggatgatgccagaaggaatgctcattggcagtaagttttgtgcacatgaacgagatgtgttgctgcacagtcctttccttgtgggaaatggtcatagtagattgcagaatgggcctcagccaagaaagtccacagtgtgacctttttgatgacattacaaagagcaagaatctgatgtgaggctgcagaattttaaatcaaagacattatatgctggcattgcttatggatactgaaatacgtgtattctgtttcagcttgatactacctgagtaaaaatcgt

SEQ ID NO: 17395 - DNA, 600 bp, Chicken  19866894225522_2
agggaacaggtggcagcttgtggagtcctttttttgttaagttttattcacagttcgtttttgtctttcctttcccatctgcagttgagtacgacaaggagttcacccctcaccagcagcaccacaaggagttcaagttcaatttgtctcagattcccgagggcgaggctgtcacagctgctgagtttcggatctacaaggactgcgtggtggagagctttaaaaaccaaacttttcttatcagcatctaccaagtgctgcaggaacatccaaacaggtaggccatcrcctcctgtcctrgggagggatgatgccagaaggaatgctcattggcagtaagttttgtgcacatgaacgagatgtgttgctgcacagtcctttccttgtgggaaatggtcatagtagattgcagaatgggcctcagccaagaaagtccacagtgtgacctttttgatgacattacaaagagcaagaatctgatgtgaggctgcagaattttaaatcaaagacattatatgctggcattgcttatggatactgaaatacgtgtattctgtttcagcttgatactacctgagtaaaaatcgtagccattttgca

SEQ ID NO: 17396 - DNA, 566 bp, Chicken  19866894225522_3
tgccagaaggaatgctcattggcagtaagttttgtgcacatgaacgagatgtgttgctgcacagtcctttccttgtgggaaatggtcatagtagattgcagaatgggcctcagccaagaaagtccacagtgtgacctttttgatgacattacaaagagcaagaatctgatgtgaggctgcagaattttaaatcaaagacattatatgctggcattgcttatggatactgaaatacgtgtattctgtttcagcttgatactacctgagtaaaaatcgtagccattttgcaaattacaagtsattagtgtaatcttgacctactctccactagaccaaggttaaaacaaataaagaaaaaggaagttcaacatgctgaccacaggtacaaaaccactcatgggctttcagtggtaataaggtaggcaaaagtgagaagtagaaayggtgacacaaaaatccaaaaaagagtaaactagttggttaattttaaaagggtaacatttccgatgaaggaactacgcaaggtaaagaaagatggaaatgcgtcaattaaatgtcagtgagtg

SEQ ID NO: 17397 - DNA, 423 bp, Chicken  19866894225522_4
tgacattacaaagagcaagaatctgatgtgaggctgcagaattttaaatcaaagacattatatgctggcattgcttatggatactgaaatacgtgtattctgtttcagcttgatactacctgagtaaaaatcgtagccattttgcaaattacaagtsattagtgtaatcttgacctactctccactagaccaaggttaaaacaaataaagaaaaaggaagttcaacatgctgaccacaggtacaaaaccactcatgggctttcagtggtaataaggtaggcaaaagtgagaagtagaaayggtgacacaaaaatccaaaaaagagtaaactagttggttaattttaaaagggtaacatttccgatgaaggaactacgcaaggtaaagaaagatggaaatgcgtcaattaaatgtcagtgagtg

SEQ ID NO: 17398 - DNA, 600 bp, Chicken  19866894225526_1
aaggttggaaaggacctctggagattacccagtcaatatccctgctaaaattggttccctagagtagcttgcacagaaaagcattcagatgggttttgagtatctccagagaaggagactccacagtccctctgagcggcctgttccagtgccctgtcatcctcaaaatacagattttccgcactttcacatggaatattgtgtgttccagtttgtgctcattgccccttattctgttactgggcactactgaaaagagcctgcttccatccacttgactcccatgcattagatatttayaaacattgaatccacattgcagagatgatacaagaaatcagaaatcaaattttactattattataactgaatgagaaatatgcacaaaacagcagtccatcacaataccaagttctgtgagttgctaagtgtgttctagagtgtgctaaatattgcagatactctcagacatgaaaaaaacaaatatacaagattaaacaagataatgaaatgttaagaagatgccatmtgttttgtaactataatcttttataaaatatgctggttaacttcagttctaacatttcagaaaacactgaa

SEQ ID NO: 17399 - DNA, 600 bp, Chicken  19866894225526_2
tattctgttactgggcactactgaaaagagcctgcttccatccacttgactcccatgcattagatatttayaaacattgaatccacattgcagagatgatacaagaaatcagaaatcaaattttactattattataactgaatgagaaatatgcacaaaacagcagtccatcacaataccaagttctgtgagttgctaagtgtgttctagagtgtgctaaatattgcagatactctcagacatgaaaaaaacaaatatacaagattaaacaagataatgaaatgttaagaagatgccatmtgttttgtaactataatcttttataaaatatgctggttaacttcagttctaacatttcagaaaacactgaataatgctttaaaagagaacatcaaattactttaaatttggcagttgagtagaggtattgcacaatacaagtagctgcctctctaacagctcagtgtaactggagagagaatataagcaacaccaagtaatttgcttgcgtcttttcacataaaaatgctcctttgatgatgaaaaacatgtttgtgaattcatacagtcaccatctgtatatactgttcttcatgtctg

SEQ ID NO: 17400 - DNA, 600 bp, Chicken  19866894225527_1
taaattaaaagaattagaaagaattaacttcagaagcttattagagttatcttcaatccagaaggaaaagggatgagaacaataggttcaaagggaataacacataactgaagcaatactccttctagatggtgctattgcttagctcttgtggaaaaaagatctttttaggaaagtattagattgtgataaattaaagtccatatgacttatacaagcaaggcatcataataagataacaaaggaattcacatatagcattacctaacatttgaatgtacattataatgacattttcaygtaatttttaaggcaattttcaaatttttacatctttacatctgcatgagcttgtaattgatcagatgactcacacagagatcagaggtcaaggaggtctccacaggtgaaaggggaaatggattaaatcagagaaatgtcctctatgtgtagttatttatttacatttattagcacttgcagcatactaatcaattcctaacaatcagaatgtgttcccttctgttgagatgcttaatttatttatatggatttaagaataaaggcttcactagagataaattgagggattcagcagtt

SEQ ID NO: 17401 - DNA, 600 bp, Chicken  19866894225533_1
aatggaaacactatgctaattcattccttctgaatatttaagctttcttctaacaagtaaatgggattattatataggtgacagtctctatagtagtgtaatgttttgagtattgatttccaagtgacctgtttcaaaacaagactttttcttccatatcagtatttcaaaagttgttttgatacacagcggaactcagctttcagtgttagaaacaaaagaagaccagcagatagattggagaagatgttaagcctctttctgggttagcacttgaagttggcttcattttgtttccartttttaatgcaaaactcctatttgaaagacggcgcccaacaacccactgcattgaaatcatccatgtcagtcttcccagagaaaatgaggaatccagcttgaatttgggtttctgtgggtgagggcagctctgctgagtgctgcctctcctctcaacgccttcctcctgggctgagctgcaggatgaatgttctgatgtatatttcaggagttctgtatgatttttgttcctttcagacacaaatatgctgctcattccttgcccatcctccaaaggcattcttgcagcatccatcgcat

SEQ ID NO: 17402 - DNA, 600 bp, Chicken  19866894225534_1
tatagtaaaaactatgactaatatagagttaaagaaaataaggacatttttagatggaataataatcaaatgtgcatttgtcctggtcagagaactggcaaactgtagatcataaaattaagtgcagtaaagcaaaaatcgtgcaaaaaaaaagcaaaaaaagcaaaaattaggttctgcttcacaagaagcacagacatagtcttgtgcagagcaccagttgagataacccatgtacttctcatttcatgggtttcttctatgttcttgttccttctgagtttatagcacttcagtttyccctgtgcacagtacttctgactactcagatgctttggtttaatctaaaatactatggatttactgtttgctaatgtgattggaaaattcatctccacacatatgaaggaagacagaagcacatgagtgtggtatgtgagaattcttccccagaatctctctgggatattgcaggaagtgacaagaccgatgactgtatttaacaagaatcaccatggagacagaaaacaaagattttgaacactttcaggactgaacattgtttggrgagataaaaatgagggaaaataaaggtacaaa

SEQ ID NO: 17403 - DNA, 600 bp, Chicken  19866894225534_2
tgttccttctgagtttatagcacttcagtttyccctgtgcacagtacttctgactactcagatgctttggtttaatctaaaatactatggatttactgtttgctaatgtgattggaaaattcatctccacacatatgaaggaagacagaagcacatgagtgtggtatgtgagaattcttccccagaatctctctgggatattgcaggaagtgacaagaccgatgactgtatttaacaagaatcaccatggagacagaaaacaaagattttgaacactttcaggactgaacattgtttggrgagataaaaatgagggaaaataaaggtacaaaaggacaaaagatcacataaaagtagggtctgtgctagttttaatgtgtccaacatctaatcagcacagtctatcctgtcttctcattaaactcaatttctaaatcttttattgggtgaggaactctctatctgtgtgctcatggttgtaggcatgtctgagtgcaacaggtggagtgggactaaggacagcatgggccatgtgtctggaggccagatgaagatacatgtgtcaatgtttaaacagtgagcatcaagctagactgtgtt

SEQ ID NO: 17404 - DNA, 591 bp, Chicken  19866894225569_1
aggacttttccagtctctgatcttcttgctgagagcactgatttctgccagaacgttgcatgactgactgttcatttgaaactgctttgaattcacacatgtattgatacacacttcattactttaaggagccttagtcatgtaagtgtcgttctgtacataaacacaaagctcttattctgaagagctcccaggctgagcagatgcgatagtagcaaatggagatgacaaactgaaatgctggagttatgtgacaaaggatagaagtggggtggcagtgatttacgaaggcaaccaatraaaatgtacacctgtcaaattactttttatgtatcatgaaaaatcctatggttacatacctgattgatgtcccttgtggactattttttcaggagattaatggagaaggagttgtgtcagtaaggaacaactgaggggggagggataaggaaagataaatgcaggggtgtttgcagggcagataagttgagtaccatcaattgaagggataaaagtcagggggcagcgcatcaaagagagaaaagaaacggtcacacagaactcctggatgaagggaatgacactgtaata

SEQ ID NO: 17405 - DNA, 600 bp, Chicken  19866894225570_1
tacctcttcttctaaggtttccagagctataaacaagggagaacaggaacaaccagtcaatcaatttatggaacattgaaaaggtcaagatattgtaatatgctgtgttgcactgaatatatgggatattaaaattcagatgcttcactcctaagaaaataattgcagtggagcaaatacagaagcacagactcctaccctggtggcaattaagtaaatacatctatttcaatgacagcctgagagacactgtcttttgtgattctctactaagcctgataacagtcttggatagaaatmatttccttccttgcttccttccttccttccttcctgctcctctcttcagatctttttacatcttattttctttctatattttattccttacatatcacctgctctattggagcaattcttctttactttgttacacaggcccccagaacactgagtaggactgagttttctggtctgtgtactcctctatccttcacagacttttgagaaaaagctgttcctcgcagtctgtgatcaaagccttctgtcattgactcttaagtgatttgtataccatttttaaaaatcagtaccccaatc

SEQ ID NO: 17406 - DNA, 600 bp, Chicken  19866894225574_1
tgcagttcaaggttttccagtaaaaccctccgagccagcagttctggaacagccgtcacatgctgtgccacaggcagctctcaacccagtactcactttccactgtagcaccttcgttggggttggaatagccttctcctttcctcttgatcctccggatgatccctccatcctcaaacaggtcctcgcctttgaaatcaagcagctcgatctaaaggattaaagggaaggtaggcagaactgtgggtggagaggaaggagaggagaaaaacaacagaaaattcacaaagcaacagttcrtccccaagccrgagagccaagcaaactaaatyggtgctcagctgacaagcagaagttgcccataaaagccagctccaagccacagcataatacacccaatttattagaaattgggccacatccagtacctgaagtgcagcacaaagtaacagtaaaacagagtttattaatcctgcagggcagagcgcaatcgtggctgggaggtgcacggggagcaaaggagcagatttttaacccctggaggtgttcccaagctgcttccccgctcgcgtgcctttgcacagcctggctgtgccagct

SEQ ID NO: 17407 - DNA, 600 bp, Chicken  19866894225574_2
gttttccagtaaaaccctccgagccagcagttctggaacagccgtcacatgctgtgccacaggcagctctcaacccagtactcactttccactgtagcaccttcgttggggttggaatagccttctcctttcctcttgatcctccggatgatccctccatcctcaaacaggtcctcgcctttgaaatcaagcagctcgatctaaaggattaaagggaaggtaggcagaactgtgggtggagaggaaggagaggagaaaaacaacagaaaattcacaaagcaacagttcrtccccaagccrgagagccaagcaaactaaatyggtgctcagctgacaagcagaagttgcccataaaagccagctccaagccacagcataatacacccaatttattagaaattgggccacatccagtacctgaagtgcagcacaaagtaacagtaaaacagagtttattaatcctgcagggcagagcgcaatcgtggctgggaggtgcacggggagcaaaggagcagatttttaacccctggaggtgttcccaagctgcttccccgctcgcgtgcctttgcacagcctggctgtgccagctctccccgcggg

SEQ ID NO: 17408 - DNA, 600 bp, Chicken  19866894225574_3
agccagcagttctggaacagccgtcacatgctgtgccacaggcagctctcaacccagtactcactttccactgtagcaccttcgttggggttggaatagccttctcctttcctcttgatcctccggatgatccctccatcctcaaacaggtcctcgcctttgaaatcaagcagctcgatctaaaggattaaagggaaggtaggcagaactgtgggtggagaggaaggagaggagaaaaacaacagaaaattcacaaagcaacagttcrtccccaagccrgagagccaagcaaactaaatyggtgctcagctgacaagcagaagttgcccataaaagccagctccaagccacagcataatacacccaatttattagaaattgggccacatccagtacctgaagtgcagcacaaagtaacagtaaaacagagtttattaatcctgcagggcagagcgcaatcgtggctgggaggtgcacggggagcaaaggagcagatttttaacccctggaggtgttcccaagctgcttccccgctcgcgtgcctttgcacagcctggctgtgccagctctccccgcgggactgctccccactgcagactc

SEQ ID NO: 17409 - DNA, 599 bp, Chicken  19866894225582_1
  misc_feature (1)..(12): n is any nucleotide
nnnnnnnnnnnnctttgtaggatcacagaatggcttgggttgaaagagatctcccaaagccatcccactgcagcctcctaccatgggcaggattgccttccactagcacaggttgcctagggcagagcactgctcaggatggagcttccgtagtgtcactgctctctattacactttttgttcctgtacattttatgagcaaatcactggtgttcttataaatctttctgagagtgagtgggttttggttgaatttattacagaatcccttctgtacaagtttgctaaggctggaggcaytctgcrtttactatttagtayttaactccactttttccacttttttgttgttgttttaatttttgagtgagctctatggagaactgatggatttctgtatggtacttccagcttctatcgtttttcacctagagggtggtgacacagtgaacaggttgcccaaggaggctgtggatgccccatccctggaggcattcaaggccaggctggatgtggctctgggcagcctggtctgctggttggtgaccctgcatatagcaggggggttgaaacaagatgatcactgtggtccttttcaa

SEQ ID NO: 17410 - DNA, 599 bp, Chicken  19866894225582_2
  misc_feature (1)..(6): n is any nucleotide
nnnnnnctttgtaggatcacagaatggcttgggttgaaagagatctcccaaagccatcccactgcagcctcctaccatgggcaggattgccttccactagcacaggttgcctagggcagagcactgctcaggatggagcttccgtagtgtcactgctctctattacactttttgttcctgtacattttatgagcaaatcactggtgttcttataaatctttctgagagtgagtgggttttggttgaatttattacagaatcccttctgtacaagtttgctaaggctggaggcaytctgcrtttactatttagtayttaactccactttttccacttttttgttgttgttttaatttttgagtgagctctatggagaactgatggatttctgtatggtacttccagcttctatcgtttttcacctagagggtggtgacacagtgaacaggttgcccaaggaggctgtggatgccccatccctggaggcattcaaggccaggctggatgtggctctgggcagcctggtctgctggttggtgaccctgcatatagcaggggggttgaaacaagatgatcactgtggtccttttcaacccagg

SEQ ID NO: 17411 - DNA, 600 bp, Chicken  19866894225582_3
atcacagaatggcttgggttgaaagagatctcccaaagccatcccactgcagcctcctaccatgggcaggattgccttccactagcacaggttgcctagggcagagcactgctcaggatggagcttccgtagtgtcactgctctctattacactttttgttcctgtacattttatgagcaaatcactggtgttcttataaatctttctgagagtgagtgggttttggttgaatttattacagaatcccttctgtacaagtttgctaaggctggaggcaytctgcrtttactatttagtayttaactccactttttccacttttttgttgttgttttaatttttgagtgagctctatggagaactgatggatttctgtatggtacttccagcttctatcgtttttcacctagagggtggtgacacagtgaacaggttgcccaaggaggctgtggatgccccatccctggaggcattcaaggccaggctggatgtggctctgggcagcctggtctgctggttggtgaccctgcatatagcaggggggttgaaacaagatgatcactgtggtccttttcaacccaggccattctgtgatgatt

SEQ ID NO: 17412 - DNA, 600 bp, Chicken  19866894225582_4
tgtggaatactgtatggagagctctgacatttcctcccacgttcatgcacatcatgcacccaaaactggaggctggacgaaacacacagctggattctggacaattgcttcctcagcccatcctcgagcagcatatcaagaaatcaggagcagggaaagtgaagtctgccagagctcagagagatcttagtagctcagagacaggactgtgatttggaacgttgattattgcacttgtgcttccacactgaatagagaactcataattgaagagattaccttgtggatgatgataagagygcattttcttcctctgcagacaacatttgtgctgtggcrgccattatggctgctgcttttatcagtgatttagaatggagctgtcaaaaactttaaaaagcttctattaaagtaatgtggttttatctatataaaacctgtgagatttatcagggaagccaggtttggcctccttttctaataagagtgtgcagctgcaccacagggcagggagctctccagccttcgaggaagtcaggcatctgatcagtaccagattgagaatccctggagagctctctctcgagagcagagctgtgg

SEQ ID NO: 17413 - DNA, 600 bp, Chicken  19866894225582_5
cgttcatgcacatcatgcacccaaaactggaggctggacgaaacacacagctggattctggacaattgcttcctcagcccatcctcgagcagcatatcaagaaatcaggagcagggaaagtgaagtctgccagagctcagagagatcttagtagctcagagacaggactgtgatttggaacgttgattattgcacttgtgcttccacactgaatagagaactcataattgaagagattaccttgtggatgatgataagagygcattttcttcctctgcagacaacatttgtgctgtggcrgccattatggctgctgcttttatcagtgatttagaatggagctgtcaaaaactttaaaaagcttctattaaagtaatgtggttttatctatataaaacctgtgagatttatcagggaagccaggtttggcctccttttctaataagagtgtgcagctgcaccacagggcagggagctctccagccttcgaggaagtcaggcatctgatcagtaccagattgagaatccctggagagctctctctcgagagcagagctgtggatatgtggaaaccagtccttcatcgccgttcatggggat

SEQ ID NO: 17414 - DNA, 600 bp, Chicken  19866894225586_1
aggaaatagcccttaaattcactcttatcgagtgcgcctcacattctgcacggtgctttttaaaagagaaagccacattagggggacaaaacacatgactatattccacagctgctctgtgagacctcacaagtcaggcctttaaacaagagctcctctccaccaccagcactatgaaaatggaggggcaagaagggcttcatctttgtgaaccatccgcaagagctgctgttaatcactccaaggtgatcccataggatctagcttaagcacagcgtgaaagaaaaccccgctgctccstgtgaacgacctggatctggaatgacttcccttgtgcttcagaaggagattcgtggctttgggatgtcttccacaatgtcacctaccctcattttttgagttcatccccaagcaaaagttgttcctcctctctagagctttccatggaagtccaaggctgagaaaggctgcagaagtagaggcgggtttcagacagtatagctggtgggaattgccccctcctgtgcaaagacctccagccaaggggacacttgctgctccccaagctagagcctgccttcccacacacacctcaagctg

SEQ ID NO: 17415 - DNA, 600 bp, Chicken  19866894225595_1
gagcactgccaggacagcagagctgtgctggctgcattactgatcacacatgctctggtatggccacaccggcagataacggatgggtgctccaaggagggaagtggagggactgacaaaatcgctgcctacacattgagaaatatacagggcatagcatgtgacatacactgaaattaacatgaatttagtactgctgccagtgaaagccactctaattgaaactaatagctttgcccttcaatgtcttgtaaagcactccctactgcccatgcaggagtcacctgtctgcagtcagcrtttctcacaacaggaggagagaggcttttcaaacctggagaaaactatcatcttctggtaacaaaaaaacaaaacaaacaagacaaccctacggtgttacagacgttgaggaacaggattatgtgctcctctgtgatggcagcccaccaagctctagtacagatggtccattcccattgcacgttccctcaacagctttgctactggcatttcagaatgtgagattgttgattaaaaagcctcaaactaagttaatgacaaagtgataacatccttgaactcattttggttgggctcttt

SEQ ID NO: 17416 - DNA, 600 bp, Chicken  19866894225597_1
agacccagctgtcacgtgttcctggacgcactcctttccagcgctccctcgtgctccttcctccccatccgtgtgcagcgactgaccttccagatctgacccatccgcctccccgctgcagcagccacccttggtttgagattagataaagcgacaggcggagcagcgagctgcgtgcgggcaggacaggcaacggggacggggcacgaggcccagggaggggggttccccgggcgccctatgagcagaccttgtctggagcgcacgtggaggctggggaaaaggcacgatcttacagcrctgcagatcagaaagcaaacaggctaggttagggacagaaatagggcagagcacgcaggctgcaagccggaggcacagaaaggaagggctgggaggtgctcacgatgcagaagggaagaagcaggcaaaggaaagaaacagcactgcagcctggttagcctatttaatgccatgcgtcctactgcaagctcttgcagcacctctagcagcaaagaaactccagctgcttgctctgtgcagggcacaggaggacagggactgcttgcagactgacacttgaggatgaaacagctttttgtc

SEQ ID NO: 17417 - DNA, 600 bp, Chicken  19866894225597_2
ggctctgagcaacctatctagctgtagacactgcaggggagttggagtagatgacttttaaaggtcccttccaactcaaacaattccttgattctatctccttggttccatacaagcattgctctgcagagaaaactcatcacactggagcaaggagtgccacacaccaggaagaatggagaactgcagcaatgaccacgcactgactttctttgaaggaaagagacatctgtggcagcggagcccctgaccaagtgacagagatggtacggggtctgtgcatcaccccctccaccagcygccctccccacagcccaaagctgctgcgctgttatacaaccctgggatcccagggatgagctggtgctcgcggtgagaaatgttgagttatagttgataaaagcaatraagggttccaatagccctcttaacattccgatgccagtcttaccagcctgttccccctcaaacattcactctccctaccaaaggcctcacagcccatgtgtcacttggtgagcaggggtcaacccaggcagcgaccggacaactgcgcccactgctcctcaaactcctcagcactgcagccatccccaggca

SEQ ID NO: 17418 - DNA, 600 bp, Chicken  19866894225597_3
catacaagcattgctctgcagagaaaactcatcacactggagcaaggagtgccacacaccaggaagaatggagaactgcagcaatgaccacgcactgactttctttgaaggaaagagacatctgtggcagcggagcccctgaccaagtgacagagatggtacggggtctgtgcatcaccccctccaccagcygccctccccacagcccaaagctgctgcgctgttatacaaccctgggatcccagggatgagctggtgctcgcggtgagaaatgttgagttatagttgataaaagcaatraagggttccaatagccctcttaacattccgatgccagtcttaccagcctgttccccctcaaacattcactctccctaccaaaggcctcacagcccatgtgtcacttggtgagcaggggtcaacccaggcagcgaccggacaactgcgcccactgctcctcaaactcctcagcactgcagccatccccaggcaggtgtgctggaagcatcccacgcagggcagcaggcagccaggctcaggctcatggtgccacagggcaggaggtgccaggggcacgcggatgcaggcaggcagagccag

SEQ ID NO: 17419 - DNA, 600 bp, Chicken  19866894225600_1
ttctttgaagaataagattgaggcattagcactgatttggacaatcaaatcagaaccaaagtcaatgtcaaaggttcatcttgtgtctaagaaatggctaccattcttaatgtgtctaaaattctagcttgagggtaaggaggcaagtgaaagggctggattccatttcttaggtctacaatttattaaagcaaaaattaatgccgaagtagaggaggatgcctactgtaacttcggttttctaattcaaacgaatttcagtaagtcagcttttcagtaatgagccatataggaaggatraacagaaatgaggtgatctgcagtttttcattatccatctaaagagtgagatctgacaaaaattcagccttgtaaacactgaattctgaatgtgtagaattgccttcactgtccagtaagtactttggcttatcactagaattatttcagcttgaattttttctgctgaccagaacagctcttgaatgaattatccagctgatgttaatatactcagtgtccattactcttcattttcataagatcatgaataaatgtagtgtgcaggggatctcaggtagtctttaatgcaagccagtg

SEQ ID NO: 17420 - DNA, 599 bp, Chicken  19866894225603_1
  misc_feature (1)..(233): n is any nucleotide
nnnnnnnnnnnnnnnnnnnnnnnnnnnnnnnnnnnnnnnnnnnnnnnnnnnnnnnnnnnnnnnnnnnnnnnnnnnnnnnnnnnnnnnnnnnnnnnnnnnnnnnnnnnnnnnnnnnnnnnnnnnnnnnnnnnnnnnnnnnnnnnnnnnnnnnnnnnnnnnnnnnnnnnnnnnnnnnnnnnnnnnnnnnnnnnnnnnnnnnnnnnnnnnnnnnnnnnnnnnnnnnnnnnnnnnnnttaatgattcctgcattggtactatcttggagggggatagcctggcaggactcagagtcaccctatrgagagcttgcgaggatggcattaagaaatagtgctggaaaaactggctgtttcctggtaagttccacgtatgtgtctgaattttggtcctctatgctcaaaactgagcttgcacttggttcactgcctgcaagctgttgggagagcaatggggccattcccagcagcatggtgcccgaaactggcttcctttctccagctcttagtagttgatcttccaatgttttgcccttttccagtaattaggttgtttgcctgcagcagccttggagtttgtggaagagtccaggttagtcgcta

SEQ ID NO: 17421 - DNA, 600 bp, Chicken  19866894225603_2
tttcctggtaagttccacgtatgtgtctgaattttggtcctctatgctcaaaactgagcttgcacttggttcactgcctgcaagctgttgggagagcaatggggccattcccagcagcatggtgcccgaaactggcttcctttctccagctcttagtagttgatcttccaatgttttgcccttttccagtaattaggttgtttgcctgcagcagccttggagtttgtggaagagtccaggttagtcgctattggaactgttgggttttagtgtctgaaacagcagaaatgtgcatttccygactccagccaaacctggaactggagaggcaacccaccacagggagataaggcagctggcccagaaaccactcagcccttcagctttccccttgaagtgatgtgaagagccacccgccaggatcagagcctggctttccacctctggataatcctggcttcatcaaaaacccacgagcagagcttcagatgtgtggtgctccacggctaagctgcttttgtgccctcccagtgcctcggcacactgcaaacaggtggcattcactggcaacagaggacacgaagcatcccctaatccatc

SEQ ID NO: 17422 - DNA, 600 bp, Chicken  19866894225607_1
aaagccatctaattttagtctgacaccattcggttgaaatacttaactgtcactcttgaaaatatttgtatcgagaatcatccactccattgtgtgtggttgagttgtcaaggctcctgcatagatactgtccagtgaaacagcaagggcagaaattcttcttacaaagggttttaaacaaagaaatatccggtttcttatgaacacaaaaagtctgttcagtatttgttgataaaacaccaatgaagagagcttgtttttgaaggcttgtgtaagaagatgctgcagttctgcgttcartgaaaatctgcaagtgtgcttaggttgtaagcctgkagtgtctggcacacctggtcctgtctttctacatgatagccctcttcgacaattgctgtagcagtgctgctctccaagtatgaataaatamtaaaagttatgactccagtatggacacttcaaatggcagcgaagaattggtttaaagttaattgctgttactattgcacaccgttggcttgctgtctyttcatggactgatgtccttggtttccaccaggcatctattttattaccagtgatttgtgagttcatgtaagcccc

SEQ ID NO: 17423 - DNA, 600 bp, Chicken  19866894225607_2
aaatacttaactgtcactcttgaaaatatttgtatcgagaatcatccactccattgtgtgtggttgagttgtcaaggctcctgcatagatactgtccagtgaaacagcaagggcagaaattcttcttacaaagggttttaaacaaagaaatatccggtttcttatgaacacaaaaagtctgttcagtatttgttgataaaacaccaatgaagagagcttgtttttgaaggcttgtgtaagaagatgctgcagttctgcgttcartgaaaatctgcaagtgtgcttaggttgtaagcctgkagtgtctggcacacctggtcctgtctttctacatgatagccctcttcgacaattgctgtagcagtgctgctctccaagtatgaataaatamtaaaagttatgactccagtatggacacttcaaatggcagcgaagaattggtttaaagttaattgctgttactattgcacaccgttggcttgctgtctyttcatggactgatgtccttggtttccaccaggcatctattttattaccagtgatttgtgagttcatgtaagccccatgacatacagcagaacccttagagtgaaaaagctt

SEQ ID NO: 17424 - DNA, 600 bp, Chicken  19866894225607_3
ctgtccagtgaaacagcaagggcagaaattcttcttacaaagggttttaaacaaagaaatatccggtttcttatgaacacaaaaagtctgttcagtatttgttgataaaacaccaatgaagagagcttgtttttgaaggcttgtgtaagaagatgctgcagttctgcgttcartgaaaatctgcaagtgtgcttaggttgtaagcctgkagtgtctggcacacctggtcctgtctttctacatgatagccctcttcgacaattgctgtagcagtgctgctctccaagtatgaataaatamtaaaagttatgactccagtatggacacttcaaatggcagcgaagaattggtttaaagttaattgctgttactattgcacaccgttggcttgctgtctyttcatggactgatgtccttggtttccaccaggcatctattttattaccagtgatttgtgagttcatgtaagccccatgacatacagcagaacccttagagtgaaaaagctttttgttttcttctcctttcctttgctgaccatctgtttggcagcttcttgataagatgaaattaaattaatgaactttaattccttagatg

SEQ ID NO: 17425 - DNA, 600 bp, Chicken  19866894225607_4
ttgttgataaaacaccaatgaagagagcttgtttttgaaggcttgtgtaagaagatgctgcagttctgcgttcartgaaaatctgcaagtgtgcttaggttgtaagcctgkagtgtctggcacacctggtcctgtctttctacatgatagccctcttcgacaattgctgtagcagtgctgctctccaagtatgaataaatamtaaaagttatgactccagtatggacacttcaaatggcagcgaagaattggtttaaagttaattgctgttactattgcacaccgttggcttgctgtctyttcatggactgatgtccttggtttccaccaggcatctattttattaccagtgatttgtgagttcatgtaagccccatgacatacagcagaacccttagagtgaaaaagctttttgttttcttctcctttcctttgctgaccatctgtttggcagcttcttgataagatgaaattaaattaatgaactttaattccttagatgcaggaatgaaatacacaattgtgaagtaactgataaaaatgacataaagttacatgcagtttcagcttaatatgtgcaatatggcttctgcaagcatc

SEQ ID NO: 17426 - DNA, 600 bp, Chicken  19866894225607_5
cartgaaaatctgcaagtgtgcttaggttgtaagcctgkagtgtctggcacacctggtcctgtctttctacatgatagccctcttcgacaattgctgtagcagtgctgctctccaagtatgaataaatamtaaaagttatgactccagtatggacacttcaaatggcagcgaagaattggtttaaagttaattgctgttactattgcacaccgttggcttgctgtctyttcatggactgatgtccttggtttccaccaggcatctattttattaccagtgatttgtgagttcatgtaagycccatgacatacagcagaacccttagagtgaaaaagctttttgttttcttctcctttcctttgctgaccatctgtttggcagcttcttgataagatgaaattaaattaatgaactttaattccttagatgcaggaatgaaatacacaattgtgaagtaactgataaaaatgacataaagttacatgcagtttcagcttaatatgtgcaatatggcttctgcaagcatcaaatggtgttttttgagttaatatttttatgcaatatgaggtctttgccctgagagagcctaactggtaaaa

SEQ ID NO: 17427 - DNA, 600 bp, Chicken  19866894225607_6
artgaaaatctgcaagtgtgcttaggttgtaagcctgkagtgtctggcacacctggtcctgtctttctacatgatagccctcttcgacaattgctgtagcagtgctgctctccaagtatgaataaatamtaaaagttatgactccagtatggacacttcaaatggcagcgaagaattggtttaaagttaattgctgttactattgcacaccgttggcttgctgtctyttcatggactgatgtccttggtttccaccaggcatctattttattaccagtgatttgtgagttcatgtaagcyccatgacatacagcagaacccttagagtgaaaaagctttttgttttcttctcctttcctttgctgaccatctgtttggcagcttcttgataagatgaaattaaattaatgaactttaattccttagatgcaggaatgaaatacacaattgtgaagtaactgataaaaatgacataaagttacatgcagtttcagcttaatatgtgcaatatggcttctgcaagcatcaaatggtgttttttgagttaatatttttatgcaatatgaggtctttgccctgagagagcctaactggtaaaat

SEQ ID NO: 17428 - DNA, 543 bp, Chicken  19866894225609_1
acagactggtctcaacacaaaatattaatgatatcattgtaattaataaagcattcaataaaagcaaaaggggaaatgattgtaatttaatacaaccatgctaatagtgctacatttattcaattcctttgctatggaatgccaggagaattttaatgatgcatgttaatataatagataagtgcagaaaaatgacacatctctataagcacttgcttacccattctgagatgactttctgtctccagtagagtcaacccttcaaattaaaatgtattgaaaatactccttttagagttyctaatttccatttgagtgagtgttaaagtttatcaaaacacaagaatttttactgatacattttaaatgggaagataacatattttagtacagcaaggcatacataagagaattcatttataaaagcatagttgttttttttttttttccccatttaccctcaaaacagttgacaattccatttggagatttgggaaattatcaggtctgtgagaagctaaaatatctctctggtgtattcat

SEQ ID NO: 17429 - DNA, 516 bp, Chicken  19866894225615_1
acgtttttattccttcatttgttctgtacaagtgtaggaataactgaagtgaggagtaggctttctttgctcctgttgtttcctgtcagagaagtagttctgatattgaagctgtcagcaaatttagcttcccttattgtaagaagtagtgctgcagaatgtttgtgtgcaaaacaaaagagaattctggtgattattttatttacctggatgcagactacatgatgccacttaaaggtgaagatatagcccttgggcataggaatatggaatccaaatatgacacaacatagtaaatawatttagaaatgagttgtacaaaatagaaatartkatacagaaacagagcgtgagcagtttygtagttgcacattgagaattcacatatatattctcctcccttatctgtgtgcagaaaaaaaagcagtgaggtgctaaratattaaagcactttttattatggatagatgggacttgcaagcatattctgagcaggagatgcttcaatgaggttat

SEQ ID NO: 17430 - DNA, 484 bp, Chicken  19866894225615_2
tgtaggaataactgaagtgaggagtaggctttctttgctcctgttgtttcctgtcagagaagtagttctgatattgaagctgtcagcaaatttagcttcccttattgtaagaagtagtgctgcagaatgtttgtgtgcaaaacaaaagagaattctggtgattattttatttacctggatgcagactacatgatgccacttaaaggtgaagatatagcccttgggcataggaatatggaatccaaatatgacacaacatagtaaatawatttagaaatgagttgtacaaaatagaaatartkatacagaaacagagcgtgagcagtttygtagttgcacattgagaattcacatatatattctcctcccttatctgtgtgcagaaaaaaaagcagtgaggtgctaaratattaaagcactttttattatggatagatgggacttgcaagcatattctgagcaggagatgcttcaatgaggttat

SEQ ID NO: 17431 - DNA, 482 bp, Chicken  19866894225615_3
taggaataactgaagtgaggagtaggctttctttgctcctgttgtttcctgtcagagaagtagttctgatattgaagctgtcagcaaatttagcttcccttattgtaagaagtagtgctgcagaatgtttgtgtgcaaaacaaaagagaattctggtgattattttatttacctggatgcagactacatgatgccacttaaaggtgaagatatagcccttgggcataggaatatggaatccaaatatgacacaacatagtaaatawatttagaaatgagttgtacaaaatagaaatartkatacagaaacagagcgtgagcagtttygtagttgcacattgagaattcacatatatattctcctcccttatctgtgtgcagaaaaaaaagcagtgaggtgctaaratattaaagcactttttattatggatagatgggacttgcaagcatattctgagcaggagatgcttcaatgaggttat

SEQ ID NO: 17432 - DNA, 455 bp, Chicken  19866894225615_4
tttctttgctcctgttgtttcctgtcagagaagtagttctgatattgaagctgtcagcaaatttagcttcccttattgtaagaagtagtgctgcagaatgtttgtgtgcaaaacaaaagagaattctggtgattattttatttacctggatgcagactacatgatgccacttaaaggtgaagatatagcccttgggcataggaatatggaatccaaatatgacacaacatagtaaatawatttagaaatgagttgtacaaaatagaaatartkatacagaaacagagcgtgagcagtttygtagttgcacattgagaattcacatatatattctcctcccttatctgtgtgcagaaaaaaaagcagtgaggtgctaaratattaaagcactttttattatggatagatgggacttgcaagcatattctgagcaggagatgcttcaatgaggttat

SEQ ID NO: 17433 - DNA, 377 bp, Chicken  19866894225615_5
taagaagtagtgctgcagaatgtttgtgtgcaaaacaaaagagaattctggtgattattttatttacctggatgcagactacatgatgccacttaaaggtgaagatatagcccttgggcataggaatatggaatccaaatatgacacaacatagtaaatawatttagaaatgagttgtacaaaatagaaatartkatacagaaacagagcgtgagcagtttygtagttgcacattgagaattcacatatatattctcctcccttatctgtgtgcagaaaaaaaagcagtgaggtgctaaratattaaagcactttttattatggatagatgggacttgcaagcatattctgagcaggagatgcttcaatgaggttat

SEQ ID NO: 17434 - DNA, 600 bp, Chicken  19866894225617_1
atgttacattttctgtttttgtttgtttgtttgtttttagtaataatgcaatacaaggatatgttctataatctcatgaaaatgtctgtgaccaaactgagaagaaaatccgagtttcctccgagtcagtccaggtactctcagcctgagagactaaatttggaatagaagataaaacgagaatggagttctcaaagaatatttctttctccattattaaaaacggaaggaagtccagggtcctctgagtgtagattgaaaggtcttttcattactaaagctgaattgtgctggactgcrgttgctttttttttttttttcttctctcagagtgtatgtaaaactctgttggttaaagaagatcatttcttatttccaagtgagtgtcatagttactatttttccttgaataaacaagaaatggaaatactctgttacagttcttattgtatatttcttcaggcatatgattgcctctttcaactagagaacctgtaagttctttgaaacctatgtgtaactcacaagctgaaataaaaaggaaaaaaaatctccacatctttcagtgcagaattttacaaatatcagcttcacttgata

SEQ ID NO: 17435 - DNA, 599 bp, Chicken  19866894225620_1
  misc_feature (1)..(201): n is any nucleotide
nnnnnnnnnnnnnnnnnnnnnnnnnnnnnnnnnnnnnnnnnnnnnnnnnnnnnnnnnnnnnnnnnnnnnnnnnnnnnnnnnnnnnnnnnnnnnnnnnnnnnnnnnnnnnnnnnnnnnnnnnnnnnnnnnnnnnnnnnnnnnnnnnnnnnnnnnnnnnnnnnnnnnnnnnnnnnnnnnnnnnnnnnnnnnnnnnnnnnnnnnactgtgaattccatcgcacagagcgaggctgcagcctgccttccagctacacgccccgggggctttgggaacttatgctttccttaagatttaaggttktttttttttttaagaatcatattttattattcatgttcgttgcttggaacgaaaaaaaaaaagaaagcaggcgtgtttaacactggagacataattaactgcaagagatggtttcctggttgtggtgttgatgttttattttttaatttgctttttttttttcccctttggatgtttttttttttcatctgactcatattttagcagcagcagcagcaattctccaggcgctcgcatcaaaaagggacaaggcaggagttaaattttcatgtgcaccgtagtgacttaggagctaaaca

SEQ ID NO: 17436 - DNA, 600 bp, Chicken  19866894225620_2
cgcccggcgcaaccctgagcttgggctttgcagctacttccagcaaggcatgggccttcttattttgggttgttgtttttggaggcactttggcttctgaggttgttccaggtctgtctttgattttgtttttattagaggaaggttttaaagcgaaagaaaagccccgggagatgcggatgtcagcagggttggtcggggttatcccaggtcaatgggcgcctggtgcgggcaggctgagttcagtgtcctgagcccatctcccttttctctcccccaaagggctccattggcttcccrggatttccaggcgccaacggcgagaagggcacacgggtaagagctgctctctgctcacttggctgagttttccctctagggaagagccctcgggcaggactgctggctgtcccttcgcagtccccaacagaggatgctccagccctattacacgctgggaagatttcctttgagatactgtaggagatttctctgaacctgaatccttccctcactgccagacgttgmtcagggcgtgaagagctttttaattaatggtggttgttggagatgggtgattctgttcagaaccatcttcat

SEQ ID NO: 17437 - DNA, 600 bp, Chicken  19866894225620_3
cgggcaggctgagttcagtgtcctgagcccatctcccttttctctcccccaaagggctccattggcttcccrggatttccaggcgccaacggcgagaagggcacacgggtaagagctgctctctgctcacttggctgagttttccctctagggaagagccctcgggcaggactgctggctgtcccttcgcagtccccaacagaggatgctccagccctattacacgctgggaagatttcctttgagatactgtaggagatttctctgaacctgaatccttccctcactgccagacgttgmtcagggcgtgaagagctttttaattaatggtggttgttggagatgggtgattctgttcagaaccatcttcatcctaactgatgaagagattcaaagtggactgttgaaaacacacttacaggtgcctccttttaacaagtgaagctaccctagattcctaactayccttcaagtactggggctccatcccccccagatgtgctttacctctcacccctctcagctttgctcctgagtagcaggaattcacctgctgtgggtttgtatttacctgcttccttttcttagtttgagcataac

SEQ ID NO: 17438 - DNA, 600 bp, Chicken  19866894225620_4
gcaggactgctggctgtcccttcgcagtccccaacagaggatgctccagccctattacacgctgggaagatttcctttgagatactgtaggagatttctctgaacctgaatccttccctcactgccagacgttgmtcagggcgtgaagagctttttaattaatggtggttgttggagatgggtgattctgttcagaaccatcttcatcctaactgatgaagagattcaaagtggactgttgaaaacacacttacaggtgcctccttttaacaagtgaagctaccctagattcctaactayccttcaagtactggggctccatcccccccagatgtgctttacctctcacccctctcagctttgctcctgagtagcaggaattcacctgctgtgggtttgtatttacctgcttccttttcttagtttgagcataacaatgttgagttaggggatggagagcaccaacatcaactcgttccgtgctccagctctggtcacagggtgaagatggggaggagtgaagagggcgagtggaattcgttttcctcctcctctcatttaaatacaaatgacttctaacagacgtgtttgatgggagcg

SEQ ID NO: 17439 - DNA, 542 bp, Chicken  19866894225624_1
tggctttatgcaaactttgaagctctgctggaaccagttgctaggaactgcagctcatactttgcagaagcttagtcctgattttgcaaagtgcttttgtgtaatcagtcaattagagctgtgaccagtgatccatatcagcaattgatagcgaagtgcaggattggtacgcttggaatccaggtttcagcctttctggttaggtagcaccgctcacacaaaagttacgctgatttcttgaatttctgactaaaagcatttgtatacaactctgcattaatcggagaaagttgggaaagsatttgttttaacattttcacctccatttgcgctattaggaaatccctccctgctaatttttttttggtaacatcatctggaaatggaaataaatgcagtgataygattacagtcagttaacaaccaaatcatgcttgaagtgcatttgtttgtaatctacaatggggtagacaaattgtttttatcttttttttgcacaagcataactttaaaacgaatattaagcttcagtaaattttgaa

SEQ ID NO: 17440 - DNA, 438 bp, Chicken  19866894225624_2
tcagtcaattagagctgtgaccagtgatccatatcagcaattgatagcgaagtgcaggattggtacgcttggaatccaggtttcagcctttctggttaggtagcaccgctcacacaaaagttacgctgatttcttgaatttctgactaaaagcatttgtatacaactctgcattaatcggagaaagttgggaaagsatttgttttaacattttcacctccatttgcgctattaggaaatccctccctgctaatttttttttggtaacatcatctggaaatggaaataaatgcagtgataygattacagtcagttaacaaccaaatcatgcttgaagtgcatttgtttgtaatctacaatggggtagacaaattgtttttatcttttttttgcacaagcataactttaaaacgaatattaagcttcagtaaattttgaa

SEQ ID NO: 17441 - DNA, 600 bp, Chicken  19866894225625_1
tactgaaatcagtaaaaatcttcccaattgcttcagcagagtttagttaaggcactttcaaaacagaagtgattgccagcgtctaagcttttaagtcctgacctgcactgcagttcttctgcatctgggaatctcaagccctgccctgcatgctggggccaggtacaatattaatgtaggaaacatacttctctctttggcccatgatttccagcccacatgaatgaagaaacattctttgaatttgcctgtgaaagcaacacaaggcatgtgctcatctacgtagcactgacttgatcrgtgttctgtattttctcccccgcctccttttatttggtttttgttttgttttgttcttcagaatagatgccaagttgtttttttttctgtctttgccaaaaagataccatccagaaccttgtagcactgctgtttccatttgctgaatrttagatctagttcttttagcattttagtctgttgaagctttgtttccatgtcttgttttgtttggaatttgaacattttaatgggaaacacaagcaaacaaagcttccaagtagcatttggctgaaaattagtttgtgactaaaggggctg

SEQ ID NO: 17442 - DNA, 600 bp, Chicken  19866894225625_2
gcgtctaagcttttaagtcctgacctgcactgcagttcttctgcatctgggaatctcaagccctgccctgcatgctggggccaggtacaatattaatgtaggaaacatacttctctctttggcccatgatttccagcccacatgaatgaagaaacattctttgaatttgcctgtgaaagcaacacaaggcatgtgctcatctacgtagcactgacttgatcrgtgttctgtattttctcccccgcctccttttatttggtttttgttttgttttgttcttcagaatagatgccaagttgrttttttttctgtctttgccaaaaagataccatccagaaccttgtagcactgctgtttccatttgctgaatrttagatctagttcttttagcattttagtctgttgaagctttgtttccatgtcttgttttgtttggaatttgaacattttaatgggaaacacaagcaaacaaagcttccaagtagcatttggctgaaaattagtttgtgactaaaggggctgtctcaaatggacccattccctccttcagggcctcagagtgtctgtatttgcagtaaaattgggaaccaggcaarccac

SEQ ID NO: 17443 - DNA, 600 bp, Chicken  19866894225625_3
cgtctaagcttttaagtcctgacctgcactgcagttcttctgcatctgggaatctcaagccctgccctgcatgctggggccaggtacaatattaatgtaggaaacatacttctctctttggcccatgatttccagcccacatgaatgaagaaacattctttgaatttgcctgtgaaagcaacacaaggcatgtgctcatctacgtagcactgacttgatcrgtgttctgtattttctcccccgcctccttttatttggtttttgttttgttttgttcttcagaatagatgccaagttgtrtttttttctgtctttgccaaaaagataccatccagaaccttgtagcactgctgtttccatttgctgaatrttagatctagttcttttagcattttagtctgttgaagctttgtttccatgtcttgttttgtttggaatttgaacattttaatgggaaacacaagcaaacaaagcttccaagtagcatttggctgaaaattagtttgtgactaaaggggctgtctcaaatggacccattccctccttcagggcctcagagtgtctgtatttgcagtaaaattgggaaccaggcaarccacc

SEQ ID NO: 17444 - DNA, 600 bp, Chicken  19866894225625_4
atgctggggccaggtacaatattaatgtaggaaacatacttctctctttggcccatgatttccagcccacatgaatgaagaaacattctttgaatttgcctgtgaaagcaacacaaggcatgtgctcatctacgtagcactgacttgatcrgtgttctgtattttctcccccgcctccttttatttggtttttgttttgttttgttcttcagaatagatgccaagttgtttttttttctgtctttgccaaaaagataccatccagaaccttgtagcactgctgtttccatttgctgaatrttagatctagttcttttagcattttagtctgttgaagctttgtttccatgtcttgttttgtttggaatttgaacattttaatgggaaacacaagcaaacaaagcttccaagtagcatttggctgaaaattagtttgtgactaaaggggctgtctcaaatggacccattccctccttcagggcctcagagtgtctgtatttgcagtaaaattgggaaccaggcaarccaccaataggtttcagttggaaataatggctcatgtgcagttcttgttaggacatcagaagtcattgccccgtc

SEQ ID NO: 17445 - DNA, 600 bp, Chicken  19866894225625_5
ttgtttttttttctgtctttgccaaaaagataccatccagaaccttgtagcactgctgtttccatttgctgaatrttagatctagttcttttagcattttagtctgttgaagctttgtttccatgtcttgttttgtttggaatttgaacattttaatgggaaacacaagcaaacaaagcttccaagtagcatttggctgaaaattagtttgtgactaaaggggctgtctcaaatggacccattccctccttcagggcctcagagtgtctgtatttgcagtaaaattgggaaccaggcaarccaccaataggtttcagttggaaataatggctcatgtgcagttcttgttaggacatcagaagtcattgccccgtcttgcacagtaattgtgtttcagttagggacacgtgtttgatttttcttttgcttgcttcctttgtattttagcttggatgatttatgtccaggctgaagtgtggtttgtgtggtctgtgtgggggttgggacttttttattgctgctgtattttaaagcagcagacatcttctggggcagcttaaataccttgataacttaggtgtataaattctaacaaggcaa

SEQ ID NO: 17446 - DNA, 600 bp, Chicken  19866894225629_1
gcagctcaacgttttccaagaacttcaagaaatttgcagtatctgagactaggaatctacaaacaagtctcatctgatggagaaaagcttacgcccatctccagcacttcaacatttctgtcacaccgttcagatacgttcactttcttcaacgcaaagatcaacaaatacatgaatcattcagatctgtccatcacacggtgccggtgataccagatagcgtgtttacagtgctttcacagttacgtgaatcaatccggcgcacatttgccaagatataaaaataaatgttacataacrcgcagttcacaatcgatacgtgggttgcacgcatcaaacagaagaaaacagcacatgaaccactgtgcaacaactgtcctaagaagcagaagctgcaattgcctgagtcatttgacccaaaattcggtctcgttgtctggtgagcgcaagtagcaataaggacagcagagtaacaaatacagcaatcctctcggtttgtccagggacaaasaaagtaattaggcacagtcagaagccttcagcatcttcagatagtgttttctcctgcctaggctcaaaaaggaaatgtttttcctgcag

SEQ ID NO: 17447 - DNA, 497 bp, Chicken  19866894225629_2
accagatagcgtgtttacagtgctttcacagttacgtgaatcaatccggcgcacatttgccaagatataaaaataaatgttacataacrcgcagttcacaatcgatacgtgggttgcacgcatcaaacagaagaaaacagcacatgaaccactgtgcaacaactgtcctaagaagcagaagctgcaattgcctgagtcatttgacccaaaattcggtctcgttgtctggtgagcgcaagtagcaataaggacagcagagtaacaaatacagcaatcctctcggtttgtccagggacaaasaaagtaattaggcacagtcagaagccttcagcatcttcagatagtgttttctcctgcctaggctcaaaaaggaaatgtttttcctgcagcctgacagaaactgatgaaatatcactattagtaacgatgatgagagatggagagattaaagacagggagttcaaaagcaaacatgctgcaacttagctttggggggg

SEQ ID NO: 17448 - DNA, 599 bp, Chicken  19866894225632_1
  misc_feature (1)..(18): n is any nucleotide
nnnnnnnnnnnnnnnnnntgttgcgtgctctcctgtggcttcctttaatgtagttgtgtgtgctgctgataaatgaacgaatgctgtatgtaagagtaattagctgatggagtagatcagagggatgcataagaaccttttatgaaaaatcaagcggtttgattttagttttatttgaggagttatgtaaggagttattcttggggcaacgagcagccctaagcacaggctctgcaggtcattttggcagcacttgctgtgtgtgtcccattcccaactttgccagtggtcccttgaacrttgccatgtgtgtagccacagcaggaagcygttctgtatrygttgtctgtgactgtgctgcgctcattggtttggatgacaggtgtagaaggcagccttggctctctctctaacacagctgtcctggctaaaaaggctgagcatccctaccataaaccagtaaggaagctggactctcatctcttcatcaggctgttctgaagggtcttgtccagctgcatattccagtggatgaggtttgttggaagcagtaagagaacagtgtcaaggtagtgaatagagctgggaaaattggtctg

SEQ ID NO: 17449 - DNA, 600 bp, Chicken  19866894225632_2
tcctgtggcttcctttaatgtagttgtgtgtgctgctgataaatgaacgaatgctgtatgtaagagtaattagctgatggagtagatcagagggatgcataagaaccttttatgaaaaatcaagcggtttgattttagttttatttgaggagttatgtaaggagttattcttggggcaacgagcagccctaagcacaggctctgcaggtcattttggcagcacttgctgtgtgtgtcccattcccaactttgccagtggtcccttgaacrttgccatgtgtgtagccacagcaggaagcygttctgtatrygttgtctgtgactgtgctgcgctcattggtttggatgacaggtgtagaaggcagccttggctctctctctaacacagctgtcctggctaaaaaggctgagcatccctaccataaaccagtaaggaagctggactctcatctcttcatcaggctgttctgaagggtcttgtccagctgcatattccagtggatgaggtttgttggaagcagtaagagaacagtgtcaaggtagtgaatagagctgggaaaattggtctgggatccttaccccagccactgaacagtaccc

SEQ ID NO: 17450 - DNA, 600 bp, Chicken  19866894225632_3
tcctttaatgtagttgtgtgtgctgctgataaatgaacgaatgctgtatgtaagagtaattagctgatggagtagatcagagggatgcataagaaccttttatgaaaaatcaagcggtttgattttagttttatttgaggagttatgtaaggagttattcttggggcaacgagcagccctaagcacaggctctgcaggtcattttggcagcacttgctgtgtgtgtcccattcccaactttgccagtggtcccttgaacrttgccatgtgtgtagccacagcaggaagcygttctgtatrygttgtctgtgactgtgctgcgctcattggtttggatgacaggtgtagaaggcagccttggctctctctctaacacagctgtcctggctaaaaaggctgagcatccctaccataaaccagtaaggaagctggactctcatctcttcatcaggctgttctgaagggtcttgtccagctgcatattccagtggatgaggtttgttggaagcagtaagagaacagtgtcaaggtagtgaatagagctgggaaaattggtctgggatccttaccccagccactgaacagtaccccctgaaatga

SEQ ID NO: 17451 - DNA, 600 bp, Chicken  19866894225632_4
cctttaatgtagttgtgtgtgctgctgataaatgaacgaatgctgtatgtaagagtaattagctgatggagtagatcagagggatgcataagaaccttttatgaaaaatcaagcggtttgattttagttttatttgaggagttatgtaaggagttattcttggggcaacgagcagccctaagcacaggctctgcaggtcattttggcagcacttgctgtgtgtgtcccattcccaactttgccagtggtcccttgaacrttgccatgtgtgtagccacagcaggaagcygttctgtatrygttgtctgtgactgtgctgcgctcattggtttggatgacaggtgtagaaggcagccttggctctctctctaacacagctgtcctggctaaaaaggctgagcatccctaccataaaccagtaaggaagctggactctcatctcttcatcaggctgttctgaagggtcttgtccagctgcatattccagtggatgaggtttgttggaagcagtaagagaacagtgtcaaggtagtgaatagagctgggaaaattggtctgggatccttaccccagccactgaacagtaccccctgaaatgag

SEQ ID NO: 17452 - DNA, 600 bp, Chicken  19866894225632_5
taaacagactctgcagtagcaccatatggattgcttttgcccttgaatgggaatgggactctgtttttaatcaagtctaattcaacatcagcctcagtaaatagcaggatgtgtcagtgcattgcaaaaattttatatatgcagtttttaaatgggcttttagcaagttggtattaatctgctggagctctgaggtttccagaagggaatgcagtaaaaggcacctctttaaaaagggctggggaataatctctcatttctcttttcccagcactgctctctgttccctcttggtcttcrctggctgttaacataggcagactgttcccaggtgtttgcttctgaatgaaaaggaaagcctacttagaccctgaataacccatggtacctgaactgaggagcatttgtgaaatggcagcatagttgcatgctgtgaaaaaagctggtttgtcccactgaagacagcaaagggactgaacagagagaattgattttgctcagcagggctttgctaacaagtggtgatggagcagggtggcagagctgcaggagacctgtggaaggcccaggcagggccatgtgctgctcacacaaagggga

SEQ ID NO: 17453 - DNA, 600 bp, Chicken  19866894225632_6
ggcagtgtaagcctgtgctttcttttaatacccttcccacagcacccactggcttttcatggaggtgatgctcagtgtgtaccaaaacactgtcctaactgggcatgttttgtaagctggaagtacaaattcatcccctgcagagtcagcacctggactgttctgaaggctaggagtgatctggatggcagaatacaaccaggatttcaccaagtccagttttggatatgcctggccaggctttccagcacaaattgtgatggaaatgcagtgcatgcacccttacttcacagctgcccmatgaatagagcaggcatgagaggtttaacaaacaggtatttctagtgcattttgggaactgtgcctcagaartgttctacaaattcatgggattgttattcagatacaaattgccctgaaataccgttacctttccacagaagtgaaggatgtctctaataaaaccaagtttaatggcgctctctggaatcagactttctcctaagggctctgtgatatcttacatagtttcattttcattatgaagtggtatcgatttatttttttttgaattaggtctgtcaacacaaagtgcagagc

SEQ ID NO: 17454 - DNA, 600 bp, Chicken  19866894225632_7
cagtgtgtaccaaaacactgtcctaactgggcatgttttgtaagctggaagtacaaattcatcccctgcagagtcagcacctggactgttctgaaggctaggagtgatctggatggcagaatacaaccaggatttcaccaagtccagttttggatatgcctggccaggctttccagcacaaattgtgatggaaatgcagtgcatgcacccttacttcacagctgcccmatgaatagagcaggcatgagaggtttaacaaacaggtatttctagtgcattttgggaactgtgcctcagaartgttctacaaattcatgggattgttattcagatacaaattgccctgaaataccgttacctttccacagaagtgaaggatgtctctaataaaaccaagtttaatggcgctctctggaatcagactttctcctaagggctctgtgatatcttacatagtttcattttcattatgaagtggtatcgatttatttttttttgaattaggtctgtcaacacaaagtgcagagcatcttggagcacagaggatttgttacggtgagctgctgacctctgctcttaagagcaaaatcatttccacat

SEQ ID NO: 17455 - DNA, 600 bp, Chicken  19866894225634_1
gttgctatggcactgttgcttggagatggatgtgaaaaaacggcaggctcggaattgtgaattccccccccaccctttttttttttttcttttttttttcttttttctttttttcttttcccggttgtttttacctctgcgagtttcgattggtggctgcaggaggaggtttgctgccaggcagagccctccattcccagcacctctccgcggctttccaaagataaacgtttctcagcgctcgtgcgttggagggaggctggcgttacgcgagtaaacgcggggctacaacgcaccgcwtacagccgggtccgggcgcacggagcggcaggtagcgggcagccgcaggtacagccacacaaagcagccgggctctttgtgtgctgacggccgcgacgtggaaggagggagcagcagagagaggctgtggagctgggagtgcgagccgtgctgcgggcacggtgctgtctgcagccttccccctgtccggatgtgctcctcaggtttgggacggcgtggctggggagcagcgctgcccccacagctccccgctacccgcggggctgtttgcgtttccactcggccgcagttcccaccttg

SEQ ID NO: 17456 - DNA, 600 bp, Chicken  19866894225646_1
gctgcttagggagagaaagcctggctcggctctctattggggtgtccgggacaaaggtgacaggtccatggtcagggcagtctgatggatatgccttgtcacacagtgtgcaccctgcatagagaggaaaggaccacaggcattaaaaagatccaacagcccctgaactgcaaccagctccctatcaatatgttatagatcagcttctgccaaaggctgcttctacctcgtttaacacagcagctttgggagctttcactcagaacactatgtgcaattttattacggtcaggttggcascaacatacatatcactgttcccatcaaattcagatcaaacatgcagatccccacctgcctccctcttcatcaaactacagcaaaactgagggtgttttccccagagctggcagtaaggctcatgggaggagagccacgttcgctctgatcacaagtgacataacctttaatggaaggtaggagaagccaagccacaagcttcctaactgagcatggtttttgagtttaccaggagcacaagaattttatgacatgcagagcctcaaggatattcatgtagagggacagtaaggttttctc

SEQ ID NO: 17457 - DNA, 600 bp, Chicken  19866894225649_1
aagagcagagcaagttcaagaccacctcatgatgctgaatgtgcacaagtctatggggccagacaacatgcatctgggatccagttctgaaggaactggctgatgtggttgccaagacactctccatgatatttgaaaaatcacagctgtcaggcaaagtctctggtgactgtaaaaagggaaacatcactcccatttttaagaagcaaggaggaaaggaggaccaggccctggcgctgctgcccagagagctgtggatgcttcatccctgtaggtgctcaaggccaggttggatggggscctgggcagcctgagctggtggggggcagccagcccacgggaggggttggtactagatgggctttaagatcccttccaacctaagttattctatgattctgtgatctgagcaatgctaagcaagtcaaggagttttgaaatataattaattccatggctratatgacagaaattcaatgtaaaaaatggtttgtaatcctaacagtagctgaaatgcagtctctcaaactaccccttcacaggatttcagagaaatctgcagaatttctgtacataattttttatctttctggatgggaa

SEQ ID NO: 17458 - DNA, 600 bp, Chicken  19866894225649_2
ctctggtgactgtaaaaagggaaacatcactcccatttttaagaagcaaggaggaaaggaggaccaggccctggcgctgctgcccagagagctgtggatgcttcatccctgtaggtgctcaaggccaggttggatggggccctgggcagcctgagctggtggggggcagccagcccacgggaggggttggtactagatgggctttaagatcccttccaacctaagttattctatgattctgtgatctgagcaatgctaagcaagtcaaggagttttgaaatataattaattccatggctratatgacagaaattcaatgtaaaaaatggtttgtaatcctaacagtagctgaaatgcagtctctcaaactaccccttcacaggatttcagagaaatctgcagaatttctgtacataattttttatctttctggatgggaaaaaaaacctcataaggaccactatgacaactctttatactagtgtactatagatttcagtagtcctgtacattcctgaacaaagagcaataattataggcaaggttttggccttttggcaggttttgtttccatacatatttgttatattcaggcagaca

SEQ ID NO: 17459 - DNA, 600 bp, Chicken  19866894225651_1
tttagccagaatagacattaataggaaaatgaggttttttatgcacctcatatttctattattttctcattattctgggagagactgaaattgcaagttctgctgttaacctcacatgaaaaaaattatgtttttttctggatatattttcttagcagaaggcctttactcagaattcaacatttacaaaggtacatattctctcactggattgtgtatactgtgcttatttaagatagaaagacctatagagaggtcagtccgccacattcttttatgcttctagtactcctttagtgyggctgtttaaagccagtgtcatagtattacactttttgttaaaaattccttattttatgccatgttaagatgagagaatgtcaagtgttaaagtaatacatttcataacttctgcatggcagtggcacaggctgcccagagaagctgtggatgcctcatctgtggagtcattcaaggccaacttgagtggggcacggcacagcctgactgagtggtttgcaacacagccctcagcagaagggttggaactgcagggtctttgtctcttactgcccaagaccttctgttcttctatgatgt

SEQ ID NO: 17460 - DNA, 555 bp, Chicken  19866894225651_2
ttaaagtaatacatttcataacttctgcatggcagtggcacaggctgcccagagaagctgtggatgcctcatctgtggagtcattcaaggccaacttgagtggggcacggcacagcctgactgagtggtttgcaacacagccctcagcagaagggttggaactgcagggtctttgtctcttactgcccaagaccttctgttcttctatgatgtgattgttatttattcctgaaatgataatgcgcaatgaccaaactctgtttttaacatagctgattttcatttagataagaggctccrgtgattttgattgatgtttccagtctgttgataggttgaagtggaatgtaacctgcaagtaacctcacttttacactaatcatgcgtcatcagcaaaaaacaaccctctctccaacagttctttacttggagctcagtgcaaaagtgttaggatagctggttgagggctcaagggaacttgaaccatgtgaaacatatgctgtgccgtagtaattaaaacagcctattaagtaaggctcaatccctcagtaatgg

SEQ ID NO: 17461 - DNA, 600 bp, Chicken  19866894225652_1
gaagccctactgggacacccccccacctacgacccacatccacaggggagtttgggccagagatcaacgtgggcaaaaacactaaaacatggccccttagtgctgcaaagattagcctctgcacttcaaaacagggcagctgttgaatttgcttaaaggatgcacccaggatgacagggatgtgccccttttagcacagggcacagagtccctcgtgcctagcagcacctacctacaggtgaatggggctgagggctgctctgcgggctgctggattcactactggtctggaagagctgygctttctctggggtgttctgcagccttttctttggctggaggagagatgggatggggatgagataaggaactgctgtcccaccctgggctgtcctttagggccactcaccgagtcacagccgtgtcggggagattcatcatcagggtcctcagcttctgtctcgctgtagcagtctggaggccatgggggaggatggaagcagagatcctggggcagtcccagcagcagcaccgagcatcatccccatgcacctcctctccatttctcacactttccccaaatcatgggcaaaattccca

SEQ ID NO: 17462 - DNA, 600 bp, Chicken  19866894225659_1
gcatcttattcatctgaatgctggcagtgccctccattgtcattttaattgccttaattcttaaagagtcacctgcaattgcattcccttggactgcatttgcatcttgtgctgggttttctgtgctggtttggttactctgacactgatgtggatgaatgtttttccttttatccctcagcacatggcagtgatgtgctggggagtctgtgagcatcagcggacctgttctgcttacagcaggtcctgtaggtatcttgtcttgctgtatcaaagctgtgtgtaaagcaggtgtgcctrcaaggcagstctttaaagaggggggcggggaggaagacaaaaaacacgcttgttctggattaaatcaggaatggccatctgttattggcactgcagtttaatgagttgcaggtcatcagtttasacagtgtagttggctttttgtaccctctgcttgttgtcatgagatctgatttatcagtttaagcatgagaaagtgcagataaacagcataacttcaggtgctgagtaagcaacatcctaaattgtcatgaattactctttcacccttttccatccagactcacagttggttactgg

SEQ ID NO: 17463 - DNA, 600 bp, Chicken  19866894225659_2
tcatctgaatgctggcagtgccctccattgtcattttaattgccttaattcttaaagagtcacctgcaattgcattcccttggactgcatttgcatcttgtgctgggttttctgtgctggtttggttactctgacactgatgtggatgaatgtttttccttttatccctcagcacatggcagtgatgtgctggggagtctgtgagcatcagcggacctgttctgcttacagcaggtcctgtaggtatcttgtcttgctgtatcaaagctgtgtgtaaagcaggtgtgcctrcaaggcagstctttaaagaggggggcggggaggaagacaaaaaacacgcttgttctggattaaatcaggaatggccatctgttattggcactgcagtttaatgagttgcaggtcatcagtttasacagtgtagttggctttttgtaccctctgcttgttgtcatgagatctgatttatcagtttaagcatgagaaagtgcagataaacagcataacttcaggtgctgagtaagcaacatcctaaattgtcatgaattactctttcacccttttccatccagactcacagttggttactggcctgtactg

SEQ ID NO: 17464 - DNA, 600 bp, Chicken  19866894225659_3
gctggtttggttactctgacactgatgtggatgaatgtttttccttttatccctcagcacatggcagtgatgtgctggggagtctgtgagcatcagcggacctgttctgcttacagcaggtcctgtaggtatcttgtcttgctgtatcaaagctgtgtgtaaagcaggtgtgcctrcaaggcagstctttaaagaggggggcggggaggaagacaaaaaacacgcttgttctggattaaatcaggaatggccatctgttattggcactgcagtttaatgagttgcaggtcatcagtttasacagtgtagttggctttttgtaccctctgcttgttgtcatgagatctgatttatcagtttaagcatgagaaagtgcagataaacagcataacttcaggtgctgagtaagcaacatcctaaattgtcatgaattactctttcacccttttccatccagactcacagttggttactggcctgtactgcaatggaggcatccactccacctccatacctgctttaagctacaactgatactagctgttgtggagtagtatcaacactgcatgctcgaaatgtgggtttgtgccaatgggatgt

SEQ ID NO: 17465 - DNA, 600 bp, Chicken  19866894225661_1
agggcgagatgcagttgcagtgatgtcactccctcttactgttttagtgtttaattaacgttttttagtggactgttttaatttaattaatatctcattgtaataaactttcaatttctctttggcacttctgagcataaaaattatattataaacctgtataaaagcatacatttgctcataatctgtgaaaagaataatatgtttggaactggaataattgtttttctattcatgcttgtctgcatgcatattttctgcactgtgggaaagaccaaaaccagcaaacattgtacatcmtttgtattttcatgcaaggtagtataagtgattatctagctaataacttgctggaaaaattaagggtttactttatttgaactatttccatacatcagctaaccacctcttctyccygcttcctttagatatttcctttccttccakcactattatcccccctgcattgaatggcagttcgacagtacctctcatctggggaatgccaattttattccaggctcttgctgcttggccagttgactgcttccttttgcactggtacgtgtccaagtcaataggcgaacactaatctacccc

SEQ ID NO: 17466 - DNA, 600 bp, Chicken  19866894225661_2
tttctctttggcacttctgagcataaaaattatattataaacctgtataaaagcatacatttgctcataatctgtgaaaagaataatatgtttggaactggaataattgtttttctattcatgcttgtctgcatgcatattttctgcactgtgggaaagaccaaaaccagcaaacattgtacatcmtttgtattttcatgcaaggtagtataagtgattatctagctaataacttgctggaaaaattaagggtttactttatttgaactatttccatacatcagctaaccacctcttctyccygcttcctttagatatttcctttccttccakcactattatcccccctgcattgaatggcagttcgacagtacctctcatctggggaatgccaattttattccaggctcttgctgcttggccagttgactgcttccttttgcactggtacgtgtccaagtcaataggcgaacactaatctaccccacttttgactattcagttgccattttttacatattttgtgggaacttgattcctttgaatctaatattctcctggcactctggggtctacattgctacactgcacataatccca

SEQ ID NO: 17467 - DNA, 600 bp, Chicken  19866894225661_3
ctctttggcacttctgagcataaaaattatattataaacctgtataaaagcatacatttgctcataatctgtgaaaagaataatatgtttggaactggaataattgtttttctattcatgcttgtctgcatgcatattttctgcactgtgggaaagaccaaaaccagcaaacattgtacatcmtttgtattttcatgcaaggtagtataagtgattatctagctaataacttgctggaaaaattaagggtttactttatttgaactatttccatacatcagctaaccacctcttctyccygcttcctttagatatttcctttccttccakcactattatcccccctgcattgaatggcagttcgacagtacctctcatctggggaatgccaattttattccaggctcttgctgcttggccagttgactgcttccttttgcactggtacgtgtccaagtcaataggcgaacactaatctaccccacttttgactattcagttgccattttttacatattttgtgggaacttgattcctttgaatctaatattctcctggcactctggggtctacattgctacactgcacataatcccactg

SEQ ID NO: 17468 - DNA, 600 bp, Chicken  19866894225661_4
attataaacctgtataaaagcatacatttgctcataatctgtgaaaagaataatatgtttggaactggaataattgtttttctattcatgcttgtctgcatgcatattttctgcactgtgggaaagaccaaaaccagcaaacattgtacatcmtttgtattttcatgcaaggtagtataagtgattatctagctaataacttgctggaaaaattaagggtttactttatttgaactatttccatacatcagctaaccacctcttctyccygcttcctttagatatttcctttccttccakcactattatcccccctgcattgaatggcagttcgacagtacctctcatctggggaatgccaattttattccaggctcttgctgcttggccagttgactgcttccttttgcactggtacgtgtccaagtcaataggcgaacactaatctaccccacttttgactattcagttgccattttttacatattttgtgggaacttgattcctttgaatctaatattctcctggcactctggggtctacattgctacactgcacataatcccactgttcactcaccagaacctcatctaaatgcag

SEQ ID NO: 17469 - DNA, 600 bp, Chicken  19866894225661_5
tctggggaatgccaattttattccaggctcttgctgcttggccagttgactgcttccttttgcactggtacgtgtccaagtcaataggcgaacactaatctaccccacttttgactattcagttgccattttttacatattttgtgggaacttgattcctttgaatctaatattctcctggcactctggggtctacattgctacactgcacataatcccactgttcactcaccagaacctcatctaaatgcagggacatgcacatccgccaccaaaggagaagcatattcatctgttttkggttgctacaagttgctagagaagacttctgtacaygattcaaaaagtgcaaatactgcatctaacatctattttcatcaccgttactaatgtgaaagctatgatttctctgttacttttggcacttcagtaactcaaattaatgcacgtatcttcttcatgtgtctggaaatttcatcttcatacatagcaaactacaatgctccccaggaaatgttaccaattagcttttccagggtgactgctaaaatgtttaatagtctagattagtctgtactggtggttggttttttttgttgt

SEQ ID NO: 17470 - DNA, 600 bp, Chicken  19866894225661_6
cttggccagttgactgcttccttttgcactggtacgtgtccaagtcaataggcgaacactaatctaccccacttttgactattcagttgccattttttacatattttgtgggaacttgattcctttgaatctaatattctcctggcactctggggtctacattgctacactgcacataatcccactgttcactcaccagaacctcatctaaatgcagggacatgcacatccgccaccaaaggagaagcatattcatctgttttkggttgctacaagttgctagagaagacttctgtacaygattcaaaaagtgcaaatactgcatctaacatctattttcatcaccgttactaatgtgaaagctatgatttctctgttacttttggcacttcagtaactcaaattaatgcacgtatcttcttcatgtgtctggaaatttcatcttcatacatagcaaactacaatgctccccaggaaatgttaccaattagcttttccagggtgactgctaaaatgtttaatagtctagattagtctgtactggtggttggttttttttgttgttgttgttattgttcatttttttgagcatatcaaatt

SEQ ID NO: 17471 - DNA, 600 bp, Chicken  19866894225663_1
catatcaaaataaacagaaggatttcaaatagtttcaaatgaaaatgtgatggaataccattttggttttaatttcatttgccataaactaatgaaatacctaatcatttgaaacagaacaaaaacataaataatttataacccaatcagcaactccttgaaaaacaaatctaaaaatacttaaggttatatttttatataagctcaagaaagaaggggaagtaaaattagatactggaatgcattattgatttcatggctgctttttagtttggtctggaatactgttattgggagcaytggggaatggaagaatcttaaggaaacaataaatatgaaggtttttcctaacataaatgtagctgcttcttggctgaagcacaaaacgctgggtgttaataatatattgtgacgatgtaaggttggaaataaagagtaatataatgcctaatgaaaattgccaatgcaatttgtgcaggtaggatctgattgcccaaactggagtacagccaatcatgaaagcatttatgccttctatttcaggaaattgaatgggtacttctgtcataacaagcaggaattttatcaagatacttgcac

SEQ ID NO: 17472 - DNA, 600 bp, Chicken  19866894225670_1
ttatttcttttgcagaagccaaagaaacctccacctccagttaaaaatccaggtatgtatgatgtgcatgctggtgggtgcctgtggaagtattaaaatgcagaaacagttcgtgacttcagaagaagattcagaagtagctttgtatttcccagtgctgaagctgcccctggtcacactttgaggttactttatattgcatattttactgctgctatatattgctgctgtgtatttttccaaattatgatggagcctactttggaaacactgtaataggagtctacagttgactaggamtaaatgggtgttataaatggcattaccttccttgcraaggaaaaagaatataaacagaaattcatggatatcgtattttagttagtggctaagataattaaaactctttgagaaatgcctgtgctttggttttatgtgcagctcccaagcctgaattgccaactggagagaagaagttccctttgaggtctgaagagaaaggtgagagcagttttctgggtaggtattagacttctttagattagctgtgctgtgcaacagttgtttggaatcatgcagattctagctaacgatacaatc

SEQ ID NO: 17473 - DNA, 600 bp, Chicken  19866894225670_2
ccagttaaaaatccaggtatgtatgatgtgcatgctggtgggtgcctgtggaagtattaaaatgcagaaacagttcgtgacttcagaagaagattcagaagtagctttgtatttcccagtgctgaagctgcccctggtcacactttgaggttactttatattgcatattttactgctgctatatattgctgctgtgtatttttccaaattatgatggagcctactttggaaacactgtaataggagtctacagttgactaggamtaaatgggtgttataaatggcattaccttccttgcraaggaaaaagaatataaacagaaattcatggatatcgtattttagttagtggctaagataattaaaactctttgagaaatgcctgtgctttggttttatgtgcagctcccaagcctgaattgccaactggagagaagaagttccctttgaggtctgaagagaaaggtgagagcagttttctgggtaggtattagacttctttagattagctgtgctgtgcaacagttgtttggaatcatgcagattctagctaacgatacaatctaatttgatcttaataatatctcatggtgtagccat

SEQ ID NO: 17474 - DNA, 600 bp, Chicken  19866894225676_1
actccagcacatgcagcatcttaatgaagaaaaatacgtacctgatgttgtttgcactgtgtccgtattagaaaaaggccttgtggaacgtggcacatgctaccaaggagacagctggtattaatgaataccagctctctgggagcaacattcatctcatgtcatgacactattccagaagaatattaaattattctttggacctctttcaaagggacaacagcagcaccaaaaagcttaaaatcagatttaacagtgctgcagatttaattcccagagcatatacaatttctgggctgwtctctctcctctgagcttctaacttactcaatggaagaagcactgcaatagcccaagtaaatctcagaaagcaggctcgttacaacttcagcatcaaactgcaaagaagaaagtggttcaaatgaagtgggtgctccagcagcccggaaagctagctacgccatgggctgcatcaaaagaagcatgatgagcaggtcgagggaggtgatcctgcatctctactccgcactggtgagacctcacctggaatactgcatccagatgcggagttcagtacaggacagatgtggacctgttgga

SEQ ID NO: 17475 - DNA, 600 bp, Chicken  19866894225687_1
ttcaatagtttctagctttcattgctgcttgctagtagtggacagtatggatggcatgcaaaaaaagcttcaaaattttaaaattgtgtgaacatgcttatatatgtatgtatattagtatctggaattctttggcttttaccttagaaatataactaaaggctttctgttctgaattatttcaaatgaggaatgcttgaggacgtggctctgactcataatctcttaagacagagctgctgatagcataggttattggtgcctccttgagacttagaaggcctatcaagattcagaacrgaatgcaatgagttctgccattccaaccctggctgtctaggcacaggacacagtcctgcccgtgtgctcacccagccaagcccaggttttcttttggttcatgctgtaccctcacctcaacatcagctctaatccagactgttcaaatcaaatgtgggcccagccctccaccatctacatttggccacccattttaccactggcaacatgctccagttaataatcagcagaagatatgattttcctcattttacctactgccrttcacaatctgaattgtgacacaatcagatgtgtcag

SEQ ID NO: 17476 - DNA, 600 bp, Chicken  19866894225687_2
tccttgagacttagaaggcctatcaagattcagaacrgaatgcaatgagttctgccattccaaccctggctgtctaggcacaggacacagtcctgcccgtgtgctcacccagccaagcccaggttttcttttggttcatgctgtaccctcacctcaacatcagctctaatccagactgttcaaatcaaatgtgggcccagccctccaccatctacatttggccacccattttaccactggcaacatgctccagttaataatcagcagaagatatgattttcctcattttacctactgccrttcacaatctgaattgtgacacaatcagatgtgtcagcccaaatccatccttatccatggtgtaaatgatctattttctaatacttattcctcctctacagtgggggaaacagtatccagcagagaagcctagaggcagaaatgacttaaataatcacagtgagaatctgtctggtaygataacttcaaaaggactgaactatgcagttacagaggcactcaggatgcttcaggaaggtgtctagcagttgcctccctgaaaccaaatcacaagctctgatgctataaggagtgatcagc

SEQ ID NO: 17477 - DNA, 557 bp, Chicken  19866894225687_3
ttcaaatcaaatgtgggcccagccctccaccatctacatttggccacccattttaccactggcaacatgctccagttaataatcagcagaagatatgattttcctcattttacctactgccrttcacaatctgaattgtgacacaatcagatgtgtcagcccaaatccatccttatccatggtgtaaatgatctattttctaatacttattcctcctctacagtgggggaaacagtatccagcagagaagcctagaggcagaaatgacttaaataatcacagtgagaatctgtctggtaygataacttcaaaaggactgaactatgcagttacagaggcactcaggatgcttcaggaaggtgtctagcagttgcctccctgaaaccaaatcacaagctctgatgctataaggagtgatcagctcaatgttaacaaatactcatatataagtttatacaaaataaagaacactgcaatagccatgtttgccatagtttgatccgaaactcatttaactgtagtggggtacgtgtatactgcttgcagagatgctgagt

SEQ ID NO: 17478 - DNA, 600 bp, Chicken  19866894225692_1
attattttgaatggcaaatatttttgaaatgacaaagtacaaagaattgtgcttctcacatccaattactgcgtgaaccagagcaaaggactgtgaagtagaggtcagtgatgaaaggttgatgtgccaactacaatttttccatacgattgtcttcacatcatcactttgaacatctgtattttacagtgttctcataaatatgcatattctatgcagaaatgtctccatttaactatctctctaatgacaggtagtgttggcctcccattgaaggccactgtagagaaagacagtaaygtttattattaatatggtagcagacatgtttttgagcgactttaatgctgtttcacaatggatatcaacatattacagttgcagcagagtcataaaaactagattgttgtggaaggaatctgttgagcctcatgatgaggcaggtagttgagaatgcctgtggttcttaccaatctttcacatttgttcctgatagaacccttgttttgacaaaaaaaacccaaaccaaaatataygggttttttgttcgttttttgttccacatggaataacagtttgccttcagtgacagygaattgt

SEQ ID NO: 17479 - DNA, 600 bp, Chicken  19866894225692_2
tatctctctaatgacaggtagtgttggcctcccattgaaggccactgtagagaaagacagtaaygtttattattaatatggtagcagacatgtttttgagcgactttaatgctgtttcacaatggatatcaacatattacagttgcagcagagtcataaaaactagattgttgtggaaggaatctgttgagcctcatgatgaggcaggtagttgagaatgcctgtggttcttaccaatctttcacatttgttcctgatagaacccttgttttgacaaaaaaaacccaaaccaaaatataygggttttttgttcgttttttgttccacatggaataacagtttgccttcagtgacagygaattgtctgygaaagggagatgtgttgaagagattccaatacstgcccagaaatctgygtggtggtaaattatctgcagaggcattccatgtaaataattcattggaatatttcttttaaagtcttgctaattttgtttcaggaaatggaggataaggtgatcagcccagaaaaagctgaagaagcaaaattgaaagcaagataccctcatctgggccagaagccaggaggctcagacttct

SEQ ID NO: 17480 - DNA, 600 bp, Chicken  19866894225692_3
cagtaaygtttattattaatatggtagcagacatgtttttgagcgactttaatgctgtttcacaatggatatcaacatattacagttgcagcagagtcataaaaactagattgttgtggaaggaatctgttgagcctcatgatgaggcaggtagttgagaatgcctgtggttcttaccaatctttcacatttgttcctgatagaacccttgttttgacaaaaaaaacccaaaccaaaatataygggttttttgttcgttttttgttccacatggaataacagtttgccttcagtgacagygaattgtctgygaaagggagatgtgttgaagagattccaatacstgcccagaaatctgygtggtggtaaattatctgcagaggcattccatgtaaataattcattggaatatttcttttaaagtcttgctaattttgtttcaggaaatggaggataaggtgatcagcccagaaaaagctgaagaagcaaaattgaaagcaagataccctcatctgggccagaagccaggaggctcagacttcttgaggaagaggcttcaaaaaggagtgagttctttattgtctgcggggtgcagatgag

SEQ ID NO: 17481 - DNA, 600 bp, Chicken  19866894225692_4
attattaatatggtagcagacatgtttttgagcgactttaatgctgtttcacaatggatatcaacatattacagttgcagcagagtcataaaaactagattgttgtggaaggaatctgttgagcctcatgatgaggcaggtagttgagaatgcctgtggttcttaccaatctttcacatttgttcctgatagaacccttgttttgacaaaaaaaacccaaaccaaaatataygggttttttgttcgttttttgttccacatggaataacagtttgccttcagtgacagygaattgtctgygaaagggagatgtgttgaagagattccaatacstgcccagaaatctgygtggtggtaaattatctgcagaggcattccatgtaaataattcattggaatatttcttttaaagtcttgctaattttgtttcaggaaatggaggataaggtgatcagcccagaaaaagctgaagaagcaaaattgaaagcaagataccctcatctgggccagaagccaggaggctcagacttcttgaggaagaggcttcaaaaaggagtgagttctttattgtctgcggggtgcagatgagaaattccagaa

SEQ ID NO: 17482 - DNA, 600 bp, Chicken  19866894225692_5
gactttaatgctgtttcacaatggatatcaacatattacagttgcagcagagtcataaaaactagattgttgtggaaggaatctgttgagcctcatgatgaggcaggtagttgagaatgcctgtggttcttaccaatctttcacatttgttcctgatagaacccttgttttgacaaaaaaaacccaaaccaaaatataygggttttttgttcgttttttgttccacatggaataacagtttgccttcagtgacagygaattgtctgygaaagggagatgtgttgaagagattccaatacstgcccagaaatctgygtggtggtaaattatctgcagaggcattccatgtaaataattcattggaatatttcttttaaagtcttgctaattttgtttcaggaaatggaggataaggtgatcagcccagaaaaagctgaagaagcaaaattgaaagcaagataccctcatctgggccagaagccaggaggctcagacttcttgaggaagaggcttcaaaaaggagtgagttctttattgtctgcggggtgcagatgagaaattccagaattatggtatctgattctttgcatggctaaaagc

SEQ ID NO: 17483 - DNA, 600 bp, Chicken  19866894225692_6
tcacaatggatatcaacatattacagttgcagcagagtcataaaaactagattgttgtggaaggaatctgttgagcctcatgatgaggcaggtagttgagaatgcctgtggttcttaccaatctttcacatttgttcctgatagaacccttgttttgacaaaaaaaacccaaaccaaaatataygggttttttgttcgttttttgttccacatggaataacagtttgccttcagtgacagygaattgtctgygaaagggagatgtgttgaagagattccaatacstgcccagaaatctgygtggtggtaaattatctgcagaggcattccatgtaaataattcattggaatatttcttttaaagtcttgctaattttgtttcaggaaatggaggataaggtgatcagcccagaaaaagctgaagaagcaaaattgaaagcaagataccctcatctgggccagaagccaggaggctcagacttcttgaggaagaggcttcaaaaaggagtgagttctttattgtctgcggggtgcagatgagaaattccagaattatggtatctgattctttgcatggctaaaagcgctgtgcattcatct

SEQ ID NO: 17484 - DNA, 600 bp, Chicken  19866894225696_1
aaagccattctgtgtctctgcctaccatcctggaggtgcccttttcttgggggatgctgggatgcagaagcagagggaagatgtagagggtgacccccagacaaccaaaatcattggggttcaactgatcaatcctggcagggtatagccaattttgcctctccttcgatattctagcctcaccaaaccttaaaggcagatgataactgtgctccatagacaactcactgctgcagagccacgtgccagctgaggggattcccatgtgctggtgtctgagctgacgtgagcacagggcarggggctgaggggctgttacttctggcctttcattctacggagattgattctcaaatcttctaggatagcacagccctgacctaagcactttttgaaggtaaagtgagaagtgtgccaaagctaaatatagctattgttcctaatagggtgcaagcggggaacacgtcaggagcatcagattggaaagcccagaactcagtgacagaaagcgtacagagacaaggcagtgacatcccagcatgcattcagggctgctgcactgcatacagcacagcccagcccaaagccattgtgaatagg

SEQ ID NO: 17485 - DNA, 600 bp, Chicken  19866894225701_1
aaacatcggtatttcatcaaccgcaatcagcgtgagctcaaaagcaacaaacgctgcaaaagccatcctgaatcatttaggaagtcaggtttggaataaggttgaattcagatgcaaaggttacgaggctgcccagtctgacagctaaccctactgctatgttctctattccaaaaccatgtgagctgcagaactaaaagaagaaacaaacctcttctgtgccactgtggctgagctaagcagcatctctgcacactcactgcatagcagtaccgtggtgggaaagctgccttgggagcrtactgcagtgtttgtgtgtgaatcagcttaacagcttacagacacatagttgggatttcttatrgactgattgtgcctgctcttctcctccagcatcctcagtgagaagtggaggctgcaggctggyattgcagacatygggcagctctgggccatcagtacaggtagatcctcaccatcactgccaaaattccagaggcccttttcagcagcacctgaggttgggccagaaattgtttttccacccttctggtatcctgaaccctgactacaagggctgcaattcttaacctgttgtct

SEQ ID NO: 17486 - DNA, 600 bp, Chicken  19866894225701_2
atcctgaatcatttaggaagtcaggtttggaataaggttgaattcagatgcaaaggttacgaggctgcccagtctgacagctaaccctactgctatgttctctattccaaaaccatgtgagctgcagaactaaaagaagaaacaaacctcttctgtgccactgtggctgagctaagcagcatctctgcacactcactgcatagcagtaccgtggtgggaaagctgccttgggagcrtactgcagtgtttgtgtgtgaatcagcttaacagcttacagacacatagttgggatttcttatrgactgattgtgcctgctcttctcctccagcatcctcagtgagaagtggaggctgcaggctggyattgcagacatygggcagctctgggccatcagtacaggtagatcctcaccatcactgccaaaattccagaggcccttttcagcagcacctgaggttgggccagaaattgtttttccacccttctggtatcctgaaccctgactacaagggctgcaattcttaacctgttgtctttgtaattcctgaccaagattaaaaacaagattaaaaacagaaagaaaagtcraaaacctcttt

SEQ ID NO: 17487 - DNA, 600 bp, Chicken  19866894225701_3
gctgcccagtctgacagctaaccctactgctatgttctctattccaaaaccatgtgagctgcagaactaaaagaagaaacaaacctcttctgtgccactgtggctgagctaagcagcatctctgcacactcactgcatagcagtaccgtggtgggaaagctgccttgggagcrtactgcagtgtttgtgtgtgaatcagcttaacagcttacagacacatagttgggatttcttatrgactgattgtgcctgctcttctcctccagcatcctcagtgagaagtggaggctgcaggctggyattgcagacatygggcagctctgggccatcagtacaggtagatcctcaccatcactgccaaaattccagaggcccttttcagcagcacctgaggttgggccagaaattgtttttccacccttctggtatcctgaaccctgactacaagggctgcaattcttaacctgttgtctttgtaattcctgaccaagattaaaaacaagattaaaaacagaaagaaaagtcraaaacctctttgtttcttccctatttttaaaatagggaccraaaaaaatgagttaattaatttgttttattgtg

SEQ ID NO: 17488 - DNA, 600 bp, Chicken  19866894225701_4
gacagctaaccctactgctatgttctctattccaaaaccatgtgagctgcagaactaaaagaagaaacaaacctcttctgtgccactgtggctgagctaagcagcatctctgcacactcactgcatagcagtaccgtggtgggaaagctgccttgggagcrtactgcagtgtttgtgtgtgaatcagcttaacagcttacagacacatagttgggatttcttatrgactgattgtgcctgctcttctcctccagcatcctcagtgagaagtggaggctgcaggctggyattgcagacatygggcagctctgggccatcagtacaggtagatcctcaccatcactgccaaaattccagaggcccttttcagcagcacctgaggttgggccagaaattgtttttccacccttctggtatcctgaaccctgactacaagggctgcaattcttaacctgttgtctttgtaattcctgaccaagattaaaaacaagattaaaaacagaaagaaaagtcraaaacctctttgtttcttccctatttttaaaatagggaccraaaaaaatgagttaattaatttgttttattgtgttttcttttaag

SEQ ID NO: 17489 - DNA, 600 bp, Chicken  19866894225701_5
gatttcttatrgactgattgtgcctgctcttctcctccagcatcctcagtgagaagtggaggctgcaggctggyattgcagacatygggcagctctgggccatcagtacaggtagatcctcaccatcactgccaaaattccagaggcccttttcagcagcacctgaggttgggccagaaattgtttttccacccttctggtatcctgaaccctgactacaagggctgcaattcttaacctgttgtctttgtaattcctgaccaagattaaaaacaagattaaaaacagaaagaaaagtcraaaacctctttgtttcttccctatttttaaaatagggaccraaaaaaatgagttaattaatttgttttattgtgttttcttttaagcaagcagataacagatagaacgctttcagctcagcctcttccagcaarccactgccagaaggagctgcatggccaacttcagtctgacctcagcataagtgggacccaaaccctcagaagagaggatggcattttgcaggagatgggcttagggkaaagatattctcattatcattcatccaggctcttactttatcagagacctttccaggag

SEQ ID NO: 17490 - DNA, 577 bp, Chicken  19866894225701_6
gcatcctcagtgagaagtggaggctgcaggctggyattgcagacatygggcagctctgggccatcagtacaggtagatcctcaccatcactgccaaaattccagaggcccttttcagcagcacctgaggttgggccagaaattgtttttccacccttctggtatcctgaaccctgactacaagggctgcaattcttaacctgttgtctttgtaattcctgaccaagattaaaaacaagattaaaaacagaaagaaaagtcraaaacctctttgtttcttccctatttttaaaatagggarcraaaaaaatgagttaattaatttgttttattgtgttttcttttaagcaagcagataacagatagaacgctttcagctcagcctcttccagcaarccactgccagaaggagctgcatggccaacttcagtctgacctcagcataagtgggacccaaaccctcagaagagaggatggcattttgcaggagatgggcttagggkaaagatattctcattatcattcatccaggctcttactttatcagagacctttccaggaggcaggagcttaaacag

SEQ ID NO: 17491 - DNA, 575 bp, Chicken  19866894225701_7
atcctcagtgagaagtggaggctgcaggctggyattgcagacatygggcagctctgggccatcagtacaggtagatcctcaccatcactgccaaaattccagaggcccttttcagcagcacctgaggttgggccagaaattgtttttccacccttctggtatcctgaaccctgactacaagggctgcaattcttaacctgttgtctttgtaattcctgaccaagattaaaaacaagattaaaaacagaaagaaaagtcraaaacctctttgtttcttccctatttttaaaatagggaccraaaaaaatgagttaattaatttgttttattgtgttttcttttaagcaagcagataacagatagaacgctttcagctcagcctcttccagcaarccactgccagaaggagctgcatggccaacttcagtctgacctcagcataagtgggacccaaaccctcagaagagaggatggcattttgcaggagatgggcttagggkaaagatattctcattatcattcatccaggctcttactttatcagagacctttccaggaggcaggagcttaaacag

SEQ ID NO: 17492 - DNA, 482 bp, Chicken  19866894225701_8
aaattccagaggcccttttcagcagcacctgaggttgggccagaaattgtttttccacccttctggtatcctgaaccctgactacaagggctgcaattcttaacctgttgtctttgtaattcctgaccaagattaaaaacaagattaaaaacagaaagaaaagtcraaaacctctttgtttcttccctatttttaaaatagggaccraaaaaaatgagttaattaatttgttttattgtgttttcttttaagcaagcagataacagatagaacgctttcagctcagcctcttccagcaarccactgccagaaggagctgcatggccaacttcagtctgacctcagcataagtgggacccaaaccctcagaagagaggatggcattttgcaggagatgggcttagggkaaagatattctcattatcattcatccaggctcttactttatcagagacctttccaggaggcaggagcttaaacag

SEQ ID NO: 17493 - DNA, 375 bp, Chicken  19866894225701_9
ttgtctttgtaattcctgaccaagattaaaaacaagattaaaaacagaaagaaaagtcraaaacctctttgtttcttccctatttttaaaatagggaccraaaaaaatgagttaattaatttgttttattgtgttttcttttaagcaagcagataacagatagaacgctttcagctcagcctcttccagcaarccactgccagaaggagctgcatggccaacttcagtctgacctcagcataagtgggacccaaaccctcagaagagaggatggcattttgcaggagatgggcttagggkaaagatattctcattatcattcatccaggctcttactttatcagagacctttccaggaggcaggagcttaaacag

SEQ ID NO: 17494 - DNA, 600 bp, Chicken  19866894225703_1
ttgtagaaggtcaggtacacactttatctacctggactgctaaggttattgctagctgagctgccttgcttgtagagtcagtcttagtttttggtacagcactatcttctttgagagcactgagtccaccacactggttatggaagacatgggcagaatgtctttcttaaggtactgcagaaattcaacatgtaatagaaaatttcatggcaagagttgtgacaaaattgagttggcagtacttcagaaatagaacttaagatacactgtgcttttggccatctttgcttttcttttttkgggggggaaggrgaaagggtttatgtatcctgtcatgcagattaagattgatgacattcagaaagggttttaaaaacagatcccatagaaaattaggaagggacttagaagaactacagttawtaatgctgtctcagtgtgtagaactggtaaacgtaatggtgagggctataaagcatctgtatacattttgattgctcttacttgcattgttctattgttgttgttccacatcagtattttgaagagaaagcattttacctttttaaactctgcctcgctgttgccacatgcttcctg

SEQ ID NO: 17495 - DNA, 600 bp, Chicken  19866894225703_2
aggtacacactttatctacctggactgctaaggttattgctagctgagctgccttgcttgtagagtcagtcttagtttttggtacagcactatcttctttgagagcactgagtccaccacactggttatggaagacatgggcagaatgtctttcttaaggtactgcagaaattcaacatgtaatagaaaatttcatggcaagagttgtgacaaaattgagttggcagtacttcagaaatagaacttaagatacactgtgcttttggccatctttgcttttcttttttkgggggggaaggrgaaagggtttatgtatcctgtcatgcagattaagattgatgacattcagaaagggttttaaaaacagatcccatagaaaattaggaagggacttagaagaactacagttawtaatgctgtctcagtgtgtagaactggtaaacgtaatggtgagggctataaagcatctgtatacattttgattgctcttacttgcattgttctattgttgttgttccacatcagtattttgaagagaaagcattttacctttttaaactctgcctcgctgttgccacatgcttcctgactattctcctg

SEQ ID NO: 17496 - DNA, 600 bp, Chicken  19866894225703_3
gtccaccacactggttatggaagacatgggcagaatgtctttcttaaggtactgcagaaattcaacatgtaatagaaaatttcatggcaagagttgtgacaaaattgagttggcagtacttcagaaatagaacttaagatacactgtgcttttggccatctttgcttttcttttttkgggggggaaggrgaaagggtttatgtatcctgtcatgcagattaagattgatgacattcagaaagggttttaaaaacagatcccatagaaaattaggaagggacttagaagaactacagttawtaatgctgtctcagtgtgtagaactggtaaacgtaatggtgagggctataaagcatctgtatacattttgattgctcttacttgcattgttctattgttgttgttccacatcagtattttgaagagaaagcattttacctttttaaactctgcctcgctgttgccacatgcttcctgactattctcctgtgcacctactttttctagtcttctgttaaacatctgagcagggagtgccttttcttcagtgtatttattgatatttgaaataattataccaactggtttaaaactaaccta

SEQ ID NO: 17497 - DNA, 600 bp, Chicken  19866894225706_1
ccccaggtccttctctgcagggctatgctcaaggactgctccttccagtctgtatagatgcctggggttcctccggcccaactgcaaaacattgcacttgactgtgttgaacttaattttattcacccgggctttctcatttgcagattcagtcagtagcaaggttctgtgtgcaactcagagatgcatgtgcaaaccagcaaagttgaagtgctgccttcagctgcactgacatgtaatattgttaaggtgaagtgcagacaactaagcctctttcctcctctttggagagtggagttygctggtgaaagtgctcatacaacgctctaggttccagaagaacacatamacattcacggatctcctgagtactgtcacagcccttggcctacctgcttcccttgccccaaccctgggtttcctacttgccagttagtttgttttagtttgttgctacccttgtattgctattacctttgcactgaaaagatccttgactgggtaatcttaatgaaacatgctcatcttccacrtacccttaaaataaccaacatgaaattgtacctaaatatttaagttacttagaatatttaatctagt

SEQ ID NO: 17498 - DNA, 600 bp, Chicken  19866894225706_2
ctgtatagatgcctggggttcctccggcccaactgcaaaacattgcacttgactgtgttgaacttaattttattcacccgggctttctcatttgcagattcagtcagtagcaaggttctgtgtgcaactcagagatgcatgtgcaaaccagcaaagttgaagtgctgccttcagctgcactgacatgtaatattgttaaggtgaagtgcagacaactaagcctctttcctcctctttggagagtggagttygctggtgaaagtgctcatacaacgctctaggttccagaagaacacatamacattcacggatctcctgagtactgtcacagcccttggcctacctgcttcccttgccccaaccctgggtttcctacttgccagttagtttgttttagtttgttgctacccttgtattgctattacctttgcactgaaaagatccttgactgggtaatcttaatgaaacatgctcatcttccacrtacccttaaaataaccaacatgaaattgtacctaaatatttaagttacttagaatatttaatctagttaaattactagtgtgtttttcatttgcactgttacaggtaaactactga

SEQ ID NO: 17499 - DNA, 600 bp, Chicken  19866894225706_3
atgtaatattgttaaggtgaagtgcagacaactaagcctctttcctcctctttggagagtggagttygctggtgaaagtgctcatacaacgctctaggttccagaagaacacatamacattcacggatctcctgagtactgtcacagcccttggcctacctgcttcccttgccccaaccctgggtttcctacttgccagttagtttgttttagtttgttgctacccttgtattgctattacctttgcactgaaaagatccttgactgggtaatcttaatgaaacatgctcatcttccacrtacccttaaaataaccaacatgaaattgtacctaaatatttaagttacttagaatatttaatctagttaaattactagtgtgtttttcatttgcactgttacaggtaaactactgataatgaattcagagtcagtacagataataactggaagagtgtccttttaaaggtgtctgttcactgacaaaaatattgaaacgtaaaatgaggatagtagtatggaatctctgctcatctaacatctgaagtttgatctcaaggccactgaattatggggaaattactagtttctgtttctcct

SEQ ID NO: 17500 - DNA, 600 bp, Chicken  19866894225707_1
tgtttatgctgttgatacattacccagtcaaatttcacacgggctgagaggatttctgaagactatgtcctgatagaaagagatatttgcaaagtgcagaagcatttagcaatggagccaggtatgctacttccttatcttagttccttatgtgttctgcccaactttctgtttcctgctcttactgatttgtgggctgactatccatgtgcctcatagatttcctcctccaatgccttttactttctattatcttttacatttgtttttgtatcccaccacattcttgccagctatatrtcatcttctgtgatcttcaggagtcaaagttgttccaggtcccccagactgtttggcagaaaaagctccctaatcagctttggcagatgtacattcagcatgtactttcacatacgttatcctaattgcttacagacaggtaaatcccatgccctagttgtatcatgagctagtcacattgtgaggttttccctctttttggaaaacatcagactgtacagataaaagctgcaaggtctctggcactgttcatagcaacaagcttatctgagctagggcagaatctatcatccattctta

SEQ ID NO: 17501 - DNA, 600 bp, Chicken  19866894225710_1
ctgcgctataaaaatcacaattaccatttctgctcccatcactgttgttagctcggaaggtcactgcaaagagccctttggtaaacagcaagatgcttcccagcgctcagcatcggtgcttacagtatcctatttccagcagcacagcttgttgtgcgggttacaaccaaacccttctttgcctcatttgcaggttagcggggtcaggcgggtcagggaggaagtgacaacactcgcgtgcattttattggggttttttcatgtttttctttccctccctctgttcttcttcttcagccycgcactgaaggggtgggactgtgtgcctttaaacggcacttcagtagtaagcaatgtcacgtcataaataaataaactaggtacaattttatttttgcttctkatattcctcccacagagaacaggmaaacagctgtacagagggtgtgcatgcatacaggtgtgtgtatacatgtttgcgtacatatctgtagatgtgtgtgtgtacgcatgtgtgcattttccatatttatcacttttcagtacattagagcatttagtacttcggaaggcactcatccaagcagagctccatgtaag

SEQ ID NO: 17502 - DNA, 523 bp, Chicken  19866894225710_2
cgctcagcatcggtgcttacagtatcctatttccagcagcacagcttgttgtgcgggttacaaccaaacccttctttgcctcatttgcaggttagcggggtcaggcgggtcagggaggaagtgacaacactcgcgtgcattttattggggttttttcatgtttttctttccctccctctgttcttcttcttcagccycgcactgaaggggtgggactgtgtgcctttaaacggcacttcagtagtaagcaatgtcacgtcataaataaataaactaggtacaattttatttttgcttctkatattcctcccacagagaacaggmaaacagctgtacagagggtgtgcatgcatacaggtgtgtgtatacatgtttgcgtacatatctgtagatgtgtgtgtgtacgcatgtgtgcattttccatatttatcacttttcagtacattagagcatttagtacttcggaaggcactcatccaagcagagctccatgtaagtgcactgtgtacaagccaagaaagaa

SEQ ID NO: 17503 - DNA, 499 bp, Chicken  19866894225710_3
tcctatttccagcagcacagcttgttgtgcgggttacaaccaaacccttctttgcctcatttgcaggttagcggggtcaggcgggtcagggaggaagtgacaacactcgcgtgcattttattggggttttttcatgtttttctttccctccctctgttcttcttcttcagccycgcactgaaggggtgggactgtgtgcctttaaacggcacttcagtagtaagcaatgtcacgtcataaataaataaactaggtacaattttatttttgcttctkatattcctcccacagagaacaggmaaacagctgtacagagggtgtgcatgcatacaggtgtgtgtatacatgtttgcgtacatatctgtagatgtgtgtgtgtacgcatgtgtgcattttccatatttatcacttttcagtacattagagcatttagtacttcggaaggcactcatccaagcagagctccatgtaagtgcactgtgtacaagccaagaaagaa

SEQ ID NO: 17504 - DNA, 600 bp, Chicken  19866894225711_1
tgatggccaccctggccaaatctcaagtcaccaccgtcaaactgactcaggacctcttcacagcagctgctggaagcagtgctagtgggaagggcatttctgcaacattgcatgtcacatccaatcctgtccagactgctgattctccagccaagactagcacggcctcatcttcttccagtccagctggaagcacagtggttaaagtgactcctgacttaaagaccacagagccaacgagttctgctttcagactgatgcctgctctaggcatgactgtggcagatcagaagagcaaasccattacwacagtggcatccactgaggccaagccagctgctaccataagaatcgtccaagggctgggggtgatgccacccaaagctgggcagacaattaccgtagctactcatgctaagcaagtaccctcttctgcagcagtgagcgtgcctggcacagtccatacctcagctgtctcattaccaaccatgagtgccacagtatcaaaagcagttgctgttgcttcaggagctgstgggactcccataactataggcacaggaggtactgctgtgcgacaggtacctgtcagcaccacag

SEQ ID NO: 17505 - DNA, 600 bp, Chicken  19866894225711_2
accctggccaaatctcaagtcaccaccgtcaaactgactcaggacctcttcacagcagctgctggaagcagtgctagtgggaagggcatttctgcaacattgcatgtcacatccaatcctgtccagactgctgattctccagccaagactagcacggcctcatcttcttccagtccagctggaagcacagtggttaaagtgactcctgacttaaagaccacagagccaacgagttctgctttcagactgatgcctgctctaggcatgactgtggcagatcagaagagcaaasccattacwacagtggcatccactgaggccaagccagctgctaccataagaatcgtccaagggctgggggtgatgccacccaaagctgggcagacaattaccgtagctactcatgctaagcaagtaccctcttctgcagcagtgagcgtgcctggcacagtccatacctcagctgtctcattaccaaccatgagtgccacagtatcaaaagcagttgctgttgcttcaggagctgstgggactcccataactataggcacaggaggtactgctgtgcgacaggtacctgtcagcaccacagtagtatct

SEQ ID NO: 17506 - DNA, 552 bp, Chicken  19866894225711_3
aacgagttctgctttcagactgatgcctgctctaggcatgactgtggcagatcagaagagcaaasccattacwacagtggcatccactgaggccaagccagctgctaccataagaatcgtccaagggctgggggtgatgccacccaaagctgggcagacaattaccgtagctactcatgctaagcaagtaccctcttctgcagcagtgagcgtgcctggcacagtccatacctcagctgtctcattaccaaccatgagtgccacagtatcaaaagcagttgctgttgcttcaggagctgstgggactcccataactataggcacaggaggtactgctgtgcgacaggtacctgtcagcaccacagtagtatctacatcacaggcagtaagtaatgctgagctttttctggagttggctgagaaaggggtgtgatggtttattattgatggtttatctctaaaaatctcttacatctgcaaaaggtcaaattaagtactgtagaatgtgagttcacaactgatttcgtggtgttggaattgcagctgaatatt

SEQ ID NO: 17507 - DNA, 600 bp, Chicken  19866894225722_1
gctatgcagttagcattcctgagccatctgggcctgttggcatggccccagctggatgggctggcaggtttatccacagcatgatgtaatatccatctcccagcatttgattattcttcttgctctggatggcctcatatctggatggcaagtctggagcgggcattttgatttcctgttgctatttgtggacttttcctggccaatcctcaagagcagctcgggcagttttcgttcctccagctgaaagagtgatgccacccagctggtatagtgcagaggccagtcccagccagcccrtcagctggagacagacagccctgcagaggggtccagctgttcttcacactgtgccacagctggagagaaggggacacccctgcctttgttcttgggcagctgcagctcagcccaggagttgtctcagccttcagcactggcagggagtgggctgcaggagaggctatcaggccaccccttcccagctgcttgttggtttccctgctctgcttggtcttgcagtgggatgggggggaaggagaattttattttgcccaagacttattcttccctttgcttcatgagagcaaaaagcaacag

SEQ ID NO: 17508 - DNA, 600 bp, Chicken  19866894225728_1
tgccagggttaaatcaaacatttggaaaagcagtgcatcacttttatacgcttgcagttaattgaaaagataacatggccgtagctgatgagctatcattgttgactgttgtggtgtttttgtcagtcagaacaaagatctatgtgatggtgaaaatgaaaggtaatcaagctgccaacttcaaacaatttttgccagtttcactcattatcagtgatcaagctgctaatatgacactttagttcattagcagtgaatatgatactaatgagtgcggcaggcaattaaaacatgtgctayattgtattagtttacttgcggtcggcactttgagcaacctggtaagcatgtatttgatacagtctgtgcaggagtgtgttgaccctagaatgaaaactagttacgtttttgctgcttcttattttgttggctacaatatcttgtcaggtttatgcaaaaacctgctgaacattaaaagaaaatggtgggtgggtgttaataagaatatcttgaaygttgattaatctaaaatctaaatattcttttttcttttattaaagcattcagaagtattctcaaagcaaacaccataacaccagc

SEQ ID NO: 17509 - DNA, 600 bp, Chicken  19866894225728_2
gatcaagctgctaatatgacactttagttcattagcagtgaatatgatactaatgagtgcggcaggcaattaaaacatgtgctayattgtattagtttacttgcggtcggcactttgagcaacctggtaagcatgtatttgatacagtctgtgcaggagtgtgttgaccctagaatgaaaactagttacgtttttgctgcttcttattttgttggctacaatatcttgtcaggtttatgcaaaaacctgctgaacattaaaagaaaatggtgggtgggtgttaataagaatatcttgaaygttgattaatctaaaatctaaatattcttttttcttttattaaagcattcagaagtattctcaaagcaaacaccataacaccagctgcaggtgtcgatttgccataattgtttagatactatggtaacagacactgcagaaaacactgagacagatagttttacatcacttttcttttggtcattacgtgcagttttgattgatacacttagaattcaagccttgctgaattcaaaatctgaaatacatgcagttagaagtactgaatttcacccagttaatacaaaaatgcagcttatg

SEQ ID NO: 17510 - DNA, 600 bp, Chicken  19866894225730_1
cagatggctttggtgtgtctagcttggtgttctaccctagaatcctcctcttagaagaacccgactgctacatcccacagcagcccatctttgtatttccaggaaaaaaaagcttatcttgtacctccatcttgtagacacggagtctctggagcagttccaaaccaagtcagcacaccagccttctgaaaaataggaacatttactgcttccaaacatcaagcatctacccaagaatgaatattgtccactgctaacatgctgtgggaagccccttgttggtatagctgcagtccctcrggctgatataagaaaaagttccctcaaactgactatacaaaacaaacagccagatgctcagatgctttattgtctccatgtttgtctgcagcagactgtgtttcctcaaagtgttgtgctgcattgccagaaaaacacattttgtgtactcctcaaatccaaatattgcgagattgtatggaggaagggagtgagccacttttttccattactttttcaagtgctcttgtatgcaaatcttctcccttcctctaacctttgaaataacatcactggcagaaagtgaggaatactaaattt

SEQ ID NO: 17511 - DNA, 600 bp, Chicken  19866894225743_1
aaatcgctgtgctttgtttaaagccagcacacagacatgaggagagtaattccacttaagctcctgtgcatgtggatattgtccaagcacattttcttcttgctgtgtttccctccacatgctctttggaaatggcacaggacccagtgtagattagacatctgatgtttgaggaggtccagacgcggattttagatgttaacttcgctgggctaaaacagtctcttccaagcttatgtcagagatggccaagggaaggatagttaggtggccagcccatgtgacagctccaaaatttaragcgtgttcatgaaagacttctttgtttttcaaacagggtaagcattcaggcataaagactttcaaaaaagggaaagaaacttctgtgcggattgaaagcagcagatgcagcatctggaattttctgaaggtgtcttgtcacagggcaattcccgtttgcttaagtcttattggacctgtgttgtttctcctttggcctatgcagaggaaaggaaagagctgtctctgccaagccctgtccgatgggcagttccccagctgcactgctgccctcagcaaggccttgtgctccccagggca

SEQ ID NO: 17512 - DNA, 600 bp, Chicken  19866894225745_1
ggaagccactgacccctcacgtgacacttggctccacagcaaaccctcagtgagccactgccaagtccaggccagagggcagaatacatggcaggagtcccatgagaagaaaagggccaggacagggaccctgcctggtaggggatgcagggtctgggcagccattgaggctcccagggcagcccccacacctcagaaggcagcccctgatctgagcaccctcctaccagggagctggtgatgctgggaaccagctggggttgcccagagatgtggtggaagccttatccttggagacayccaaggtaaggatggatggggctctgagcacctgattaactgtagacatccctgttcactgcaagggagttgggccagacaacctctaaaggtcccttccagttcaaatgattttgtgattctgtgtgggggacttgggtctcatacctatctttcctcatgtgtcagagacttcagacccatcccacagatggaggggaagcaaaacaaagaagccatcaccacctccctttgccaccttgccagcacagctcgaacccatcctgcttcctgtggctgagcggtggccatctgctccca

SEQ ID NO: 17513 - DNA, 549 bp, Chicken  19866894225757_1
gagtggggaggagaggacctgatgtcctctcggtggctgtacagcaggaaggatccattggagggctggtgaggtgaggtaaggtggggttttccactctgaggataagaccaggtagggtttgctatccttagcctgttctcttcgtaaccacagaatgggcagttgaaggtgaaaccaggccctccatggatatcagttgtgcctcttcataagtagtttgggcagattccatctctgcaatctctggaatagggatcttgaaaagagagcttaggtacagaggcaaagctatgcagktggctgtcccccrtcaactaacccctctgcacctctagcaacatggaagtgttcagtttgtaacattaggcgattaggaaagggacatgtttgtttcctgtgcagtgattaaactacaaatgatgtgccaagaaaatgtacagactgttgttgaacgaagagctaagccagttgtactcatatttctggtgatggcttgctgtccctgtgctaacgtggtaccaggtgatcccattgtgtccatttttc

SEQ ID NO: 17514 - DNA, 536 bp, Chicken  19866894225757_2
aggacctgatgtcctctcggtggctgtacagcaggaaggatccattggagggctggtgaggtgaggtaaggtggggttttccactctgaggataagaccaggtagggtttgctatccttagcctgttctcttcgtaaccacagaatgggcagttgaaggtgaaaccaggccctccatggatatcagttgtgcctcttcataagtagtttgggcagattccatctctgcaatctctggaatagggatcttgaaaagagagcttaggtacagaggcaaagctatgcagktggctgtcccccrtcaactaacccctctgcacctctagcaacatggaagtgttcagtttgtaacattaggcgattaggaaagggacatgtttgtttcctgtgcagtgattaaactacaaatgatgtgccaagaaaatgtacagactgttgttgaacgaagagctaagccagttgtactcatatttctggtgatggcttgctgtccctgtgctaacgtggtaccaggtgatcccattgtgtccatttttc

SEQ ID NO: 17515 - DNA, 600 bp, Chicken  19866894225758_1
aaatggtggagtgatgctgctgctcttaccccttggaagaaggtgaacattatattcctttgcagcaaatgaacatctgatgccttatgaagggcttcagcagcagccaagtgggtcacaaaagaggagacagcactctctgccccaggtgcaatgttccagaagaaggaatggctgtcaatctgtaagcatgaacagcaggaatgagaaatgtgcaaacagatgaatactgtactgggaaagcaaatctgccacctctttttaatcccactcatcccactgataaggggaaaaaaaaamaaacaaagcatcctgcccaatgaaaccycaaataccaattgcaatagccaattcaatccaaacaaagggcaggagcacaggaagaaatggaaagtaagagaagtatattctcacaagaccctacactcacatcatcccataatccttccagtcyaccctctgcaaaacaagattaagagatacttactcgtgtagcaaccataataaactccttcttaggatcraccttttcagatgcattaataggatgcaaggtgctccacacattgtaatcaagcagaggatcacatacagtctcta

SEQ ID NO: 17516 - DNA, 600 bp, Chicken  19866894225758_2
ggtggagtgatgctgctgctcttaccccttggaagaaggtgaacattatattcctttgcagcaaatgaacatctgatgccttatgaagggcttcagcagcagccaagtgggtcacaaaagaggagacagcactctctgccccaggtgcaatgttccagaagaaggaatggctgtcaatctgtaagcatgaacagcaggaatgagaaatgtgcaaacagatgaatactgtactgggaaagcaaatctgccacctctttttaatcccactcatcccactgataaggggaaaaaaaaamaaamaaagcatcctgcccaatgaaaccycaaataccaattgcaatagccaattcaatccaaacaaagggcaggagcacaggaagaaatggaaagtaagagaagtatattctcacaagaccctacactcacatcatcccataatccttccagtcyaccctctgcaaaacaagattaagagatacttactcgtgtagcaaccataataaactccttcttaggatcraccttttcagatgcattaataggatgcaaggtgctccacacattgtaatcaagcagaggatcacatacagtctctaagaa

SEQ ID NO: 17517 - DNA, 600 bp, Chicken  19866894225758_3
ccccttggaagaaggtgaacattatattcctttgcagcaaatgaacatctgatgccttatgaagggcttcagcagcagccaagtgggtcacaaaagaggagacagcactctctgccccaggtgcaatgttccagaagaaggaatggctgtcaatctgtaagcatgaacagcaggaatgagaaatgtgcaaacagatgaatactgtactgggaaagcaaatctgccacctctttttaatcccactcatcccactgataaggggaaaaaaaaamaaacaaagcatcctgcccaatgaaaccycaaataccaattgcaatagccaattcaatccaaacaaagggcaggagcacaggaagaaatggaaagtaagagaagtatattctcacaagaccctacactcacatcatcccataatccttccagtcyaccctctgcaaaacaagattaagagatacttactcgtgtagcaaccataataaactccttcttaggatcraccttttcagatgcattaataggatgcaaggtgctccacacattgtaatcaagcagaggatcacatacagtctctaagaagcagaaacaayattgcttgaaaat

SEQ ID NO: 17518 - DNA, 600 bp, Chicken  19866894225758_4
tgttccagaagaaggaatggctgtcaatctgtaagcatgaacagcaggaatgagaaatgtgcaaacagatgaatactgtactgggaaagcaaatctgccacctctttttaatcccactcatcccactgataaggggaaaaaaaaamaaacaaagcatcctgcccaatgaaaccycaaataccaattgcaatagccaattcaatccaaacaaagggcaggagcacaggaagaaatggaaagtaagagaagtatattctcacaagaccctacactcacatcatcccataatccttccagtcyaccctctgcaaaacaagattaagagatacttactcgtgtagcaaccataataaactccttcttaggatcraccttttcagatgcattaataggatgcaaggtgctccacacattgtaatcaagcagaggatcacatacagtctctaagaagcagaaacaayattgcttgaaaattgagattatggcagagagaagtgaaaaacagtcttgcttgtcagctgtagctcatcagttttatcacgacaaggagagaaatctgctcacctggattaatgctgaaggtgttttggatggagttgc

SEQ ID NO: 17519 - DNA, 600 bp, Chicken  19866894225758_5
gaatactgtactgggaaagcaaatctgccacctctttttaatcccactcatcccactgataaggggaaaaaaaaamaaacaaagcatcctgcccaatgaaaccycaaataccaattgcaatagccaattcaatccaaacaaagggcaggagcacaggaagaaatggaaagtaagagaagtatattctcacaagaccctacactcacatcatcccataatccttccagtcyaccctctgcaaaacaagattaagagatacttactcgtgtagcaaccataataaactccttcttaggatcraccttttcagatgcattaataggatgcaaggtgctccacacattgtaatcaagcagaggatcacatacagtctctaagaagcagaaacaayattgcttgaaaattgagattatggcagagagaagtgaaaaacagtcttgcttgtcagctgtagctcatcagttttatcacgacaaggagagaaatctgctcacctggattaatgctgaaggtgttttggatggagttgcgcctcatgcaggtaacagtgctggtgacagcatgcatgtgggaaaaaagctgcatggcacacagagggta

SEQ ID NO: 17520 - DNA, 600 bp, Chicken  19866894225758_6
cccaatgaaaccycaaataccaattgcaatagccaattcaatccaaacaaagggcaggagcacaggaagaaatggaaagtaagagaagtatattctcacaagaccctacactcacatcatcccataatccttccagtcyaccctctgcaaaacaagattaagagatacttactcgtgtagcaaccataataaactccttcttaggatcraccttttcagatgcattaataggatgcaaggtgctccacacattgtaatcaagcagaggatcacatacagtctctaagaagcagaaacaayattgcttgaaaattgagattatggcagagagaagtgaaaaacagtcttgcttgtcagctgtagctcatcagttttatcacgacaaggagagaaatctgctcacctggattaatgctgaaggtgttttggatggagttgcgcctcatgcaggtaacagtgctggtgacagcatgcatgtgggaaaaaagctgcatggcacacagagggtactcagggccagatccatcagtagggacattatggtcttggtaacactggacagaaataaacatcatcatgaggcttagtttgtctgtaata

SEQ ID NO: 17521 - DNA, 600 bp, Chicken  19866894225759_1
aggaagccaggaggccctttttaagcgaaaagttcagcatttcagtatttctcatttttacagtgaactcttcaaaatcatcctcacgaaattatacaggaccctacaaaatagactatatgaaaatatcatagaatggcctgggttgaaaaggaccacagtgatcatccattttcaccccctgctatgtgcagggtcgccaaccagcagcccaggctgcccagagccacatccagcctggccttgaatgcctccagggatggggcatccacagcctccttgggcaacctgttcagtgcrtcaccaccctctgggtgaaaaatttcctcctaatatccaacctaaacctccactgtctcagttgaaaaccattcccccttgtcctatcactgtccaccctcgtaaacagccgttccccctcctatttatatgctctcttcaagtactggaaggccacaatgaggtccctccagagccttctcttctctaagctaaacaagcccagttccctcaaccttttctctgatcatctcagtgcccacctctggatctgttccaataaaacatcaatccaaatcaaacatcacggtgatcttgagc

SEQ ID NO: 17522 - DNA, 600 bp, Chicken  19866894225761_1
agtcagatgacctgcgcccttatatctgttcccttgagcaggaatgataacagtactcgaaaaggctcttggggaacttcttctgtagttcttcttctcttccagacaggtacccggaactaaagcatttgctccttaactcccagtacactgcatgatgttgtgatgtggaatactgataaccaaaaatcataaaaccatgacaggagcatacagacaggagggagaatgactctttgctagggtggatagtgctcggacaagggggaatggttttaaacctcccctgagacaggggargtttaggttagatattaggaagaagtttttcactcagagggtggtgacgcactggaacacattgcccaaggaggttgtggatgtcccatccctggagacatccaaggccagactggatgtggctctgggcagcctggtctagtggttggtgaccctgcacatggcaggggggttgaaactcgatgatcattgtgtttcttttcaacccagggcattttatgataaatccacttttatcttaaggtacacccagaatgtaggcaaatgctacagtgcttaaaattccagtggtaaaaatat

SEQ ID NO: 17523 - DNA, 600 bp, Chicken  19866894225767_1
gccctgtatagcctggcttgcactggcatcggaacgaaccaggcaaattgatgcaggtcccaccatggtgacagaggcctgacgtggcacattcgttcacatctatctcacacttctggccagtgtagccagactgacagatgcaggagaacttatgtccagacacggtacatgtacttccattggcacaaggttgagaggtacaggcatcaatccactggcagtcctttcctgtaggatgaagacgtaagaaattaatatggaaaacagctccacacgtcacgcttcaggctaccccaraatgrctgctgtactacatcttaacctaaagcacgtgtgcaaaatgattataggaattagcttatatgttacaatacctgaaacaaaattaacttgctggttacgggagaaagcctgtaacctatttatgcattaccagcaagatacagaacgttgtgatttataaaaataacccatgacctgaaatcgtaccacactgccagtcactctcttgttctactttcccttcaagaaagggagggggggaatttccatgcttctcctcaggcaaccaattaacattttcccactgaaagattt

SEQ ID NO: 17524 - DNA, 600 bp, Chicken  19866894225767_2
gtatagcctggcttgcactggcatcggaacgaaccaggcaaattgatgcaggtcccaccatggtgacagaggcctgacgtggcacattcgttcacatctatctcacacttctggccagtgtagccagactgacagatgcaggagaacttatgtccagacacggtacatgtacttccattggcacaaggttgagaggtacaggcatcaatccactggcagtcctttcctgtaggatgaagacgtaagaaattaatatggaaaacagctccacacgtcacgcttcaggctaccccaraatgrctgctgtactacatcttaacctaaagcacgtgtgcaaaatgattataggaattagcttatatgttacaatacctgaaacaaaattaacttgctggttacgggagaaagcctgtaacctatttatgcattaccagcaagatacagaacgttgtgatttataaaaataacccatgacctgaaatcgtaccacactgccagtcactctcttgttctactttcccttcaagaaagggagggggggaatttccatgcttctcctcaggcaaccaattaacattttcccactgaaagattttgctg

SEQ ID NO: 17525 - DNA, 600 bp, Chicken  19866894225768_1
ttatcacatatcaatattaccacagagtgtgtcagcagataaaaagggcttctcctcagcaccgagaatatctttatccacgctgacatattcacgccattcttagccaatagctccctctttagtcctgcagcagagagcaacagtctttttttttttttttcctggcaaatgaagttgattgctttatagaaagaatagcaaacacatcttttggcttttgcaatgaaatttactccaggaaaactaagcaaaataatttgctggtaagggcaatcttatatcaaagtgcatttgcaratcttggaatctacgcctccttctgggattcctttattttggatactttggccaggatggaatatggtttctttgatctttttactagaagctgattatgtgatgttagcaaaataactcaagttgagaaaaatagagatgatatactatattattcagtttattcatttcttatgcatgaaactgacaaagggatactgtgctaatgatgaatacagaattcacttggttatgttctgaatgggcagacctttcttccacactaatgtcgtctgggtgtaaaagtgcagcttccagggt

SEQ ID NO: 17526 - DNA, 600 bp, Chicken  19866894225770_1
gaacggccttcagaacggccttcagataaatagggagatctctcaaagctgactttcatgggcggcactaataagctctctaagcataaagatgacaaagcgaacgatgagaattctccaggtattttcctagcctctgttactgaaaagatcctcccaagatcttcctgaatgttctcagtattttcctaagtttcagaggatttagggctggccgtgctctgtagataggatctctgtcaagttcagcaaaagggcttggaagcaaattttgctggttggtgtagcaagagtttttaraactataaaatcatgagggggtctggaaaattttgttcatctttctgcagtctcacaaagtttatttctgtcactttatttttccgtgatggtcagtgtatggaaaatggcaacatatcagactccgttcctgtctctagcagccccaaacaaggttgtgtgctggctcccacgctgttttccttctttttcttggccgtgctggcggaggcattttgctgacattgagagaggagtatttatttagttctgtaccaatggaaagtttctccatctgcagcgccgctcatcagagatctt

SEQ ID NO: 17527 - DNA, 600 bp, Chicken  19866894225771_1
tgtcctgtgttgccctacaatgaagcattgtttgagacttcagccttagacagttaaaaatgtgaaatgtgtatttaattgctatgtgacaggacagataatggctggcacagttctcacaataatttatgtggtgccaaacaagtgcagtctatatgctttcccttcagaggtcatttgttcaatcacacattttttttgtttcaaagtgccttaaaacagtaatcaaagtaacagttaggtgttccttatatgtggttaaactgtggtcttgatttatgaatgcagcattaaaaaaawgttatttcaaacttggatgctataaaggatcacactctcctagtgtagaacattcatagaaacagctatttcatgtgcgatgtgattatattattcaaattcccaaaaagctctttacatgttctcttttcctgtaccggatagaatcatggaatcacaaaggttgaaaaagacccacaggatcacccagtccaaccattcacccatcaccaatagttctcactcaaccatgtccctcaacacaacatccaaacattccttgaatacctccagggtcggtgaccccactacctctctggg

SEQ ID NO: 17528 - DNA, 600 bp, Chicken  19866894225772_1
tcagtgatctcttgaggtccctttcaactcctgaagttctgtgattctgtgattctgtaattctgagaagaaatttttcctaatatccaacctgaatctcccctggaacaacttgaggtcatcacctctcatcctattgctgttacccaggagaagaggctgactcccatcttgctacaacctcttttcaggtcgttgtagagagcaataagatctgagcctcctcttctccagactgaacaaccccagctccttcagccacttcccattagacttgagctccagaccccttcacagctycgttgcccttctctggatgtactccaggtcctccatgtctttcttgtaatgaggagtctaaaactaaacacagcactcaaggtaccactttgcagcttctgagggatggatgctgtgcaagttcaaataattttgactgcagccgtagctgtcttgctctgaaactgaaggtatttgaattgaagcccatttcttcccgttctttctcatcctttccggcaccatgtttaccactggtctaatccaaatagtgcaaggagaatgatctgagagtgagcaataagtagacaagtgctttcc

SEQ ID NO: 17529 - DNA, 599 bp, Chicken  19866894225774_1
  misc_feature (1)..(21): n is any nucleotide
nnnnnnnnnnnnnnnnnnnnncaagattcagaattaacaaaccccatgttttcctctacaatagtctaacccatcaaaatactcaatctcagccttgagaaagtatgcacacaagcaaatagaaaatttcatttacaaccattctgcttaccagttggaaagagcttgtaaagctgcattcatgtaacaagtgttaccaatattttttaatcctgttagacctggaaaaaaaaaaaaaaaagatattcagtcagtctggtaatctaaggcatactaagaaaaacatttcatagtaaataygcgctaattaaaatgcctgtgtcacagttacaaagcccattataatgcagagttttaaccaaaagaaacacaggactcctaagtcctgtgtctagattactatattggaaaagtaattagtgttttggtattgggtaaaatacttcagaaaagcagatcgtgttttatcttaattcttcctgttttatgacagttgcagattgtcactttaaaatacagttgtcaaacatttatactttagtagaacttaatgatttacccattcagttaaattgtttctatgctgcgttcaraatagt

SEQ ID NO: 17530 - DNA, 600 bp, Chicken  19866894225774_2
taaataygcgctaattaaaatgcctgtgtcacagttacaaagcccattataatgcagagttttaaccaaaagaaacacaggactcctaagtcctgtgtctagattactatattggaaaagtaattagtgttttggtattgggtaaaatacttcagaaaagcagatcgtgttttatcttaattcttcctgttttatgacagttgcagattgtcactttaaaatacagttgtcaaacatttatactttagtagaacttaatgatttacccattcagttaaattgtttctatgctgcgttcaraatagttgatcatwttaccaaaataacgatttaactcttttgtcaagttcacgttaacatttaaatatacgcaacgctcaaaatgtatttgccatgtgactgcccattaccagagccataattaacttacaaccagtctttttctatgccaattatatacccttattgttacacacagactgctcagtttagattaccacaaagaatttattttcaagcccagtttgtttactttcttgactgatatccacatacagttttcccacatacataaaagctacaactaacattctttcactg

SEQ ID NO: 17531 - DNA, 600 bp, Chicken  19866894225774_3
ttaaaatgcctgtgtcacagttacaaagcccattataatgcagagttttaaccaaaagaaacacaggactcctaagtcctgtgtctagattactatattggaaaagtaattagtgttttggtattgggtaaaatacttcagaaaagcagatcgtgttttatcttaattcttcctgttttatgacagttgcagattgtcactttaaaatacagttgtcaaacatttatactttagtagaacttaatgatttacccattcagttaaattgtttctatgctgcgttcaraatagttgatcatwttaccaaaataacgatttaactcttttgtcaagttcacgttaacatttaaatatacgcaacgctcaaaatgtatttgccatgtgactgcccattaccagagccataattaacttacaaccagtctttttctatgccaattatatacccttattgttacacacagactgctcagtttagattaccacaaagaatttattttcaagcccagtttgtttactttcttgactgatatccacatacagttttcccacatacataaaagctacaactaacattctttcactgattgcagagacaag

SEQ ID NO: 17532 - DNA, 599 bp, Chicken  19866894225775_1
  misc_feature (1)..(1): n is any nucleotide
ntggagtaattataaaaaaaaaaagtttagtatttatttttcaagtgtttctaaatgatccccaattttaagtatctctactagcctaatattcaaattgtttaagttatacatacaactatttcaaatattgaaaaactcataagcaaaaccataccatggtcctgcagctgcatggaggctcgtgttccataagttctctggatgatgtgtggcctacttttactttcctgttaagacagacatgcaacattttcttctaattaatactgtagagtgaaaagtaaggcatttctttcmatatttataacttctattactttttcacaaaacacaaactaccacagtaccaattttgcacagcaggaatttgaagcaacgtttgcaatcctaagcaaaccacagaccatttactggcatacaaaactcagatatcagagatgtttttgagattacctgaaaagagtcctttaaaatccttggcgctagagaatgcaaatcatttattccaataaatcaaattaaagagcatatctttagatgaaatcttccactcccagaagaaatgcaagaatacgcttactatttatgacaaaagt

SEQ ID NO: 17533 - DNA, 600 bp, Chicken  19866894225775_2
ctagaagacacttgtcttttcttctgtaacacttctatagaggctgccaaaacatgcaattcttttcaaagggtaggatgctactgttctgtaactcctgggagagaaatatgtaatgaactgaaggaaataagagcacattttcgctagttttgtttttttttttcttctgggaaaaaaatgttttataaagtatccaccatagttaaggttaatcaagctgaataatctacatcctgaagcctgtggccaggatattatctcacacagaaaaaagtaataatatgagtctctgaaaawtctccgtagctgcattgttttcatcttcagcattttgaaaaaaaaaaacaaaaacattcatctgtcctcttttcatttcgaattctaccacttgaatccttagcagaattggcagacggtatctcagttctagaatttctcctctgactgttgtatggatacaattgtaggtataatttcaacaaatttacagtgtctgtactgtcagttttcagcctcacaatctttatgaatgtgctacatcaaaatgcattacatggcttaacacatagcatgtaatacagcttttgaagagagtga

SEQ ID NO: 17534 - DNA, 600 bp, Chicken  19866894225778_1
tgctacgtgctgttttaacacaaatatttggcaagcctgaatcacagaaatttggtaaccagtgataactttcccagatgattgaaatgatatgattgagataaaatgaatattttgattttttttttttccttcagaccaagactttctcaggaaatgcatttaaatgttaaaatacaccatctgtactggactcagtatgcttttttctttttgctttgtacagctcttgtataataactgtgttgaatgggggctgacctgggtggcccgagtgttgttaaatcacactgtccttckccatgggctttatcatttttgtgaggataggtgcgttgttgcagtgatgtgttcttgaatgtagcacccagaagataccttattttctgttgttagtttggagtttgtaacccaataaatttctaggtggagggtctaaagcaatttttatagatgtcatttaacgcttgagaaataaattccaagagcctaagtatacttagccagcactagttctgtaattgttagatgtgccaattgttaagtgcttgtttacatgaagttatcataacgtgtttttaagactccaagttctgttta

SEQ ID NO: 17535 - DNA, 600 bp, Chicken  19866894225782_1
atttcctgagaggttttttgttccccagcaggaaggctgcaggacatctcagttaaaggctggcctatctgcagagaccatgtgtgatggctttcccagagccaacgtctgtttccccccccaactccccagtagcttcctgccagagctccttgcctccaaggatgttggcttggcaggttgccttggttctccctggatcatgggatcactgggtgagtcaatttggaaaggtcttcaggaggtctctgtccagcctcctgcttcacacatgagctcatgcagggtttctcagggctrtacttgggttgttggatatttacatgtattatagcagtagagactgctgctcctgtggtctgttstttgatttgtgctctctgkttccttggttggccaaagccaaagatggctgactgtcaaatgcagcatcttctagattgctcaggtwggagaagctgtgttaccaaactaagctgcccccaagtttcacgttcattctccccagcatgagctgttttgcatctttctccctcctcctttcccctctaacaaagctttctgtttctgtcttactgtctttgtgtatagctgaaataa

SEQ ID NO: 17536 - DNA, 600 bp, Chicken  19866894225782_2
tatctgcagagaccatgtgtgatggctttcccagagccaacgtctgtttccccccccaactccccagtagcttcctgccagagctccttgcctccaaggatgttggcttggcaggttgccttggttctccctggatcatgggatcactgggtgagtcaatttggaaaggtcttcaggaggtctctgtccagcctcctgcttcacacatgagctcatgcagggtttctcagggctrtacttgggttgttggatatttacatgtattatagcagtagagactgctgctcctgtggtctgttstttgatttgtgctctctgkttccttggttggccaaagccaaagatggctgactgtcaaatgcagcatcttctagattgctcaggtwggagaagctgtgttaccaaactaagctgcccccaagtttcacgttcattctccccagcatgagctgttttgcatctttctccctcctcctttcccctctaacaaagctttctgtttctgtcttactgtctttgtgtatagctgaaataaaatcatatcaaaatgtaatcatagtaagttgttttctgttggatgaaatattcagggcacatgtg

SEQ ID NO: 17537 - DNA, 600 bp, Chicken  19866894225782_3
tgatggctttcccagagccaacgtctgtttccccccccaactccccagtagcttcctgccagagctccttgcctccaaggatgttggcttggcaggttgccttggttctccctggatcatgggatcactgggtgagtcaatttggaaaggtcttcaggaggtctctgtccagcctcctgcttcacacatgagctcatgcagggtttctcagggctrtacttgggttgttggatatttacatgtattatagcagtagagactgctgctcctgtggtctgttstttgatttgtgctctctgkttccttggttggccaaagccaaagatggctgactgtcaaatgcagcatcttctagattgctcaggtwggagaagctgtgttaccaaactaagctgcccccaagtttcacgttcattctccccagcatgagctgttttgcatctttctccctcctcctttcccctctaacaaagctttctgtttctgtcttactgtctttgtgtatagctgaaataaaatcatatcaaaatgtaatcatagtaagttgttttctgttggatgaaatattcagggcacatgtggcttagggcctgacgcttt

SEQ ID NO: 17538 - DNA, 600 bp, Chicken  19866894225782_4
cttgcctccaaggatgttggcttggcaggttgccttggttctccctggatcatgggatcactgggtgagtcaatttggaaaggtcttcaggaggtctctgtccagcctcctgcttcacacatgagctcatgcagggtttctcagggctrtacttgggttgttggatatttacatgtattatagcagtagagactgctgctcctgtggtctgttstttgatttgtgctctctgkttccttggttggccaaagccaaagatggctgactgtcaaatgcagcatcttctagattgctcaggtwggagaagctgtgttaccaaactaagctgcccccaagtttcacgttcattctccccagcatgagctgttttgcatctttctccctcctcctttcccctctaacaaagctttctgtttctgtcttactgtctttgtgtatagctgaaataaaatcatatcaaaatgtaatcatagtaagttgttttctgttggatgaaatattcagggcacatgtggcttagggcctgacgcttttaagatgtggggaagatggtggtgtgggttcagggtcagatatcacagaacaagacccatctaaacc

SEQ ID NO: 17539 - DNA, 438 bp, Chicken  19866894225795_1
agccagcttgccaagaaacttgaaagcctaggaattatatcaagctatggatacaaatctctaggcaaatattagaatgactgaaaataaaacacataaaggcacattgtgcctttcttcaggagccagatagtaagaggaagatgtaaaaaggcatccactaccaaatgccaatacaagcagctcccagcaacacctttttgaataaagccagcacatcacttccaccaaaatgtatgtaggatgcttggaaagtaataccttctgttgatttccatggaaactacaacaaagagcacwataacactatttcatagagcaagttcccagccacagaacactacttttctaacatagtcaccaccattagctctgcatttttacctgcaatgaacaaaagcctgtatgccacacttgtaaaaatctgcacccagggga

SEQ ID NO: 17540 - DNA, 599 bp, Chicken  19866894225804_1
  misc_feature (1)..(180): n is any nucleotide
nnnnnnnnnnnnnnnnnnnnnnnnnnnnnnnnnnnnnnnnnnnnnnnnnnnnnnnnnnnnnnnnnnnnnnnnnnnnnnnnnnnnnnnnnnnnnnnnnnnnnnnnnnnnnnnnnnnnnnnnnnnnnnnnnnnnnnnnnnnnnnnnnnnnnnnnnnnnnnnnnnnnnnnnnnnnnnnnnnnnatcctaccgcagtgttaggaaatgatgagttgatgccagtgcctcctagaatgggcactgacactgtgccagaatgtttgatccatccattcaggtgttcctctacttgccagggaaatyagaaccattgggtcctcctgacacgtatgctggtgcagtcagaacaacaggtttgatttgtggtcctgcagggtgagcaaccacagctcacatggcatacctgactgccacttgtttcttgaccctgctttccaccaccactttaattttctgcctcagtctccttgtagataaacctgtctccaataaactttgtcttatttgtcccagttttgtttcttccttacccaaatttgctatttctgatattattattgatgcaatctcagccttgcatgcaattaccaataccgttaccc

SEQ ID NO: 17541 - DNA, 600 bp, Chicken  19866894225804_2
ctggtgcagtcagaacaacaggtttgatttgtggtcctgcagggtgagcaaccacagctcacatggcatacctgactgccacttgtttcttgaccctgctttccaccaccactttaattttctgcctcagtctccttgtagataaacctgtctccaataaactttgtcttatttgtcccagttttgtttcttccttacccaaatttgctatttctgatattattattgatgcaatctcagccttgcatgcaattaccaataccgttacccgaatactgctggccttgtaagacctctaaracttcctcagaagtccccagtcagttatttacaaggtttggcaatttcccacagttccacctcacctcccagtaaaacccagacaatgcttgcagcacaacctgtaactttcttcatcagctcacattcttacttgtcactaccagcaactgctcacatcatgcaggtttttcagctagtaaagcctaatcagtgacataagtgttctgcctttacttccatcatgttgacagcagattttcaactaagaatagcagggctaatctgaagtcaaggaatgtttgctgccatatcacactg

SEQ ID NO: 17542 - DNA, 600 bp, Chicken  19866894225810_1
ctgtcttgtgctccagttgtctatgcgtatgttttcctcaccatatttactctcatcagacgctctgggttgggttttcattgacttcagagggagcacactgaatgcatttgaaaatccacccagtattcttgtgtgtgtgttttttcgttccatgtcatgtatttatatatagttctgtgtattgagttatgaacaggtggcatgccagaaatctctatttccgtgacattttctcagcacatctttgcccgtagctggataacaattatggggaaggtttcaggggaaggaagctargggggaaaatattagacgaatgttaactgctaaaatagaagactgtcttattgttagaccaactataagagagaaactggtgaaagtcaaccgttaagctccaaggtcgtcctgctgcctctcaacagttatcgagaaaaagaaagttgcatgttattcagcgttgtgaggagctgttcacccacaggacctcccctcccttgattcgcttcaagtttgcaactatgccaaaggcttactcattggcaagtaaatgagatctcgagtttggatattttcatcttggggcaagaggacatg

SEQ ID NO: 17543 - DNA, 600 bp, Chicken  19866894225816_1
tacagaaacccacacagaacagaaggaaggggtggtagaggacagagcaacctcctgcaactcaggcacgcctaagcctgacacagaaagagaaaggttctgcccttagctcccagcttcatttaaacagcaactaaagaacagcaaagacaggggaactcctaccaaatcctgtgtgtacaaaacatctacagtaccccagctcatgcacgatgtttattaacacacgtcatgactgaaagagaatacccaggagctactagtcaagaattccaaagttctacttattttccttctttstaacatggactttaggctttaactacacctactctgcagacacagcataattgctggcgatgcacacgctaggtcacacaccagctacttcaaaggttgcgcaaagctctgcatctctgcagcaagtttggagcttcccattacagagcacgcagctcttggcattccttctcgagaagactgaatgcaagcctgctcatttatgcctgctcttwtagcagggacaaggcacacgcaaaagcctcacatcatgatcctccctgaaataggtagaagtgatccatctaccccacaytccct

SEQ ID NO: 17544 - DNA, 600 bp, Chicken  19866894225816_2
tttattaacacacgtcatgactgaaagagaatacccaggagctactagtcaagaattccaaagttctacttattttccttctttstaacatggactttaggctttaactacacctactctgcagacacagcataattgctggcgatgcacacgctaggtcacacaccagctacttcaaaggttgcgcaaagctctgcatctctgcagcaagtttggagcttcccattacagagcacgcagctcttggcattccttctcgagaagactgaatgcaagcctgctcatttatgcctgctcttwtagcagggacaaggcacacgcaaaagcctcacatcatgatcctccctgaaataggtagaagtgatccatctaccccacaytccctttctagggtgctgggttgggcaactcagtcatgaaagacaggaccaaataattgcataggttaaagccagctaataattctatcttaccgaattttgtctctagagataaacagctatggacttcaaagctgaccatgagccattatagtttctaaaaatctgacaaaactgcctcagactaggtccacacttcaaactcaagagaggcactcct

SEQ ID NO: 17545 - DNA, 600 bp, Chicken  19866894225816_3
ctttstaacatggactttaggctttaactacacctactctgcagacacagcataattgctggcgatgcacacgctaggtcacacaccagctacttcaaaggttgcgcaaagctctgcatctctgcagcaagtttggagcttcccattacagagcacgcagctcttggcattccttctcgagaagactgaatgcaagcctgctcatttatgcctgctcttwtagcagggacaaggcacacgcaaaagcctcacatcatgatcctccctgaaataggtagaagtgatccatctaccccacaytccctttctagggtgctgggttgggcaactcagtcatgaaagacaggaccaaataattgcataggttaaagccagctaataattctatcttaccgaattttgtctctagagataaacagctatggacttcaaagctgaccatgagccattatagtttctaaaaatctgacaaaactgcctcagactaggtccacacttcaaactcaagagaggcactcctgatcttcaacagactaaaactgtgctgaaaaaaaaaaaaaaggctgaaatgctggcttcttttaaggcagtgggagactt

SEQ ID NO: 17546 - DNA, 600 bp, Chicken  19866894225818_1
gagagcctgctgctgtgtgcacactgtgtgtgtgtggggggggtcccaccgtggtgtggggtctgtggggcaccgctatccaccaccccgtgccctcaccgctcctcgccccgcgcagccctgatgtacgccagcatctttgggaacgtgtcggccatcatccagcgcctgtactcgggcacggcgcgctaccacacgcagatgctgcgcgtccgcgagttcatccgcttccaccagatccccaacccgctgcgccagcgcctggaggagtatttccagcacgcctggtcctacaccaayggcatcgacatgaacgcggtgagcgccgccggccccgccgtgcccgctgccacccgagccgcaccgtgacgccrcgtccccatccccgcaggtgctgaagggattccccgagtgcctgcaggccgacatctgcctgcacctgaaccgcagcctgctgcagaactgcaagcccttcaagggagccaccaagggctgcctgcgcgccctggccatgaagttcaagacgacgcacgctccgcccggggacacgctggtgcacgccggcgacgtgctgaccgcgctctacttcatctcgcgtgg

SEQ ID NO: 17547 - DNA, 600 bp, Chicken  19866894225818_2
gctatccaccaccccgtgccctcaccgctcctcgccccgcgcagccctgatgtacgccagcatctttgggaacgtgtcggccatcatccagcgcctgtactcgggcacggcgcgctaccacacgcagatgctgcgcgtccgcgagttcatccgcttccaccagatccccaacccgctgcgccagcgcctggaggagtatttccagcacgcctggtcctacaccaayggcatcgacatgaacgcggtgagcgccgccggccccgccgtgcccgctgccacccgagccgcaccgtgacgccrcgtccccatccccgcaggtgctgaagggattccccgagtgcctgcaggccgacatctgcctgcacctgaaccgcagcctgctgcagaactgcaagcccttcaagggagccaccaagggctgcctgcgcgccctggccatgaagttcaagacgacgcacgctccgcccggggacacgctggtgcacgccggcgacgtgctgaccgcgctctacttcatctcgcgtggctccatcgagatcctgcgtggcgatgtggtggtggccatcctgggtgagccctgggccggggtggtgacgtggc

SEQ ID NO: 17548 - DNA, 600 bp, Chicken  19866894225823_1
atgtggtcccaaccctctgctgtgggcagggctgccacccgctcgatcaggatgcccagggttaacatgagattacgtgttttcattgcccttcgatatctgtgatcttttcagactcccactgactatggaagtgcccattgcccgccatggggcctggtagtttccttctgtgttccttcctgtggaaatcagtatggttacaagctggtaagcaggctggtattttatttaattttttcaagtacatatgcataaataaaatatgcgatagagaattgtcagacaattcaagtatcygcactctgccccctaccaagctgcagccgcttccgcaatggctctcaatcatggaagcaattgagaaaaaaacaactgtgtactgtattttagcgtggtgtcttgagagagcagctcataaaaagtgcatgaagttagtcatgaaaaaggcccatggcttccttctgcccacacactcctcagtccagcgccgcactgcagcagccgccccgggtcagcccttacagccgctgctgatggatcacacctggcagctcctcggtgacgttctgctgaagccactcacctgttggtaaagca

SEQ ID NO: 17549 - DNA, 600 bp, Chicken  19866894225825_1
taatcatgctaaagcatgtagcaatgtatttgatgtagtttattggagtttgaaattaaaatcaactttaaaaaatgaatttcccatttttagtaaataagatggataggaagctctcacttgtgatactgtttatgacctcactgctctatggagcagtgctagctctatggagctagcaggtgtcagctggaaaacaaatatttttgttgtttatgggagcaactgagtgtggctcttaaatgactttgtgtcctcaacaaacagaaaggatacttcctatcaacggtttgtctagartccaaaatttaatacatggtgttacttctctaaatagatcacaagggaaagaacaattttcaaaagctgacattgcagcttggcaatactgaaaaagtaaacaatagttcacttgtgtggttcatacaaaggatggtttggaataagaggtaaaaatcatgattcgctgtcaaataatgcctcaatatctcctttgataatgttagtgattgtagcttattttagtgtcagaaagtaagtcagatcattctgagagatgcaaactgataacaactaggtatattgcaaaatattaccaga

SEQ ID NO: 17550 - DNA, 599 bp, Chicken  19866894225826_1
  misc_feature (1)..(167): n is any nucleotide
nnnnnnnnnnnnnnnnnnnnnnnnnnnnnnnnnnnnnnnnnnnnnnnnnnnnnnnnnnnnnnnnnnnnnnnnnnnnnnnnnnnnnnnnnnnnnnnnnnnnnnnnnnnnnnnnnnnnnnnnnnnnnnnnnnnnnnnnnnnnnnnnnnnnnnnnnnnnnnnnnnnnnnnctggattgaaattagtgaatgaaatgcatatgtgtctgatccatttataactcacactgcaaaaataaccagggaataacgtggttgtggccaaactgtgttactacctgttttattctcagttgctctctcrgaggggtaaacatacttgtgagccattgctatgyggtagctgtagtcacgtcatgttgtacagtggtgtttgaaatggttgtttttgtaataggagtgcaaccttggtagtaaatttctgttagctgtgaatttttgaggtactgaagtctgtctaaaagaaagcttgttgatttactttctgctttcccttcagctggtataaagctacagtcatttcactgaaataccagctaaactgagcatacgttcaagaaagatcatttcagaaatctgtcagtcttgagaacatttcccttc

SEQ ID NO: 17551 - DNA, 599 bp, Chicken  19866894225826_2
  misc_feature (1)..(133): n is any nucleotide
nnnnnnnnnnnnnnnnnnnnnnnnnnnnnnnnnnnnnnnnnnnnnnnnnnnnnnnnnnnnnnnnnnnnnnnnnnnnnnnnnnnnnnnnnnnnnnnnnnnnnnnnnnnnnnnnnnnnnnnnnnnnnnnnnnnnnctggattgaaattagtgaatgaaatgcatatgtgtctgatccatttataactcacactgcaaaaataaccagggaataacgtggttgtggccaaactgtgttactacctgttttattctcagttgctctctcrgaggggtaaacatacttgtgagccattgctatgyggtagctgtagtcacgtcatgttgtacagtggtgtttgaaatggttgtttttgtaataggagtgcaaccttggtagtaaatttctgttagctgtgaatttttgaggtactgaagtctgtctaaaagaaagcttgttgatttactttctgctttcccttcagctggtataaagctacagtcatttcactgaaataccagctaaactgagcatacgttcaagaaagatcatttcagaaatctgtcagtcttgagaacatttcccttccatttcctgagaataccagggaataattggtttt

SEQ ID NO: 17552 - DNA, 458 bp, Chicken  19866894225826_3
ctgtgaatttttgaggtactgaagtctgtctaaaagaaagcttgttgatttactttctgctttcccttcagctggtataaagctacagtcatttcactgaaataccagctaaactgagcatacgttcaagaaagatcatttcagaaatctgtcagtcttgagaacatttcccttccatttcctgagaataccagggaataattggttttgctactctgaggcagagcagctgttgtgtctataagttgtgtgtgagctgtgtgtgctgtgttagttattagctgaaaaaaaaatcagagrcagcacctggactgactgtacctggtgtttggttgttacaggatcacggtgtccggctgtcagcagagagcggggagcattcacacatgaacaagtctycctctgagaactggaagctgaagccttcatcagataaatggtttgtgaaggggacagtt

SEQ ID NO: 17553 - DNA, 359 bp, Chicken  19866894225826_4
aaataccagctaaactgagcatacgttcaagaaagatcatttcagaaatctgtcagtcttgagaacatttcccttccatttcctgagaataccagggaataattggttttgctactctgaggcagagcagctgttgtgtctataagttgtgtgtgagctgtgtgtgctgtgttagttattagctgaaaaaaaaatcagagrcagcacctggactgactgtacctggtgtttggttgttacaggatcacggtgtccggctgtcagcagagagcggggagcattcacacatgaacaagtctycctctgagaactggaagctgaagccttcatcagataaatggtttgtgaaggggacagtt

SEQ ID NO: 17554 - DNA, 600 bp, Chicken  19866894225831_1
ggcagtaacttgattgttattatgtcctgttaggcagggacaattcaattaagacacttttctaagatccgcatcacactgccgttggaactggttacgtgcgtgagctaatgttctgttccttctgatttatatcggtcaccctcatcaaaactaaagtcagtatatacagctttcaaaaatctaaataaatccctcttcaaagcttactttcattgtgtcgactagaagaaactaggtgacttctatttatatattcactttatttatatctagtcaacaactcgcttatattaaaamaagaactgggcagtctcaaagctgtggctttgttggtagttaactctacttgctgaaataatgctgcaaaatgggacrggatctgagattactgagaaatgagcaattttgttgcacatatatcatgcacacatgatatttttcagcacttgccagctcagtaatttcaatagaacggcaaaaatcttgtctgtgttcagcactgacctcacatcaatttgtggactccctaccaaacccatgaaaagctgaacagtgacaaaagttttggttagctgggagcctggagcatcttcgtta

SEQ ID NO: 17555 - DNA, 600 bp, Chicken  19866894225831_2
ctgccgttggaactggttacgtgcgtgagctaatgttctgttccttctgatttatatcggtcaccctcatcaaaactaaagtcagtatatacagctttcaaaaatctaaataaatccctcttcaaagcttactttcattgtgtcgactagaagaaactaggtgacttctatttatatattcactttatttatatctagtcaacaactcgcttatattaaaamaagaactgggcagtctcaaagctgtggctttgttggtagttaactctacttgctgaaataatgctgcaaaatgggacrggatctgagattactgagaaatgagcaattttgttgcacatatatcatgcacacatgatatttttcagcacttgccagctcagtaatttcaatagaacggcaaaaatcttgtctgtgttcagcactgacctcacatcaatttgtggactccctaccaaacccatgaaaagctgaacagtgacaaaagttttggttagctgggagcctggagcatcttcgttatgagctgagagacctggcactgttcagtctgaagaagactgagggggaatcttatcaatgcctgkaggtatctaatgg

SEQ ID NO: 17556 - DNA, 543 bp, Chicken  19866894225831_3
gcaaaatgggacrggatctgagattactgagaaatgagcaattttgttgcacatatatcatgcacacatgatatttttcagcacttgccagctcagtaatttcaatagaacggcaaaaatcttgtctgtgttcagcactgacctcacatcaatttgtggactccctaccaaacccatgaaaagctgaacagtgacaaaagttttggttagctgggagcctggagcatcttcgttatgagctgagagacctggcactgttcagtctgaagaagactgagggggaatcttatcaatgcctgkaggtatctaatgggtaggaatcaagtggatggggccaggctcttttctacagtgcccggtgacagaacaaagggcaatgggcactggatacactggatacagtggatacagtgtggatacacagatacaaactgggatacaggaagaacttctttactgtgggggtgacatagcactggaacaggctgcccagagaggtcatggagtctccttctctggagatattcagaactgtcctacatt

SEQ ID NO: 17557 - DNA, 599 bp, Chicken  19866894225846_1
  misc_feature (1)..(52): n is any nucleotide
nnnnnnnnnnnnnnnnnnnnnnnnnnnnnnnnnnnnnnnnnnnnnnnnnnnntacaggagtgaagtgccagtgtgagaatctgcctcctgcaaggggctgagggaggctgctgctcgtccacattcattttcagacttatacaaaggcgcataaaggggggacctctttccccacttggaacgcattggggacaccaagtgtggcgctggtttggatgcagttaggggctgaaccacggggtcacagagtggttgggtgggcaggacttctgggtccatctgctcccagccctgcttatkcagggacagccagagcagggygcccagcaccgtggctctgtgatgggactcggtaggtcasgtgggtggttggactcgatggtcttgaaaccaggtgatctgatgattctactctaagtctgggtggcttctgagtatcaatcaaggaggaagactccaccacctctatgggcaaccagctgcagcacttggcaacctgcacagcaaraagcgctccctgatgttcagaggtaccttctgtgtttcaggatgctgagcttyccaccatcagggtggatgccactgacctgggacccagc

SEQ ID NO: 17558 - DNA, 600 bp, Chicken  19866894225846_10
tctgaaaggcttcataatgtgctcaacccaaacgtaaccccgccgttgctgtaaccaatttgtgaagaataattaaacaaccgacgctaacattaattcattacagcacatctcaaagccacctttgctgtgcactgtgtttcaggtagctcctccaaaatgcaacgcctaaatgcctcactaatcatggtaggaggcccgtggtgctggcaccccactgacgtttcattcgattgctttcagcagatcactcattggctgatttagctgcgagagcactcggaggatggctgctaatgsatagtgcagrgagggggctcgggatgctcaggtcagtgctgtgatgagggctgtgggtggttgggatgtttgcatgctgttgttcttttaaagagcctgtgctatctcaatcccttgccttggggccggttgtactcactgacgtggtgggagaggytgctgctcacaccaggaccaggctggctttttcactgcagtctctttggcctgagctcctgaagggatgttcccagggcatcagttaaggctgcaagaggaatggctccttaaagaggcactttctcgtgcaaaactccttgg

SEQ ID NO: 17559 - DNA, 600 bp, Chicken  19866894225846_11
ttcataatgtgctcaacccaaacgtaaccccgccgttgctgtaaccaatttgtgaagaataattaaacaaccgacgctaacattaattcattacagcacatctcaaagccacctttgctgtgcactgtgtttcaggtagctcctccaaaatgcaacgcctaaatgcctcactaatcatggtaggaggcccgtggtgctggcaccccactgacgtttcattcgattgctttcagcagatcactcattggctgatttagctgcgagagcactcggaggatggctgctaatgsatagtgcagrgagggggctcgggatgctcaggtcagtgctgtgatgagggctgtgggtggttgggatgtttgcatgctgttgttcttttaaagagcctgtgctatctcaatcccttgccttggggccggttgtactcactgacgtggtgggagaggytgctgctcacaccaggaccaggctggctttttcactgcagtctctttggcctgagctcctgaagggatgttcccagggcatcagttaaggctgcaagaggaatggctccttaaagaggcactttctcgtgcaaaactccttgggtacagatat

SEQ ID NO: 17560 - DNA, 461 bp, Chicken  19866894225846_12
aaatgcaacgcctaaatgcctcactaatcatggtaggaggcccgtggtgctggcaccccactgacgtttcattcgattgctttcagcagatcactcattggctgatttagctgcgagagcactcggaggatggctgctaatgsatagtgcagrgagggggctcgggatgctcaggtcagtgctgtgatgagggctgtgggtggttgggatgtttgcatgctgttgttcttttaaagagcctgtgctatctcaatcccttgccttggggccggttgtactcactgacgtggtgggagaggytgctgctcacaccaggaccaggctggctttttcactgcagtctctttggcctgagctcctgaagggatgttcccagggcatcagttaaggctgcaagaggaatggctccttaaagaggcactttctcgtgcaaaactccttgggtacagatatagcattaa

SEQ ID NO: 17561 - DNA, 599 bp, Chicken  19866894225846_2
  misc_feature (1)..(31): n is any nucleotide
nnnnnnnnnnnnnnnnnnnnnnnnnnnnnnntacaggagtgaagtgccagtgtgagaatctgcctcctgcaaggggctgagggaggctgctgctcgtccacattcattttcagacttatacaaaggcgcataaaggggggacctctttccccacttggaacgcattggggacaccaagtgtggcgctggtttggatgcagttaggggctgaaccacggggtcacagagtggttgggtgggcaggacttctgggtccatctgctcccagccctgcttatkcagggacagccagagcagggygcccagcaccgtggctctgtgatgggactcggtaggtcasgtgggtggttggactcgatggtcttgaaaccaggtgatctgatgattctactctaagtctgggtggcttctgagtatcaatcaaggaggaagactccaccacctctatgggcaaccagctgcagcacttggcaacctgcacagcaaraagcgctccctgatgttcagaggtaccttctgtgtttcaggatgctgagcttyccaccatcagggtggatgccactgacctgggacccagccttcaggggacgagaacatgg

SEQ ID NO: 17562 - DNA, 600 bp, Chicken  19866894225846_3
gaagtgccagtgtgagaatctgcctcctgcaaggggctgagggaggctgctgctcgtccacattcattttcagacttatacaaaggcgcataaaggggggacctctttccccacttggaacgcattggggacaccaagtgtggcgctggtttggatgcagttaggggctgaaccacggggtcacagagtggttgggtgggcaggacttctgggtccatctgctcccagccctgcttatkcagggacagccagagcagggygcccagcaccgtggctctgtgatgggactcggtaggtcasgtgggtggttggactcgatggtcttgaaaccaggtgatctgatgattctactctaagtctgggtggcttctgagtatcaatcaaggaggaagactccaccacctctatgggcaaccagctgcagcacttggcaacctgcacagcaaraagcgctccctgatgttcagaggtaccttctgtgtttcaggatgctgagcttyccaccatcagggtggatgccactgacctgggacccagccttcaggggacgagaacatggtatgstctwtaattttgagctcacactgactcagatttgaa

SEQ ID NO: 17563 - DNA, 600 bp, Chicken  19866894225846_4
ggtttggatgcagttaggggctgaaccacggggtcacagagtggttgggtgggcaggacttctgggtccatctgctcccagccctgcttatkcagggacagccagagcagggygcccagcaccgtggctctgtgatgggactcggtaggtcasgtgggtggttggactcgatggtcttgaaaccaggtgatctgatgattctactctaagtctgggtggcttctgagtatcaatcaaggaggaagactccaccacctctatgggcaaccagctgcagcacttggcaacctgcacagcaaraagcgctccctgatgttcagaggtaccttctgtgtttcaggatgctgagcttyccaccatcagggtggatgccactgacctgggacccagccttcaggggacgagaacatggtatgstctwtaattttgagctcacactgactcagatttgaagtttcggagcctacggtattgaactcgaggtctatcaggagagtaaaatttgcatttaggtctttctgaccccatcaaaaccccactgaggaatctctagggagcgctgcgagactttggccgccaccccgttgcacagagctgcat

SEQ ID NO: 17564 - DNA, 600 bp, Chicken  19866894225846_5
caggacttctgggtccatctgctcccagccctgcttatkcagggacagccagagcagggygcccagcaccgtggctctgtgatgggactcggtaggtcasgtgggtggttggactcgatggtcttgaaaccaggtgatctgatgattctactctaagtctgggtggcttctgagtatcaatcaaggaggaagactccaccacctctatgggcaaccagctgcagcacttggcaacctgcacagcaaraagcgctccctgatgttcagaggtaccttctgtgtttcaggatgctgagcttyccaccatcagggtggatgccactgacctgggacccagccttcaggggacgagaacatggtatgstctwtaattttgagctcacactgactcagatttgaagtttcggagcctacggtattgaactcgaggtctatcaggagagtaaaatttgcatttaggtctttctgaccccatcaaaaccccactgaggaatctctagggagcgctgcgagactttggccgccaccccgttgcacagagctgcatccatctcttgggacctttgctcatttgcacctcacaggtcccaagccactcct

SEQ ID NO: 17565 - DNA, 600 bp, Chicken  19866894225846_6
agcaccgtggctctgtgatgggactcggtaggtcasgtgggtggttggactcgatggtcttgaaaccaggtgatctgatgattctactctaagtctgggtggcttctgagtatcaatcaaggaggaagactccaccacctctatgggcaaccagctgcagcacttggcaacctgcacagcaaraagcgctccctgatgttcagaggtaccttctgtgtttcaggatgctgagcttyccaccatcagggtggatgccactgacctgggacccagccttcaggggacgagaacatggtatgstctwtaattttgagctcacactgactcagatttgaagtttcggagcctacggtattgaactcgaggtctatcaggagagtaaaatttgcatttaggtctttctgaccccatcaaaaccccactgaggaatctctagggagcgctgcgagactttggccgccaccccgttgcacagagctgcatccatctcttgggacctttgctcatttgcacctcacaggtcccaagccactccttgagaatacgatgggtcccagcgccacgcaccttcccccagcctcaagtctagatgtcacagcg

SEQ ID NO: 17566 - DNA, 600 bp, Chicken  19866894225846_7
ccgtggctctgtgatgggactcggtaggtcasgtgggtggttggactcgatggtcttgaaaccaggtgatctgatgattctactctaagtctgggtggcttctgagtatcaatcaaggaggaagactccaccacctctatgggcaaccagctgcagcacttggcaacctgcacagcaaraagcgctccctgatgttcagaggtaccttctgtgtttcaggatgctgagcttyccaccatcagggtggatgccactgacctgggacccagccttcaggggacgagaacatggtatgstctwtaattttgagctcacactgactcagatttgaagtttcggagcctacggtattgaactcgaggtctatcaggagagtaaaatttgcatttaggtctttctgaccccatcaaaaccccactgaggaatctctagggagcgctgcgagactttggccgccaccccgttgcacagagctgcatccatctcttgggacctttgctcatttgcacctcacaggtcccaagccactccttgagaatacgatgggtcccagcgccacgcaccttcccccagcctcaagtctagatgtcacagcgacga

SEQ ID NO: 17567 - DNA, 600 bp, Chicken  19866894225846_8
tcacaggtcccaagccactccttgagaatacgatgggtcccagcgccacgcaccttcccccagcctcaagtctagatgtcacagcgacgaacataaaaccgaaggcagcagctcacctgcactatttccagcatctcaccgcggctgatgtacccgttgccatccaggtcatacatgctgaacgcccacttgagcttctgctcgagcttgccccgcgaggtgacgctgagcgcaatgatgaattccctgaagtcgatggtcccgtcgccgttggtgtcgaaggtgcggaacacgtgttcrgcgaacttcgatgcgtcgccgtaagggaaaaaattggcgtagatttttttgaactcctccacagtcaaatggcccgttgggcaatcttttaggaagcccttgtaccactcctgcagctcgtggtccagtgaactcggtgttctcgcgcaggtcctgcagcacttcagggcgcagcttgctgttctgcttccccatccttgcccagagcctggctcagatgctgccaatgagagagcacccatgttatctctgtgatacataatcactcccctagaacagcttgtagtgtccaggtccaat

SEQ ID NO: 17568 - DNA, 600 bp, Chicken  19866894225846_9
accaccttttgttctgtcaaaaagtgtaacagtgcacaataaccaaagcagtgttgccactgccctgctttgcatccccgtcacgcttatccagagccaaaagagcaaatgctgtgcagcatggcatgtagacatcaacaccatgaaatgtaccggggctgagcaattcccagaggtaaacatcccaggcatgcataagaacctacaaaaatgttaaaggtcagcaaaaaaatacggggctgtgcagcagagagcttttcaacagctgaatttaacctcattttatttgcattccacttrttttgtgtgttgcctcagcgatgtacaaaatccacatcctgccctgtggctgaatgcttggaggcagaacccagctcaatgcagcaagctctgctatccttggcacatctctttaccataaaagctgtgtttcagccatgaaaccctacttctgcccagtgcatggcagctttctgcaggtccctgtgtggctctgcttgctggaacttgatggccaaaggaggtttggaaacgtttagtgccattgctgtcctcttcccttacaaagggaggtccctcaacagcaggagcctggttgtt

SEQ ID NO: 17569 - DNA, 600 bp, Chicken  19866894225853_1
aaagtacaaaagcctccattccgtgctccaaaaacacaagcaaaaatgatagtttctgccctgctcagggacttcctgagttggatgtgagttttctatgtgtaataacccttttccactgatttccccagtatcctcttgaatatgcaaacggagaaatttcctgcagaccaggagggaactgggaaaagggcaagttcctcttctggatgcagtccccatccaagacaaggaatcagcaaaactcacatgtcccctgaagacaggttgggaatggatgtctccagccccatgctcagsgctgggtgaagmaagttgtaggcgggggtctgtgatcccaatatctctgttccttgagaaaacaagatgtgctgtcccatcaacacaactggcccctacgtgggcacagagcttggatccaagccctctgtgctgagtatcctgcatgtaggggtggacatgggccaagtgyaggtccctccactgcaaaactgtggcatttatccaggtagtcctgcaggctccacacatgttcttgagccttcctgcatacatgttcaaattatttgatcttacataagctggaaatctcaaattttt

SEQ ID NO: 17570 - DNA, 600 bp, Chicken  19866894225853_2
cctccattccgtgctccaaaaacacaagcaaaaatgatagtttctgccctgctcagggacttcctgagttggatgtgagttttctatgtgtaataacccttttccactgatttccccagtatcctcttgaatatgcaaacggagaaatttcctgcagaccaggagggaactgggaaaagggcaagttcctcttctggatgcagtccccatccaagacaaggaatcagcaaaactcacatgtcccctgaagacaggttgggaatggatgtctccagccccatgctcagsgctgggtgaagmaagttgtaggcgggggtctgtgatcccaatatctctgttccttgagaaaacaagatgtgctgtcccatcaacacaactggcccctacgtgggcacagagcttggatccaagccctctgtgctgagtatcctgcatgtaggggtggacatgggccaagtgyaggtccctccactgcaaaactgtggcatttatccaggtagtcctgcaggctccacacatgttcttgagccttcctgcatacatgttcaaattatttgatcttacataagctggaaatctcaaattttttccttgcctggc

SEQ ID NO: 17571 - DNA, 508 bp, Chicken  19866894225853_3
aggagggaactgggaaaagggcaagttcctcttctggatgcagtccccatccaagacaaggaatcagcaaaactcacatgtcccctgaagacaggttgggaatggatgtctccagccccatgctcagsgctgggtgaagmaagttgtaggcgggggtctgtgatcccaatatctctgttccttgagaaaacaagatgtgctgtcccatcaacacaactggcccctacgtgggcacagagcttggatccaagccctctgtgctgagtatcctgcatgtaggggtggacatgggccaagtgyaggtccctccactgcaaaactgtggcatttatccaggtagtcctgcaggctccacacatgttcttgagccttcctgcatacatgttcaaattatttgatcttacataagctggaaatctcaaattttttccttgcctggcttcttttgggaccattccattgggaaaataaacaacagcagcacaaataccctaactgcaatggggag

SEQ ID NO: 17572 - DNA, 600 bp, Chicken  19866894225857_1
ctgtttacaaacagatttaatccttcagatcccactgacacccctgggtgaagctggtgatatgatccaactacagcaaaaattgctgatgtattcttacccttcttttcctgttgttggtttggttatttgggtttgctttttttttttttcagataattattaatccagaaagctttccccgttctgcagagcttctttaggagcaatcagtgagaacccctccttcagctgaaacacaacccaagcagcctttactcctccaaaactccaagcttccggagcaagctgctacagcakcagtctcagtagggtgctttgctccagggacggtccttgcacaccaccagggatggaagctttrggggatctgagccccagcaggcacccagggctgcagccatcccrcagtgggcacagggaggaaggcatgaccccaaggaggggattagcgtaattgctgcgtccatggagaaagccctcagaggaggcaggagagcaaggaggtcccattacatattttacaytgcagttatggccttacagacaagtcatgtctgctcctaatctgagatcagtgagtgacagcrttttataggg

SEQ ID NO: 17573 - DNA, 600 bp, Chicken  19866894225857_2
atccaactacagcaaaaattgctgatgtattcttacccttcttttcctgttgttggtttggttatttgggtttgctttttttttttttcagataattattaatccagaaagctttccccgttctgcagagcttctttaggagcaatcagtgagaacccctccttcagctgaaacacaacccaagcagcctttactcctccaaaactccaagcttccggagcaagctgctacagcakcagtctcagtagggtgctttgctccagggacggtccttgcacaccaccagggatggaagctttrggggatctgagccccagcaggcacccagggctgcagccatcccrcagtgggcacagggaggaaggcatgaccccaaggaggggattagcgtaattgctgcgtccatggagaaagccctcagaggaggcaggagagcaaggaggtcccattacatattttacaytgcagttatggccttacagacaagtcatgtctgctcctaatctgagatcagtgagtgacagcrttttatagggagcagtaacttttgatttacatataggagttgttgattcaatctacgtccagatgtctggaaaa

SEQ ID NO: 17574 - DNA, 600 bp, Chicken  19866894225857_3
tcctgttgttggtttggttatttgggtttgctttttttttttttcagataattattaatccagaaagctttccccgttctgcagagcttctttaggagcaatcagtgagaacccctccttcagctgaaacacaacccaagcagcctttactcctccaaaactccaagcttccggagcaagctgctacagcakcagtctcagtagggtgctttgctccagggacggtccttgcacaccaccagggatggaagctttrggggatctgagccccagcaggcacccagggctgcagccatcccrcagtgggcacagggaggaaggcatgaccccaaggaggggattagcgtaattgctgcgtccatggagaaagccctcagaggaggcaggagagcaaggaggtcccattacatattttacaytgcagttatggccttacagacaagtcatgtctgctcctaatctgagatcagtgagtgacagcrttttatagggagcagtaacttttgatttacatataggagttgttgattcaatctacgtccagatgtctggaaaaggaagcagcttccccccacctccctcctgctccctgagagccca

SEQ ID NO: 17575 - DNA, 600 bp, Chicken  19866894225857_4
tcagctgaaacacaacccaagcagcctttactcctccaaaactccaagcttccggagcaagctgctacagcakcagtctcagtagggtgctttgctccagggacggtccttgcacaccaccagggatggaagctttrggggatctgagccccagcaggcacccagggctgcagccatcccrcagtgggcacagggaggaaggcatgaccccaaggaggggattagcgtaattgctgcgtccatggagaaagccctcagaggaggcaggagagcaaggaggtcccattacatattttacaytgcagttatggccttacagacaagtcatgtctgctcctaatctgagatcagtgagtgacagcrttttatagggagcagtaacttttgatttacatataggagttgttgattcaatctacgtccagatgtctggaaaaggaagcagcttccccccacctccctcctgctccctgagagcccattaacctcctactgacgcaaactaatatgtagtcacaattccccagctcggactcagaaatgcagacattaccataatcggctaaaacaagtatttataaacatttcaatgggcaagat

SEQ ID NO: 17576 - DNA, 600 bp, Chicken  19866894225857_5
gctacagcakcagtctcagtagggtgctttgctccagggacggtccttgcacaccaccagggatggaagctttrggggatctgagccccagcaggcacccagggctgcagccatcccrcagtgggcacagggaggaaggcatgaccccaaggaggggattagcgtaattgctgcgtccatggagaaagccctcagaggaggcaggagagcaaggaggtcccattacatattttacaytgcagttatggccttacagacaagtcatgtctgctcctaatctgagatcagtgagtgacagcrttttatagggagcagtaacttttgatttacatataggagttgttgattcaatctacgtccagatgtctggaaaaggaagcagcttccccccacctccctcctgctccctgagagcccattaacctcctactgacgcaaactaatatgtagtcacaattccccagctcggactcagaaatgcagacattaccataatcggctaaaacaagtatttataaacatttcaatgggcaagataccatcagcaggggtcctgaatatttgtcttaaaatttattaaccaaccacagagaaagtgtc

SEQ ID NO: 17577 - DNA, 600 bp, Chicken  19866894225861_1
ctgattatcagattatagctgtttcacacaagctgttctcatatcaaatctcacagaggcgtgggtgtttgctttgcttttattttccttctaattcaaataactaaacatcaaaattaatctgatttcatttaaacttgctgcactattttgatccccatcatcttggttctacatgctgcgtttgggtattattagaagagtctatagcttcaaaggaaaaatatatcagctctaaaagttattagcatcgtaaaaaaaatattttaaaagacttctaaagtagatattccataaaaygttcaccttctgatatctaatgtctaattcttattttatgccatatgtaagtcctaccaacaatacctatagtaaaatatagaaygagatctcattacattcaaaaactgtaattcttggtttttttttctttactcagctactgaagacaacattcaaatcttttatactacatgaagagcttttgatcagcaattttctacatgcttttatgttggttatgttcagcttgtatgttcagtgggagttttatctccatccatcttatatagaatgtaatacaaccttattcagaatgtc

SEQ ID NO: 17578 - DNA, 600 bp, Chicken  19866894225861_2
tccttctaattcaaataactaaacatcaaaattaatctgatttcatttaaacttgctgcactattttgatccccatcatcttggttctacatgctgcgtttgggtattattagaagagtctatagcttcaaaggaaaaatatatcagctctaaaagttattagcatcgtaaaaaaaatattttaaaagacttctaaagtagatattccataaaaygttcaccttctgatatctaatgtctaattcttattttatgccatatgtaagtcctaccaacaatacctatagtaaaatatagaaygagatctcattacattcaaaaactgtaattcttggtttttttttctttactcagctactgaagacaacattcaaatcttttatactacatgaagagcttttgatcagcaattttctacatgcttttatgttggttatgttcagcttgtatgttcagtgggagttttatctccatccatcttatatagaatgtaatacaaccttattcagaatgtcacagaaaatgaggaatgttactgtgacgctatctactaaatgtacaagaggaagatagcactttagtttttgtcgattcacacct

SEQ ID NO: 17579 - DNA, 600 bp, Chicken  19866894225865_1
gggtaaaaactatttgggagtaaatgctaggctcaaaatgagtagtgttttggctgtgggaggaattggattcttcagcatgtcacacacgggaggaggggaggaatgctgtcagtgtgttggggctcagtcttttggtcgtggctcttcgaggcagccctgagccttatgatctgtgaaggaaacccctgccactccacatccacacggtgatgggttactgtggtggtgctgtcatgtcagagtagggatggcactgctgtcctgtgctgtcccacacaggtgggaatatgtgctgarcctaactgcttyttccgcaggatgagagaattcatgtcattaaaygaagctttagccttttctgtttagtctgtgaatttctctgctgttactgttgtttatgacacttatttttgttgtttttctttcccaggtatttttatggcctctgtcacagtagcgtctcagcgtctcgcaggcatttatggatttattctgagaacgttcctgtgaggtaggaaacattattacctgcgttttacagactgagctgaggcacattgagataaaggttgcaggaggagtctgttgcaccgccag

SEQ ID NO: 17580 - DNA, 600 bp, Chicken  19866894225865_2
tttgggagtaaatgctaggctcaaaatgagtagtgttttggctgtgggaggaattggattcttcagcatgtcacacacgggaggaggggaggaatgctgtcagtgtgttggggctcagtcttttggtcgtggctcttcgaggcagccctgagccttatgatctgtgaaggaaacccctgccactccacatccacacggtgatgggttactgtggtggtgctgtcatgtcagagtagggatggcactgctgtcctgtgctgtcccacacaggtgggaatatgtgctgarcctaactgcttyttccgcaggatgagagaattcatgtcattaaaygaagctttagccttttctgtttagtctgtgaatttctctgctgttactgttgtttatgacacttatttttgttgtttttctttcccaggtatttttatggcctctgtcacagtagcgtctcagcgtctcgcaggcatttatggatttattctgagaacgttcctgtgaggtaggaaacattattacctgcgttttacagactgagctgaggcacattgagataaaggttgcaggaggagtctgttgcaccgccagcagtcaaactct

SEQ ID NO: 17581 - DNA, 600 bp, Chicken  19866894225865_3
tgttttggctgtgggaggaattggattcttcagcatgtcacacacgggaggaggggaggaatgctgtcagtgtgttggggctcagtcttttggtcgtggctcttcgaggcagccctgagccttatgatctgtgaaggaaacccctgccactccacatccacacggtgatgggttactgtggtggtgctgtcatgtcagagtagggatggcactgctgtcctgtgctgtcccacacaggtgggaatatgtgctgarcctaactgcttyttccgcaggatgagagaattcatgtcattaaaygaagctttagccttttctgtttagtctgtgaatttctctgctgttactgttgtttatgacacttatttttgttgtttttctttcccaggtatttttatggcctctgtcacagtagcgtctcagcgtctcgcaggcatttatggatttattctgagaacgttcctgtgaggtaggaaacattattacctgcgttttacagactgagctgaggcacattgagataaaggttgcaggaggagtctgttgcaccgccagcagtcaaactctgattgccaacaacttgtttattgtcctaatcac

SEQ ID NO: 17582 - DNA, 600 bp, Chicken  19866894225865_4
acacttatttttgttgtttttctttcccaggtatttttatggcctctgtcacagtagcgtctcagcgtctcgcaggcatttatggatttattctgagaacgttcctgtgaggtaggaaacattattacctgcgttttacagactgagctgaggcacattgagataaaggttgcaggaggagtctgttgcaccgccagcagtcaaactctgattgccaacaacttgtttattgtcctaatcacaaacccagctacctgtctttttcctttcccttttttcccctctttcttttcttcctgstctgatgattagcagaaacaatctgcaaatggctgggacgacctctggaaaatatgattaggtttcctgctgtccttttttaacactgttacttatgagttaaaatgcctttctaaaaatatcagcagatctgtttatgttaaatgattaacatgtttagactttcaacagataagctgtcatgcttctttttgagtcagtaactcctttatcctacctgtctgggcttgtggctgttgcattcttacctgcctaagctaatgccatcccaatcacctaaagcaatgccaagaatttcat

SEQ ID NO: 17583 - DNA, 600 bp, Chicken  19866894225867_1
aaaattagctcggttttatgcgtgtttatttcctgtgcagccaagaaaagaagatataaataaatctcaattaaatggccttgtatctaaatatcatggtttgagatgtgtgcattcctggggttagtccttaccttacagagaggtagtttcctttgtatcttcatcctcctaattaatgattaggtaatatacagatggtcaatcacaagaaagtctttttttaatcactgtagttcatgtaattcttgtccctgagtgcactggggcagagatcagtattcttatggcagaaggctyagacaaatagtccagcttgtgtcaatggactctgagcactgatggaaagcaaggctttcctgagcatgtgcatttttccaaaatgcagcccaccagccgttcttgatgcaatgggatggttggtcccagggttacccaggggccaacctttctttatttgtgaattccaccatgttttcagacactttcgctcttggccatccactgagtgtctagcatagcattctgaaaaggattaggaaaygtgtcctttgtgycrctttgtaatagaattgatacagttaggcatgtcagtctaaa

SEQ ID NO: 17584 - DNA, 532 bp, Chicken  19866894225867_2
attcttgtccctgagtgcactggggcagagatcagtattcttatggcagaaggctyagacaaatagtccagcttgtgtcaatggactctgagcactgatggaaagcaaggctttcctgagcatgtgcatttttccaaaatgcagcccaccagccgttcttgatgcaatgggatggttggtcccagggttacccaggggccaacctttctttatttgtgaattccaccatgttttcagacactttcgctcttggccatccactgagtgtctagcatagcattctgaaaaggattaggaaaygtgtcctttgtgycrctttgtaatagaattgatacagttaggcatgtcagtctaaaataagcacaaatcatttgcagaagtatctccccctcaagagtgctgcacacacatgtatgtgcaattttcacaggcaaagaagacactcaaattgtctaactgtaggaatgctattttattggtgtatcaaaagatgcatgcttttaaaaatgctaggattttctcttgtttactg

SEQ ID NO: 17585 - DNA, 519 bp, Chicken  19866894225867_3
agtgcactggggcagagatcagtattcttatggcagaaggctyagacaaatagtccagcttgtgtcaatggactctgagcactgatggaaagcaaggctttcctgagcatgtgcatttttccaaaatgcagcccaccagccgttcttgatgcaatgggatggttggtcccagggttacccaggggccaacctttctttatttgtgaattccaccatgttttcagacactttcgctcttggccatccactgagtgtctagcatagcattctgaaaaggattaggaaaygtgtcctttgtgycrctttgtaatagaattgatacagttaggcatgtcagtctaaaataagcacaaatcatttgcagaagtatctccccctcaagagtgctgcacacacatgtatgtgcaattttcacaggcaaagaagacactcaaattgtctaactgtaggaatgctattttattggtgtatcaaaagatgcatgcttttaaaaatgctaggattttctcttgtttactg

SEQ ID NO: 17586 - DNA, 517 bp, Chicken  19866894225867_4
tgcactggggcagagatcagtattcttatggcagaaggctyagacaaatagtccagcttgtgtcaatggactctgagcactgatggaaagcaaggctttcctgagcatgtgcatttttccaaaatgcagcccaccagccgttcttgatgcaatgggatggttggtcccagggttacccaggggccaacctttctttatttgtgaattccaccatgttttcagacactttcgctcttggccatccactgagtgtctagcatagcattctgaaaaggattaggaaaygtgtcctttgtgycrctttgtaatagaattgatacagttaggcatgtcagtctaaaataagcacaaatcatttgcagaagtatctccccctcaagagtgctgcacacacatgtatgtgcaattttcacaggcaaagaagacactcaaattgtctaactgtaggaatgctattttattggtgtatcaaaagatgcatgcttttaaaaatgctaggattttctcttgtttactg

SEQ ID NO: 17587 - DNA, 600 bp, Chicken  19866894225872_1
cgcagcacagccctggaggaggtggcagcgcccggcacgatgttttttatcccgttgtgggtgggattttccagcgctcgccgttgggccccgttccgctccagctgcagctttattctccatttcaaaggcagccgaagaaggcagacggttgcaacgccactgccatatcgagcgctcccaggggacggctgccccggcaccgcactgcgcccatggggatggagtgctcagagaggggatggtgctgggtgccccagggcgtccacaccaatggatgtctgcatggctccacgtgcyctcacagcccgtgctgggttctcccctcacttcctcgttagaaataataatagtaaagatgccttcatctgtaggcagaaggactgcgtcaacggagctgagctaaggtggcacaaacccactgggaaccctgaaacaaacaaaacctttttctctcttctctcagcgcttcagcstttcctttcaaattggtttgattctttgtttttctataggcagcctgtctgtatagagacacgtgtgtagctgttggcagaggcacggagtttccactcggcattaatgccaaattaaagcgtt

SEQ ID NO: 17588 - DNA, 600 bp, Chicken  19866894225872_2
gctcccaggggacggctgccccggcaccgcactgcgcccatggggatggagtgctcagagaggggatggtgctgggtgccccagggcgtccacaccaatggatgtctgcatggctccacgtgcyctcacagcccgtgctgggttctcccctcacttcctcgttagaaataataatagtaaagatgccttcatctgtaggcagaaggactgcgtcaacggagctgagctaaggtggcacaaacccactgggaaccctgaaacaaacaaaacctttttctctcttctctcagcgcttcagcstttcctttcaaattggtttgattctttgtttttctataggcagcctgtctgtatagagacacgtgtgtagctgttggcagaggcacggagtttccactcggcattaatgccaaattaaagcgttatagcttcagtagctctttttaccagggtattaataaccacctcagacaccgcagggcactttattaatcatttgttcgtgggatggggtgggcggtgtgggcacattggccaaagatgcatcatccgaactgggaatcctaactcaggtgcgcggggctgggatgggcacatggc

SEQ ID NO: 17589 - DNA, 600 bp, Chicken  19866894225873_1
atatgaaggatttcacccagcctattaataagcagaattacagatagttggggagtaaatcatccaccattttcagtcacatcaacaatagattgagaaaaattactcattcatttttataatcctttaattcttgcagatgttcctttgaaaattgatttaaattgatgaatcacagggcaagattggtgtaaatttttcaacctgaagacaattaccttcgatagagtaatcacagcacacatccctgtacctcctataactcatcggttctcaatgtttaatgccactgcaactctrgagccagctcctgaggcaacaagagcaaatggtttgtaattagatgaaacccagcctgttctgataccttttttctctcctctattcctcagatagaagaggtgggcaagataaagaaacaaaaattcaccttgacttggggcaagtactcaaagaaggttggaggattcaggaagggaagcagtgggagccttccctgtgccctgcccaacctggggacactgcagcatrcccaccaggagcaacacccacacctttgtgccgtaacttcacagaaagactgaatgagctccaggctca

SEQ ID NO: 17590 - DNA, 488 bp, Chicken  19866894225873_2
atcacagcacacatccctgtacctcctataactcatcggttctcaatgtttaatgccactgcaactctrgagccagctcctgaggcaacaagagcaaatggtttgtaattagatgaaacccagcctgttctgataccttttttctctcctctattcctcagatagaagaggtgggcaagataaagaaacaaaaattcaccttgacttggggcaagtactcaaagaaggttggaggattcaggaagggaagcagtgggagccttccctgtgccctgcccaacctggggacactgcagcatrcccaccaggagcaacacccacacctttgtgccgtaacttcacagaaagactgaatgagctccaggctcatgccagtgccaactgtgtggcagaactcttcatcagccagagggaaaagcaaagcatcttccagctcctgacatggtttggttctgcaaagaaaatcaggatggagttcatccacttca

SEQ ID NO: 17591 - DNA, 600 bp, Chicken  19866894225877_1
gtctccataatccataggctcatccgctttaaaagaagcactaaaactagctgaaaagacagttgatctatttacaaaagcctaattacttatttaccagaaaatgaatgtaaagttcattcaggtggatgttaaaggtcttgtgttctttgtctgtgactgttttcattctttgaacccagttctcagaagaatttggcatgttcagtgccatgctcagggggtatatttcagtatttgttatcctgtttgttctttcgcgtacattcagtgtgtacatatcttctttactgcttcctyctcgctgtgtcaatatgaacttacaaagaaataaatacaacattgagtgctggttttgctgcttgctgttgcttcaaacctgcaagctcgtcttttgtgctgcgaaaaatccagagcagcacgttaggtatgtccaggcaaagctcagtgtatgtacaaagtcattgcagagtcaccaaagtaatggcaagttaagatattatggtgtttgtccttcagcctgtgtgtcacaaaagagtgttggaaagaacaagcgccttcaggctgaactgcagctcaggcagcactgagttttgttat

SEQ ID NO: 17592 - DNA, 600 bp, Chicken  19866894225880_1
aactggactttgctataaaatcttcctacgggatagcaaacctaattgcaaaaaatcaaagccatttcctggatgtgcgtttgttaagcaatgcatggatggcatgtgtcctgataaaacaagggatttttctcagatcattttgtctcacctgattatagccaggtctactgaaggaataggaaaacctatccaaaaaagtcggagagtacagctgctaatttcaaattttacgccttgacaatagatgaaagtagtaatgctacagacacggctcaatttggcattttcgttagaggwgttggtaacaaatatagtgtcactgaagaaattgcttctttggtgccattgaaagacacagattgatttgtatgaaagagtgaaaaaacatattgaagccattttctttcacctttgtcaacgtatctggtatagctactgatggtgtcccagtgatggtacaaaagggggacttataaaatgaatagaagatgatgcagttaccaccagtaactcacgtttgatgaacaaccactgcatcagcacctctcctatgttggagcacccctcctatgtagataggctgaaggaactgggctt

SEQ ID NO: 17593 - DNA, 600 bp, Chicken  19866894225881_1
caatactggggattctgtaggctattctttcaatgaaaataagatacaaagcgagaccagtacaattcaaagaatttttttgcatttcatgagaaagcaaacaaacaattctcagtttatattatgttgcttcttgaagaaaattaactaacatgaagcatatcatttcattttattttaacatttatttcaaagggaggacaaaagaccaatcagaataaaccagtaaagattatacgcttgctatcccagcaagacttatagtatcactgtctaggattctttgtgttgatgggtgtytggaaaatggaaaacaatgctttgcttttactttagagacacatttcacgttttagtgcatgcattctgctaacctgtttttaaggattgaaagtagcagaatgagaaggtgacattgataccatatcaggtctgaaggttccactactctgttagaaacatcaccgtatgaccaggacattcataactcctgagatatcaggcattatattcaagactcatttcccctccccagtctcaaaataaaagttgtatattcttccttcacacacgtatgaatgtcccattaaaattaatcta

SEQ ID NO: 17594 - DNA, 600 bp, Chicken  19866894225885_1
cattggtgtttaactgttctgcttgcaagcctgatttgacctaagacaagagttgggaatggaggggaggaaagggagacaggctgggcaggaagcagagtccagtgaactttcacaaaccttaaacaactgagcctggccgggattcagcacgtaagatggaccaaggttcagggtgatttattttatctggaatcatttcacatctctggatgtaatgtgtggggttggctccttcccctacagaaagtaagccttctgactcaggctttcaaagtgatcattcatttatctatagcrcagcatttgccttctctgcattcacaaatttggaactaattccctgtacgacatagcatttaatgagtttgtctcctgagttctgcaaagcatttaaaatccttttgatggcattttctctttagtaattaacgtcttatcagtgaattttgcagagaacaatggcctgattctcttctgatgccattttacatctccgtagctccactgactgcaaatgaattactcctgttttgcatactgtgagaggagaattaagaccttaagcctaccactatttaatcacatgctttgaactca

SEQ ID NO: 17595 - DNA, 600 bp, Chicken  19866894225893_1
aaatataccaatgcatggcagcataataataataaaagcagggacattccccagtgccaacatgcacaccttccctatggagtgtgttaattgcatatttccttgcatgggaaaggaccaagatctaaaacagtgaatttcctgaagaaaatattcctgaattgccaggattcggtgaatcccttcagttctggaagaattctgtagctcataaataatggatcttcttgctattttgacttgccagtaaagcaggtggtggtgaagatgtgaatgtgatcactgtcatcatctttgctkctgtaacagctaacaggcagtaaagctttgttttttcatttcaggtgggtgctaagttgaactatgattgtcatcccytaatggctgacaactgggaaagcatcactggagaaggaccaccaatgaggcagactttgcagaaaggtgaaaggagaggtaaaaagctttgagtatcttaggaagttccctgctgttacttggatgcctggttgctgtttgatgccctcatgrtttgtatgtttctcaaaccaggcgacatgaataatgtaatgaattttaaagcaacaaaaaaagactcag

SEQ ID NO: 17596 - DNA, 600 bp, Chicken  19866894225893_2
ggagtgtgttaattgcatatttccttgcatgggaaaggaccaagatctaaaacagtgaatttcctgaagaaaatattcctgaattgccaggattcggtgaatcccttcagttctggaagaattctgtagctcataaataatggatcttcttgctattttgacttgccagtaaagcaggtggtggtgaagatgtgaatgtgatcactgtcatcatctttgctkctgtaacagctaacaggcagtaaagctttgttttttcatttcaggtgggtgctaagttgaactatgattgtcatcccytaatggctgacaactgggaaagcatcactggagaaggaccaccaatgaggcagactttgcagaaaggtgaaaggagaggtaaaaagctttgagtatcttaggaagttccctgctgttacttggatgcctggttgctgtttgatgccctcatgrtttgtatgtttctcaaaccaggcgacatgaataatgtaatgaattttaaagcaacaaaaaaagactcagtgcacacagtgattgaagtacttccctgtgggagttagaaaagrgaaacacagccactggttgcagatagggatgaaa

SEQ ID NO: 17597 - DNA, 600 bp, Chicken  19866894225893_3
tattttgacttgccagtaaagcaggtggtggtgaagatgtgaatgtgatcactgtcatcatctttgctkctgtaacagctaacaggcagtaaagctttgttttttcatttcaggtgggtgctaagttgaactatgattgtcatcccytaatggctgacaactgggaaagcatcactggagaaggaccaccaatgaggcagactttgcagaaaggtgaaaggagaggtaaaaagctttgagtatcttaggaagttccctgctgttacttggatgcctggttgctgtttgatgccctcatgrtttgtatgtttctcaaaccaggcgacatgaataatgtaatgaattttaaagcaacaaaaaaagactcagtgcacacagtgattgaagtacttccctgtgggagttagaaaagrgaaacacagccactggttgcagatagggatgaaagaaagaggtggtttgcccaaagattcagttcatctttccaatggaaaaaaaccattcagacaagtgaacatctcttctggagtagtgtgtcataggtacctctgcaagctcatgtatctgcaaaataaagggagtcataaataatttcccaga

SEQ ID NO: 17598 - DNA, 511 bp, Chicken  19866894225893_4
gtgggtgctaagttgaactatgattgtcatcccytaatggctgacaactgggaaagcatcactggagaaggaccaccaatgaggcagactttgcagaaaggtgaaaggagaggtaaaaagctttgagtatcttaggaagttccctgctgttacttggatgcctggttgctgtttgatgccctcatgrtttgtatgtttctcaaaccaggcgacatgaataatgtaatgaattttaaagcaacaaaaaaagactcagtgcacacagtgattgaagtacttccctgtgggagttagaaaagrgaaacacagccactggttgcagatagggatgaaagaaagaggtggtttgcccaaagattcagttcatctttccaatggaaaaaaaccattcagacaagtgaacatctcttctggagtagtgtgtcataggtacctctgcaagctcatgtatctgcaaaataaagggagtcataaataatttcccagaataaatatcttcacgtttcatgca

SEQ ID NO: 17599 - DNA, 600 bp, Chicken  19866894225894_1
gtctcccatatatttatattgctcctaccagccttgtgctgatcccccgggtgccctggagcatgacaggtgggctcctaagcaaggccagttgctttgacctatttctgtccattgagtcttgaaaacgactacatccaagtagcattaggtagctgagcattaggtcttgacagccttgttctccttctcactgtgttttatctttagtctaaattgtttttgctgttatttttatgtatgcagagtatctcatcagtaaagagatgagactacatatttgaggcaagaattctttgrgtagaattgcacataaaaagagaacagcaaaccggaaataatttgttatgcagtttgtcccaaaagtagtttacatttgtaaatacatagattttatatactaactgctcaaattctttgtgtaaatatagggtgatgtgagagaggagaaaagcaataaagaaactaagctttgtaaacaatttcagcagatgttcttgaagaaatacccaggcagttctcatgctcaaatctgtgctggatcagtgggatgtcatcatgctcacctgggtgctttgaagatgttatgaagatcagaga

SEQ ID NO: 17600 - DNA, 599 bp, Chicken  19866894225895_1
  misc_feature (1)..(199): n is any nucleotide
nnnnnnnnnnnnnnnnnnnnnnnnnnnnnnnnnnnnnnnnnnnnnnnnnnnnnnnnnnnnnnnnnnnnnnnnnnnnnnnnnnnnnnnnnnnnnnnnnnnnnnnnnnnnnnnnnnnnnnnnnnnnnnnnnnnnnnnnnnnnnnnnnnnnnnnnnnnnnnnnnnnnnnnnnnnnnnnnnnnnnnnnnnnnnnnnnnnnnnnatgagatctagaaaatcgatacttgtcagaaataaaaacaagatcagtggaaaagacaaatttgctgtaggactgcttttagtccttttttgtattctttmccaagtttggaaatgttctggtttttaacaatcagcttattgtcagctgctaaatattaatttctgctggcttttaagctgaaattggattgcaaggtgatttgcaagggaagtcattcaaccttttctgaattctggttcaaaaggcacatgctttttaatgcaactggtagccgcattttctatttctatagcgcrtggtaatgccttgtacttgctgtaacagcgttaccttgagaaacccctattacttagcagtttcattcaactttaagttagaatttacagagaaacattta

SEQ ID NO: 17601 - DNA, 599 bp, Chicken  19866894225895_2
  misc_feature (1)..(1): n is any nucleotide
natgagatctagaaaatcgatacttgtcagaaataaaaacaagatcagtggaaaagacaaatttgctgtaggactgcttttagtccttttttgtattctttmccaagtttggaaatgttctggtttttaacaatcagcttattgtcagctgctaaatattaatttctgctggcttttaagctgaaattggattgcaaggtgatttgcaagggaagtcattcaaccttttctgaattctggttcaaaaggcacatgctttttaatgcaactggtagccgcattttctatttctatagcgcrtggtaatgccttgtacttgctgtaacagcgttaccttgagaaacccctattacttagcagtttcattcaactttaagttagaatttacagagaaacatttacagagaaacaaatccgcattaacatgaatgatatcatatgaggtattttaaatgattagtaattaaaatttagtagaatgataatatggtaattaaatatcaattgtttgcacaggaccacttattgagtttaataagtatgtaaaagatattaatctagttgtcatgaaattacctcattgagggggagtgggaata

SEQ ID NO: 17602 - DNA, 599 bp, Chicken  19866894225897_1
  misc_feature (1)..(56): n is any nucleotide
nnnnnnnnnnnnnnnnnnnnnnnnnnnnnnnnnnnnnnnnnnnnnnnnnnnnnnnncgtttgagctcttaaataaatgttgagcaatttggagttttctctagctggtaaggaattatacagcgtggaggtcttttaaaataaaaggtaagcctagagaaaagaagaacagaataaggcttgaccagggaataacaagagtctctctttggtgttttcctgagaaagctgtgtgcatcttttttgttcgttgcccgaggtgttactgggagtaactttgttctgccatgtccaggtcctwcaggaagatgctccctgccagtccagtactggctgtgttctcttttaactgcttttccactatgtaatttcattacagatgacgtcatccttaaggctttttgctactcttgtatggtttgatgtgatcaacaaaacctattacactgatgtgtgtcctaatgtattaaaatctaatttttgctggttgtttgtcgtactctgctctgtcagctactttcaacgtggctgctatagcrgatgcaattactttgggggattcgtacatgtggaaatgggtttagaaattggagagcactg

SEQ ID NO: 17603 - DNA, 600 bp, Chicken  19866894225897_2
ttttttgttcgttgcccgaggtgttactgggagtaactttgttctgccatgtccaggtcctwcaggaagatgctccctgccagtccagtactggctgtgttctcttttaactgcttttccactatgtaatttcattacagatgacgtcatccttaaggctttttgctactcttgtatggtttgatgtgatcaacaaaacctattacactgatgtgtgtcctaatgtattaaaatctaatttttgctggttgtttgtcgtactctgctctgtcagctactttcaacgtggctgctatagcrgatgcaattactttgggggattcgtacatgtggaaatgggtttagaaattggagagcactggcttaaaagagacggctctaatgctagctgcaccaaaatcttttctgttctcatgatgcttaatagtggataggaatttayttgatacttttatgaggtctacttcagttcatgccctgtttattttatgatttgaatagtgtctgttcatgttattgcatgatgttttgataccaaggtgaagttttgattgcctattcagcttcctatagaacatcaattattgcaataacagaaca

SEQ ID NO: 17604 - DNA, 600 bp, Chicken  19866894225897_3
gacgtcatccttaaggctttttgctactcttgtatggtttgatgtgatcaacaaaacctattacactgatgtgtgtcctaatgtattaaaatctaatttttgctggttgtttgtcgtactctgctctgtcagctactttcaacgtggctgctatagcrgatgcaattactttgggggattcgtacatgtggaaatgggtttagaaattggagagcactggcttaaaagagacggctctaatgctagctgcaccaaaatcttttctgttctcatgatgcttaatagtggataggaatttayttgatacttttatgaggtctacttcagttcatgccctgtttattttatgatttgaatagtgtctgttcatgttattgcatgatgttttgataccaaggtgaagttttgattgcctattcagcttcctatagaacatcaattattgcaataacagaacatacagartctgttacataaacatgctcrtacagcttgccctgtcctgatctctaaattcagtctctggagttcctcacctgaaaaatgtggctacttttggaacttggtttcctttccctttttgctgatgtgtttgaacac

SEQ ID NO: 17605 - DNA, 600 bp, Chicken  19866894225897_4
ttactttgggggattcgtacatgtggaaatgggtttagaaattggagagcactggcttaaaagagacggctctaatgctagctgcaccaaaatcttttctgttctcatgatgcttaatagtggataggaatttayttgatacttttatgaggtctacttcagttcatgccctgtttattttatgatttgaatagtgtctgttcatgttattgcatgatgttttgataccaaggtgaagttttgattgcctattcagcttcctatagaacatcaattattgcaataacagaacatacagartctgttacataaacatgctcrtacagcttgccctgtcctgatctctaaattcagtctctggagttcctcacctgaaaaatgtggctacttttggaacttggtttcctttccctttttgctgatgtgtttgaacacaaagtaatggcagtagtagccaggtatataaaccagtcatcccactgcatgaattagggcagatttctcccaagggctttgtgtggccagctttctacccaggctgtctgctgctgggaattgttttatttggatttcaggcctaaatacacgtaggaggttagt

SEQ ID NO: 17606 - DNA, 600 bp, Chicken  19866894225897_5
tgtggaaatgggtttagaaattggagagcactggcttaaaagagacggctctaatgctagctgcaccaaaatcttttctgttctcatgatgcttaatagtggataggaatttayttgatacttttatgaggtctacttcagttcatgccctgtttattttatgatttgaatagtgtctgttcatgttattgcatgatgttttgataccaaggtgaagttttgattgcctattcagcttcctatagaacatcaattattgcaataacagaacatacagartctgttacataaacatgctcrtacagcttgccctgtcctgatctctaaattcagtctctggagttcctcacctgaaaaatgtggctacttttggaacttggtttcctttccctttttgctgatgtgtttgaacacaaagtaatggcagtagtagccaggtatataaaccagtcatcccactgcatgaattagggcagatttctcccaagggctttgtgtggccagctttctacccaggctgtctgctgctgggaattgttttatttggatttcaggcctaaatacacgtaggaggttagtgctaggatcacttatttattg

SEQ ID NO: 17607 - DNA, 600 bp, Chicken  19866894225899_1
gcctggctaatgcttttagcttgaatccaggcttcttcctttcggggtggattgttaatgttctgctccagagtaagcaggccaaggacagcctcaagggagcactcccattaaggagtgcaaaggaaatgagagatccttgaagagcaggagaattgatcaggaacttcttttttgctaaaacctttgtagacttctaagtctggaaaatctcaataacaccaagtatgttaaccatgatggtcaggaaaagactgaaacagtagttgaggtgggaaaaggtctttggagatcattaaycctgcctycctagctcaaagcaggaagagtagcaggttgttcaggagcgcgtccagctggactttgagaatctccaaggatggagactccacagccactctgggatactttttccaacattcaatcaccctcacagtgaaaaaagctgtacttctgtgttcattgcctcttgtcttggcagagagcaaccactgatatgaatctgcctttgtttgtcaatttctctctccacccataaacacaacctcaatgatccctctggagtcttctgcatgttgagcagtctcagctctctcaacc

SEQ ID NO: 17608 - DNA, 600 bp, Chicken  19866894225899_2
aatgcttttagcttgaatccaggcttcttcctttcggggtggattgttaatgttctgctccagagtaagcaggccaaggacagcctcaagggagcactcccattaaggagtgcaaaggaaatgagagatccttgaagagcaggagaattgatcaggaacttcttttttgctaaaacctttgtagacttctaagtctggaaaatctcaataacaccaagtatgttaaccatgatggtcaggaaaagactgaaacagtagttgaggtgggaaaaggtctttggagatcattaaycctgcctycctagctcaaagcaggaagagtagcaggttgttcaggagcgcgtccagctggactttgagaatctccaaggatggagactccacagccactctgggatactttttccaacattcaatcaccctcacagtgaaaaaagctgtacttctgtgttcattgcctcttgtcttggcagagagcaaccactgatatgaatctgcctttgtttgtcaatttctctctccacccataaacacaacctcaatgatccctctggagtcttctgcatgttgagcagtctcagctctctcaacctcttctga

SEQ ID NO: 17609 - DNA, 600 bp, Chicken  19866894225904_1
ccttggtggtaatggacttgttggcggtctccttggtggcggtggacccgttggcggtctcctcggcggtgatggtcttgtgggcggtctcctcggcgggggtctccttggaggaactggtaaccagggtcaaggctcacttcttggaggaggtctccttggcaaggatggtctgctgggcaccgtgcaaggactcacagggtgagtgagagtggtagacgtgtccccgagcagctctccatcattggccatgcctgtggtctggacatggcacctacattgtgctcttagggtgagttsataaatgagggttgagaagttgggagtttctgccatgaggctgcatgtgcttatcatgagctggccctggctgaaagggaccccaggatcacagctgtgtgaccaaccacagcagcgggggctgagaggaccccagggaagtaagaagtagcaaatgttattcactgcctttccttgttccaactccaggctgagaattgtgaacatcactctccccaaaataactctgcgcttcctgccaggcattggtctccagctgaatatctacacccagctgctgatagatggcaatgggtaagg

SEQ ID NO: 17610 - DNA, 599 bp, Chicken  19866894225905_1
  misc_feature (1)..(56): n is any nucleotide
nnnnnnnnnnnnnnnnnnnnnnnnnnnnnnnnnnnnnnnnnnnnnnnnnnnnnnnntcctctcagtaccttctttgcaagcagccctgggaagcaagagagagaagacagtgacagaacgcggggagtttccagcaggatgtcccagatcaccaaagacatggcagtaaggatgctgcacatgactcagttcctgaggaagaagggccccatcacggtatggattttctcacccccatcaccccatcacttttataggtatgaagatgccttctagagaaggcacccaactgcccagtgyctgctgaaaaacccrtgttatctcatccttctgaaagtggcactgggtgcatttgccccagtaatttcaggaattactttcctgaaaggagatgcaaatctttatgrctagtccattcctcattccagaatacacctggcctttctggacgctcccatcttacaggaaagatggatttttttcctcctccccatcacatttccattttgttttagagcaaggagcagcttgttgcctgtgctaggcaratagcttctgatgggcaggcatttgttacattcggccgcatcattgccaac

SEQ ID NO: 17611 - DNA, 599 bp, Chicken  19866894225905_2
  misc_feature (1)..(41): n is any nucleotide
nnnnnnnnnnnnnnnnnnnnnnnnnnnnnnnnnnnnnnnnntcctctcagtaccttctttgcaagcagccctgggaagcaagagagagaagacagtgacagaacgcggggagtttccagcaggatgtcccagatcaccaaagacatggcagtaaggatgctgcacatgactcagttcctgaggaagaagggccccatcacggtatggattttctcacccccatcaccccatcacttttataggtatgaagatgccttctagagaaggcacccaactgcccagtgyctgctgaaaaacccrtgttatctcatccttctgaaagtggcactgggtgcatttgccccagtaatttcaggaattactttcctgaaaggagatgcaaatctttatgrctagtccattcctcattccagaatacacctggcctttctggacgctcccatcttacaggaaagatggatttttttcctcctccccatcacatttccattttgttttagagcaaggagcagcttgttgcctgtgctaggcaratagcttctgatgggcaggcatttgttacattcggccgcatcattgccaacatctgcctggacaag

SEQ ID NO: 17612 - DNA, 600 bp, Chicken  19866894225905_3
cagtgacagaacgcggggagtttccagcaggatgtcccagatcaccaaagacatggcagtaaggatgctgcacatgactcagttcctgaggaagaagggccccatcacggtatggattttctcacccccatcaccccatcacttttataggtatgaagatgccttctagagaaggcacccaactgcccagtgyctgctgaaaaacccrtgttatctcatccttctgaaagtggcactgggtgcatttgccccagtaatttcaggaattactttcctgaaaggagatgcaaatctttatgrctagtccattcctcattccagaatacacctggcctttctggacgctcccatcttacaggaaagatggatttttttcctcctccccatcacatttccattttgttttagagcaaggagcagcttgttgcctgtgctaggcaratagcttctgatgggcaggcatttgttacattcggccgcatcattgccaacatctgcctggacaagagatgttctgcagagctgctgtgtgctgcagagcagacccacaccatcagcagccagctcgccatcgtggccaggtgagttgctggtaacaag

SEQ ID NO: 17613 - DNA, 600 bp, Chicken  19866894225905_4
cttttataggtatgaagatgccttctagagaaggcacccaactgcccagtgyctgctgaaaaacccrtgttatctcatccttctgaaagtggcactgggtgcatttgccccagtaatttcaggaattactttcctgaaaggagatgcaaatctttatgrctagtccattcctcattccagaatacacctggcctttctggacgctcccatcttacaggaaagatggatttttttcctcctccccatcacatttccattttgttttagagcaaggagcagcttgttgcctgtgctaggcaratagcttctgatgggcaggcatttgttacattcggccgcatcattgccaacatctgcctggacaagagatgttctgcagagctgctgtgtgctgcagagcagacccacaccatcagcagccagctcgccatcgtggccaggtgagttgctggtaacaaggagtctccctgaggctcaaagagatgtgcacagtggcctccagaggtctgtgttggatctgggtgtagcacttagagctcagttacagttcaacaggctctcctctttctgctgctgccagcagccctttcctcccattta

SEQ ID NO: 17614 - DNA, 599 bp, Chicken  19866894225926_1
  misc_feature (1)..(78): n is any nucleotide
nnnnnnnnnnnnnnnnnnnnnnnnnnnnnnnnnnnnnnnnnnnnnnnnnnnnnnnnnnnnnnnnnnnnnnnnnnnnnntcttttttttattgttctatgatttttggaggatttcctggatgaagaatgtctcaatgtgcaatcactgggtattcaagtaatcgctgctcagagaggaagctgtgcgctcactcgtgagtctcgcttgtctggttgtatgggaccggtattaaaggttggagctcagagataaatgctgtgagtaagcaactacacacctctgtcttgataagttattgratcgcccttaacaaagttatcagggcagaactgggggtggtcagggcgtagctctgcagcgtcctgcgtactggagctcctaccctgcttgctggcagcctcactgggtcagatgggcaattcyaagagtgacatgcttgacaggtctgacgccagcatcctgrcgtgcttgttttgtgtgtcacccaaccacgttgtggccgatggcactgtctccagctgtgggatttgccrgrcttaaggaatcccargcggtggggcagcgtggatggtgacacatggaatctgaccttggctgc

SEQ ID NO: 17615 - DNA, 600 bp, Chicken  19866894225926_2
gaatgtctcaatgtgcaatcactgggtattcaagtaatcgctgctcagagaggaagctgtgcgctcactcgtgagtctcgcttgtctggttgtatgggaccggtattaaaggttggagctcagagataaatgctgtgagtaagcaactacacacctctgtcttgataagttattgratcgcccttaacaaagttatcagggcagaactgggggtggtcagggcgtagctctgcagcgtcctgcgtactggagctcctaccctgcttgctggcagcctcactgggtcagatgggcaattcyaagagtgacatgcttgacaggtctgacgccagcatcctgrcgtgcttgttttgtgtgtcacccaaccacgttgtggccgatggcactgtctccagctgtgggatttgccrgrcttaaggaatcccargcggtggggcagcgtggatggtgacacatggaatctgaccttggctgcttttaatgaattgagaaatgtgagcactgattgcctgtggggctgacctcacccttgccacccatctctgtggggctggggcagcccctggtgtgtctgtgtgctgcctggggcagaggcagcag

SEQ ID NO: 17616 - DNA, 600 bp, Chicken  19866894225926_3
ctgctcagagaggaagctgtgcgctcactcgtgagtctcgcttgtctggttgtatgggaccggtattaaaggttggagctcagagataaatgctgtgagtaagcaactacacacctctgtcttgataagttattgratcgcccttaacaaagttatcagggcagaactgggggtggtcagggcgtagctctgcagcgtcctgcgtactggagctcctaccctgcttgctggcagcctcactgggtcagatgggcaattcyaagagtgacatgcttgacaggtctgacgccagcatcctgrcgtgcttgttttgtgtgtcacccaaccacgttgtggccgatggcactgtctccagctgtgggatttgccrgrcttaaggaatcccargcggtggggcagcgtggatggtgacacatggaatctgaccttggctgcttttaatgaattgagaaatgtgagcactgattgcctgtggggctgacctcacccttgccacccatctctgtggggctggggcagcccctggtgtgtctgtgtgctgcctggggcagaggcagcagctcctcttgcagaccctgcaataccttcttgtccctttcc

SEQ ID NO: 17617 - DNA, 600 bp, Chicken  19866894225926_4
ggttggagctcagagataaatgctgtgagtaagcaactacacacctctgtcttgataagttattgratcgcccttaacaaagttatcagggcagaactgggggtggtcagggcgtagctctgcagcgtcctgcgtactggagctcctaccctgcttgctggcagcctcactgggtcagatgggcaattcyaagagtgacatgcttgacaggtctgacgccagcatcctgrcgtgcttgttttgtgtgtcacccaaccacgttgtggccgatggcactgtctccagctgtgggatttgccrgrcttaaggaatcccargcggtggggcagcgtggatggtgacacatggaatctgaccttggctgcttttaatgaattgagaaatgtgagcactgattgcctgtggggctgacctcacccttgccacccatctctgtggggctggggcagcccctggtgtgtctgtgtgctgcctggggcagaggcagcagctcctcttgcagaccctgcaataccttcttgtccctttcctcccagtgcagaagtgtcctagagtggaggctgcctgcgtgttaatgtgagtgataatactggagatatc

SEQ ID NO: 17618 - DNA, 600 bp, Chicken  19866894225926_5
ttggagctcagagataaatgctgtgagtaagcaactacacacctctgtcttgataagttattgratcgcccttaacaaagttatcagggcagaactgggggtggtcagggcgtagctctgcagcgtcctgcgtactggagctcctaccctgcttgctggcagcctcactgggtcagatgggcaattcyaagagtgacatgcttgacaggtctgacgccagcatcctgrcgtgcttgttttgtgtgtcacccaaccacgttgtggccgatggcactgtctccagctgtgggatttgccrgrcttaaggaatcccargcggtggggcagcgtggatggtgacacatggaatctgaccttggctgcttttaatgaattgagaaatgtgagcactgattgcctgtggggctgacctcacccttgccacccatctctgtggggctggggcagcccctggtgtgtctgtgtgctgcctggggcagaggcagcagctcctcttgcagaccctgcaataccttcttgtccctttcctcccagtgcagaagtgtcctagagtggaggctgcctgcgtgttaatgtgagtgataatactggagatatcac

SEQ ID NO: 17619 - DNA, 600 bp, Chicken  19866894225926_6
aaatgctgtgagtaagcaactacacacctctgtcttgataagttattgratcgcccttaacaaagttatcagggcagaactgggggtggtcagggcgtagctctgcagcgtcctgcgtactggagctcctaccctgcttgctggcagcctcactgggtcagatgggcaattcyaagagtgacatgcttgacaggtctgacgccagcatcctgrcgtgcttgttttgtgtgtcacccaaccacgttgtggccgatggcactgtctccagctgtgggatttgccrgrcttaaggaatcccargcggtggggcagcgtggatggtgacacatggaatctgaccttggctgcttttaatgaattgagaaatgtgagcactgattgcctgtggggctgacctcacccttgccacccatctctgtggggctggggcagcccctggtgtgtctgtgtgctgcctggggcagaggcagcagctcctcttgcagaccctgcaataccttcttgtccctttcctcccagtgcagaagtgtcctagagtggaggctgcctgcgtgttaatgtgagtgataatactggagatatcacagcggggttcagcag

SEQ ID NO: 17620 - DNA, 600 bp, Chicken  19866894225927_1
ggactcaacaatctccttgggcagtactccaggtgtggcctcaccagggcagagtaagaggaagaaccctccttgacctgctgcccacactcattttaattgctccacaataacactggccttcttggccacaagggcacaccaagagttggctttaacccgctgtccaccagaacacataggtccttctctgcagagctcctttccagcaggtccaccccctacctatactgatccagccagttattcctccccatatgcaatcccctacacttgcccttgttgaaccacattaggttyctctctacccagctcttagtcctgtccaggtctcaatgaaggcagtacagccttcaggtatgttagtcacttcttgcagctctgcatcatcagcaaacttgctgagggtgcactctatcccttcacccaggccactgatgagtacgtcatatgtgcttcttcatcacataacttttattcaggatttttctgtcctttacgaactggcagaaaatttttgatattagattgcttatttagtaagacatcttaacagcacttattttatgattgcatagttattaattacaagttcttacc

SEQ ID NO: 17621 - DNA, 600 bp, Chicken  19866894225939_1
tggaagggcagtactctgagctacacatactaagctgtagccattggagttatagggcagcaagaataagttttccttcaaacttcatcaaattttaaacaaagagaagtttggggttacaactcggcatgaaaaaaaaaccaatgcttcttcacatccagctctgttcattgtttgtgagccacgtgcaatcataagctgtcttctgcaattcttactctccttacacagccctaatcttgactgtaacaggactgtgtgtaaacaaggtgtgatgcaagactatcaaatacccagctrcacaccactttaccatgtgatacctatgaaatatgtaaaataaaaacatcaccatcatctttgtacccagttatagttagcagcatctttttctacagctatttccttatatacctaatttcttcttctagtatttatctgtaactcatttgttttcctaaccataccttccctggagatgtgcattcaatcacaagtacgttgtttactcctttttgaccaggacctacttatgaaattgttgtggcttttcttccaggcaacactttctcctgctagaagaattccctgtggaagtgc

SEQ ID NO: 17622 - DNA, 600 bp, Chicken  19866894225942_1
gtaaattagtttagctgggaacttatgcttttctttctttttttttgaaattatttcacagtttgtatattccttttcaatagtaaaccaatcttacctagcacttattgtgttcagagtaatgtaacaaatgactcaggttgcagttgcaagtgctcagtagtttttcctatcactttcaagtcctacactcagaaaatatggaacccggcaacagaacaaggggaaatgggcacaaatattgcaagttctatctgaacatgaggaaaagcttctggactgagggtgacaaagcactgsaacaggctgcccagagggggctggtgaagtctccttctctgaagatacycaagacccatctggatactttcctgtgtgacctgctgtagggaactgctttagcagggggttggactcgatggtctccagagatcccttccaacccctgggattctgggattctcattctcctcggcctgctgataattatagaatcagagaatatcccaagctggaagggactcgcgaggatcaccaaagtccaattctggctccattgcatgatcacccaaaatcaaaccccagtgtctgacagcattg

SEQ ID NO: 17623 - DNA, 559 bp, Chicken  19866894225942_2
attatttcacagtttgtatattccttttcaatagtaaaccaatcttacctagcacttattgtgttcagagtaatgtaacaaatgactcaggttgcagttgcaagtgctcagtagtttttcctatcactttcaagtcctacactcagaaaatatggaacccggcaacagaacaaggggaaatgggcacaaatattgcaagttctatctgaacatgaggaaaagcttctggactgagggtgacaaagcactgsaacaggctgcccagagggggctggtgaagtctccttctctgaagatacycaagacccatctggatactttcctgtgtgacctgctgtagggaactgctttagcagggggttggactcgatggtctccagagatcccttccaacccctgggattctgggattctcattctcctcggcctgctgataattatagaatcagagaatatcccaagctggaagggactcgcgaggatcaccaaagtccaattctggctccattgcatgatcacccaaaatcaaaccccagtgtctgacagcattgcccaaatt

SEQ ID NO: 17624 - DNA, 600 bp, Chicken  19866894225946_1
tcatcccttttcctctctgaatgcctctcacagcaagaatacacagtagaataagaaccttgagacttttccaccaggaaatcccccctccactgaagaaaacccttagggccttatccacggttgttgagactgtttttgacatctgcataagaaggatatggccaaaatacggcaacatcaaatgtacttgtagccttttactaaggggtagcagctgttttgcagaaaagcaagacataaagcaacacttgaatgggaggcaagcaaatcattttaaatactgacatactatttccrtttgagcataatgattgaaaagatctataatttgacctaacaaatattgttaagttcttttgaaagaatcaagtttgaaaatagggcagaatttatttttgtactttttaatttatatttttacaggtattacaaatatcacccatctggtttacactagtcattacttatctataatcttagaaagaccaattatgactttaacaattaaggttagactttcagctgagctgtttccaaacaaaccattatgactgatttttgcagttttcccttcttgcattagcatgcaggttttca

SEQ ID NO: 17625 - DNA, 599 bp, Chicken  19866894225950_1
  misc_feature (1)..(237): n is any nucleotide
nnnnnnnnnnnnnnnnnnnnnnnnnnnnnnnnnnnnnnnnnnnnnnnnnnnnnnnnnnnnnnnnnnnnnnnnnnnnnnnnnnnnnnnnnnnnnnnnnnnnnnnnnnnnnnnnnnnnnnnnnnnnnnnnnnnnnnnnnnnnnnnnnnnnnnnnnnnnnnnnnnnnnnnnnnnnnnnnnnnnnnnnnnnnnnnnnnnnnnnnnnnnnnnnnnnnnnnnnnnnnnnnnnnnnnnnnnnnnattgctatttcttacagggaagcccatagccagcaccccgcatggaggaaagggcagtgccaygcgggragctgcatgcacaggtcagggtcagcacaaccttcgtgccttgaggccacagcatcagcaccttgtactgataccagattgcaggggacagctgcagacacatccaggcgcacgatgacatttttagggggacaaagagcagctgtgggacgatctattccctcctccggcatttctgtgctgcgttcaatactcgaacgcaactcatctcaggagcaaagcgtgccatccccagcccagccatcacttttctcattaacctccaccccagggctctatctcagcaataccca

SEQ ID NO: 17626 - DNA, 599 bp, Chicken  19866894225950_2
  misc_feature (1)..(231): n is any nucleotide
nnnnnnnnnnnnnnnnnnnnnnnnnnnnnnnnnnnnnnnnnnnnnnnnnnnnnnnnnnnnnnnnnnnnnnnnnnnnnnnnnnnnnnnnnnnnnnnnnnnnnnnnnnnnnnnnnnnnnnnnnnnnnnnnnnnnnnnnnnnnnnnnnnnnnnnnnnnnnnnnnnnnnnnnnnnnnnnnnnnnnnnnnnnnnnnnnnnnnnnnnnnnnnnnnnnnnnnnnnnnnnnnnnnnnnnattgctatttcttacagggaagcccatagccagcaccccgcatggaggaaagggcagtgccaygcgggragctgcatgcacaggtcagggtcagcacaaccttcgtgccttgaggccacagcatcagcaccttgtactgataccagattgcaggggacagctgcagacacatccaggcgcacgatgacatttttagggggacaaagagcagctgtgggacgatctattccctcctccggcatttctgtgctgcgttcaatactcgaacgcaactcatctcaggagcaaagcgtgccatccccagcccagccatcacttttctcattaacctccaccccagggctctatctcagcaatacccacaacaa

SEQ ID NO: 17627 - DNA, 600 bp, Chicken  19866894225950_3
tcagcaccttgtactgataccagattgcaggggacagctgcagacacatccaggcgcacgatgacatttttagggggacaaagagcagctgtgggacgatctattccctcctccggcatttctgtgctgcgttcaatactcgaacgcaactcatctcaggagcaaagcgtgccatccccagcccagccatcacttttctcattaacctccaccccagggctctatctcagcaatacccacaacaaatgtgctttcccgagcactgcagggagggctgcctggagctgcatctgtcagcasgctgcacaagacggcaagtggaaaatcaaatctaactgaatttatttctaagtgatgccagcrgtggccaaatgggtgtattttcttccctaagtgggtacggtgacagaaaggagatgagctgggtttgaggcaggaagcccccaacaggcatgaaatgaggagagctgacctccccttgagaccacacatagggcacagcctggccctgtcatctcagtgccgcatcrgtgaagggcttggctggaaaaacaggaaaacggtgtcttctctgaatgggtatgtgggatggggggacat

SEQ ID NO: 17628 - DNA, 581 bp, Chicken  19866894225950_4
acatttttagggggacaaagagcagctgtgggacgatctattccctcctccggcatttctgtgctgcgttcaatactcgaacgcaactcatctcaggagcaaagcgtgccatccccagcccagccatcacttttctcattaacctccaccccagggctctatctcagcaatacccacaacaaatgtgctttcccgagcactgcagggagggctgcctggagctgcatctgtcagcasgctgcacaagacggcaagtggaaaatcaaatctaactgaatttatttctaagtgatgccagcrgtggccaaatgggtgtattttcttccctaagtgggtacggtgacagaaaggagatgagctgggtttgaggcaggaagcccccaacaggcatgaaatgaggagagctgacctccccttgagaccacacatagggcacagcctggccctgtcatctcagtgccgcatcrgtgaagggcttggctggaaaaacaggaaaacggtgtcttctctgaatgggtatgtgggatggggggacattcctggggggggagaaaaaaccccactcctgacaccaccttaag

SEQ ID NO: 17629 - DNA, 414 bp, Chicken  19866894225950_5
caatacccacaacaaatgtgctttcccgagcactgcagggagggctgcctggagctgcatctgtcagcasgctgcacaagacggcaagtggaaaatcaaatctaactgaatttatttctaagtgatgccagcrgtggccaaatgggtgtattttcttccctaagtgggtacggtgacagaaaggagatgagctgggtttgaggcaggaagcccccaacaggcatgaaatgaggagagctgacctccccttgagaccacacatagggcacagcctggccctgtcatctcagtgccgcatcrgtgaagggcttggctggaaaaacaggaaaacggtgtcttctctgaatgggtatgtgggatggggggacattcctggggggggagaaaaaaccccactcctgacaccaccttaag

SEQ ID NO: 17630 - DNA, 600 bp, Chicken  19866894225954_1
cccttgtatcacctttgaaatatgtatgcacatgttatgcagtgtggatgcatatcaatgccatatctacctttgcatattaaatcatcgccacatcttctccggcagtaaaatatgcagagcatatgctaaggaaagagctgccctcccccagcgctgcccaccccaggtagctcagcccctgtcctttgttcttcttctagaacaggctttcttttttttccttcctgcaaactgcttttgtgcttctaaggacctcacctcacatctcatagatcagccagggctgatgccctaacwtctctcccctgtcagagaggggggaggatattggggtacctctgtagcraggcagcagcagtacagtgtggcttaaccatgtctgccctcattgcacagccctgtgggggcatcagggaacaaccagctgtgggtttcagatggcctaaagcccggccactgcartgccccatctcctgttgttagagctgagcagtcagacctgayggacctgagagttgggtcacaaaacagggagyggggtatttctgctggcctgtgcrataagggcaagaaattggaataaaccatttggggcac

SEQ ID NO: 17631 - DNA, 600 bp, Chicken  19866894225954_2
gcatatcaatgccatatctacctttgcatattaaatcatcgccacatcttctccggcagtaaaatatgcagagcatatgctaaggaaagagctgccctcccccagcgctgcccaccccaggtagctcagcccctgtcctttgttcttcttctagaacaggctttcttttttttccttcctgcaaactgcttttgtgcttctaaggacctcacctcacatctcatagatcagccagggctgatgccctaacwtctctcccctgtcagagaggggggaggatattggggtacctctgtagcraggcagcagcagtacagtgtggcttaaccatgtctgccctcattgcacagccctgtgggggcatcagggaacaaccagctgtgggtttcagatggcctaaagcccggccactgcartgccccatctcctgttgttagagctgagcagtcagacctgayggacctgagagttgggtcacaaaacagggagyggggtatttctgctggcctgtgcrataagggcaagaaattggaataaaccatttggggcaccagccaagcagtgaggccaggcatccccaaggacaacgacacagctttt

SEQ ID NO: 17632 - DNA, 600 bp, Chicken  19866894225954_3
ccaggtagctcagcccctgtcctttgttcttcttctagaacaggctttcttttttttccttcctgcaaactgcttttgtgcttctaaggacctcacctcacatctcatagatcagccagggctgatgccctaacwtctctcccctgtcagagaggggggaggatattggggtacctctgtagcraggcagcagcagtacagtgtggcttaaccatgtctgccctcattgcacagccctgtgggggcatcagggaacaaccagctgtgggtttcagatggcctaaagcccggccactgcartgccccatctcctgttgttagagctgagcagtcagacctgayggacctgagagttgggtcacaaaacagggagyggggtatttctgctggcctgtgcrataagggcaagaaattggaataaaccatttggggcaccagccaagcagtgaggccaggcatccccaaggacaacgacacagcttttgcattcctgtccatggtagagctctcctggtgcatcagcagcagcgaagggctgcaacgcaccctgcccctgcatcacccctgcccccacagagcatcctttgcctccttctctct

SEQ ID NO: 17633 - DNA, 600 bp, Chicken  19866894225954_4
ggctttcttttttttccttcctgcaaactgcttttgtgcttctaaggacctcacctcacatctcatagatcagccagggctgatgccctaacwtctctcccctgtcagagaggggggaggatattggggtacctctgtagcraggcagcagcagtacagtgtggcttaaccatgtctgccctcattgcacagccctgtgggggcatcagggaacaaccagctgtgggtttcagatggcctaaagcccggccactgcartgccccatctcctgttgttagagctgagcagtcagacctgayggacctgagagttgggtcacaaaacagggagyggggtatttctgctggcctgtgcrataagggcaagaaattggaataaaccatttggggcaccagccaagcagtgaggccaggcatccccaaggacaacgacacagcttttgcattcctgtccatggtagagctctcctggtgcatcagcagcagcgaagggctgcaacgcaccctgcccctgcatcacccctgcccccacagagcatcctttgcctccttctctctcaacaaacaaggccaaggttccccattctcatcacattgcca

SEQ ID NO: 17634 - DNA, 600 bp, Chicken  19866894225954_5
tttgtgcttctaaggacctcacctcacatctcatagatcagccagggctgatgccctaacwtctctcccctgtcagagaggggggaggatattggggtacctctgtagcraggcagcagcagtacagtgtggcttaaccatgtctgccctcattgcacagccctgtgggggcatcagggaacaaccagctgtgggtttcagatggcctaaagcccggccactgcartgccccatctcctgttgttagagctgagcagtcagacctgayggacctgagagttgggtcacaaaacagggagyggggtatttctgctggcctgtgcrataagggcaagaaattggaataaaccatttggggcaccagccaagcagtgaggccaggcatccccaaggacaacgacacagcttttgcattcctgtccatggtagagctctcctggtgcatcagcagcagcgaagggctgcaacgcaccctgcccctgcatcacccctgcccccacagagcatcctttgcctccttctctctcaacaaacaaggccaaggttccccattctcatcacattgccaatactttgccatcatgcagccaagcttgctaa

SEQ ID NO: 17635 - DNA, 600 bp, Chicken  19866894225954_6
cacatctcatagatcagccagggctgatgccctaacwtctctcccctgtcagagaggggggaggatattggggtacctctgtagcraggcagcagcagtacagtgtggcttaaccatgtctgccctcattgcacagccctgtgggggcatcagggaacaaccagctgtgggtttcagatggcctaaagcccggccactgcartgccccatctcctgttgttagagctgagcagtcagacctgayggacctgagagttgggtcacaaaacagggagyggggtatttctgctggcctgtgcrataagggcaagaaattggaataaaccatttggggcaccagccaagcagtgaggccaggcatccccaaggacaacgacacagcttttgcattcctgtccatggtagagctctcctggtgcatcagcagcagcgaagggctgcaacgcaccctgcccctgcatcacccctgcccccacagagcatcctttgcctccttctctctcaacaaacaaggccaaggttccccattctcatcacattgccaatactttgccatcatgcagccaagcttgctaattattatcccttatacttcctcat

SEQ ID NO: 17636 - DNA, 600 bp, Chicken  19866894225954_7
cctctcctactcataggtttctgtgtttctcaggcgtttccctccaagccttgcttgctgtttcctccccccaccttttgctcaccctaattttgcagacttcagaaaagaagtgaggaaagctgtcactctcagagggatctctcacagcacgagcccttcatttctcagcgaggtgtcagaaggaacagggtgagcaaaaagtgttttctcccagggggttgcatcctcctgtgggtaccaacctgcccaccccacagcaggatgcaaagtcctccaggagctttgcaaaaggacacrcagagcatcaagcctcacccccagctctccaatggcacygtctgctccagaaagcacagcagggagaaagcccctgggatatgccctagccctctggttatgaccatccatatacatccacaacaataacaataataaaacacgaccaattgggaaaattaagggaggagaaaatctgtgccccctgatcttgccatgcccacgtggtcccacaccgccccttggcatggcacagccccctgtgccccggctccatgacccccctgccctggctccccttgatcagaggcctcgctcccc

SEQ ID NO: 17637 - DNA, 600 bp, Chicken  19866894225954_8
ccctccaagccttgcttgctgtttcctccccccaccttttgctcaccctaattttgcagacttcagaaaagaagtgaggaaagctgtcactctcagagggatctctcacagcacgagcccttcatttctcagcgaggtgtcagaaggaacagggtgagcaaaaagtgttttctcccagggggttgcatcctcctgtgggtaccaacctgcccaccccacagcaggatgcaaagtcctccaggagctttgcaaaaggacacrcagagcatcaagcctcacccccagctctccaatggcacygtctgctccagaaagcacagcagggagaaagcccctgggatatgccctagccctctggttatgaccatccatatacatccacaacaataacaataataaaacacgaccaattgggaaaattaagggaggagaaaatctgtgccccctgatcttgccatgcccacgtggtcccacaccgccccttggcatggcacagccccctgtgccccggctccatgacccccctgccctggctccccttgatcagaggcctcgctcccccgtgggctcttttttgcctatttttggggggtgggattt

SEQ ID NO: 17638 - DNA, 600 bp, Chicken  19866894225956_1
tggaagtgttcaagaccaggttggatggggcttttggcaacatggttttgtggaaggtgtcccagcttatggaagtggggctggaacaacatgatctttaaggtctacccaagcctatgtaagaaaaatgcatgttagtgcatgggcacagagcatcatctgacatccctgcaggacctggtcctctgcctgctgccatcagacattaacacctgcagctgagccaaacagaccccaaacgatgcattcccattggtgcagcacgctgcactcagcctcagcccccagcacggtgcttcycatttgctcagcacaaggcctgctgttagcctggtgcagcctctggtgcaggtctggacgctttggtggctttcccacaaagagaggraaaacccaagcaaggacacagcgcagccccgtgcgcactgcgtgggctgcagggcagcgtcgctgggtcagagctccccttcctgtgcagctgagctgcgctcccagaacaaacagcaaaacaaaaagacagaaaaaaaaacacaaagccaaccacaacagaacagccccacagcagaagagctctcaggcgtgctcgtctcatctgctstg

SEQ ID NO: 17639 - DNA, 600 bp, Chicken  19866894225956_2
acatgatctttaaggtctacccaagcctatgtaagaaaaatgcatgttagtgcatgggcacagagcatcatctgacatccctgcaggacctggtcctctgcctgctgccatcagacattaacacctgcagctgagccaaacagaccccaaacgatgcattcccattggtgcagcacgctgcactcagcctcagcccccagcacggtgcttcycatttgctcagcacaaggcctgctgttagcctggtgcagcctctggtgcaggtctggacgctttggtggctttcccacaaagagaggraaaacccaagcaaggacacagcgcagccccgtgcgcactgcgtgggctgcagggcagcgtcgctgggtcagagctccccttcctgtgcagctgagctgcgctcccagaacaaacagcaaaacaaaaagacagaaaaaaaaacacaaagccaaccacaacagaacagccccacagcagaagagctctcaggcgtgctcgtctcatctgctstgacttaagcaccagctacagagagaaaagcgcaggtgaacgctttcctctccaagctctgcgctggggcaccgtgcctgctgtctgcag

SEQ ID NO: 17640 - DNA, 487 bp, Chicken  19866894225956_3
cycatttgctcagcacaaggcctgctgttagcctggtgcagcctctggtgcaggtctggacgctttggtggctttcccacaaagagaggraaaacccaagcaaggacacagcgcagccccgtgcgcactgcgtgggctgcagggcagcgtcgctgggtcagagctccccttcctgtgcagctgagctgcgctcccagaacaaacagcaaaacaaaaagacagaaaaaaaaacacaaagccaaccacaacagaacagccccacagcagaagagctctcaggcgtgctcgtctcatctgctstgacttaagcaccagctacagagagaaaagcgcaggtgaacgctttcctctccaagctctgcgctggggcaccgtgcctgctgtctgcagcttttgtttcccagtgggggctcctccagcacaccccagcccctctgcagccccacatcttcggctgtttggtgttttgaggtataacccatcataa

SEQ ID NO: 17641 - DNA, 600 bp, Chicken  19866894225961_1
agcagggagccctagggaaagtcagcatagggtgcctgaagagctgtcattacatttctccagcctgcagcctaattgctgtgaggtccaagtggccccgggaaacaggtcgtcccaggaaggctcaaggccaagtgacctggttttctctggtataatccttgtctggccattctgaaactatctgcactttcaggaagctcagagccttcttccctagcagagtgtctgcctggagtatgcagagattccttctcactcaccagtaatcctctctgtgctgtgatgctgtgcaactcwgttcaggatttaytgtaagcaacagtacagcgttgatctgtactttttctaaggtgcatgctgtacatacgraaataccataaagctgctctcaacaaacacaacttgagtttcccctgattttaaaccatctgacacagctgcttggctttgctttccaaaaccttccaatcccacctttgaggagacattgacaccaacccctgcctgtacttcttcaacttcatccctgcaacttgatgttctctatcacactgactttgcaaaacctccttcaaccagcccacagcaacactaatg

SEQ ID NO: 17642 - DNA, 600 bp, Chicken  19866894225961_2
agggaaagtcagcatagggtgcctgaagagctgtcattacatttctccagcctgcagcctaattgctgtgaggtccaagtggccccgggaaacaggtcgtcccaggaaggctcaaggccaagtgacctggttttctctggtataatccttgtctggccattctgaaactatctgcactttcaggaagctcagagccttcttccctagcagagtgtctgcctggagtatgcagagattccttctcactcaccagtaatcctctctgtgctgtgatgctgtgcaactcwgttcaggatttaytgtaagcaacagtacagcgttgatctgtactttttctaaggtgcatgctgtacatacgraaataccataaagctgctctcaacaaacacaacttgagtttcccctgattttaaaccatctgacacagctgcttggctttgctttccaaaaccttccaatcccacctttgaggagacattgacaccaacccctgcctgtacttcttcaacttcatccctgcaacttgatgttctctatcacactgactttgcaaaacctccttcaaccagcccacagcaacactaatgatggcattgccct

SEQ ID NO: 17643 - DNA, 600 bp, Chicken  19866894225961_3
taattgctgtgaggtccaagtggccccgggaaacaggtcgtcccaggaaggctcaaggccaagtgacctggttttctctggtataatccttgtctggccattctgaaactatctgcactttcaggaagctcagagccttcttccctagcagagtgtctgcctggagtatgcagagattccttctcactcaccagtaatcctctctgtgctgtgatgctgtgcaactcwgttcaggatttaytgtaagcaacagtacagcgttgatctgtactttttctaaggtgcatgctgtacatacgraaataccataaagctgctctcaacaaacacaacttgagtttcccctgattttaaaccatctgacacagctgcttggctttgctttccaaaaccttccaatcccacctttgaggagacattgacaccaacccctgcctgtacttcttcaacttcatccctgcaacttgatgttctctatcacactgactttgcaaaacctccttcaaccagcccacagcaacactaatgatggcattgcccttgggctggcctgacagtgacaacagtgacagtgccacgatacgaaccacagctgtagcg

SEQ ID NO: 17644 - DNA, 600 bp, Chicken  19866894225962_1
tgagcttcccattgactgtgaattaattttgttttactgacctgctttgtcgtgtcttctaaatgcaacagtgacttataaggaacctaatgcaaaacaattcttaaaaatttcggaagtggtctaagtttttcgtaatgcatattcattctgtctttgtgggtcagaaattacagagattgtttgaagaaaacacatctacatatttagttttaaataacactgtcaacaagaagagcattttctgggtattactgctcaatattacagctgatgaaattgctgctaattgtgacaaaraagtcacatttttggacctttactctgtctcttgacttcttactttaaaatggtagacttagtaatataattgactgagagaaggttgtagcatttctaaatgaaaattagaattttggtaggacctgagtcaggtgcttgcaatgcagacacattttcctctctcctttgtagcacctgggggtaataaaacaattttatagggctgaaattagtcactgaagaactttctatattactgcctgaaaggaaaaaaaaataattaagggaagaatatatctggggactagtttacctttg

SEQ ID NO: 17645 - DNA, 600 bp, Chicken  19866894225965_1
cagccctttccatgctgcccctcgttggccatgaaggactttggaaggttttctttaaaattcttggatagaaatcactctccagtgttcaacagagcatacaggaagaggaaaaaaaagtcagcttgtctctaacaagagatcatgaggaatccttggctctgctcagcgtgggattattccaagggaagtgattattcactacttccagcacctatttgcagttcaatttgcaaaagtaactgttatgaaacaagcagaaggaagcaaagatcagagtggaaaggcaacatgcattcrctacccagggakcaagctaagcatgctgggctctctctcaatttctctcaccaaagttrcttgctgacacccaggaggattacactttaaccacgagacccaccctgaccccaacccacgcccatgagaaccactgaagggctttgctttgcacagggcagagccacagtgcaactctttggtcaacgatggcacctttggctccaagcgtgactcaacctcacacrgatctgaaggactgccctaaagaagctttttgccctgtggtttttaaaaggcccatagctctgagtgcaaaca

SEQ ID NO: 17646 - DNA, 600 bp, Chicken  19866894225965_2
tgctgcccctcgttggccatgaaggactttggaaggttttctttaaaattcttggatagaaatcactctccagtgttcaacagagcatacaggaagaggaaaaaaaagtcagcttgtctctaacaagagatcatgaggaatccttggctctgctcagcgtgggattattccaagggaagtgattattcactacttccagcacctatttgcagttcaatttgcaaaagtaactgttatgaaacaagcagaaggaagcaaagatcagagtggaaaggcaacatgcattcrctacccagggakcaagctaagcatgctgggctctctctcaatttctctcaccaaagttrcttgctgacacccaggaggattacactttaaccacgagacccaccctgaccccaacccacgcccatgagaaccactgaagggctttgctttgcacagggcagagccacagtgcaactctttggtcaacgatggcacctttggctccaagcgtgactcaacctcacacrgatctgaaggactgccctaaagaagctttttgccctgtggtttttaaaaggcccatagctctgagtgcaaacattccggttacac

SEQ ID NO: 17647 - DNA, 600 bp, Chicken  19866894225965_3
attcttggatagaaatcactctccagtgttcaacagagcatacaggaagaggaaaaaaaagtcagcttgtctctaacaagagatcatgaggaatccttggctctgctcagcgtgggattattccaagggaagtgattattcactacttccagcacctatttgcagttcaatttgcaaaagtaactgttatgaaacaagcagaaggaagcaaagatcagagtggaaaggcaacatgcattcrctacccagggakcaagctaagcatgctgggctctctctcaatttctctcaccaaagttrcttgctgacacccaggaggattacactttaaccacgagacccaccctgaccccaacccacgcccatgagaaccactgaagggctttgctttgcacagggcagagccacagtgcaactctttggtcaacgatggcacctttggctccaagcgtgactcaacctcacacrgatctgaaggactgccctaaagaagctttttgccctgtggtttttaaaaggcccatagctctgagtgcaaacattccggttacacaaagcactacaagagaaaaagagcttccttccagcttcctacacctt

SEQ ID NO: 17648 - DNA, 496 bp, Chicken  19866894225965_4
aatttgcaaaagtaactgttatgaaacaagcagaaggaagcaaagatcagagtggaaaggcaacatgcattcrctacccagggakcaagctaagcatgctgggctctctctcaatttctctcaccaaagttrcttgctgacacccaggaggattacactttaaccacgagacccaccctgaccccaacccacgcccatgagaaccactgaagggctttgctttgcacagggcagagccacagtgcaactctttggtcaacgatggcacctttggctccaagcgtgactcaacctcacacrgatctgaaggactgccctaaagaagctttttgccctgtggtttttaaaaggcccatagctctgagtgcaaacattccggttacacaaagcactacaagagaaaaagagcttccttccagcttcctacaccttagccaagttcctaactttataggattaagagcaaacaccaccccaaacatccatcaaccactaa

SEQ ID NO: 17649 - DNA, 600 bp, Chicken  19866894225969_1
gccctttggattgccaggaattgggtgactgctccagtagttgtacatagttaatgagaagtaatttcttatcctagtcaataatattggcagactcgaagattttggatatagatggcatagagaagcaaggtcaagaattagtggctggctctgttggtttcaggagttacagagagcacaagccgagtcacgtgtgcgtgtagttgatataaagagcacatgttggcacagagaattgctgtcatatatgctttatcttgtgtttgcttttatcaagctttccataccgatgattcwctctttgtaataatcctctgaaagaggtaacactttaacgcatttttaaaatgtacaaaaacactgtatggtatctctgttattttattaaactttcagtatttgaagggaagtgaatgggagatatgaggggaaaaaatgtgatgcgggtaaattcctttttttctcagtaacatgtttgtatgttgtaaaaacattcaattcctacacagccatctgaaaaaagtccagttttgaaatgcgtttccttttggcagtgcgtttgtgatgaggcaaataaatctatatgtgaatagtcta

SEQ ID NO: 17650 - DNA, 600 bp, Chicken  19866894225969_2
gacattgtaaagacagacctttgctgtatagcttcagcgtttgaaccttcaatgctaaatatgtcttcttgaattgcagtgtcctgtttcaaaatcagtgtttttgtttctgtatatatacaggttgttcccctctgaaagggatacttctgtaattgggtcttatcttgaaaaatatttacctgttacagcatctaaacgttctgtggtacaatcactttgttcttcagtcttatttgctttgtgcaatagcatgctggctttagtcagtgttgtttcactttctgaaagttacttctsgtttgcaataaaacccaaataagaaactcttagtaatttgtggtagacagtggggaatgatggcttataacatcaggagatctcttgggttacagcagtttgggccttgaaggtatagagtatatgctgttgtaagtaggtctgaggatgcccaccatgttactgagacgtcatgtggttcagaaggatcttggtatgtgaaaagttagtgagtgtgatggtaacctaacttcaattagtgtaccaaatttatttgtgaaacaagattttcatctgtcttgtctcttttaacctttgtca

SEQ ID NO: 17651 - DNA, 600 bp, Chicken  19866894225970_1
cttacctggatgctacagggcttgcagacatccagctttgctcctggaagcatcacggcccacggggaagattccctgcagcttcatgcagtgctgagcaccacctcctcccggctctgcttctccccttccccagcagccacacggagcagagcagcacgcaacactccgggctgctcaaacaccgcagcgatttttttttttcttggcttcctgatttctatttccttttattaaaacagccagaagctgataagcaagagagataggccgtgctgccagcacacacgcaatgcaacrcgctcaccttcctgcagcgcaccgtctgtctgtgcagggaatgcttcagcagcactgaacagctgcaaagggaaagccctgacaccactgtgctcatttaaaatactttattgcaacattatatggtactccaactctcccagcagcaggactcttgcatgtcaacaccaaaacagattactcttaaattaaaactcactctctctctatataaatttgtttgtacagacgctccttgcgacacatcggtggtgggagaacagcagccccagctttttccacccgataaaacttctgttt

SEQ ID NO: 17652 - DNA, 600 bp, Chicken  19866894225971_1
gaagttgtctaaggaagaattcacgggtagaatcctaaaacatattttttaattttagatgcataatttgtgcttatttatctgttcaattgaaattcgattttaatgtagataaatggataccatgctcatttctgtagacaatgcatgtaacagaggcatttaatttatgtgctatgtaggagttgactgtttgatatcattgccatatagttacaagtggagtcatggctgcctgatatctgtgaaaagataatggttcataacagggctggtagagggaacagtaagttctacttwgtatgtctctatatgcacaatcttatggataaaatatacattattgcgtatatttcataattgaggaatcgatccatacagaaagtacaaactgtgtagtaattaaaaattacatggaggggaatgctccttacaggaaacatatttcaccgtttctgttccaggtagctgtgtgtatgttacatgcgtagtttctacattagttacatatggaacataactgatgactatatatttcctaccagtcaaaatacaacaaaaattaccaaaaagccactcaaagatccagaatgtgatctg

SEQ ID NO: 17653 - DNA, 600 bp, Chicken  19866894225971_2
tgcgtatatttcataattgaggaatcgatccatacagaaagtacaaactgtgtagtaattaaaaattacatggaggggaatgctccttacaggaaacatatttcaccgtttctgttccaggtagctgtgtgtatgttacatgcgtagtttctacattagttacatatggaacataactgatgactatatatttcctaccagtcaaaatacaacaaaaattaccaaaaagccactcaaagatccagaatgtgatctgacatattcaaatgagggaaatgtcagcatcttttagggaatgayatttggcatgaaagaaattcaaattttgacccttaacacttaacattcaaatcaaagaataaggtaaacaaaaatagttccaacttatttatcatcagactcactgaagatcaccacaacaaagaaagagatacaattaaatagtatagttgttcttgaaaaaaaaaaaaggtgtcgcggaggaattaccattacacgaccagctctagacagcatggagctgcattttgtgtatcagatgttgacagcaatgcataaactgctgtcaagtgacatttagagctgtagctccctgaggtc

SEQ ID NO: 17654 - DNA, 600 bp, Chicken  19866894225975_1
catgacatgaaaaatgaagattcccagagaactaggtaaaaaggacagtgaaaagctaaagtcagccagagggaagagtttgtaatgtgatcccgaaagagatctgagtagattactgcctggaaatggggactagaatacctcagaaatcataccttgatgcttcgaatcagcacgttctgtagaacacgctctttatttttgtaaataaacaggatcacatgaaaaacaacccagatatttccttcagttttgttgacagaaacaagcaggagaactcccagttctgcttggataggrgagcacaaccccaagtcaggaagaaacgcaaccaaggctatgagctggtggtctctccaaatttagaagaatctgaatttagatgatggaggtttccaaatggcctggaggtaggaaaagatcggaaaaatcctaagaaagatattaaactagacccgtggactttggagtaggaattcagacttcaagcacccagagacttcaaagaaggaattagaacagggcatacaataagagctggaggctttgcaaaaaaaaaaaaaaaaaaaagagagcaacatctgaaagcgtacccaaaaa

SEQ ID NO: 17655 - DNA, 600 bp, Chicken  19866894225975_2
tggggactagaatacctcagaaatcataccttgatgcttcgaatcagcacgttctgtagaacacgctctttatttttgtaaataaacaggatcacatgaaaaacaacccagatatttccttcagttttgttgacagaaacaagcaggagaactcccagttctgcttggataggrgagcacaaccccaagtcaggaagaaacgcaaccaaggctatgagctggtggtctctccaaatttagaagaatctgaatttagatgatggaggtttccaaatggcctggaggtaggaaaagatcggraaaatcctaagaaagatattaaactagacccgtggactttggagtaggaattcagacttcaagcacccagagacttcaaagaaggaattagaacagggcatacaataagagctggaggctttgcaaaaaaaaaaaaaaaaaaaagagagcaacatctgaaagcgtacccaaaaagaaaaaggaaaggtcttatatagagaaggaactgctgaggaaaaatctacaaacgtctcctgtcttgagaacccacccagttgcatagttttcagtttgcaaaatgtttcctgaggttcttggtta

SEQ ID NO: 17656 - DNA, 326 bp, Chicken  19866894225975_3
cttcaaagaaggaattagaacagggcatacaataagagctggaggctttgcaaaaaaaaaaaaaaaaaaaagagagcaacatctgaaagcgtacccaaaaagaaaaaggaaaggtcttatatagagaaggaactgctgaggaaaaatctacaaacgtctcctgtcttgagaacccacccagttgcatagttttcagtttgcaaaatgtttcctgaggttcttggttacctgattatcattgtccgtggaagattttccacaaaaatgaaggagcccaaggcaaattgtaactgaacaaarcttttagctggtttgaaatttgtaaa

SEQ ID NO: 17657 - DNA, 530 bp, Chicken  19866894225979_1
agcatatagctgtttgtctaacctttacaacttttagtgtctgtacagcagatgctaatggacctgaaaatagaaagtctgaagcttgtatattcacccttgctttatattttgaagcgctgtatgtataaaaatacgtatataaatatgtagtacagactgtgttagcggtaatccctgacccattttgtttgcatcgtgcacagctgactaccatttatctgctgtccctcagagtccattttatacttaagcagtcatgtttctcttgctagtgagcaactggaatcacactgcacktctgcacwcacaggcttcctgtatacgccatctgttatctgcttttccttccttgaagcaggatatgtataaacgttgttgcagggtggcttgcatttgaaagtcttcctgaaaatcccacagaagctgcaaaaggcagtgcagctttgtaagtcgttgcctgtacaggctatacctgatgtattttctgctggatctagagcagaaaggctccagagcacctttcttta

SEQ ID NO: 17658 - DNA, 522 bp, Chicken  19866894225979_2
gctgtttgtctaacctttacaacttttagtgtctgtacagcagatgctaatggacctgaaaatagaaagtctgaagcttgtatattcacccttgctttatattttgaagcgctgtatgtataaaaatacgtatataaatatgtagtacagactgtgttagcggtaatccctgacccattttgtttgcatcgtgcacagctgactaccatttatctgctgtccctcagagtccattttatacttaagcagtcatgtttctcttgctagtgagcaactggaatcacactgcacktctgcacwcacaggcttcctgtatacgccatctgttatctgcttttccttccttgaagcaggatatgtataaacgttgttgcagggtggcttgcatttgaaagtcttcctgaaaatcccacagaagctgcaaaaggcagtgcagctttgtaagtcgttgcctgtacaggctatacctgatgtattttctgctggatctagagcagaaaggctccagagcacctttcttta

SEQ ID NO: 17659 - DNA, 600 bp, Chicken  19866894225984_1
aagcacacccaaacgcagatggttacattaggggtcactgtctcataagtggcttaaaaaaaacaactggcatgtttttttatttccctccctacagcccattctctcatatgctccaaatatttcagcagttctactctgtggggatataatattccaattgttgtctcaagtggaggaagtcaccctgagtagagaacaaaccaaaataaggaagaagaggtaaaatgagttaccttcttctgcctcagctggatttcaagatggttacgaagagccttagggtctcggggtccttcygtgtgaagtgatgctgcagctcgtagcaaagatgtctcctgggtactcttccctgatgttcctgcaggaacaactcttggtagcaaaccctcaactgatttcttaggttcaccttcattcgatgaggaataaacaagtactactttatcacggtcrctgtcagaaactccatcagcaggcttttccagacttggcctgacttgtgtcttggatggtgctgcccctgctcctggctttaggagagcatgttgtgatgctgcctgtggtactgttgtggaagtcgtgttttctttaggtatt

SEQ ID NO: 17660 - DNA, 600 bp, Chicken  19866894225984_2
ccaattgttgtctcaagtggaggaagtcaccctgagtagagaacaaaccaaaataaggaagaagaggtaaaatgagttaccttcttctgcctcagctggatttcaagatggttacgaagagccttagggtctcggggtccttcygtgtgaagtgatgctgcagctcgtagcaaagatgtctcctgggtactcttccctgatgttcctgcaggaacaactcttggtagcaaaccctcaactgatttcttaggttcaccttcattcgatgaggaataaacaagtactactttatcacggtcrctgtcagaaactccatcagcaggcttttccagacttggcctgacttgtgtcttggatggtgctgcccctgctcctggctttaggagagcatgttgtgatgctgcctgtggtactgttgtggaagtcgtgttttctttaggtattggtttcatctctccattcttcccaccaatgcattctttctctctggtttctctatccccacagttttttaagcttttatccccraactgctccttctctggagacttgctacttgtactttgcttttcaaaactgactgggaagagttcrgatctg

SEQ ID NO: 17661 - DNA, 600 bp, Chicken  19866894225984_3
aaaccctcaactgatttcttaggttcaccttcattcgatgaggaataaacaagtactactttatcacggtcrctgtcagaaactccatcagcaggcttttccagacttggcctgacttgtgtcttggatggtgctgcccctgctcctggctttaggagagcatgttgtgatgctgcctgtggtactgttgtggaagtcgtgttttctttaggtattggtttcatctctccattcttcccaccaatgcattctttctctctggtttctctatccccacagttttttaagcttttatccccraactgctccttctctggagacttgctacttgtactttgcttttcaaaactgactgggaagagttcrgatctgccacctggctctttctccacatgttcagatttcttggattccctgacacttcctccatacttctctttatcctgatgggtgtttttccctttccaagtctcagaaagacaaagcttagattcagatacggcactttccttaagttctggatcactcctacattccttggattgtttctttacagttttcagctcttctagatcttccttctactgtggaggaaccaga

SEQ ID NO: 17662 - DNA, 552 bp, Chicken  19866894225984_4
cggtcrctgtcagaaactccatcagcaggcttttccagacttggcctgacttgtgtcttggatggtgctgcccctgctcctggctttaggagagcatgttgtgatgctgcctgtggtactgttgtggaagtcgtgttttctttaggtattggtttcatctctccattcttcccaccaatgcattctttctctctggtttctctatccccacagttttttaagcttttatccccraactgctccttctctggagacttgctacttgtactttgcttttcaaaactgactgggaagagttcrgatctgccacctggctctttctccacatgttcagatttcttggattccctgacacttcctccatacttctctttatcctgatgggtgtttttccctttccaagtctcagaaagacaaagcttagattcagatacggcactttccttaagttctggatcactcctacattccttggattgtttctttacagttttcagctcttctagatcttccttctactgtggaggaaccagaggtggacttcttttcttt

SEQ ID NO: 17663 - DNA, 600 bp, Chicken  19866894225986_1
gtaagattcctgcatgagcgggatatttcctccatgctatcagcaaagaatgctgtttattatccttcccacagatgaaattacaggccctaaggttccatgcaactgaatgaaacttctagaatgttctagagaagtatcaactggaagatgctaaaatgaatcaaaggcactgactgtaagaattccagcatgcaatgaattccctcattaattcatttcagtggctaatcaattaaatgcatgtactttatttgtactttcagacttctctggccactggttttctagtccaggcayggctcttactagttttgttcctkttctagtatgtataaacattggtctctagcctaggatctttgctatatcttatctgtgtawagtttaaggacaggctcagaaagtatctgaaagttgcattctgcattttaaactgttgctagctgactacagaatatctgaagtctcccactgcactcccactgaagtctcactactgcactagtagcttctagggtcaaaattttatgcagaggctgcatttaactcccctagagatagatctggacagcaagaatgatgaaccttctccaagat

SEQ ID NO: 17664 - DNA, 600 bp, Chicken  19866894225986_2
tatttcctccatgctatcagcaaagaatgctgtttattatccttcccacagatgaaattacaggccctaaggttccatgcaactgaatgaaacttctagaatgttctagagaagtatcaactggaagatgctaaaatgaatcaaaggcactgactgtaagaattccagcatgcaatgaattccctcattaattcatttcagtggctaatcaattaaatgcatgtactttatttgtactttcagacttctctggccactggttttctagtccaggcayggctcttactagttttgttcctkttctagtatgtataaacattggtctctagcctaggatctttgctatatcttatctgtgtawagtttaaggacaggctcagaaagtatctgaaagttgcattctgcattttaaactgttgctagctgactacagaatatctgaagtctcccactgcactcccactgaagtctcactactgcactagtagcttctagggtcaaaattttatgcagaggctgcatttaactcccctagagatagatctggacagcaagaatgatgaaccttctccaagattgttaacttttcatgttttcctt

SEQ ID NO: 17665 - DNA, 600 bp, Chicken  19866894225986_3
aggccctaaggttccatgcaactgaatgaaacttctagaatgttctagagaagtatcaactggaagatgctaaaatgaatcaaaggcactgactgtaagaattccagcatgcaatgaattccctcattaattcatttcagtggctaatcaattaaatgcatgtactttatttgtactttcagacttctctggccactggttttctagtccaggcayggctcttactagttttgttcctkttctagtatgtataaacattggtctctagcctaggatctttgctatatcttatctgtgtawagtttaaggacaggctcagaaagtatctgaaagttgcattctgcattttaaactgttgctagctgactacagaatatctgaagtctcccactgcactcccactgaagtctcactactgcactagtagcttctagggtcaaaattttatgcagaggctgcatttaactcccctagagatagatctggacagcaagaatgatgaaccttctccaagattgttaacttttcatgttttcctttccttgttccataagctccaactccagatgcaacaatagtccttcctcttaggtaagtgtg

SEQ ID NO: 17666 - DNA, 599 bp, Chicken  19866894225987_1
  misc_feature (1)..(121): n is any nucleotide
nnnnnnnnnnnnnnnnnnnnnnnnnnnnnnnnnnnnnnnnnnnnnnnnnnnnnnnnnnnnnnnnnnnnnnnnnnnnnnnnnnnnnnnnnnnnnnnnnnnnnnnnnnnnnnnnnnnnnnnnnaaattgtttaggctgtgtatgtataacactatgcaagtctgcaccaattacaaatcacaagccaatatgtacctcgtcactaatatgtgcatccacatatcacagaatcacagaatattttcagttgaaaagctttctggggtcacctgatcaaattctcttctgaaaacaggggtaayttaaaagccagagacattttactcactattctttccagatggattttgactacctccaggattggaggcttcaccacctctctgagcatcagtgtccgtgccacaaatccctactctcattgtgatgaattctttcccctatctagttgaagcatttctggctgcaactcatggccaatgcctctagcccttytggtgcaaaagtagagtgtgacagctttctctgcaatcatccactgggtgaagacaacagttagattttcccctttgccttcccagggatgttctcagggatgagc

SEQ ID NO: 17667 - DNA, 600 bp, Chicken  19866894225987_2
ctcgtcactaatatgtgcatccacatatcacagaatcacagaatattttcagttgaaaagctttctggggtcacctgatcaaattctcttctgaaaacaggggtaayttaaaagccagagacattttactcactattctttccagatggattttgactacctccaggattggaggcttcaccacctctctgagcatcagtgtccgtgccacaaatccctactctcattgtgatgaattctttcccctatctagttgaagcatttctggctgcaactcatggccaatgcctctagcccttytggtgcaaaagtagagtgtgacagctttctctgcaatcatccactgggtgaagacaacagttagattttcccctttgccttcccagggatgttctcagggatgagcagtagcacataatagccatctccttcactgtactctcactatgtatgtacctagacttcagcgaaacaggagcccagtacaggcacatgcatgcatgcaacggtgaagcgaaagtgtagaaaagattataataaaataagaacttaatatttaaaacagatcttttcatttaagtgaaacaactctagagatta

SEQ ID NO: 17668 - DNA, 476 bp, Chicken  19866894225992_1
gaaaggaaaaaagcactccagtaagaattatgctgctccaaacatcatttgccatactcacttatgaactcatttccacggctgatttagtagatgtgctcttgcatgtaatctaaaaaagcagaagtgaatccttcctataaaaatcagagaattttaaccacttttaagatatctcatatggtcttataatacagcactttagataaaattatttcataaacttcccccaaatggtttgcattcatacaaggcagaacaaaaagcagtaaaagccttcacagaatcagagcttgactktaagcatttcttgcaaaaattaaaaagttctcaagaatgaaatcttgattgttattcctggaggaaaatatagaaacttgacaggaaaattgcaccatatcatgagtttggggagatttgtttatgtttttataaaagagagatatcaatattcagtagatttataaaacacatta

SEQ ID NO: 17669 - DNA, 600 bp, Chicken  19866894225993_1
aataaagtaattaataagttcttttctaagttcactttttattgctaagctgtttgggagttttaatatgtctgttctttcacacttcagctttctttatcatgctacgaaatcagctactaatactgatatttcaatgggaaagatatgatgtcacaaagcccaagcaaatacaaggatttaattcaaaaatataaactctgaagaaagaggacactacagaagtgagcaaaggtcacacaaaaggaaggaaaaaataaaggcaatttatttaagttcatgacataagttttacacagmacattcacccgccagttcygtcaaacactgtatatgagagtgcttaaaacatgttayaaagaattctccagtgtcatcacagctcaatccatkcttttattcagtctggccctttaaaacttttctgttatttattcagtcatgtccttttgtttgtgttctagcagctgggatttgatgtattgatgtgtacttacgtaaggaacatttaccaccactttgtcctagcgctctgcacacatcagggtttactgccaaaatggcatgttttctggaatggaaatatttaatatggtctat

SEQ ID NO: 17670 - DNA, 600 bp, Chicken  19866894225993_2
tcttttctaagttcactttttattgctaagctgtttgggagttttaatatgtctgttctttcacacttcagctttctttatcatgctacgaaatcagctactaatactgatatttcaatgggaaagatatgatgtcacaaagcccaagcaaatacaaggatttaattcaaaaatataaactctgaagaaagaggacactacagaagtgagcaaaggtcacacaaaaggaaggaaaaaataaaggcaatttatttaagttcatgacataagttttacacagmacattcacccgccagttcygtcaaacactgtatatgagagtgcttaaaacatgttayaaagaattctccagtgtcatcacagctcaatccatkcttttattcagtctggccctttaaaacttttctgttatttattcagtcatgtccttttgtttgtgttctagcagctgggatttgatgtattgatgtgtacttacgtaaggaacatttaccaccactttgtcctagcgctctgcacacatcagggtttactgccaaaatggcatgttttctggaatggaaatatttaatatggtctattaaaagaaaaatggtattt

SEQ ID NO: 17671 - DNA, 600 bp, Chicken  19866894225993_3
gagttttaatatgtctgttctttcacacttcagctttctttatcatgctacgaaatcagctactaatactgatatttcaatgggaaagatatgatgtcacaaagcccaagcaaatacaaggatttaattcaaaaatataaactctgaagaaagaggacactacagaagtgagcaaaggtcacacaaaaggaaggaaaaaataaaggcaatttatttaagttcatgacataagttttacacagmacattcacccgccagttcygtcaaacactgtatatgagagtgcttaaaacatgttayaaagaattctccagtgtcatcacagctcaatccatkcttttattcagtctggccctttaaaacttttctgttatttattcagtcatgtccttttgtttgtgttctagcagctgggatttgatgtattgatgtgtacttacgtaaggaacatttaccaccactttgtcctagcgctctgcacacatcagggtttactgccaaaatggcatgttttctggaatggaaatatttaatatggtctattaaaagaaaaatggtatttgggggcctatgtaagttgtcattactaatgcggtagca

SEQ ID NO: 17672 - DNA, 600 bp, Chicken  19866894225993_4
tctttatcatgctacgaaatcagctactaatactgatatttcaatgggaaagatatgatgtcacaaagcccaagcaaatacaaggatttaattcaaaaatataaactctgaagaaagaggacactacagaagtgagcaaaggtcacacaaaaggaaggaaaaaataaaggcaatttatttaagttcatgacataagttttacacagmacattcacccgccagttcygtcaaacactgtatatgagagtgcttaaaacatgttayaaagaattctccagtgtcatcacagctcaatccatkcttttattcagtctggccctttaaaacttttctgttatttattcagtcatgtccttttgtttgtgttctagcagctgggatttgatgtattgatgtgtacttacgtaaggaacatttaccaccactttgtcctagcgctctgcacacatcagggtttactgccaaaatggcatgttttctggaatggaaatatttaatatggtctattaaaagaaaaatggtatttgggggcctatgtaagttgtcattactaatgcggtagcaagaaagaaactcgattttttgattgctgctagttgt

SEQ ID NO: 17673 - DNA, 600 bp, Chicken  19866894225996_1
ctccggttaaaacaaaacaaatgaaacagaaaactaacttcacctaagatatcattctttgctttgctttttactttactagaaaccttatgggtcatacattgtgcttcctcatggaagaaaatgacaacacagaaaatcacttctagacacctgggatgaaaatagctcccctcatttagatacagcaggactttagtcaagaccagagattcttacagtctaaattgtaggtctgctgaggcattatattctttattgatcttataaactgcactgcatgcaaaatagaaagcagtraaattattaacccatcagtactttttgtcctcataagtgatactgctgcactagtatacaagattgattttgacactatcagaaaagagagtgtttttatttggtatttatgtatatataaaaataatcttcatatgcatattttcacacatcaaccatggatcagaaatgtacygtttggctaattgggtaggaaaaatgcagcacgtgtaatagcacagcctctcccactggggccactatagaggcacataaaaatcatcagctgtactaaagtgaggacgaagcctagaaatggat

SEQ ID NO: 17674 - DNA, 600 bp, Chicken  19866894225996_2
catttagatacagcaggactttagtcaagaccagagattcttacagtctaaattgtaggtctgctgaggcattatattctttattgatcttataaactgcactgcatgcaaaatagaaagcagtraaattattaacccatcagtactttttgtcctcataagtgatactgctgcactagtatacaagattgattttgacactatcagaaaagagagtgtttttatttggtatttatgtatatataaaaataatcttcatatgcatattttcacacatcaaccatggatcagaaatgtacygtttggctaattgggtaggaaaaatgcagcacgtgtaatagcacagcctctcccactggggccactatagaggcacataaaaatcatcagctgtactaaagtgaggacgaagcctagaaatggatctgttcttgaagtccctctgtgcctttccctacccttgcttatctatgcaaggtaaattggtctctccatcattcatgattaggaaaagatagaatctctatgggaagcaaacacttctttatatacgtctttcagttctacattttcagaactcccttacacacttaatcctat

SEQ ID NO: 17675 - DNA, 599 bp, Chicken  19866894226001_1
  misc_feature (1)..(29): n is any nucleotide
nnnnnnnnnnnnnnnnnnnnnnnnnnnnnctagagggaggagggggaagggattttggacacatacgcttcgcattaactgccatcactgggaactttgcagcctcctcggtgaagagggagacttacacagctggagggagcgcaggcgggcggccctgccttcccctccctggggaggatgagcccaaggagaagaaagggaagctgggctcggcgagccacagacgtcgtgtgtttacagagcggggtgggaggggagcagcggacgtggggcagccccgggtccctgcagcccttmcacagctcatcccaatgaagcatctcagccacgctgctttgctttcaggacagcacgaatttaccctttggagcccattccacagaggaggatgttgatactctttgctctttggctgcagggatgagtcctggggagttttccccaccttcatccatcccaaccgtaggcatgcttttcacacacmcatttgattggaatgcagaagcaaagcaaagccagggtcctgcccaggctttgaaatgcccaaatggagagaagcatccaggatcccatgctccatgcaccaaataatcctc

SEQ ID NO: 17676 - DNA, 600 bp, Chicken  19866894226001_2
caaggagaagaaagggaagctgggctcggcgagccacagacgtcgtgtgtttacagagcggggtgggaggggagcagcggacgtggggcagccccgggtccctgcagcccttmcacagctcatcccaatgaagcatctcagccacgctgctttgctttcaggacagcacgaatttaccctttggagcccattccacagaggaggatgttgatactctttgctctttggctgcagggatgagtcctggggagttttccccaccttcatccatcccaaccgtaggcatgcttttcacacacmcatttgattggaatgcagaagcaaagcaaagccagggtcctgcccaggctttgaaatgcccaaatggagagaagcatccaggatcccatgctccatgcaccaaataatcctcagccattgggcgcttcccagggagagctgcaggagaggtccagctcctgccaggtgctgatgggtcattgctgggttggagtgtgcagcagccactgagcatcccctccgtgggcgaccttttgaaccaggacaggaattcaagccctcatcctgacacggggccttctggcttctgcctgcctcgtt

SEQ ID NO: 17677 - DNA, 600 bp, Chicken  19866894226001_3
ccagggagagctgcaggagaggtccagctcctgccaggtgctgatgggtcattgctgggttggagtgtgcagcagccactgagcatcccctccgtgggcgaccttttgaaccaggacaggaattcaagccctcatcctgacacggggccttctggcttctgcctgcctcgttacatttaataaaataggtattagagcggcggagtctcgtttcagccctcggtttggaacagctgcctcctcatttttgtgcaggccttgaaggagaagtcgcaagatgttaagcccttgttataaacrggggatttgaggagagttactggcatctgcaggacattgcttggctgggacaagacctggggaaagctgggagccctctgccatcgcatgggatgtcctggtttgtcctccagtggcctcaggcggtgccactgctcagtgacagctctcagccagggctcagccccactctgagcatccctgggctgcagcagcacagtgcacagtgcagtgctcrgggtgtattcatcccaaaagcaaggagtttggtcaggctgtgttcccccatgtgggctgtgagcccctctgtgctctgtctct

SEQ ID NO: 17678 - DNA, 600 bp, Chicken  19866894226001_4
cctcggtttggaacagctgcctcctcatttttgtgcaggccttgaaggagaagtcgcaagatgttaagcccttgttataaacrggggatttgaggagagttactggcatctgcaggacattgcttggctgggacaagacctggggaaagctgggagccctctgccatcgcatgggatgtcctggtttgtcctccagtggcctcaggcggtgccactgctcagtgacagctctcagccagggctcagccccactctgagcatccctgggctgcagcagcacagtgcacagtgcagtgctcrgggtgtattcatcccaaaagcaaggagtttggtcaggctgtgttcccccatgtgggctgtgagcccctctgtgctctgtctctatgctgctcttgcagtttttccagtatccactgctggcagggctcagctttcacccaagctctgggatgctcgagtttgcagaggttttctttggcacagggctccctgctcccggtgccgtcacccagagaggacggggacacagcaacgtggggctgtggcactgatcctgcagcactcaggctgaggttttcatctctgtctccttcccaagcc

SEQ ID NO: 17679 - DNA, 527 bp, Chicken  19866894226012_1
cctgtaactgccctgctgatggagagtaatttatagacatgctgaagaagctggatttatactctgatcatgggagagaaatgctggtacataaaattggtagtaccttttgcagtatatacctaaatctttaatttttatagcagctaagagaaaaataagcttgcatacagtgcacacagcataaactgaccataaatcttagccctgcagagagccaaggaaagaatcctggtgattcctggtccaggctgtttgcaaaagtgccgtgataacggtcgttctgagagccagagcccratccacacggctcctttggatttcctatccccaaacaggaaaagyggaggtgcccatcactgggatggagcaccagcggggaagtggcgctccatgggatcagcccacacagctgagcagggattcacttctcagaccacacaaagcatttctctctctccctcctttagggtaaagcaaaaatggaagagtccattttaaagcaaagcccaacctagctgctggaa

SEQ ID NO: 17680 - DNA, 482 bp, Chicken  19866894226012_2
agaagctggatttatactctgatcatgggagagaaatgctggtacataaaattggtagtaccttttgcagtatatacctaaatctttaatttttatagcagctaagagaaaaataagcttgcatacagtgcacacagcataaactgaccataaatcttagccctgcagagagccaaggaaagaatcctggtgattcctggtccaggctgtttgcaaaagtgccgtgataacggtcgttctgagagccagagcccratccacacggctcctttggatttcctatccccaaacaggaaaagyggaggtgcccatcactgggatggagcaccagcggggaagtggcgctccatgggatcagcccacacagctgagcagggattcacttctcagaccacacaaagcatttctctctctccctcctttagggtaaagcaaaaatggaagagtccattttaaagcaaagcccaacctagctgctggaa

SEQ ID NO: 17681 - DNA, 565 bp, Chicken  19866894226014_1
acatccccttgcacatcctcttgcacatctccttgcacgtccccttgcatgtccccttgaacatctccttgcacgtctcattgcacatccccttgcagactctgcctgagcagctgtgctcctgggacagagcatggaggtggcagtgagaggggacgtggggacgatgagcatcccaggaccaaacccctctcagagctgtgacagcagagctgctgctgtttgtcacacctctccacagtggagatccacggacgcatcagcagtgtcagaattaacttctgcgggtggctgtgaatrcacagagtgacatttttgcttcatcccccgaaggccccagggctgtgccagatgctctgggaggttggggatgagcccaggctccatggttcccctctagatgggagctacccaagctgacacctttctattcccacccagagctgtattcctctattggatgcatggagcagcctgaggcagctccaccaccccattttctgggtcacccttctccatctcagctccagcacagcaccactcatcaacacacttcagagcaacc

SEQ ID NO: 17682 - DNA, 599 bp, Chicken  19866894226018_1
  misc_feature (1)..(82): n is any nucleotide
nnnnnnnnnnnnnnnnnnnnnnnnnnnnnnnnnnnnnnnnnnnnnnnnnnnnnnnnnnnnnnnnnnnnnnnnnnnnnnnnnnaactgatggaaaaagattcagtatttgtcaatatctactatgctatggagaacctaatcaatgaattagtctatcaattaattagtctaggcagcaaatgactccctgtactgttggtccatgaagtggtcaataaagtcaaatgtctagtttaatgtttctcacgtaatgattgtgttatgggaagaatagtaaaagcaatgtttatacagtttcarttgtgtatttcaagtgtttggcttacagaaagatatccagataattctattataaagacaatctgcacaaatttcaggattttaatgctgtgaagatatttgtcctcctatctgtgtaagctgcgtcttcatgagactgatattccttacaggaaatgatagtgtggtgtaaggatgcatgtatgctgagccaccattctatcagttcttctacatgggaaatcgtggcaagaatgtttggcttttatgccaactcctcttcattttggcaggggccagagtgagtcacctctctgtga

SEQ ID NO: 17683 - DNA, 600 bp, Chicken  19866894226020_1
tgaaacatgaaatatcacattattgttctgcaaaagaccaggcttttaaagatagtattgtaatctggaaacagactgaaaaatgtaaaaaggttatatccaacgttagaagtaatctgcatgctcaccaaagcctagatcatctcaaagcggtaataattcactgacagcagatacccttattttgatatttgctatatgtttagtattcattacagcagattattgcaggattaccacaacatttttgcctttgtggtaccattcaataaaatctaattttcatgtaatctggacttyttttattctctcccttygcaaaatctgcattcattgcctccaagcctgactaattgccatccacttcagtttcacattgttttcacttcttgaattttatacgggtaatattcaaaagtatttttgcacacttttatattaattgctatcaaatgtgtgtgcacaaaggcaagaatgcctacttttctttcatactacagggcaaacagccagacttaaaatgcttcataattaggcattttaccagattgtaacaaaagatgtatttgcttacttttactgcaaagtcaattataaata

SEQ ID NO: 17684 - DNA, 600 bp, Chicken  19866894226020_2
cattattgttctgcaaaagaccaggcttttaaagatagtattgtaatctggaaacagactgaaaaatgtaaaaaggttatatccaacgttagaagtaatctgcatgctcaccaaagcctagatcatctcaaagcggtaataattcactgacagcagatacccttattttgatatttgctatatgtttagtattcattacagcagattattgcaggattaccacaacatttttgcctttgtggtaccattcaataaaatctaattttcatgtaatctggacttyttttattctctcccttygcaaaatctgcattcattgcctccaagcctgactaattgccatccacttcagtttcacattgttttcacttcttgaattttatacgggtaatattcaaaagtatttttgcacacttttatattaattgctatcaaatgtgtgtgcacaaaggcaagaatgcctacttttctttcatactacagggcaaacagccagacttaaaatgcttcataattaggcattttaccagattgtaacaaaagatgtatttgcttacttttactgcaaagtcaattataaatatgcaaaattcaaagggg

SEQ ID NO: 17685 - DNA, 518 bp, Chicken  19866894226025_1
aatacactgacttttatgaaagaagacttttataacttattaccagttctaaaaggcttttttgagcttcctgtaacatttaattgatcatacaactgctataaaattctacaggacatgtgaaacgttacaaaagaaaagcaattctcattcagtttcataaatattacttccacaaaattcacctaaaatattattatcctatatgttgtaatatagtttacatatgcatattcttactttatgaaactaaaatgaatatgcttgtattttaaatatcttcacatattctgacactgrcaatctaaatagaaaactacttgatgtgtaatatatagctcatttataatttcagtttcatggtttaaataactagcttataatataggtgagatataaagatatcttacattttattcaagtataaaaataatcattaccttatggacttaatacaattttactggcattggtttctaagaaccatatacatgtagacaagctgcattccatgaaca

SEQ ID NO: 17686 - DNA, 600 bp, Chicken  19866894226034_1
ccctcccctcccagcccataaactgttgacacaattgcaccactcagcttggcgtcatctgcagacttgctgaggattcattcagtcccatcatcgatgtcattgataaagatgttaaagagtatcagtcccaagacagactgcagggggataccactagtcatcgacctccacctggccatagagccattgacaacaatcctctggctatgactatccaaccaattccttatccactgaatagtccactcttcaaacctgtatttctccaatttagagacaaggatatggtgtggaacywtgtcaaaggccttgtacaagtccaggtaaatgacattggttgcctttcctttgcccactgattccatcactccatcagattggtcaagcacgaccttcccttggtgaagccatgctggctgtctcagatcacctgctcatcctccatgtgccttaacatctcttccgggaggatttgtttcatgaccttcccagacgcagagatgagacttacttgcctgtagttccccaggtcctccttccaccctctattataaataggagtgatatttccctttttccagtcagtgaggacttcac

SEQ ID NO: 17687 - DNA, 600 bp, Chicken  19866894226034_2
cctcccctcccagcccataaactgttgacacaattgcaccactcagcttggcgtcatctgcagacttgctgaggattcattcagtcccatcatcgatgtcattgataaagatgttaaagagtatcagtcccaagacagactgcagggggataccactagtcatcgacctccacctggccatagagccattgacaacaatcctctggctatgactatccaaccaattccttatccactgaatagtccactcttcaaacctgtatttctccaatttagagacaaggatatggtgtggaacywtgtcaaaggccttgtacaagtccaggtaaatgacattggttgcctttcctttgcccactgattccatcactccatcagattggtcaagcacgaccttcccttggtgaagccatgctggctgtctcagatcacctgctcatcctccatgtgccttaacatctcttccgggaggatttgtttcatgaccttcccagacgcagagatgagacttacttgcctgtagttccccaggtcctccttccaccctctattataaataggagtgatatttccctttttccagtcagtgaggacttcacc

SEQ ID NO: 17688 - DNA, 600 bp, Chicken  19866894226037_1
ctcccccttcctcctcccttagattgccttctgaaaagtgattatctttaaaagagatattcattcttttttgtggttttatttctttcaacctgctagtcaatggaaaacctttaatcaaatttacaaataggcttcattttcctctctacagattcttcagatgtgaaaaaaacacaagatcataccccaaagtcccacaccaagaaacacagtaagtccatgattgtaatggttataacatccgtggtttataatggttgtttgattgagggaaaagaaacacattaagagtagatwcccactgggaaggaaaagggagcattctgagttcattttgaaagcagaactggttagatggttactctgattgaattctccaaggatctgactgtttctggtgctgtttgctcacgttatttttgatgcagtagttttgcacttctctaattgcttttatcaataggagcctagagggaaaccaccagaattcagtttcctccaccctgtgttgagcttagctggtgatctgaaatatagggatgacaaaggaggtgatggactaaataaggaaggtctgtgcacaggccctgctgtgcc

SEQ ID NO: 17689 - DNA, 561 bp, Chicken  19866894226039_1
tatggtatctaccactgattctttacaaacaaactggaatacaaagcaagttatttttacaaaaaggtgccacaagcagttggtgtcagaagtggctggaactgagttctgactcccatcacctgtgttagaccttctgaaacagaaatattgccaacctttgcagaatagtttgatggattctcttgctacatacatgctggcatccctggtgtgctttcggttgttaagagtgaggattttttaatatacacttcattttccttgtagctgttccaagcagttagcgtttacacattytctcaccaactgactgatctstgtatagatttgagaaccaaattctgttgactgaaagggatgaaagcattgccgccagctaatgaaaatgagcaggtacttttctggaaactggttagatctgttttcccttgtcataggatttttcctaataggagacatgtaattctttaaaacaatacgtagtgctccattccagatactgtctaactggcattcatctgtcatatagtaaagtagttaaacaccacatatgggtta

SEQ ID NO: 17690 - DNA, 540 bp, Chicken  19866894226039_2
tttacaaacaaactggaatacaaagcaagttatttttacaaaaaggtgccacaagcagttggtgtcagaagtggctggaactgagttctgactcccatcacctgtgttagaccttctgaaacagaaatattgccaacctttgcagaatagtttgatggattctcttgctacatacatgctggcatccctggtgtgctttcggttgttaagagtgaggattttttaatatacacttcattttccttgtagctgttccaagcagttagcgtttacacattytctcaccaactgactgatctstgtatagatttgagaaccaaattctgttgactgaaagggatgaaagcattgccgccagctaatgaaaatgagcaggtacttttctggaaactggttagatctgttttcccttgtcataggatttttcctaataggagacatgtaattctttaaaacaatacgtagtgctccattccagatactgtctaactggcattcatctgtcatatagtaaagtagttaaacaccacatatgggtta

SEQ ID NO: 17691 - DNA, 600 bp, Chicken  19866894226043_1
tctcttaattgcaagcagtacaggactgacagtctagaaatatttgtcaaacgttgtcaagtaatggaataagacttatctcatccacacacttcataattcaaacatctaactctatttcattccaagttaagcctggaaaatattgcatatataagcatatatacttctatgaatttccagctttactattaaaaattctgtttagtatgtaatctatcccagcactggggttacttttgttccaaaaaaggtagttccctcataccgtcctctaattcaaatggaaatagcttctcyccagtgcttatcactttctactgattacctagacttgctgcagagygcatagtttgctcgtggcacatgaatctcatgactggacttgttctttcaatatactgatgcatgatggcacatcaggctcatgcacctactgaagttatcagatgagcattacagtgtgctacttctgtatgtcccgtgtaatgaattatagcaaaagctgggaatttaatttagattgccactttgcaatagagattttacctaacctgcaacacattgccacgcaatttttagcttacacattataccgtg

SEQ ID NO: 17692 - DNA, 600 bp, Chicken  19866894226043_2
tcaaacgttgtcaagtaatggaataagacttatctcatccacacacttcataattcaaacatctaactctatttcattccaagttaagcctggaaaatattgcatatataagcatatatacttctatgaatttccagctttactattaaaaattctgtttagtatgtaatctatcccagcactggggttacttttgttccaaaaaaggtagttccctcataccgtcctctaattcaaatggaaatagcttctcyccagtgcttatcactttctactgattacctagacttgctgcagagygcatagtttgctcgtggcacatgaatctcatgactggacttgttctttcaatatactgatgcatgatggcacatcaggctcatgcacctactgaagttatcagatgagcattacagtgtgctacttctgtatgtcccgtgtaatgaattatagcaaaagctgggaatttaatttagattgccactttgcaatagagattttacctaacctgcaacacattgccacgcaatttttagcttacacattataccgtgataatttgattatgggtcccaactgagctaacatctaggttgagat

SEQ ID NO: 17693 - DNA, 600 bp, Chicken  19866894226043_3
tgcatgatggcacatcaggctcatgcacctactgaagttatcagatgagcattacagtgtgctacttctgtatgtcccgtgtaatgaattatagcaaaagctgggaatttaatttagattgccactttgcaatagagattttacctaacctgcaacacattgccacgcaatttttagcttacacattataccgtgataatttgattatgggtcccaactgagctaacatctaggttgagattaaatttgcaagtatgatactctagtgcaggcatccatgtggaactgcctgaatatgascatggtatcaaagctctacaaacagcttttttcaaagctttttatcaaagctttacaaacatgggcagaggcagcccatgtatcaacattcaaggccattttgtgtgcagtagctgagacatctccacagaaaagatacaggaatctggggagactcaaacttcctgcaccatcagctggaggctgattcttcccaccagctgtaccaggtatctatttgtgtgactgtacgtaggccacctccattcagaccttccaccagcaaagataaggacaagatcaaactcacacacgaggaga

SEQ ID NO: 17694 - DNA, 600 bp, Chicken  19866894226043_4
taaactctccaggtttcactaaatgaacaactcttacactgacgacagcaggagcataggcatctgacttaaaggtagaaacctaaatgttttgcactgattttcatttttctgttttattcctgatgatccgcagctgatgctttctattttcttatatttattttaaaagcttgtcctctcctagtgagctaattgccaagatgggctagtcttctgagacagaattaattctttttgactcagtaggcaggacttagaaacttttgttgacagatctctctggtctcttgaaacccrtccatttcacactgatcatatgctttttttcctttggataaggcttctcatttccaatatgctttgaaacatttcaactacttaccccaaagattaaagcagtggtaaggattttaccattctacagctctattcagtcatgcagtagcacttaagagattgaggcaaagtcccatgactttaaaaattcaatttggcatttgtacgacgacagcggatgtaggtcaaaaagacaatttcattaaagtgaagtttgatcttcagtcagtaagaagccattgattgaacgaagctttctgc

SEQ ID NO: 17695 - DNA, 599 bp, Chicken  19866894226054_1
  misc_feature (1)..(131): n is any nucleotide
nnnnnnnnnnnnnnnnnnnnnnnnnnnnnnnnnnnnnnnnnnnnnnnnnnnnnnnnnnnnnnnnnnnnnnnnnnnnnnnnnnnnnnnnnnnnnnnnnnnnnnnnnnnnnnnnnnnnnnnnnnnnnnnnnnncatttcttacacagtaggaagataggaagatattttcatatattctctttggactaaatggtcattaggcaagagaaaaggtccaaacttcacttgagctggacttcacactaaaacaaagtggatgctactgtgtatcatggaagcattctatgaaacaatacagctstcacccagtaacttgttgccctggtttctcttacccagtcgagactgtaacgtcccatcatccgttgaagccatgtcattgagtctcagaagccctcgacctctttccacccaagactgagagtttttatcaaatacaaacagcttgcactgaatctgtaacagaaaacacccatgtggcacagtggttgactgaagcagttttgtatttcattgtattcagacatctagttggtcaaaaccaatctaatttcatactgggactctgaactgcttgyagacatggcatcatgtctttca

SEQ ID NO: 17696 - DNA, 600 bp, Chicken  19866894226054_2
cattctatgaaacaatacagctstcacccagtaacttgttgccctggtttctcttacccagtcgagactgtaacgtcccatcatccgttgaagccatgtcattgagtctcagaagccctcgacctctttccacccaagactgagagtttttatcaaatacaaacagcttgcactgaatctgtaacagaaaacacccatgtggcacagtggttgactgaagcagttttgtatttcattgtattcagacatctagttggtcaaaaccaatctaatttcatactgggactctgaactgcttgyagacatggcatcatgtctttcacaatagatccctcaaattgtgctaatatggtgaggtttttatgaaggtagatattcttaaaataatgcctgcattcaaaatcaaaaagcaagaatgatgttcagatagggtgcaagcttccacagctcccttcttcttgccctgatccygtcttgctattaytatatattatagcttgcttggtctgagaaaacagatgttatgattgctttgtacaagaatatgagttgaactgacatgcagaaagcatgcttaagattcgccaggattgtccaaat

SEQ ID NO: 17697 - DNA, 430 bp, Chicken  19866894226054_3
actgaatctgtaacagaaaacacccatgtggcacagtggttgactgaagcagttttgtatttcattgtattcagacatctagttggtcaaaaccaatctaatttcatactgggactctgaactgcttgyagacatggcatcatgtctttcacaatagatccctcaaattgtgctaatatggtgaggtttttatgaaggtagatattcttaaaataatgcctgcattcaaaatcaaaaagcaagaatgatgttcagatagggtgcaagcttccacagctcccttcttcttgccctgatccygtcttgctattaytatatattatagcttgcttggtctgagaaaacagatgttatgattgctttgtacaagaatatgagttgaactgacatgcagaaagcatgcttaagattcgccaggattgtccaaatg

SEQ ID NO: 17698 - DNA, 417 bp, Chicken  19866894226054_4
cagaaaacacccatgtggcacagtggttgactgaagcagttttgtatttcattgtattcagacatctagttggtcaaaaccaatctaatttcatactgggactctgaactgcttgyagacatggcatcatgtctttcacaatagatccctcaaattgtgctaatatggtgaggtttttatgaaggtagatattcttaaaataatgcctgcattcaaaatcaaaaagcaagaatgatgttcagatagggtgcaagcttccacagctcccttcttcttgccctgatccygtcttgctattaytatatattatagcttgcttggtctgagaaaacagatgttatgattgctttgtacaagaatatgagttgaactgacatgcagaaagcatgcttaagattcgccaggattgtccaaatg

SEQ ID NO: 17699 - DNA, 600 bp, Chicken  19866894226062_1
cgcttggatggtggccgggcggcgccggggaagcagccggcggaacggttggaagcggctcacggcgggatgagtcagatggctgaaagcaagaagtggctttaatgccttaatagaaccaagccgcgataattaggagccgtcagagagggagtggataggctgcatttagaggaagaacgagatccagctgctcccgcagctccggcacgttgccagcacacggagcagcagcggctttctcatggcgcagtgcttgttgtgctcatttctcacccttacacgcacaacgtacccatkctgtacagctacgacggggcacttcgcattgggtctgtccctttagcgtgccccgaagcacacacacagcgctgtacagcacagctggtccctgcgtgccccataagccaccacaccgctgygtgctctgcacagctgatccccactgcacgtaaagcccggtgaatgccgagcacacggaccttcctgtacacacactgtgttactggagcccagtgtgggtacaatcctgtacgtgtggggacattttaacataatccatgcaaaaagtcattcataaggcaagaggtgaggtgttcc

SEQ ID NO: 17700 - DNA, 600 bp, Chicken  19866894226062_2
gccgcgataattaggagccgtcagagagggagtggataggctgcatttagaggaagaacgagatccagctgctcccgcagctccggcacgttgccagcacacggagcagcagcggctttctcatggcgcagtgcttgttgtgctcatttctcacccttacacgcacaacgtacccatkctgtacagctacgacggggcacttcgcattgggtctgtccctttagcgtgccccgaagcacacacacagcgctgtacagcacagctggtccctgcgtgccccataagccaccacaccgctgygtgctctgcacagctgatccccactgcacgtaaagcccggtgaatgccgagcacacggaccttcctgtacacacactgtgttactggagcccagtgtgggtacaatcctgtacgtgtggggacattttaacataatccatgcaaaaagtcattcataaggcaagaggtgaggtgttcccaggcctctgggcatccatgcacagcagctgctgcaygccagttgtaatgaaagcaattacctatcattaaacacacaaggcaygcattttgttctccttgttttgcccaagcacagactgt

SEQ ID NO: 17701 - DNA, 600 bp, Chicken  19866894226062_3
tccctttagcgtgccccgaagcacacacacagcgctgtacagcacagctggtccctgcgtgccccataagccaccacaccgctgygtgctctgcacagctgatccccactgcacgtaaagcccggtgaatgccgagcacacggaccttcctgtacacacactgtgttactggagcccagtgtgggtacaatcctgtacgtgtggggacattttaacataatccatgcaaaaagtcattcataaggcaagaggtgaggtgttcccaggcctctgggcatccatgcacagcagctgctgcaygccagttgtaatgaaagcaattacctatcattaaacacacaaggcaygcattttgttctccttgttttgcccaagcacagactgtgtttctgggtcaaaacrtcccgcgttgcctcttccttcctaacagctctcttcttgaaatgtggcatyagcacacttgattcctgcacgccttgatgatgtctgctttttgatggaaagacattttacccttcgttaccttctctgtcttatttcctactactggaagctggggtttgctaaaatttcatgtgtcatattaatacaattcaggga

SEQ ID NO: 17702 - DNA, 600 bp, Chicken  19866894226062_4
ctggtccctgcgtgccccataagccaccacaccgctgygtgctctgcacagctgatccccactgcacgtaaagcccggtgaatgccgagcacacggaccttcctgtacacacactgtgttactggagcccagtgtgggtacaatcctgtacgtgtggggacattttaacataatccatgcaaaaagtcattcataaggcaagaggtgaggtgttcccaggcctctgggcatccatgcacagcagctgctgcaygccagttgtaatgaaagcaattacctatcattaaacacacaaggcaygcattttgttctccttgttttgcccaagcacagactgtgtttctgggtcaaaacrtcccgcgttgcctcttccttcctaacagctctcttcttgaaatgtggcatyagcacacttgattcctgcacgccttgatgatgtctgctttttgatggaaagacattttacccttcgttaccttctctgtcttatttcctactactggaagctggggtttgctaaaatttcatgtgtcatattaatacaattcagggattttggaagattttcgaatggatttctgatcggcaaagtctccaaaa

SEQ ID NO: 17703 - DNA, 600 bp, Chicken  19866894226062_5
tccccactgcacgtaaagcccggtgaatgccgagcacacggaccttcctgtacacacactgtgttactggagcccagtgtgggtacaatcctgtacgtgtggggacattttaacataatccatgcaaaaagtcattcataaggcaagaggtgaggtgttcccaggcctctgggcatccatgcacagcagctgctgcaygccagttgtaatgaaagcaattacctatcattaaacacacaaggcaygcattttgttctccttgttttgcccaagcacagactgtgtttctgggtcaaaacrtcccgcgttgcctcttccttcctaacagctctcttcttgaaatgtggcatyagcacacttgattcctgcacgccttgatgatgtctgctttttgatggaaagacattttacccttcgttaccttctctgtcttatttcctactactggaagctggggtttgctaaaatttcatgtgtcatattaatacaattcagggattttggaagattttcgaatggatttctgatcggcaaagtctccaaaaataaatggaatccgtcagttttccctccccgttttattctctccctttcccagca

SEQ ID NO: 17704 - DNA, 600 bp, Chicken  19866894226062_6
acacacactgtgttactggagcccagtgtgggtacaatcctgtacgtgtggggacattttaacataatccatgcaaaaagtcattcataaggcaagaggtgaggtgttcccaggcctctgggcatccatgcacagcagctgctgcaygccagttgtaatgaaagcaattacctatcattaaacacacaaggcaygcattttgttctccttgttttgcccaagcacagactgtgtttctgggtcaaaacrtcccgcgttgcctcttccttcctaacagctctcttcttgaaatgtggcatyagcacacttgattcctgcacgccttgatgatgtctgctttttgatggaaagacattttacccttcgttaccttctctgtcttatttcctactactggaagctggggtttgctaaaatttcatgtgtcatattaatacaattcagggattttggaagattttcgaatggatttctgatcggcaaagtctccaaaaataaatggaatccgtcagttttccctccccgttttattctctccctttcccagcattgcattccctcccttacttttgctgtgtctttttgtgccctccttccacc

SEQ ID NO: 17705 - DNA, 372 bp, Chicken  19866894226062_7
cgttaccttctctgtcttatttcctactactggaagctggggtttgctaaaatttcatgtgtcatattaatacaattcagggattttggaagattttcgaatggatttctgatcggcaaagtctccaaaaataaatggaatccgtcagttttccctccccgttttattctctccctttcccagcattgcattccctcccttacttttgctgtgtctttttgtgccctccttccacccctgcgttacgtcgggacgtcagggcaggctgcaccagaggaatctggtcatgtggctgcccarcagattaatgaacctttgtgcttttcagtctcccgagcagtcaaagtcagacagaatctgcagcaggacggc

SEQ ID NO: 17706 - DNA, 598 bp, Chicken  19866894226063_1
caaaatgtcctagctgtctcctgtctgcaacaactgtagatggagtacctctactaaagccatgatagctttgatatgcagacagcacctttggagagctgactcatcctccctggaggacttttttccccagaagccaacagaatttcaccctcctcccttctcattatcagtgaacatattatcaaagcttgatttgtagacacctccctggacacaaagaagaaaaaattgtggggccagaaaacaagttgtccagattacacacttatcctttatccccctccctcagcctccctsttggttttcagatttattgagcaatatttgagcagggttatctcagggttagtgaaatttctacactgtaaagctcagtgtcactaatgccacaagcttaaagtccctgaatcaatcaaactcagaggaaaatctgtgctgcccatacaaaatttcttggggaaaaaagaaacaaatcaaaacaaacgaaaaacaaacaaaagaacagcaaaaacaaacaaacaaacaaaaacagtagaaagaagaacactaacatcacaggtattattcatgcttaaccatattgcttaatactctt

SEQ ID NO: 17707 - DNA, 600 bp, Chicken  19866894226068_1
gggaagggaggagtcttcatcaagatgagcagttgttttttttcctgcagaagctactactgaaatattcagctaaattcagattaaccagctttgcactggttaacttgctagattaggttcataacatcgtgcttagtgaaactgttttctttcaaacacttctatattttaattactgttttctctaaggaatgtttttaagctttacatgcttttgagatcacgttgacttttgaaatggcccagctgctttatttctctgccctaagtacagcttcaggctgtgtttgttctgtyattgtaagttgctcttttccagtcaagcagcaccagggttagtgttatttaaaatcctagctaatggacttaccttttcttttccagctcttttattatgctggagtgaaggcaaatctgttgaacagctttttccttgtctttgtttcttctaatgggccgtgctccactctgagagtttatatagctgcagctcgaggaagaggaaaaaaagaaatattcttatgatgatctttttttcatttaatggatgagttgtacaattcagtagctgtcttctctcgtccagtttctttgaaa

SEQ ID NO: 17708 - DNA, 600 bp, Chicken  19866894226071_1
gtttgctatgaccttgcaaactaaggcatccatctgtcattttattatatattatattgcaatatcatattatatatttgtttatataaattttttatatatttattataattgtaatatgatcaccaatttaaggaactaggtagtttaccctatatctcctgtgaggaagaagtgaaaaatgcagcaaaatccctcttgatttactctgcagaatcgctactaaagatgatagtactaatacagttatctctgttaagccattaaccagatattccaggcatacaagattgttttctrctggcagctgcttcgaaatcaaggcatacttcttgtgctgctctatcaaatcttatgtttctcttgggatgggatataagatggttaatgtagtagaataacaccatgaatgtttatttttatgaacctagtattctaaggaatttttaaaatatgcttaaaaaaacaagaatgtatgaagtaaaagttaccattggtatctttagaaacttctaatgcattttttggataaaactgcaaaggtgatgaagaatactttttatttatttttgtttatttggtctttatttcctttactct

SEQ ID NO: 17709 - DNA, 600 bp, Chicken  19866894226073_1
ctgcagggttgaaagccagactgcacaggagcaatttgccagcagactgaccatgtcacatgtcttcctgtgaagacaaattgcagattctctagaaacaattatgctgggtgggagagacccattatatatttctctttaacctggactacttacttttcttgagtaaagctgacgtttgcaagaggttccgctgtttctttcccttcctcatcctcttttagtcctgtccctttgagtggaaagtttttcttttttaaatagcaaatttagggctcatacctgatatataaacaagakattgtcctttgtgtatcccatatttttagagagcaccataaggacagttgatttgacattgattataccaataaaatatgaagttttttccagtttatacaactgggcataataaggtcacatattacacttattcttcatgtaaatgtggtttcattataggtaccatcgtgcttactttgtagattaggaaaactgaactacagagaagctaggtgactttcttaagtttccagcctacacgagattcagcaaagggtccctgtgttctagcctacctgctggcatgtagctgacagt

SEQ ID NO: 17710 - DNA, 599 bp, Chicken  19866894226075_1
  misc_feature (1)..(145): n is any nucleotide
nnnnnnnnnnnnnnnnnnnnnnnnnnnnnnnnnnnnnnnnnnnnnnnnnnnnnnnnnnnnnnnnnnnnnnnnnnnnnnnnnnnnnnnnnnnnnnnnnnnnnnnnnnnnnnnnnnnnnnnnnnnnnnnnnnnnnnnnnnnnnnnnnagttttgtcaaggtgaaaaagatctctttcatcttctcatggggtttacattctgttcattctgtgtcctaattttaaaataaatttcctaattttaacccgatttaacagaagataaatagtctcaaatttgctaactttctttaagagggcastgcagataattttttttttttttttaatagagctctcacaagatgaaaaacaaaacatagaactctttttcttttttttctatattgtttcattatacaatgcttcctctcatcactggtattgccaagaaaagtgtaagaaagacttaaaactgcaaatatttgtcatatctcctgaactcatctgtctgttttgattccattttgtatccaaaccatctataaaaaacttaacaagattacttttacactgcaagtctgataatattgtagctgtatataagaggagctgctaatgt

SEQ ID NO: 17711 - DNA, 600 bp, Chicken  19866894226075_2
ttcctctcatcactggtattgccaagaaaagtgtaagaaagacttaaaactgcaaatatttgtcatatctcctgaactcatctgtctgttttgattccattttgtatccaaaccatctataaaaaacttaacaagattacttttacactgcaagtctgataatattgtagctgtatataagaggagctgctaatgtacttgaaactattttgaaaataaaggacaattacaggacaatgaaaccactttgaaaatgagggacaatactgggatgctttgaagctcttactgagacaaaarctttcctcagtatggaaatgttcaaaaccagctcataggctgcctagtattcttttgttaagtaagaattcgaagaatcagaaagcactgtaatatgtggcccttgttctatgatttctaatcttacttgagttcacatgagacagccatatcaaactgttctagctatgtttcttttttttttcttctgagaggttttagcagtatttcaatgttactttcctcaatggaataaattgtcagtcattttcatttcagctctgttttcatttactctttttgtgtatatttggaatctct

SEQ ID NO: 17712 - DNA, 600 bp, Chicken  19866894226079_1
tacctgtcagaacttcatcatgtccttgcagtagtaagccatttcccacgctgccaaatgggagagcacctgagataaaattatcttgtttgctgcactccatttgattttcaaaaacaaaacaaaaataaaaagtaaaaaacattcaatcagaaacaaatcacaaaaaaaggtctgtctttctttctttctttctttctttctttctttctttctttctttctttctttctttctttctttctttctttctttctttttcttccttccttccttccttccttccttccttccttccttycttccttccttccttccttccttccactctctctctctttctctctttctctctttctctctttctctctttctctctttctctctctctctttctctctttctctctttcttcaatctactcccttttattttcttcttgtccagccaaaaattaatatttagtaccaaaagattccctaaaaatgaatttgacttgaaactctctaaatacgcaagtaccgtttttaatttccataaaataaataaataataacaagaaagattgaccaagggtgttctaggacatttaatttcatta

SEQ ID NO: 17713 - DNA, 600 bp, Chicken  19866894226083_1
tttttttggtttcttttggttttcttttcctttaaaaacaacgaatgtgtgtttgtaatttgtaaaggtaaagaaaaaagaaaaagaaaagaaaaaaaaaaacgacataaaaaaaaaaaaagtgccaaaaaatgtactaagcatttcatttcccttcatacatgtctgtttttataagaacaatgtgaaaattgctgggattaaatatttttgaacatgatcaagtacttccgtgggaagctgtagtgttcggtgtaaccttaatacaacttgtgctgtgtttttaaatgcctcgagtcrgtctgcagcgctcggagctgccgtaaggcagaggcatggcctcgctgtgctgtagcaatgggagygggttggggctgggcacagcgctcaccttgctgcacggtgrcgatgccccaagggccacatcctgccctggtgcagccccgtgttgtccccagcagtttgtgcccaagggatgcagcrgtgatggctccctgtagggacaagtgctgagccataaggccatgtgtggctrctctgtcccagcctggttggctggcagcacccctgggaccccctgagaccttgggactcctggaa

SEQ ID NO: 17714 - DNA, 600 bp, Chicken  19866894226083_2
aggtaaagaaaaaagaaaaagaaaagaaaaaaaaaaacgacataaaaaaaaaaaaagtgccaaaaaatgtactaagcatttcatttcccttcatacatgtctgtttttataagaacaatgtgaaaattgctgggattaaatatttttgaacatgatcaagtacttccgtgggaagctgtagtgttcggtgtaaccttaatacaacttgtgctgtgtttttaaatgcctcgagtcrgtctgcagcgctcggagctgccgtaaggcagaggcatggcctcgctgtgctgtagcaatgggagygggttggggctgggcacagcgctcaccttgctgcacggtgrcgatgccccaagggccacatcctgccctggtgcagccccgtgttgtccccagcagtttgtgcccaagggatgcagcrgtgatggctccctgtagggacaagtgctgagccataaggccatgtgtggctrctctgtcccagcctggttggctggcagcacccctgggaccccctgagaccttgggactcctggaaaccctgtttggacctctggaaatcctgggaccttgctgagacccctcctgggatcccaatgggac

SEQ ID NO: 17715 - DNA, 600 bp, Chicken  19866894226083_3
ataaaaaaaaaaaaagtgccaaaaaatgtactaagcatttcatttcccttcatacatgtctgtttttataagaacaatgtgaaaattgctgggattaaatatttttgaacatgatcaagtacttccgtgggaagctgtagtgttcggtgtaaccttaatacaacttgtgctgtgtttttaaatgcctcgagtcrgtctgcagcgctcggagctgccgtaaggcagaggcatggcctcgctgtgctgtagcaatgggagygggttggggctgggcacagcgctcaccttgctgcacggtgrcgatgccccaagggccacatcctgccctggtgcagccccgtgttgtccccagcagtttgtgcccaagggatgcagcrgtgatggctccctgtagggacaagtgctgagccataaggccatgtgtggctrctctgtcccagcctggttggctggcagcacccctgggaccccctgagaccttgggactcctggaaaccctgtttggacctctggaaatcctgggaccttgctgagacccctcctgggatcccaatgggacctctgggaaagttaggtcccccctgggactcttccttgaga

SEQ ID NO: 17716 - DNA, 600 bp, Chicken  19866894226083_4
tgtgaaaattgctgggattaaatatttttgaacatgatcaagtacttccgtgggaagctgtagtgttcggtgtaaccttaatacaacttgtgctgtgtttttaaatgcctcgagtcrgtctgcagcgctcggagctgccgtaaggcagaggcatggcctcgctgtgctgtagcaatgggagygggttggggctgggcacagcgctcaccttgctgcacggtgrcgatgccccaagggccacatcctgccctggtgcagccccgtgttgtccccagcagtttgtgcccaagggatgcagcrgtgatggctccctgtagggacaagtgctgagccataaggccatgtgtggctrctctgtcccagcctggttggctggcagcacccctgggaccccctgagaccttgggactcctggaaaccctgtttggacctctggaaatcctgggaccttgctgagacccctcctgggatcccaatgggacctctgggaaagttaggtcccccctgggactcttccttgagactcctggaagcctgcagggaccctccttggactaccagtacccctgggacctcgctgaggccccttctgggatccca

SEQ ID NO: 17717 - DNA, 600 bp, Chicken  19866894226083_5
ggaagctgtagtgttcggtgtaaccttaatacaacttgtgctgtgtttttaaatgcctcgagtcrgtctgcagcgctcggagctgccgtaaggcagaggcatggcctcgctgtgctgtagcaatgggagygggttggggctgggcacagcgctcaccttgctgcacggtgrcgatgccccaagggccacatcctgccctggtgcagccccgtgttgtccccagcagtttgtgcccaagggatgcagcrgtgatggctccctgtagggacaagtgctgagccataaggccatgtgtggctrctctgtcccagcctggttggctggcagcacccctgggaccccctgagaccttgggactcctggaaaccctgtttggacctctggaaatcctgggaccttgctgagacccctcctgggatcccaatgggacctctgggaaagttaggtcccccctgggactcttccttgagactcctggaagcctgcagggaccctccttggactaccagtacccctgggacctcgctgaggccccttctgggatcccaatgggacctctgggaaagctgggacacccctgggacccttgagactcctgga

SEQ ID NO: 17718 - DNA, 600 bp, Chicken  19866894226085_1
agagcctgtggtggggaaagcaacctgcacagagtaagtgccacaaagcctccactatggctgcaaaccccatgtccccatggaggggacatgactgccactagatggcaagctgagcccagtgtcccggccatgcgggctcggggtggtgatgggggctggggctttggggaaagcttcatctgctgctttgcttggctcctgtgcttctttctcagggtcttctgtggcatctcgtggctctccccattgctgcaagtagggaaggcccagcctgctcccagttggcaagcccacccratgctagcaccttatgcaagctgtaacagcttccataagcaagcgactgcactacatactcggaggccattagtggagtgaaactcaagtgggtatttccttccagcaacggactgctctgattactgcataactaatttgaccaggagcatagtccatcgcgctgagtgcatttatctgagcaaggtaaaacttgggagatagaaatctcatttacaagggcagacgagtgcagctagatatacggccacacagccctggaagatggatggagcccagggagctcacaacagctgtgcc

SEQ ID NO: 17719 - DNA, 600 bp, Chicken  19866894226087_1
gaaagaccaaggaaaatattaacatatccatcatgttaatgaaaaataacagataacccaaaaaagccaaagttctgatgtcttctacatcaatattcacaataaaggtcaagtgctgatcttacacaattagcagtagtgacagcagtgaattagaaaggaaaagcttagatagtatgcgggcatgctaggtgtatcaaacatatggctggacatagtggcaccttgtagtcacagaaacagctgatgaaatcttagaagctctgaggacaaggcaagaagataagaaatgggaacatrtgtacactattaatcagttgaaaagaaggaaataatctttcagggaatagtttcaattcagaaatattttggaaggaaataatcttccagggaataatttcagttcaaaaatatttccaaacaaataatcacatttgtgtttctaatcatagwagaaaatagcacagatttattagaaatgtatcaagttagacaattctaagtgaatttattccatattcagacaacaataattgacaattcactgtacaattctggatgttatcaaaaagtgttcttctgtggtttgtcctacatcca

SEQ ID NO: 17720 - DNA, 600 bp, Chicken  19866894226087_2
tagaaaggaaaagcttagatagtatgcgggcatgctaggtgtatcaaacatatggctggacatagtggcaccttgtagtcacagaaacagctgatgaaatcttagaagctctgaggacaaggcaagaagataagaaatgggaacatrtgtacactattaatcagttgaaaagaaggaaataatctttcagggaatagtttcaattcagaaatattttggaaggaaataatcttccagggaataatttcagttcaaaaatatttccaaacaaataatcacatttgtgtttctaatcatagwagaaaatagcacagatttattagaaatgtatcaagttagacaattctaagtgaatttattccatattcagacaacaataattgacaattcactgtacaattctggatgttatcaaaaagtgttcttctgtggtttgtcctacatccattgtcatttcctttcccacattataatggtctgtaagacagtatagctgtatatatttttagtaatttcagaagattacaagccaggaaatatttttattatgttagaagacaggattgaagtttaaaatgaccttggtgaattggaaaaaat

SEQ ID NO: 17721 - DNA, 600 bp, Chicken  19866894226088_1
aatcaggaataaatcgagttaagtaggtttacattgatgaactcttgaacacctatatttatacatttgaacttctgaatatggaactgaatctcatctcagcagtatgaagacaaaataactagagcactcttttagatagaacttagataattcaattttcttggaagagagctgcactatgtgttccatcactctccaggaattcttagtttgctggttgtcgtggttttgtgatttctattatcagtattccacatcatatagtgcactgggagttaaagggttaatgctccagtyccatggattgtctatatttccaggtacctggttctcagaagagaggaagaactacatctcccagaagactttcgctgtgtggtttctgttttctgttcagagagaaagataaaactgcccgggactcatgagkctgtccttcttttgctgcttgtctctgcagtgtgtgctccccagccatttcgccttcaacgttagagtaaggccttcggttttagatactctctctcatttatttactagcttcaattccaattatattatattatattatattatattatattatattatattata

SEQ ID NO: 17722 - DNA, 600 bp, Chicken  19866894226088_2
tttagatagaacttagataattcaattttcttggaagagagctgcactatgtgttccatcactctccaggaattcttagtttgctggttgtcgtggttttgtgatttctattatcagtattccacatcatatagtgcactgggagttaaagggttaatgctccagtyccatggattgtctatatttccaggtacctggttctcagaagagaggaagaactacatctcccagaagactttcgctgtgtggtttctgttttctgttcagagagaaagataaaactgcccgggactcatgagkctgtccttcttttgctgcttgtctctgcagtgtgtgctccccagccatttcgccttcaacgttagagtaaggccttcggttttagatactctctctcatttatttactagcttcaattccaattatattatattatattatattatattatattatattatattatattgtgttatcttgcatactgctatcatatttattaaattaattttctcctttaacttgttgctgctgttttgtttttaggcctatctccctacctttttcccttcccccctctcccctctcccggggagtgga

SEQ ID NO: 17723 - DNA, 600 bp, Chicken  19866894226088_3
cggttttagatactctctctcatttatttactagcttcaattccaattatattatattatattatattatattatattatattatattatattgtgttatcttgcatactgctatcatatttattaaattaattttctcctttaacttgttgctgctgttttgtttttaggcctatctccctacctttttcccttcccccctctcccctctcccggggagtggactggtgggtccctctgccacattcatcatggaatcatgccaaactagcccaaaactgtttgaaactggagaatcaytgtacgtatagtcaaattattcagtttgtttttatttttttttaaatcatgtctttaccagaattaatgcacatccagcactgtaactgttgcgatacaggaayccttacaattcctaaaayttgagatgatctaggtaaacctgctttatctgttgaaacagttgcccgggagggtggtggatgacccattcctgaagacattcaaagttaggctggatgggactctgagaaacctgatttagctgtaggtgttcctgttcattgcagtgaggtagtgggtgatgtgattcagcagtga

SEQ ID NO: 17724 - DNA, 600 bp, Chicken  19866894226088_4
catactgctatcatatttattaaattaattttctcctttaacttgttgctgctgttttgtttttaggcctatctccctacctttttcccttcccccctctcccctctcccggggagtggactggtgggtccctctgccacattcatcatggaatcatgccaaactagcccaaaactgtttgaaactggagaatcaytgtacgtatagtcaaattattcagtttgtttttatttttttttaaatcatgtctttaccagaattaatgcacatccagcactgtaactgttgcgatacaggaayccttacaattcctaaaayttgagatgatctaggtaaacctgctttatctgttgaaacagttgcccgggagggtggtggatgacccattcctgaagacattcaaagttaggctggatgggactctgagaaacctgatttagctgtaggtgttcctgttcattgcagtgaggtagtgggtgatgtgattcagcagtgacaacagtgatgtgaaaaacaaactatatgttccacatgtccatgcaagtttttatgagtgtggcatacagcctttctttcatcagttgtgaaagtgcatagcta

SEQ ID NO: 17725 - DNA, 600 bp, Chicken  19866894226088_5
attaaattaattttctcctttaacttgttgctgctgttttgtttttaggcctatctccctacctttttcccttcccccctctcccctctcccggggagtggactggtgggtccctctgccacattcatcatggaatcatgccaaactagcccaaaactgtttgaaactggagaatcaytgtacgtatagtcaaattattcagtttgtttttatttttttttaaatcatgtctttaccagaattaatgcacatccagcactgtaactgttgcgatacaggaayccttacaattcctaaaayttgagatgatctaggtaaacctgctttatctgttgaaacagttgcccgggagggtggtggatgacccattcctgaagacattcaaagttaggctggatgggactctgagaaacctgatttagctgtaggtgttcctgttcattgcagtgaggtagtgggtgatgtgattcagcagtgacaacagtgatgtgaaaaacaaactatatgttccacatgtccatgcaagtttttatgagtgtggcatacagcctttctttcatcagttgtgaaagtgcatagctagtggtggtgactctgttg

SEQ ID NO: 17726 - DNA, 371 bp, Chicken  19866894226095_1
cttttcttctcttttggagggagaaagacacaattattttcatgccagacgcacacagtcatgcacgctcaagccctcacgctgcaaaactctcattcctcccctcccatttaagcctctagtctccagaatttcttctgaaaagattcagtccctcaaggcctaaagacgtgcagagatgccataattcctccagttctggacatacaatttattctcatcaccttgtccataacctttcattcattctcagctcagttgcatctccctctctttcttttcctctcccatcttctctcycttccatcagtgtcaaaatgagagacatatattcttaaaaataaacaaataaataaaaaattaaaaaaaaa

SEQ ID NO: 17727 - DNA, 600 bp, Chicken  19866894226096_1
tctgataaccttgccaggcccaagctgcttctgtgcctgagatagggctccttctcagcccacatacaccaccagaggacaactgagagtcagtgataacaaatataagcctgaattcttctggagagctggaggcagcatgtctgttgttggctgtgcacaaagtcagcagtgaagtttttgctgctgtccttgctgttttagagccccaagactgaaatgatttccattgctgtggaagaaatagacaatagattgttttcagagtgacatgttgtgcgatttgcatttggagtagtratataattattatgccaattagtcacaaatggaggggagaaatttattctacgggtgggtgaggaagtgtttctaaatggtctattcaaaagagcaatacgaaaggaaagaggttcttcactttcatttgaataagtgtgtctccctgtgatggaatattaacaactttctttttgttgttcctacaggcagcacaaaccttgtgtgcgtagctcagctgaatgaccctatgcagaagttttccagctctgtagccaaaaatgctgcaaatcccttttggaaggaagagtttgtcttgtg

SEQ ID NO: 17728 - DNA, 600 bp, Chicken  19866894226097_1
gatgggtgagtggatggatggatagatggatgggtgggtggatggatggaggtctgtggaaccgggaaggctcaggagatgagagtcagacctacgtgacagaagcacagcttggtgctccacagcttctcccatccatgtggccctgccaggatctcagtggctttgcacctaagcctggtgctcggtacccaggcagcttccaatcatttcaaggagacctaggtgaccaattcttagtcaagtggggctttttcccagagcagcactactggacttggggacaagtgtcatggacaycctctgccaccaccatccgtagagggaggagcgccatctcctgacgtcgggtgtcctcctgcccycgrgctttcaggaggaaaaaggattagaaaatacttctgcagtattgttttcttacccatccagtgctttaacagcaaccaccacttcaagcataaagcaatgaaagcttggcaccaggtctccagctgaatgaaagagctcctcctgcgagctgggcactgagmgtcyctaacatggatggcctttcttcaggattgcttctttttaattaggtgctaatttgactaaaaattc

SEQ ID NO: 17729 - DNA, 600 bp, Chicken  19866894226097_2
gaaggctcaggagatgagagtcagacctacgtgacagaagcacagcttggtgctccacagcttctcccatccatgtggccctgccaggatctcagtggctttgcacctaagcctggtgctcggtacccaggcagcttccaatcatttcaaggagacctaggtgaccaattcttagtcaagtggggctttttcccagagcagcactactggacttggggacaagtgtcatggacaycctctgccaccaccatccgtagagggaggagcgccatctcctgacgtcgggtgtcctcctgcccycgrgctttcaggaggaaaaaggattagaaaatacttctgcagtattgttttcttacccatccagtgctttaacagcaaccaccacttcaagcataaagcaatgaaagcttggcaccaggtctccagctgaatgaaagagctcctcctgcgagctgggcactgagmgtcyctaacatggatggcctttcttcaggattgcttctttttaattaggtgctaatttgactaaaaattccccccattgtcactcctgctttgaaataaactcaccagcctcttagctgccactggagaccccgc

SEQ ID NO: 17730 - DNA, 600 bp, Chicken  19866894226097_3
ggctcaggagatgagagtcagacctacgtgacagaagcacagcttggtgctccacagcttctcccatccatgtggccctgccaggatctcagtggctttgcacctaagcctggtgctcggtacccaggcagcttccaatcatttcaaggagacctaggtgaccaattcttagtcaagtggggctttttcccagagcagcactactggacttggggacaagtgtcatggacaycctctgccaccaccatccgtagagggaggagcgccatctcctgacgtcgggtgtcctcctgcccycgrgctttcaggaggaaaaaggattagaaaatacttctgcagtattgttttcttacccatccagtgctttaacagcaaccaccacttcaagcataaagcaatgaaagcttggcaccaggtctccagctgaatgaaagagctcctcctgcgagctgggcactgagmgtcyctaacatggatggcctttcttcaggattgcttctttttaattaggtgctaatttgactaaaaattccccccattgtcactcctgctttgaaataaactcaccagcctcttagctgccactggagaccccgccac

SEQ ID NO: 17731 - DNA, 600 bp, Chicken  19866894226097_4
caattcttagtcaagtggggctttttcccagagcagcactactggacttggggacaagtgtcatggacaycctctgccaccaccatccgtagagggaggagcgccatctcctgacgtcgggtgtcctcctgcccycgrgctttcaggaggaaaaaggattagaaaatacttctgcagtattgttttcttacccatccagtgctttaacagcaaccaccacttcaagcataaagcaatgaaagcttggcaccaggtctccagctgaatgaaagagctcctcctgcgagctgggcactgagmgtcyctaacatggatggcctttcttcaggattgcttctttttaattaggtgctaatttgactaaaaattccccccattgtcactcctgctttgaaataaactcaccagcctcttagctgccactggagaccccgccacgaagtgcagtttgggaaagtgagaaggtctcagagattttgcaagaggcagaattagcagcacataattcatcgtgggttttcatccccagcacctcactgctaatcccagtcccctccgacgcctcaggctggtctgatcaagtagcagcagcaggtaggg

SEQ ID NO: 17732 - DNA, 600 bp, Chicken  19866894226097_5
tcttagtcaagtggggctttttcccagagcagcactactggacttggggacaagtgtcatggacaycctctgccaccaccatccgtagagggaggagcgccatctcctgacgtcgggtgtcctcctgcccycgrgctttcaggaggaaaaaggattagaaaatacttctgcagtattgttttcttacccatccagtgctttaacagcaaccaccacttcaagcataaagcaatgaaagcttggcaccaggtctccagctgaatgaaagagctcctcctgcgagctgggcactgagmgtcyctaacatggatggcctttcttcaggattgcttctttttaattaggtgctaatttgactaaaaattccccccattgtcactcctgctttgaaataaactcaccagcctcttagctgccactggagaccccgccacgaagtgcagtttgggaaagtgagaaggtctcagagattttgcaagaggcagaattagcagcacataattcatcgtgggttttcatccccagcacctcactgctaatcccagtcccctccgacgcctcaggctggtctgatcaagtagcagcagcaggtagggytgg

SEQ ID NO: 17733 - DNA, 600 bp, Chicken  19866894226097_6
tcyctaacatggatggcctttcttcaggattgcttctttttaattaggtgctaatttgactaaaaattccccccattgtcactcctgctttgaaataaactcaccagcctcttagctgccactggagaccccgccacgaagtgcagtttgggaaagtgagaaggtctcagagattttgcaagaggcagaattagcagcacataattcatcgtgggttttcatccccagcacctcactgctaatcccagtcccctccgacgcctcaggctggtctgatcaagtagcagcagcaggtagggytggctaacagctctgcatacgcactataaagcgatcaactcacagccaaccaaaaagagcaaggccctctaaggggcagggaagcctccatcttcagagctgctcataaagctgtcacctcgagatggctcctggttggaaatcccactttcccgcactggagaatcactaatttaggactctgctctatctgcctgccaatttgagggggacttgtgaaaaaaataaagttcagattggttgttgagacctctcttgttacacttggctgaaagcagccaacaggttcatgtgttaaac

SEQ ID NO: 17734 - DNA, 600 bp, Chicken  19866894226102_1
aactagctcaaaagagaatagtcttttttcaacattaagtaaagaataatcagatcacagctttctctagaaatgtgcttgtgaactctgaatttagaattagagatttggggtgaacttcccttttgtgcctctgtaaaaccagggacttgaacattggcctcctgtgtagaatacggactaaatcttgcatgtatcagagctattgtactttccagtccctgaggaagtccagtggctgctttttaccaaagcaccaactgggtacatttcagtaatttctgaaataaagcataatarcatttcacttaaaaatccatttaacattttagcctttaattatttatytgggatgatatgtacttttagctgtacactgtattttaaaagtctgctyctagctgagacttgatatccttttttttttttttttttagccaattttaatctcaactcatttttcttaaaccaatcaagaarctrgaccttggtgagatatttaaaacatctacacaaatgactatgaatgacattttagcatgggtctcctaaatgcagaccttggctatatgacatgaagcataacaaacattgccctga

SEQ ID NO: 17735 - DNA, 600 bp, Chicken  19866894226102_2
atcagatcacagctttctctagaaatgtgcttgtgaactctgaatttagaattagagatttggggtgaacttcccttttgtgcctctgtaaaaccagggacttgaacattggcctcctgtgtagaatacggactaaatcttgcatgtatcagagctattgtactttccagtccctgaggaagtccagtggctgctttttaccaaagcaccaactgggtacatttcagtaatttctgaaataaagcataatarcatttcacttaaaaatccatttaacattttagcctttaattatttatytgggatgatatgtacttttagctgtacactgtattttaaaagtctgctyctagctgagacttgatatccttttttttttttttttttagccaattttaatctcaactcatttttcttaaaccaatcaagaarctrgaccttggtgagatatttaaaacatctacacaaatgactatgaatgacattttagcatgggtctcctaaatgcagaccttggctatatgacatgaagcataacaaacattgccctgaaacctttttgacgtggtatctaaccatatggaaattctagaattttac

SEQ ID NO: 17736 - DNA, 600 bp, Chicken  19866894226102_3
aattagagatttggggtgaacttcccttttgtgcctctgtaaaaccagggacttgaacattggcctcctgtgtagaatacggactaaatcttgcatgtatcagagctattgtactttccagtccctgaggaagtccagtggctgctttttaccaaagcaccaactgggtacatttcagtaatttctgaaataaagcataatarcatttcacttaaaaatccatttaacattttagcctttaattatttatytgggatgatatgtacttttagctgtacactgtattttaaaagtctgctyctagctgagacttgatatccttttttttttttttttttagccaattttaatctcaactcatttttcttaaaccaatcaagaarctrgaccttggtgagatatttaaaacatctacacaaatgactatgaatgacattttagcatgggtctcctaaatgcagaccttggctatatgacatgaagcataacaaacattgccctgaaacctttttgacgtggtatctaaccatatggaaattctagaattttacgtgttttgagatggcaggcaatttttcattaatacgcctacacaggaac

SEQ ID NO: 17737 - DNA, 600 bp, Chicken  19866894226102_4
ctaaatcttgcatgtatcagagctattgtactttccagtccctgaggaagtccagtggctgctttttaccaaagcaccaactgggtacatttcagtaatttctgaaataaagcataatarcatttcacttaaaaatccatttaacattttagcctttaattatttatytgggatgatatgtacttttagctgtacactgtattttaaaagtctgctyctagctgagacttgatatccttttttttttttttttttagccaattttaatctcaactcatttttcttaaaccaatcaagaarctrgaccttggtgagatatttaaaacatctacacaaatgactatgaatgacattttagcatgggtctcctaaatgcagaccttggctatatgacatgaagcataacaaacattgccctgaaacctttttgacgtggtatctaaccatatggaaattctagaattttacgtgttttgagatggcaggcaatttttcattaatacgcctacacaggaacagtgcatactaaacattctgacttgctaacatggctatattaatacagaataggagtcttgagataattacagttttctgtct

SEQ ID NO: 17738 - DNA, 600 bp, Chicken  19866894226102_5
aatcttgcatgtatcagagctattgtactttccagtccctgaggaagtccagtggctgctttttaccaaagcaccaactgggtacatttcagtaatttctgaaataaagcataatarcatttcacttaaaaatccatttaacattttagcctttaattatttatytgggatgatatgtacttttagctgtacactgtattttaaaagtctgctyctagctgagacttgatatccttttttttttttttttttagccaattttaatctcaactcatttttcttaaaccaatcaagaarctrgaccttggtgagatatttaaaacatctacacaaatgactatgaatgacattttagcatgggtctcctaaatgcagaccttggctatatgacatgaagcataacaaacattgccctgaaacctttttgacgtggtatctaaccatatggaaattctagaattttacgtgttttgagatggcaggcaatttttcattaatacgcctacacaggaacagtgcatactaaacattctgacttgctaacatggctatattaatacagaataggagtcttgagataattacagttttctgtctgga

SEQ ID NO: 17739 - DNA, 568 bp, Chicken  19866894226102_6
gtctcctaaatgcagaccttggctatatgacatgaagcataacaaacattgccctgaaacctttttgacgtggtatctaaccatatggaaattctagaattttacgtgttttgagatggcaggcaatttttcattaatacgcctacacaggaacagtgcatactaaacattctgacttgctaacatggctatattaatacagaataggagtcttgagataattacagttttctgtctggaacagagaagtgtgtgaaatagatctttacttagatagccagaggaaaaaaaaaaaaaaamaaaacaattttctcctttaaatgtctatttaatcttagtaaatcactatccaatgaatttgagatggtctgctatactttaactacatacagcatttaaaatgtacgattggtctcttgccaatgtaggaatgtattctttcctggttacaagactgaggttttttcaaaggaaaatgtaaagaagatgtcaggaagatttaaatcctcatgggtgcctaaaatttcattcctttcactgggagacagatgtcaaagtaggaggaatg

SEQ ID NO: 17740 - DNA, 600 bp, Chicken  19866894226104_1
aggaaaaccaacagaaggaaaattatattttgttgctttatctaatacagttttaatcatcctgccaatccaagaagaaaaaaaataatatatgcaatgtaatgttcaatatttattcaagtaaggtaaagaccacagagctcatgctgagaattcaaaatgggcatgtgtacaaaatgaatagatttttctactggcagaaaatacaacaatttggaatatgcccttcaattattttagtggaaataaaaagagtgatgaagcatgtgaaaccatcaccttaaaccaacctgtaaactracataatctttggaagtatttctagattttccaaggggtagagaggctcatacttgtatgctgctacatctcaaaccaaacttcttggtttggatcttcctcatggtccacgctacttctctctttggtcactatcagagtctgtgctgaactgaacttagtggagctctctgaggcaaaaataaagcagatgttgtcaggagcttattcattacaagtatggcttaattcctttttttttttttttttttttttttacagagctttgtgctttcacacaattgtgtacacttatgccat

SEQ ID NO: 17741 - DNA, 600 bp, Chicken  19866894226108_1
tattcttgctttaaaatagaacaaaatgtcatagcatattattctcaagaatatgttgaagacagtattgtttaataactacaggaatattttaattttgtcactgtgcaccctgtcacagtttcaaagttgttattatatatctttgattttccatcagtaatgttttcttttgctccatgtgatatggatcttgttatttctccaataagtttctctaatatttcttacaggaacggtgaagacaacaaagtttaaacctgacccaaaacttatggaccatggtcagtccagcccagragatgtggatatgtacagtacaagaagctaagacatctgattacaaatctttgcaaagtattacagataagggggagggaagaagggaaggaataagccttgtgattcatactgtgtgaagtataacttaatcaggtattttcttatatttcaaactatattactgaattgaacagaatggtgtaatgaatattttgtttctcactacttacaagcagtgagaattcactcacattcagtgttattagtgcaacactgaggaaatcagatttgtctgtcttctcacaatgaagtttctct

SEQ ID NO: 17742 - DNA, 600 bp, Chicken  19866894226113_1
ttaatttctataacatttggaaaacataggaatgatgtttttgaactagcattagcactcccatatatataaattcttatatcacttctgagttaaaatatttttggcattccacatacaagccgttaacctcctgtaaattaattatgatgcaattccctctgtagaggccataacttggcttcatggattcttaatactgaattcccaattctttgtagttcatttaagagtggttgctttttgtttgtttgttcatttgttttgtatagtgaccaaaaagattaaaaaataaaattraaaaaaaaaaatcaaggataagagtacaaactatttatctctccctctctactcattaatcagagaatattgctgctcatgaagtgcttcacttaaagaataaattatttagcaccttctgctacagggagaaggaaactgtcctagataaatgagcctcatgatatttaagccctataatgtacccccaaatcttaaaattctttattctttaaatattactgattttggttctttccctttcacctgtcttcttccctgtcctctccacccttgcagcagaaaaatgccatgactata

SEQ ID NO: 17743 - DNA, 600 bp, Chicken  19866894226115_1
gcatccaccccatggaaatgggttcccagttccccccccatcggtgggagttgaagctcagcgacatgcaggatgtgtactttgccttttggctgtgtgcattttcccctttttgctctctgaaggacgtggtactgcctcatttctgctgagctccaaagccttttgtatttcccccatggccattgtcgtcaatgctctgcatatagactatcttgcaagtccttgcacttcattcagtcactgcttaatttaatccttgaatttaatcaatacttcatagatcaggtctttgctttraaaaaaaaaaaaaaaagactttttttttttggttgctttgtgcaggtgctattaggttaatgtaatcagtgtgataaagctgccctccacttaatgagcagccttgttctgcatgttggagaagggaggggagcttggaggagaaaaccacatgctgccgaagttgagtgtttgagacattagtgctggcagcaggctcagaggtgatcctttctgctgcaggaacaatgggaggcaccagcaagagcccacctcctccacaggagctccagaaagcaagagaagggacacgttgaggtc

SEQ ID NO: 17744 - DNA, 506 bp, Chicken  19866894226115_2
aaaaaaaaaaaaagactttttttttttggttgctttgtgcaggtgctattaggttaatgtaatcagtgtgataaagctgccctccacttaatgagcagccttgttctgcatgttggagaagggaggggagcttggaggagaaaaccacatgctgccgaagttgagtgtttgagacattagtgctggcagcaggctcagaggtgatcctttctgctgcaggaacaatgggaggcaccagcaagagcccacctcctccacaggagctccagaaagcaagagaagggacacgttgaggtcaargctggaggagaggtaggacagagggatgggcagggtgacagatggatggaggtggtgagggggatgtgcccaagctccgtggatctcatgagggagctctcctgcatggcatgtggctgctgccccactgggctgcccacactgggctctgctgtgggaccaatgggtgcacagtgctggtgtctgtgtactgggatagcacgctg

SEQ ID NO: 17745 - DNA, 599 bp, Chicken  19866894226117_1
  misc_feature (1)..(30): n is any nucleotide
nnnnnnnnnnnnnnnnnnnnnnnnnnnnnnactgtgaaaatatggaaacagaacacactttgccagaacagagcacctgtcctgccagggaaggctcagatgaggccagccacagaatacatgatttctggatctttaaatgcaacaagacaatggactcctcataaaacatgagtcaaccagagcttaccttgatgatgatttctgttttcccatccacatcttctgtttgctgaaataactggttctgatattgctgcaaggaaaaaacacagcaagtgtgtcatttcacagccacartatgcaacaagggcttgaaaagtgacgtctgtacggagggttcatgcagttctgtgaggaccaaagggaacctcactcctcccttacaggacagggactcagacatcggagtcagatgaagaagccaggagcaacaaggtgacaaactgtcaattacatacatttattcaagccctacttcatccaatctcaagacatgtggcttcactgtgtacaaggaactgcattccacacaagacagtgacaaattagcaaaggaaacccaaggaaaatgtcatggaaatagggccacgtgccat

SEQ ID NO: 17746 - DNA, 600 bp, Chicken  19866894226119_1
aaatagcatttaaagtggctttctgttgtcctaaatttctcaggattttacaaaagtgcttgttggccacaggaaggaaaaaaaaaagcacatttcccaccaataatttaaccaaaacagaaatgtttaaatccaagtatcaacagtggatcctcagccacaaacatattactccaaggggtgatcaccatttaaaaacatgttaaattatttcccatcacagtctgtgaataggtaggtaggaatatcatattgtaaacttgatgcaaggtatgtaaaagccatggtacaatgctttcrttgcccaaaattttctttgtaatgttcgggaaatcttgattaggtttcatattaaaaaaacaaaaacaaacaacaaaaaaacaccgtatatttaaatactttattaacagctgtatttataacataggaaccactgcagtggcagggtttgacagcttgtgttgatgtcacagtggtgttgcattgagattagaagcatctgcagccctggggtacccctctggagcctggcacaaatgtagggctgtcctttgtcagtggggagacctggtgccatggtcgcactgtgccatggtccct

SEQ ID NO: 17747 - DNA, 599 bp, Chicken  19866894226120_1
  misc_feature (1)..(87): n is any nucleotide
nnnnnnnnnnnnnnnnnnnnnnnnnnnnnnnnnnnnnnnnnnnnnnnnnnnnnnnnnnnnnnnnnnnnnnnnnnnnnnnnnnnnnnnttttttgaaaatatagatagatgtcataaaactctttttatctgttaaaggactttgttctatggtctgtaaatacaatcacagttgcatctgtatcaaggtggatattgtgagaaaggtctcagagagaaacctaaaggatggtatgcccatacaattgaattctgtagctgtgggatatagtacgcaaagtctactaccaaatatattaarcttctacatatggtgctatattgataggcaaactgaaataatggagaacacttggaaaatagaatgtaaatgtggctgccttaagagagaagaaggtagagttctccagtgtacttttattattttttcaattgaagccacaatttgcagcaatgatagtacacctgcctgggaacaaaggtgtcttcagatggcaactgctgccactacttatcacattgttgtcaaaggcatcaattgcactgcaaagcagtgaccttcttcagagccaagtttactttaaagcaggaaaaaaaaat

SEQ ID NO: 17748 - DNA, 518 bp, Chicken  19866894226120_2
ataggcaaactgaaataatggagaacacttggaaaatagaatgtaaatgtggctgccttaagagagaagaaggtagagttctccagtgtacttttattattttttcaattgaagccacaatttgcagcaatgatagtacacctgcctgggaacaaaggtgtcttcagatggcaactgctgccactacttatcacattgttgtcaaaggcatcaattgcactgcaaagcagtgaccttcttcagagccaagtttactttaaagcaggaaaaaaaaatcaagatgcttcctgaagtctagtrggatgaggtcccaaaagaattttatttaaatcgttatttttatttattacattagcaaacccatttccaatgaagagaaatgaaaaattgtactgccaaaagctcaatgtctttatttaccctaaagaaataggcacaacttcgttctgtacaagaagcttactgtagacaacaaagaaagaaaagcatgtattttctactggcctggtctatctagt

SEQ ID NO: 17749 - DNA, 600 bp, Chicken  19866894226121_1
ataggcaaatgaagctgcaacgtagagaactatcctgttggcaagaaagtattctgatgtcagattttaattcatctttttgtgcagctgttacagagactcacaccgtagcaactcccctcttcttccttgcaagatctctgtccatcggaatgctaatgttctcttatatgtagtgtttgatagctcccgacgtggtagctcacgacttctgtgagctacctgtacagccaatgccaatgtttcatctgtatttcctacttggctacctaatttcatggaggtgattcaatataggcrttagatatgaaagtcctgtgcttttttttgttctgtaagtgcactgaatttaatcccttctactatctattgacttttaattgtttattgtcttttttaaggtgtgaatgccctaaactcttactagagagaccctaatcagggtcttgtaggaaagttcctttaaattcatcattgtttcagtaaagaactttagaaaaacaaggtgtgtgtatatattatctcttcaagataacaaccttatgggtccattcatccaaatctgacatcaagactaacaagctactgaaataatcaaga

SEQ ID NO: 17750 - DNA, 600 bp, Chicken  19866894226122_1
atcagggctgtgccttgccagcaagccacatggcccagcagaggttttgttcccaccttgaactgtacccagcataactcaaagacactcgaaaagtctcatgaatcagcagagtgatcagtcttcacctgtgagcctgtcgggtccgtgagctgctgtttctgggactgggatgcatggttatctgatttcctcctgcctgtcgcagcacttgcccggctgcgggagctgatggagtgcaggctagtcttgtccccagagctggactggcttgtttccaggctgtgcctgggctcagcrccgagctgaggggcggatgggtctgtgctctgacctgcagaggggatggaagctcagcagggcttagtgatgggcactgctaaccgagcgtgccgttgggttttcaagccatttaatgtacaacactgtgtccttcccaacacgcaggcagcatcagttagccattaaatcctaagaccattaagattggaaaagacctctaagatcatctagtccaaccacccacctgccagcaatactaccactaaaaaaaagctgcatggtatgtcccctagagatcaagccaagagttgacccttc

SEQ ID NO: 17751 - DNA, 599 bp, Chicken  19866894226125_1
  misc_feature (1)..(5): n is any nucleotide
nnnnnatttttcccaccaccatctggtttaagctactcaaccttggttttgcattgaacattttagtactcctccctaataaccatcctgtcagacttcttactgtagtgcggcgcgcaaactcctcggagcagcactatgtgtgccttgccatcgtcctctcagcaaaagaccggtcgctaattgtttcaactaaagaagaattacttcaaaattatggtaagagttgttgtgttgtctgataatcctgacaatgttatgattgtctaggtctagactagacaaatgccttgtgtggargaattgtgtgtgactgaacttggagcttcaccagctttgctggccggctaattgaaggcagtcagtcatttcctttatgttttaatgatgtgatcagtttgcagaaagagtctgtaggtgcatttggcatctgagatcaagagaggaattacagtaagtgctataaaaaagcaaagtggagctgacaaggttgctsartttgcttgggagagctgtcagtgtggttagaggcctcaggttcagccatttcctgtctcctgctttatccttctttagagcttccaaaccaaatgttcagt

SEQ ID NO: 17752 - DNA, 600 bp, Chicken  19866894226125_2
agaagaattacttcaaaattatggtaagagttgttgtgttgtctgataatcctgacaatgttatgattgtctaggtctagactagacaaatgccttgtgtggargaattgtgtgtgactgaacttggagcttcaccagctttgctggccggctaattgaaggcagtcagtcatttcctttatgttttaatgatgtgatcagtttgcagaaagagtctgtaggtgcatttggcatctgagatcaagagaggaattacagtaagtgctataaaaaagcaaagtggagctgacaaggttgctsartttgcttgggagagctgtcagtgtggttagaggcctcaggttcagccatttcctgtctcctgctttatccttctttagagcttccaaaccaaatgttcagttcaggcaggccaatgactgaagatgagtagagggtagaggagcagccttctgtgcatttcaggcttagtactttgccgaaccagcacagtctttagtcttctgttctttcattttgaataataaacacgaatatttttttcttcacaattgtaattatttccaaaaacctaagcaggctgttatagaatattcttta

SEQ ID NO: 17753 - DNA, 600 bp, Chicken  19866894226125_3
aagaattacttcaaaattatggtaagagttgttgtgttgtctgataatcctgacaatgttatgattgtctaggtctagactagacaaatgccttgtgtggargaattgtgtgtgactgaacttggagcttcaccagctttgctggccggctaattgaaggcagtcagtcatttcctttatgttttaatgatgtgatcagtttgcagaaagagtctgtaggtgcatttggcatctgagatcaagagaggaattacagtaagtgctataaaaaagcaaagtggagctgacaaggttgctsartttgcttgggagagctgtcagtgtggttagaggcctcaggttcagccatttcctgtctcctgctttatccttctttagagcttccaaaccaaatgttcagttcaggcaggccaatgactgaagatgagtagagggtagaggagcagccttctgtgcatttcaggcttagtactttgccgaaccagcacagtctttagtcttctgttctttcattttgaataataaacacgaatatttttttcttcacaattgtaattatttccaaaaacctaagcaggctgttatagaatattctttacc

SEQ ID NO: 17754 - DNA, 600 bp, Chicken  19866894226126_1
cttataaatgttcagtgtgtggacagtccttcaccaccaatggaaacatgcacaggtgagtgctgatcgtgacccaggagtttggaaagcactacaggataaggggctgggtttgtttccttggaagagctttgaagctaactaaagaccttactttgactctgatatatgagtatggtgtgacacaaactcacacacactctacaactgctaggatgattacgttgtgggagggagccaaaattgagaaagggcttctagttctcctcacgtagtattcagatgctgtggatatccagragtattgctgttttggttttattattattattttgacaaacaggatggatttttctctaaggataaaaatatatagccaagctgttgaggaacagaattctaagtctgtagcttctgagtagcaggtgcaaatggttgtattggggcatctgtggtggtggtggatattaagcagtgaagtatccaagtcactgtgaagatgcctcttcagaatagaatcartcttatttgcaaacacatwcatcagtacttcctctctaggcaacttactgaactacagatccaggaaattatctgtga

SEQ ID NO: 17755 - DNA, 600 bp, Chicken  19866894226126_2
cgttgtgggagggagccaaaattgagaaagggcttctagttctcctcacgtagtattcagatgctgtggatatccagragtattgctgttttggttttattattattattttgacaaacaggatggatttttctctaaggataaaaatatatagccaagctgttgaggaacagaattctaagtctgtagcttctgagtagcaggtgcaaatggttgtattggggcatctgtggtggtggtggatattaagcagtgaagtatccaagtcactgtgaagatgcctcttcagaatagaatcartcttatttgcaaacacatwcatcagtacttcctctctaggcaacttactgaactacagatccaggaaattatctgtgaccagagtgtccaagcataatgcatgtagtttccttcatagggatgaagcagtatgtcagcagttgacaactagggaaatgatgtaaaatcacacagaatcgtagaatatccgaatttgcagtagtcccataaggatcatcaaatgcaactcctggctccacacaggaccaaacagaatttactggttagttacagttatactgactggaacacagctctagc

SEQ ID NO: 17756 - DNA, 600 bp, Chicken  19866894226126_3
aattgagaaagggcttctagttctcctcacgtagtattcagatgctgtggatatccagragtattgctgttttggttttattattattattttgacaaacaggatggatttttctctaaggataaaaatatatagccaagctgttgaggaacagaattctaagtctgtagcttctgagtagcaggtgcaaatggttgtattggggcatctgtggtggtggtggatattaagcagtgaagtatccaagtcactgtgaagatgcctcttcagaatagaatcartcttatttgcaaacacatwcatcagtacttcctctctaggcaacttactgaactacagatccaggaaattatctgtgaccagagtgtccaagcataatgcatgtagtttccttcatagggatgaagcagtatgtcagcagttgacaactagggaaatgatgtaaaatcacacagaatcgtagaatatccgaatttgcagtagtcccataaggatcatcaaatgcaactcctggctccacacaggaccaaacagaatttactggttagttacagttatactgactggaacacagctctagcacagccctatgaaataaaa

SEQ ID NO: 17757 - DNA, 599 bp, Chicken  19866894226130_1
  misc_feature (1)..(115): n is any nucleotide
nnnnnnnnnnnnnnnnnnnnnnnnnnnnnnnnnnnnnnnnnnnnnnnnnnnnnnnnnnnnnnnnnnnnnnnnnnnnnnnnnnnnnnnnnnnnnnnnnnnnnnnnnnnnnnnnnnnaggaagctgaacggctgagatttcagaaatgaacaaggcagtaggaatggggagcgtacagccccttttcagcccttaaaactccatcacattttcttgattagctacttctgaaggcatgtatgtatgtatatgtacatatatactctattttgaaatgcatacataagaaaaacttgttggakacttctaccagaagtggctgtgttatatatatggtagtttgccactactgaaccagtaactcttgacttgttgcaaggaaaagtaggtcctgaccytgtgtagagactctcttgttctcagttgcttttcttgtagttttcttccccatggagtgcaaatcttgctgcctccagtgatcaatcaatataaacaaatggaagccgcagctaaacatttatatwtattttgccaaattctatcctgctgtgctgaatttaagccaaaamcttctatgaagacagtttgtgtatgtgtcagg

SEQ ID NO: 17758 - DNA, 599 bp, Chicken  19866894226130_2
  misc_feature (1)..(19): n is any nucleotide
nnnnnnnnnnnnnnnnnnnaggaagctgaacggctgagatttcagaaatgaacaaggcagtaggaatggggagcgtacagccccttttcagcccttaaaactccatcacattttcttgattagctacttctgaaggcatgtatgtatgtatatgtacatatatactctattttgaaatgcatacataagaaaaacttgttggakacttctaccagaagtggctgtgttatatatatggtagtttgccactactgaaccagtaactcttgacttgttgcaaggaaaagtaggtcctgaccytgtgtagagactctcttgttctcagttgcttttcttgtagttttcttccccatggagtgcaaatcttgctgcctccagtgatcaatcaatataaacaaatggaagccgcagctaaacatttatatwtattttgccaaattctatcctgctgtgctgaatttaagccaaaamcttctatgaagacagtttgtgtatgtgtcaggatgaaagctgcctacagaatccaagcagagattatgtgataaaatgtgttcaggtcaaaaactggttgcagaaatgactgcaggatttctggatat

SEQ ID NO: 17759 - DNA, 600 bp, Chicken  19866894226130_3
cttctgaaggcatgtatgtatgtatatgtacatatatactctattttgaaatgcatacataagaaaaacttgttggakacttctaccagaagtggctgtgttatatatatggtagtttgccactactgaaccagtaactcttgacttgttgcaaggaaaagtaggtcctgaccytgtgtagagactctcttgttctcagttgcttttcttgtagttttcttccccatggagtgcaaatcttgctgcctccagtgatcaatcaatataaacaaatggaagccgcagctaaacatttatatwtattttgccaaattctatcctgctgtgctgaatttaagccaaaamcttctatgaagacagtttgtgtatgtgtcaggatgaaagctgcctacagaatccaagcagagattatgtgataaaatgtgttcaggtcaaaaactggttgcagaaatgactgcaggatttctggatatctttcagccaagccaggctggggagaatgaagatatttataataactttcagcgtagcctctgagatctaatatgagaagggaagaaagcaagtactcccaagagggctcctgagttactgttttgc

SEQ ID NO: 17760 - DNA, 600 bp, Chicken  19866894226130_4
ttgaaatgcatacataagaaaaacttgttggakacttctaccagaagtggctgtgttatatatatggtagtttgccactactgaaccagtaactcttgacttgttgcaaggaaaagtaggtcctgaccytgtgtagagactctcttgttctcagttgcttttcttgtagttttcttccccatggagtgcaaatcttgctgcctccagtgatcaatcaatataaacaaatggaagccgcagctaaacatttatatwtattttgccaaattctatcctgctgtgctgaatttaagccaaaamcttctatgaagacagtttgtgtatgtgtcaggatgaaagctgcctacagaatccaagcagagattatgtgataaaatgtgttcaggtcaaaaactggttgcagaaatgactgcaggatttctggatatctttcagccaagccaggctggggagaatgaagatatttataataactttcagcgtagcctctgagatctaatatgagaagggaagaaagcaagtactcccaagagggctcctgagttactgttttgctgatttaccagttagtgcttaaatcagctctggagcgaaggtgaa

SEQ ID NO: 17761 - DNA, 599 bp, Chicken  19866894226132_1
  misc_feature (1)..(119): n is any nucleotide
nnnnnnnnnnnnnnnnnnnnnnnnnnnnnnnnnnnnnnnnnnnnnnnnnnnnnnnnnnnnnnnnnnnnnnnnnnnnnnnnnnnnnnnnnnnnnnnnnnnnnnnnnnnnnnnnnnnnnnncactcgtcaacagcacttccccaagtgacaaaggactgggagagaagagagaaagacgggaaacactatccggggtgtatactttgcagtttgaagagagagcatccagaaccctctactttaattctaccaaggtgtctttctgctcagtaagaacctacagaaatagataaaaaggggkttctagttttaatgtcgctactgtaaattgcatcattccaattagtcttaaagattgcaaaattgaaagtaaggatgtaggtaggagagaaaattattgatgctaaataaaaatttgttcaaagcctttctcttcctttaaaacacacacacaaacactcaatactcttctttatatgtgcaaaaatatttgatgaaagagctctagtcccagtctaactccaagctattgttaccaacaaacttcagcctgtcacagtttaaagactaactgatccctgatacacacacaaataaata

SEQ ID NO: 17762 - DNA, 600 bp, Chicken  19866894226132_2
ttagtcttaaagattgcaaaattgaaagtaaggatgtaggtaggagagaaaattattgatgctaaataaaaatttgttcaaagcctttctcttcctttaaaacacacacacaaacactcaatactcttctttatatgtgcaaaaatatttgatgaaagagctctagtcccagtctaactccaagctattgttaccaacaaacttcagcctgtcacagtttaaagactaactgatccctgatacacacacaaataaatagaaaacagcacagtctctttctccagtagactcatatctcaytgtatggcctcattaactgtcaggsctccagatgggataccaagataatgaaagccagtcactctgatgtcaaggcaagaatctgttctctttccagctcctgttgtcataacaccgtgaattattccctcgtgcctgtacagcatgctaagttctgctcaagaaatttgccaggcatcatcacatcatcacagtttcaaagattttatcaggacaggagtttcagtcaatcagtaatgaaaattgagagctaaggtgatttctcaggccagcttcaacaagcacacagtacaagggttc

SEQ ID NO: 17763 - DNA, 600 bp, Chicken  19866894226132_3
aagtaaggatgtaggtaggagagaaaattattgatgctaaataaaaatttgttcaaagcctttctcttcctttaaaacacacacacaaacactcaatactcttctttatatgtgcaaaaatatttgatgaaagagctctagtcccagtctaactccaagctattgttaccaacaaacttcagcctgtcacagtttaaagactaactgatccctgatacacacacaaataaatagaaaacagcacagtctctttctccagtagactcatatctcaytgtatggcctcattaactgtcaggsctccagatgggataccaagataatgaaagccagtcactctgatgtcaaggcaagaatctgttctctttccagctcctgttgtcataacaccgtgaattattccctcgtgcctgtacagcatgctaagttctgctcaagaaatttgccaggcatcatcacatcatcacagtttcaaagattttatcaggacaggagtttcagtcaatcagtaatgaaaattgagagctaaggtgatttctcaggccagcttcaacaagcacacagtacaagggttccattgtgcaaagttcatcagaagga

SEQ ID NO: 17764 - DNA, 599 bp, Chicken  19866894226135_1
  misc_feature (1)..(52): n is any nucleotide
nnnnnnnnnnnnnnnnnnnnnnnnnnnnnnnnnnnnnnnnnnnnnnnnnnnntaaattgtttataccatttagtatttactaggactgttagcatcacaataagaaataatactgtaacagcatatcacattttgtttgattttgtagtgtcatgctgtcttgctctttcatactttcttgataacgggatatctgtgttgtccctgctacctcactactaaaacaataggaattggaaattggatgaaataaaggttggataaccctagattttcagggtaaaggtgtttttttttttkttttkttttgttttggtttgtttgtttgtttgtttttaagcattgatgaaggcgtgttttgtattaggaaaccatacaggaaacaaggggttatattttcctgctgagtatgaacattttccttactatagctttgatctctttttaacttttcctaaggaaaaaaatactacacatgtaaatgtttctttctatatggccttgtttatccttaaaataggtcccctttaattcatataagatattttctttgtgagtgtgtatgcttgcaaaccagatggcaagctgttttacaagtt

SEQ ID NO: 17765 - DNA, 599 bp, Chicken  19866894226135_2
  misc_feature (1)..(47): n is any nucleotide
nnnnnnnnnnnnnnnnnnnnnnnnnnnnnnnnnnnnnnnnnnnnnnntaaattgtttataccatttagtatttactaggactgttagcatcacaataagaaataatactgtaacagcatatcacattttgtttgattttgtagtgtcatgctgtcttgctctttcatactttcttgataacgggatatctgtgttgtccctgctacctcactactaaaacaataggaattggaaattggatgaaataaaggttggataaccctagattttcagggtaaaggtgtttttttttttkttttkttttgttttggtttgtttgtttgtttgtttttaagcattgatgaaggcgtgttttgtattaggaaaccatacaggaaacaaggggttatattttcctgctgagtatgaacattttccttactatagctttgatctctttttaacttttcctaaggaaaaaaatactacacatgtaaatgtttctttctatatggccttgtttatccttaaaataggtcccctttaattcatataagatattttctttgtgagtgtgtatgcttgcaaaccagatggcaagctgttttacaagttagaga

SEQ ID NO: 17766 - DNA, 599 bp, Chicken  19866894226137_1
  misc_feature (1)..(68): n is any nucleotide
nnnnnnnnnnnnnnnnnnnnnnnnnnnnnnnnnnnnnnnnnnnnnnnnnnnnnnnnnnnnnnnnnnnnctgagtgttgctgtggcccagcgctatctggatgaagccgagcgggagaagcagcagtacatgaaggagctgcgggaataccagcagtcggaagcctacaagatgtgcacggagaaaatccaggagaaaaagatcaaaaaaggtgtgctgcgttggtgccctttgctcgggatgcagcccggtgctgctgggggtggtcctggggggggtctcctgggggtaacctgcttcyttcttaccagaggacgccggctctgcggcagcaaacaccctgctgaacgggcacccgcacaaggtgaggcactgcgggctgtgtggggaaactgaggcatgtggtgctactgggtttggcccgtggggtgggcgaggaggggctgagagagacccaggttgggctccaggactccgcttcccmctgaaacggagcctggagctgcaggaggcagcacacggccgtcccctgcctgccacctccttgtcctcagggtgggggcatgggggtgggacacggggtccccctgtctgacccat

SEQ ID NO: 17767 - DNA, 600 bp, Chicken  19866894226137_2
aaatccaggagaaaaagatcaaaaaaggtgtgctgcgttggtgccctttgctcgggatgcagcccggtgctgctgggggtggtcctggggggggtctcctgggggtaacctgcttcyttcttaccagaggacgccggctctgcggcagcaaacaccctgctgaacgggcacccgcacaaggtgaggcactgcgggctgtgtggggaaactgaggcatgtggtgctactgggtttggcccgtggggtgggcgaggaggggctgagagagacccaggttgggctccaggactccgcttcccmctgaaacggagcctggagctgcaggaggcagcacacggccgtcccctgcctgccacctccttgtcctcagggtgggggcatgggggtgggacacggggtccccctgtctgacccatcccctgctgctccccaggctggcgagtgcggcgatgccttctccacctttgacgttcccatcttcacagaggagttcttggaccaaaacaaaggtgtggggctggggaaggggctgagtttggggtggggatcgctgagcccctctgatcccgctctgtccctgcagcccgggaggccgagctg

SEQ ID NO: 17768 - DNA, 600 bp, Chicken  19866894226144_1
agtgagaaccattggtgatgagtggatggttggactggatgatcttgtgggtcttttccaaccttagcgattctatgattctatggaagaactgccattcaacaagtaattacaacttgtctgtgtgccaggatgctgctctgagtttagttgtatgcagctaaaacagttgctgtttcatattaaaaaaacaatgttccaactactgtgagcagtttggatataatggtgctggcagttggtgaggattttctatgatcagaataaaaatacgaaacaaacacatactgtatgtgctcyaaatcaaaatgctgaaggtgatgctatagttgtgtggtttctgtagataaccagcaccaggcggagaagttgtcacctggttaagttggatgaaccagaatttctgcaggtggttaacctgtggtacgtgccggccagccttgctgtgtgaactgttacggcctgggctctgctggcacagaagactttgtgctgctacagtgaacttggtctgagggactggtttggctcagaactctgccgtaagggttatttcttaagccaaatcagttgtgatctcatttattgttggacattgca

SEQ ID NO: 17769 - DNA, 600 bp, Chicken  19866894226149_1
ggagggaagccctctcgcagctcactgcagtgaaccagtaacgattggcccgtcagggggtgatgtgtcatctgcagctatttgtgttccattgcctttaattatttatccaaataacaaagagcgctgtagctcttgcttgtgagatgctatttttaagcctcgtctccttggtggtttcagccccagatgactaataattgcatttggtgtctggagaaaagaagttgctgcaaagtggagctttttagaggggtctttccctgcgaggaggggcgggggctgtggggtggggtgacyttytgggggcgcatccctccccactgctgtgggtgtgggtgagctcctggtcacagcattgacctttctctctggaaggaaaggcagcagcaggaggagaggaacgtcctggatttgcgtgacaagaaggacgaggaacgccggaagatccgggaggagaaggcacgcctggcacggcgtgctgccatccaggtagtgccgaggccctgcgccgtgcccggtgctgcagcagtacctcagcctgtccctgcatctccgggggcttcccatggaactgagttctagtgggcgctccctgtg

SEQ ID NO: 17770 - DNA, 600 bp, Chicken  19866894226149_2
gggaagccctctcgcagctcactgcagtgaaccagtaacgattggcccgtcagggggtgatgtgtcatctgcagctatttgtgttccattgcctttaattatttatccaaataacaaagagcgctgtagctcttgcttgtgagatgctatttttaagcctcgtctccttggtggtttcagccccagatgactaataattgcatttggtgtctggagaaaagaagttgctgcaaagtggagctttttagaggggtctttccctgcgaggaggggcgggggctgtggggtggggtgacyttytgggggcgcatccctccccactgctgtgggtgtgggtgagctcctggtcacagcattgacctttctctctggaaggaaaggcagcagcaggaggagaggaacgtcctggatttgcgtgacaagaaggacgaggaacgccggaagatccgggaggagaaggcacgcctggcacggcgtgctgccatccaggtagtgccgaggccctgcgccgtgcccggtgctgcagcagtacctcagcctgtccctgcatctccgggggcttcccatggaactgagttctagtgggcgctccctgtggag

SEQ ID NO: 17771 - DNA, 600 bp, Chicken  19866894226162_1
gtggtttctttccattgtttatttggatttttcgtttcaaattgagctcagaccaggctttgcttctggagaactgggggttgttcagttttctgcttcttggtttttgactgtgggtatatctcccttccctcttacatcctttcaaaatgagggtctaaattctagatgctaagaatgggaaaagtgagaaagcataaaaatccctttttccaaattctcagtttttgtaaactgaaaaaaaaaaaaaaaccttcaaaattttgctatctgaaaaaaaaaaaaaagaaagagagagakgaagaaatatctctaacatatttcaccactttcttgtattttctgtctttccaatagagaaaaggaagggcaggcccacaggggagggaagagccagaaacgagggaaagaagttatgcgattaaaaatcaaagcactttaaaatgaaacatgggctcttatttttatatttttaaacataggaataatgtgacatcttaagctgaacatgtttttctttttcagtctgacatttcaaaatgaaacacaggttttcatttcaaggtattatttcatatccacgcacacatgaaatcaaaa

SEQ ID NO: 17772 - DNA, 600 bp, Chicken  19866894226164_1
tttagaccctcattttgaaaggatgtaagagggaagggagatatacccacagtcaaaaaccaagaagcagaaaactgaacaaccccccagttctccagaagcaaagcctggtctgagctcaatttgaaacgaaaaatccaaataaacaatggaaagaaaccacatgttttatcctgacaccttgttcagaaacgctccattttccttctaaactttccagcctaatttgcaaaaaaacacctaattcagtaaaactcagcttctccctcaggccattgctgcacaaggttttgctgcacraggaggaaggctygagcatcccraactgccaagctcattacacccagggtgcaagaaatatgagctccaaatgagatgccaaatccagaaygggctcctgggagacagcacgtgcccctgcactccctgctgagaactccagcacctcatgtttgcaggggacactgcagctgtgaggtccgggggcagaagggctgctggtgggcactccatctgccaataaagcagccactaacacctccaaccgtcctcgtttggtgaacagcgctgtttgtctaaggctgggcaaactcctggaaa

SEQ ID NO: 17773 - DNA, 600 bp, Chicken  19866894226164_2
tttgaaaggatgtaagagggaagggagatatacccacagtcaaaaaccaagaagcagaaaactgaacaaccccccagttctccagaagcaaagcctggtctgagctcaatttgaaacgaaaaatccaaataaacaatggaaagaaaccacatgttttatcctgacaccttgttcagaaacgctccattttccttctaaactttccagcctaatttgcaaaaaaacacctaattcagtaaaactcagcttctccctcaggccattgctgcacaaggttttgctgcacraggaggaaggctygagcatcccraactgccaagctcattacacccagggtgcaagaaatatgagctccaaatgagatgccaaatccagaaygggctcctgggagacagcacgtgcccctgcactccctgctgagaactccagcacctcatgtttgcaggggacactgcagctgtgaggtccgggggcagaagggctgctggtgggcactccatctgccaataaagcagccactaacacctccaaccgtcctcgtttggtgaacagcgctgtttgtctaaggctgggcaaactcctggaaaaaaaatcccccct

SEQ ID NO: 17774 - DNA, 600 bp, Chicken  19866894226164_3
tgtaagagggaagggagatatacccacagtcaaaaaccaagaagcagaaaactgaacaaccccccagttctccagaagcaaagcctggtctgagctcaatttgaaacgaaaaatccaaataaacaatggaaagaaaccacatgttttatcctgacaccttgttcagaaacgctccattttccttctaaactttccagcctaatttgcaaaaaaacacctaattcagtaaaactcagcttctccctcaggccattgctgcacaaggttttgctgcacraggaggaaggctygagcatcccraactgccaagctcattacacccagggtgcaagaaatatgagctccaaatgagatgccaaatccagaaygggctcctgggagacagcacgtgcccctgcactccctgctgagaactccagcacctcatgtttgcaggggacactgcagctgtgaggtccgggggcagaagggctgctggtgggcactccatctgccaataaagcagccactaacacctccaaccgtcctcgtttggtgaacagcgctgtttgtctaaggctgggcaaactcctggaaaaaaaatcccccctgttaaatgct

SEQ ID NO: 17775 - DNA, 600 bp, Chicken  19866894226164_4
tctccagaagcaaagcctggtctgagctcaatttgaaacgaaaaatccaaataaacaatggaaagaaaccacatgttttatcctgacaccttgttcagaaacgctccattttccttctaaactttccagcctaatttgcaaaaaaacacctaattcagtaaaactcagcttctccctcaggccattgctgcacaaggttttgctgcacraggaggaaggctygagcatcccraactgccaagctcattacacccagggtgcaagaaatatgagctccaaatgagatgccaaatccagaaygggctcctgggagacagcacgtgcccctgcactccctgctgagaactccagcacctcatgtttgcaggggacactgcagctgtgaggtccgggggcagaagggctgctggtgggcactccatctgccaataaagcagccactaacacctccaaccgtcctcgtttggtgaacagcgctgtttgtctaaggctgggcaaactcctggaaaaaaaatcccccctgttaaatgctgcgggcgcagaatatcggccacacgaaagcattaacgctcaggatatttccagttgcaacttggctca

SEQ ID NO: 17776 - DNA, 515 bp, Chicken  19866894226165_1
gttccaatgaatttaaaaaaggttccacatctaagtctattcccttctttatccacccacagagctgcaaagccaaggatctctcctcgctcagatactgaataatatctgcctgtctatcagatccactcctgctgtgcctgaggttctctgttgttcctaaaatgggaacaatatgttaaattgtgcttaaaccacaatctaaattgcaactgcaacactttgatttcaatcataaaaaagaagataaaagccgagtatcttactttactactaaattaacatcactaataacgatayggtgaggagcagcagacagcacatgattttattctgatctcctaaaagtcacacatctaaacttgacacttacttcctaagtctgtctttctttcctcttcatcctaagatggggggagggttcctgttaccaatacaggactgaccggtgcgttcaacttgaaaatacagccaagcacctgctctaccagttctcctcagcaagcatcaatgtg

SEQ ID NO: 17777 - DNA, 600 bp, Chicken  19866894226166_1
gaaatcttaaattgcccccatgcacttggcaaatgacattctgcaaagtagctttgcctctggaggtcacaccacaggcctgggtcaaaattagaaggcagcttagggtaaacaagatttcagtgaatgggcaaatggctctgtttcctcgtgcagttaggtatgtaggaagtctggggttccggagttagttcccagttacgttttacttatagaaagacaaagctcagtacagctgtttactagttatacgttaacatgcagcttatgacgctgctctgcttacagaaacagaacccrctgcagtatagctcagcgctcaggactgatgaaggccttccagtatagcttgcagaccttcctctgcrcggccttggaggcagagcagtgcctacgatcaatcccttttcattccaagtactcttcaaccctgggagcgatatttgcagtttyagcatggagcatcaggccgagcgccctgctgccaatttattcaytttcaaggccaagttcccagcctggttctcggcgttcgccttccsctccctctcacgggcattcccaagctcgcagccctcggtgtttatgctggggccaggc

SEQ ID NO: 17778 - DNA, 600 bp, Chicken  19866894226166_2
acaccacaggcctgggtcaaaattagaaggcagcttagggtaaacaagatttcagtgaatgggcaaatggctctgtttcctcgtgcagttaggtatgtaggaagtctggggttccggagttagttcccagttacgttttacttatagaaagacaaagctcagtacagctgtttactagttatacgttaacatgcagcttatgacgctgctctgcttacagaaacagaacccrctgcagtatagctcagcgctcaggactgatgaaggccttccagtatagcttgcagaccttcctctgcrcggccttggaggcagagcagtgcctacgatcaatcccttttcattccaagtactcttcaaccctgggagcgatatttgcagtttyagcatggagcatcaggccgagcgccctgctgccaatttattcaytttcaaggccaagttcccagcctggttctcggcgttcgccttccsctccctctcacgggcattcccaagctcgcagccctcggtgtttatgctggggccaggcacgtgactgcagagcagccgcaatggttgcagccgccggctccgccagcgctccacgtttcctgcgct

SEQ ID NO: 17779 - DNA, 600 bp, Chicken  19866894226166_3
cagttaggtatgtaggaagtctggggttccggagttagttcccagttacgttttacttatagaaagacaaagctcagtacagctgtttactagttatacgttaacatgcagcttatgacgctgctctgcttacagaaacagaacccrctgcagtatagctcagcgctcaggactgatgaaggccttccagtatagcttgcagaccttcctctgcrcggccttggaggcagagcagtgcctacgatcaatcccttttcattccaagtactcttcaaccctgggagcgatatttgcagtttyagcatggagcatcaggccgagcgccctgctgccaatttattcaytttcaaggccaagttcccagcctggttctcggcgttcgccttccsctccctctcacgggcattcccaagctcgcagccctcggtgtttatgctggggccaggcacgtgactgcagagcagccgcaatggttgcagccgccggctccgccagcgctccacgtttcctgcgctccgtaaagcctgcgcgccgctggctttcagcaggctgcacaagcgtgccttttcggtctccgcgttagcaagtaccagctgtcat

SEQ ID NO: 17780 - DNA, 600 bp, Chicken  19866894226166_4
gttacgttttacttatagaaagacaaagctcagtacagctgtttactagttatacgttaacatgcagcttatgacgctgctctgcttacagaaacagaacccrctgcagtatagctcagcgctcaggactgatgaaggccttccagtatagcttgcagaccttcctctgcrcggccttggaggcagagcagtgcctacgatcaatcccttttcattccaagtactcttcaaccctgggagcgatatttgcagtttyagcatggagcatcaggccgagcgccctgctgccaatttattcaytttcaaggccaagttcccagcctggttctcggcgttcgccttccsctccctctcacgggcattcccaagctcgcagccctcggtgtttatgctggggccaggcacgtgactgcagagcagccgcaatggttgcagccgccggctccgccagcgctccacgtttcctgcgctccgtaaagcctgcgcgccgctggctttcagcaggctgcacaagcgtgccttttcggtctccgcgttagcaagtaccagctgtcatcggtaccggctgtccccagcttctccccacggccgcggtttggc

SEQ ID NO: 17781 - DNA, 600 bp, Chicken  19866894226166_5
ctagttatacgttaacatgcagcttatgacgctgctctgcttacagaaacagaacccrctgcagtatagctcagcgctcaggactgatgaaggccttccagtatagcttgcagaccttcctctgcrcggccttggaggcagagcagtgcctacgatcaatcccttttcattccaagtactcttcaaccctgggagcgatatttgcagtttyagcatggagcatcaggccgagcgccctgctgccaatttattcaytttcaaggccaagttcccagcctggttctcggcgttcgccttccsctccctctcacgggcattcccaagctcgcagccctcggtgtttatgctggggccaggcacgtgactgcagagcagccgcaatggttgcagccgccggctccgccagcgctccacgtttcctgcgctccgtaaagcctgcgcgccgctggctttcagcaggctgcacaagcgtgccttttcggtctccgcgttagcaagtaccagctgtcatcggtaccggctgtccccagcttctccccacggccgcggtttggcggaacaccaaaccacctctgtgacacacagatctcgagtttccag

SEQ ID NO: 17782 - DNA, 577 bp, Chicken  19866894226167_1
ggatgaaaaactgcccacagaacagaccctgttttaataactgagttgcctacctagaaaactgaagtgagcagaagtgtcaggctgtgcatctgataaaagttggcagtttattccaaagaaagaaatcaaaaggttgcttgagagaaatgcaatcccagccagccctagtgcattaagcacaggctatcctagcactgcttctattaaatgctaaagctggccaacatttactgcttctacactactgctcctcttattttgcacaatggtgccataatcactacacttcctgggttyatcaacagaaaaacacaggcaacaaaaccagaatatgaactgggtgcatgtgctacctcctcccaaagcctcatgctctcaattccagtgtatgtcaattcctgttctccacagtgtggcactagaacccartaaatcctcatacaaggaaagtggtacaaagagttgagagttcaaccagcgctcagattacatacacaaagactaaaatctcataggagactctcatccatttgttgctaattgctcagagaaatgtaaaagataataggggcag

SEQ ID NO: 17783 - DNA, 445 bp, Chicken  19866894226167_2
aaggttgcttgagagaaatgcaatcccagccagccctagtgcattaagcacaggctatcctagcactgcttctattaaatgctaaagctggccaacatttactgcttctacactactgctcctcttattttgcacaatggtgccataatcactacacttcctgggttyatcaacagaaaaacacaggcaacaaaaccagaatatgaactgggtgcatgtgctacctcctcccaaagcctcatgctctcaattccagtgtatgtcaattcctgttctccacagtgtggcactagaacccartaaatcctcatacaaggaaagtggtacaaagagttgagagttcaaccagcgctcagattacatacacaaagactaaaatctcataggagactctcatccatttgttgctaattgctcagagaaatgtaaaagataataggggcag

SEQ ID NO: 17784 - DNA, 600 bp, Chicken  19866894226182_1
caccaataaatgcctgtcgtttacctctaaaacagtcaattttctttaagtaaaccctgaggaagttgcaaaagtgcatactgaaatttggcactcacagcttgaatgctgagcaagttgtttgggaaaattatatgggaaagccaatttaaagtcactgaagtgtcataagtattgagagaaataggcaaatttgctgtacaaaaagtgtagctggtatctaattcagtgacaagagtctcctcacagtaagatataaaatactgcttgtaaataattacatgtattttatttctctcrttccagtgactatttcgacaagtaccttctttgatggcttactggtgactgggctctacacctctaccagtgttcaggcttcccagagtgttggtggttccagtgcttttggatttggtaagtctgaagtaattcatgatctgcagccaaagctaatgaatacctgatcttccagaggatagcaataacaacacaattactgacacaagttaatttagactcagtaatcaagaatacatagaagtcatctgtagtcaatgagataaggctccaaggtggctttcaagcacttttacttgt

SEQ ID NO: 17785 - DNA, 599 bp, Chicken  19866894226186_1
  misc_feature (1)..(123): n is any nucleotide
nnnnnnnnnnnnnnnnnnnnnnnnnnnnnnnnnnnnnnnnnnnnnnnnnnnnnnnnnnnnnnnnnnnnnnnnnnnnnnnnnnnnnnnnnnnnnnnnnnnnnnnnnnnnnnnnnnnnnnnnnnnggaaagccagtggctcttgtaggtaggtgcctcagccggaacttgtaatagtgtgcctgaggatggattgacaggagggcaatctgtgagacaagtaaacccttctgatacaaaatcttagctgcagttctatgtccaatttggggcattgcctctggaggaaggtttgatggagcrtggaaggggccagtgggaagctatgaggactggtggtcaagcagatctaactcaggctgtaagtcagggtagaagcaatctagaaaagtgcaggctgagaatgtgtgtgttatttcagtctgttaaagatgctgcaaacagggcaggaagtarcrggcataaaattcagctaagaagatttgggtaagaacatgagaaaagccagatctaatggaawgggtagtgagatactggtgcartggtctggggaggatgctagtcacatcactggagagttttaagggcaggctgggcaaacg

SEQ ID NO: 17786 - DNA, 600 bp, Chicken  19866894226186_2
ctcagccggaacttgtaatagtgtgcctgaggatggattgacaggagggcaatctgtgagacaagtaaacccttctgatacaaaatcttagctgcagttctatgtccaatttggggcattgcctctggaggaaggtttgatggagcrtggaaggggccagtgggaagctatgaggactggtggtcaagcagatctaactcaggctgtaagtcagggtagaagcaatctagaaaagtgcaggctgagaatgtgtgtgttatttcagtctgttaaagatgctgcaaacagggcaggaagtarcrggcataaaattcagctaagaagatttgggtaagaacatgagaaaagccagatctaatggaawgggtagtgagatactggtgcartggtctggggaggatgctagtcacatcactggagagttttaagggcaggctgggcaaacgtgtgaggattgctataggtgtagttgttcatgccttaagccaaggcaggcagctgactgctcaggatggccgctagccctatctcatcagattttatgattgtgttttgctgtatcccacagccgcctctgtgattgcagcccagggggctttt

SEQ ID NO: 17787 - DNA, 600 bp, Chicken  19866894226186_3
cagccggaacttgtaatagtgtgcctgaggatggattgacaggagggcaatctgtgagacaagtaaacccttctgatacaaaatcttagctgcagttctatgtccaatttggggcattgcctctggaggaaggtttgatggagcrtggaaggggccagtgggaagctatgaggactggtggtcaagcagatctaactcaggctgtaagtcagggtagaagcaatctagaaaagtgcaggctgagaatgtgtgtgttatttcagtctgttaaagatgctgcaaacagggcaggaagtarcrggcataaaattcagctaagaagatttgggtaagaacatgagaaaagccagatctaatggaawgggtagtgagatactggtgcartggtctggggaggatgctagtcacatcactggagagttttaagggcaggctgggcaaacgtgtgaggattgctataggtgtagttgttcatgccttaagccaaggcaggcagctgactgctcaggatggccgctagccctatctcatcagattttatgattgtgttttgctgtatcccacagccgcctctgtgattgcagcccagggggcttttct

SEQ ID NO: 17788 - DNA, 600 bp, Chicken  19866894226186_4
gtaaacccttctgatacaaaatcttagctgcagttctatgtccaatttggggcattgcctctggaggaaggtttgatggagcrtggaaggggccagtgggaagctatgaggactggtggtcaagcagatctaactcaggctgtaagtcagggtagaagcaatctagaaaagtgcaggctgagaatgtgtgtgttatttcagtctgttaaagatgctgcaaacagggcaggaagtarcrggcataaaattcagctaagaagatttgggtaagaacatgagaaaagccagatctaatggaawgggtagtgagatactggtgcartggtctggggaggatgctagtcacatcactggagagttttaagggcaggctgggcaaacgtgtgaggattgctataggtgtagttgttcatgccttaagccaaggcaggcagctgactgctcaggatggccgctagccctatctcatcagattttatgattgtgttttgctgtatcccacagccgcctctgtgattgcagcccagggggcttttctcaggtcctgtggcacagctcatttcttcctccttgcacaggcttcactcctgacagaaaatg

SEQ ID NO: 17789 - DNA, 600 bp, Chicken  19866894226186_5
cttagctgcagttctatgtccaatttggggcattgcctctggaggaaggtttgatggagcrtggaaggggccagtgggaagctatgaggactggtggtcaagcagatctaactcaggctgtaagtcagggtagaagcaatctagaaaagtgcaggctgagaatgtgtgtgttatttcagtctgttaaagatgctgcaaacagggcaggaagtarcrggcataaaattcagctaagaagatttgggtaagaacatgagaaaagccagatctaatggaawgggtagtgagatactggtgcartggtctggggaggatgctagtcacatcactggagagttttaagggcaggctgggcaaacgtgtgaggattgctataggtgtagttgttcatgccttaagccaaggcaggcagctgactgctcaggatggccgctagccctatctcatcagattttatgattgtgttttgctgtatcccacagccgcctctgtgattgcagcccagggggcttttctcaggtcctgtggcacagctcatttcttcctccttgcacaggcttcactcctgacagaaaatgacagttctgatgacagatcatg

SEQ ID NO: 17790 - DNA, 600 bp, Chicken  19866894226210_1
tattatcaatactcaatttcctcttgttgaactcgattctgaaggtattaagtatttcacattctgggatttatgtaatgtatttctgacagcagttaggtgtacttggcagatcattattcatataacacttgcctacactacttatctacacttatcaataagaatttccatggataagggggacttccgagatctgcagcagcgaaaaactatcccacctttcacttggttggtataatttttcatcagttttgctggctttgatgattaccatgcttctttaaaacccattttctkttcccaccttatcttaaacaaatgccataatagtaattatgacaacattctttctgccacatttccaggctatgacagataatgctatcccaggcagaggacagtgtgaccatgcactctgttctgagtagctgaacaatgccatggggcacagaccgttatctcggggtcactgtaacctttgtccttactgaggtgaacagttayggagctcctataaagcagcaacattagagcaccagaagactttccaagccttggggtccagatccatgggcttttacagcttccttgtattgt

SEQ ID NO: 17791 - DNA, 600 bp, Chicken  19866894226210_2
aaaaactatcccacctttcacttggttggtataatttttcatcagttttgctggctttgatgattaccatgcttctttaaaacccattttctkttcccaccttatcttaaacaaatgccataatagtaattatgacaacattctttctgccacatttccaggctatgacagataatgctatcccaggcagaggacagtgtgaccatgcactctgttctgagtagctgaacaatgccatggggcacagaccgttatctcggggtcactgtaacctttgtccttactgaggtgaacagttayggagctcctataaagcagcaacattagagcaccagaagactttccaagccttggggtccagatccatgggcttttacagcttccttgtattgtcacgtggtgtgctgtcctcaagccagcatcactcttgcctcttgtaaaggtcacaggaagccttatttaaaggaaacagtccacatgcaaacagtgcctcacatgaggatcattgcctttatcaagggtgatgttgcactactcataaaatgatcttgtttgcctatatgcatgaagcactcatcagcatgatagcaaataagagga

SEQ ID NO: 17792 - DNA, 600 bp, Chicken  19866894226210_3
gtacgctttaatctccctgtcagcagactgcctgcagtgcagatgatgccccctgttttggagaaacataaatactctccgtaccgctgagctcagcgaagaaagtatatcaaagctggccttaggatgctcgtcctgagtgataacagaagtgcgggtgtgaaaggcaagaggggaaccggggccgccgcgcagccggaggagcgctgacggcaggggaccgccagagggcgctacagccccgcgagcccggcggcacccgctccccgcccgcggacaacggagccaccgcgggtgacrgggaagacacggagcagcacagccacttttgtgcgctgaacgggcagcgccgcaccccggctgtgccacactctggccgtgccacgcagcaccggcccagcgccgccgctgctgaccagaggccgtgactcgggaggtaaatattcgtttggcttctgtaggctggtgagtcttaaggcatgaggatgtttgaacaggtgagggatgctgcaaaggcatgggaacggtttgtccttcatacctgcagcraggagtgcgaggataccgcgcctgcatccaagcgttgggtgcctggacgac

SEQ ID NO: 17793 - DNA, 600 bp, Chicken  19866894226210_4
ccggcggcacccgctccccgcccgcggacaacggagccaccgcgggtgacrgggaagacacggagcagcacagccacttttgtgcgctgaacgggcagcgccgcaccccggctgtgccacactctggccgtgccacgcagcaccggcccagcgccgccgctgctgaccagaggccgtgactcgggaggtaaatattcgtttggcttctgtaggctggtgagtcttaaggcatgaggatgtttgaacaggtgagggatgctgcaaaggcatgggaacggtttgtccttcatacctgcagcraggagtgcgaggataccgcgcctgcatccaagcgttgggtgcctggacgacttcctggtgctaagggtttttaacaggactgttttgtgtgaatcctttgttactgcgagttcttgagagcccgttgtgaacgggagagacaaatgcccgcccagtgctgcctgcagcctgccctggggctgatgcaaatgtctcacaggctctgtgttcagaggacacagaagacaacagaattgcagctaatgccgtgctcactgctactggttcctaaggagaggatgagagagaagaagggatagg

SEQ ID NO: 17794 - DNA, 573 bp, Chicken  19866894226211_1
tactttacagaaatagtaatagcagcagcagtatgtttttcaaactgggctaattttaggaactaaagtatacaatctttattgtagatcagctactttactattaatagcaaggatcagagctcctttggattaataattaacatctaatgtgttttttaaccttaaaataaaagacagaatgtaattttagctgcagcttcacaggagttccgaagggcatcatgacccatgccttgggcaggtctcaaggaaaattcagtgcactttccatttagcccacagaaagatatgcttacrtgctgaacatcaggtatgtttcaatgctaatgtatctacatagcatgcaggctagatgggtggggaaagactgacaaaataccgtgtcagaggaattaaaaaataagcttctcatttcagatagcaataggaagagaagacaagcttaaacattgtcagattttatgcctgaatttaaaaacatctgaatatattattatcaatactcaatttcctcttgttgaactcgattctgaaggtattaagtatttcacattctgggatttatgtaat

SEQ ID NO: 17795 - DNA, 599 bp, Chicken  19866894226218_1
  misc_feature (1)..(13): n is any nucleotide
nnnnnnnnnnnnnattaaaaatggataacagattctcatttttgatggatttgactgctcatttaaatgacttaaggtgaaaattaactattctgtggtatttttcaaaccataacaatgtttgaaatgaaacttgaattatggcaaactcaagttatggcaaacatctgtatgaattttgatgcattggctaaacactgtcttgtgagtggcaaaaaaaaaaaaaaaaaaaagtgtctgtctgtgctatctgatttggtaaaggaatttgagaataagctagaagatttaaaaaaaaawaaatcagtttttttatatacttgtgactccattttcaattgacataaatacattccctgcaaattttcaaatgaaatatatagagttgtagtcacacatttgactctaagaaaaatttggtcatgtctttttaccagacttttgtaagatctatcttaaaagagaaaaatatccctcactttacaattacactttattcatgacatcaatttttggcagtccttatatttttgaacaattattgtcaaggttgaagcacaggaaaagtaatatttcattaaaaatatctgacgttgaca

SEQ ID NO: 17796 - DNA, 600 bp, Chicken  19866894226225_1
atttgtctacttacatttcatgtatcaccatcaaattcaaatccaatcaccttaagagtacgctgtatagatctgctccaacattcacgagcagccagtagacatgttcctgcacagggaattcctgctttttctttctcctctgtttcctcttcaattaatcagcaagaaattttcctgttgcctttttgtttacttatcttgcagctattgctgtgtcattccaacatcagccgtggtaagagggcaggagggtagtgttttatatttccgtttggctgataagggtgaaatcattcraggtttctttgcactttgatacactggtgattcaaaccgatgctgatagatctcccasttttgcatccagttccttaatattgccaactgaattataaaaaaatagcatgatactgcagtggtttgtctcttggttaattggcacaggcagagtcgatggctatagttgaacttcaacttttctctttttttctagtggaaaaccagaggttctccaactgctcaggcattaattattagacaataaaccccaaagaytggtttggatttctatcccagaacaaaatccacgtgaatcta

SEQ ID NO: 17797 - DNA, 600 bp, Chicken  19866894226225_2
tacgctgtatagatctgctccaacattcacgagcagccagtagacatgttcctgcacagggaattcctgctttttctttctcctctgtttcctcttcaattaatcagcaagaaattttcctgttgcctttttgtttacttatcttgcagctattgctgtgtcattccaacatcagccgtggtaagagggcaggagggtagtgttttatatttccgtttggctgataagggtgaaatcattcraggtttctttgcactttgatacactggtgattcaaaccgatgctgatagatctcccasttttgcatccagttccttaatattgccaactgaattataaaaaaatagcatgatactgcagtggtttgtctcttggttaattggcacaggcagagtcgatggctatagttgaacttcaacttttctctttttttctagtggaaaaccagaggttctccaactgctcaggcattaattattagacaataaaccccaaagaytggtttggatttctatcccagaacaaaatccacgtgaatctatgtttagaatgtaccggttgcgtttatttttctgagcaggacagacactttcagtcct

SEQ ID NO: 17798 - DNA, 600 bp, Chicken  19866894226225_3
tgttttatatttccgtttggctgataagggtgaaatcattcraggtttctttgcactttgatacactggtgattcaaaccgatgctgatagatctcccasttttgcatccagttccttaatattgccaactgaattataaaaaaatagcatgatactgcagtggtttgtctcttggttaattggcacaggcagagtcgatggctatagttgaacttcaacttttctctttttttctagtggaaaaccagaggttctccaactgctcaggcattaattattagacaataaaccccaaagaytggtttggatttctatcccagaacaaaatccacgtgaatctatgtttagaatgtaccggttgcgtttatttttctgagcaggacagacactttcagtcctgagaaccgagcgttttgcaatgatttcctgtcacaaaacatgtcatcaccaacaattgcttcagagaccagctgatgttttgctgatctgggtgtgcgtgggcgcacctaggccttgtaggacaccaggtagattcgctagagtcaatagagccaggcgatctgaacacagtcatgtaacaggagatacggacagcttcc

SEQ ID NO: 17799 - DNA, 600 bp, Chicken  19866894226238_1
tttgtgctttcacttttgaagccagctttctctcttcagttctatggcttaattccaaagcttattgaaggaggtggagtcctgagagtacttgagcaaaaccagacactgagatcaacacgcagagaggcacagatgtgcgcctgcatcttcaggtgcccaaaggagacagaacagggactgaggcaccactctgactacagcacttctcacaacagtgaaatcaattgaaagcatcctgtgacaggaaccaaacctggctccttactagagcagcaaggagcaatcgctggaaggccrggtgctgaagcagctcaggggagaccttatggctccctacaactccctgacaggaagacatagcaaggtgaaggttggcctccgctcccagctaacagcagtaggattggaggtcgtggcctcaaatcatgccaggggagggtcaggttggcattaggagacatttctcctctgaaagagcagtcaggcattggcacaggctgcccagggagtggtggagtccccatccctgaaggtgttgaagaacgacagacacgtggcactgggggatgtaggcagtgggcacagtggggatgggat

SEQ ID NO: 17800 - DNA, 600 bp, Chicken  19866894226239_1
tttcaatccagttcctaaaccccgctgttctcatatttaaaatgaagtgatgggattcaactaagacacctctcaagtaacagtccgcagttatcattaatgcatatctatcttcctacattgtaaaagccttcagtaatacatattttgctagataaaaacttatcatgaggccaaaagtcctcaacctacaatgcatttatatggcaaacctcggtctagcatgcactgtcttagtttgtggtaccatctgaaggggcaagtgacctggcaggagaatcataaaggggaaaaaacagyacacaatgcagcagagaaccaaaagggagtaaggagtgctttgaaagcatcatgaatgctggaaagctttatgtggcatacaaatgcagtgctgygatacagccctgctccagccacactaaaacaataaatgcttatttatgttaagtccacagcagaggtccctgctgtgatccaaggcttacacagtacgagatgcaggcagtgccaagtcagcttatgctgaacacctctgaaacagatggagaacatgaccataaagagtagaggcttggagaagtggaaggactggagaaaagc

SEQ ID NO: 17801 - DNA, 600 bp, Chicken  19866894226239_2
attaatgcatatctatcttcctacattgtaaaagccttcagtaatacatattttgctagataaaaacttatcatgaggccaaaagtcctcaacctacaatgcatttatatggcaaacctcggtctagcatgcactgtcttagtttgtggtaccatctgaaggggcaagtgacctggcaggagaatcataaaggggaaaaaacagyacacaatgcagcagagaaccaaaagggagtaaggagtgctttgaaagcatcatgaatgctggaaagctttatgtggcatacaaatgcagtgctgygatacagccctgctccagccacactaaaacaataaatgcttatttatgttaagtccacagcagaggtccctgctgtgatccaaggcttacacagtacgagatgcaggcagtgccaagtcagcttatgctgaacacctctgaaacagatggagaacatgaccataaagagtagaggcttggagaagtggaaggactggagaaaagcctcagagtcagtaacagccaagctagaaatacaagaaatgtcttcttacatttcaggagctatgctttgcaatgataatcctcccattcacatca

SEQ ID NO: 17802 - DNA, 599 bp, Chicken  19866894226243_1
  misc_feature (1)..(73): n is any nucleotide
nnnnnnnnnnnnnnnnnnnnnnnnnnnnnnnnnnnnnnnnnnnnnnnnnnnnnnnnnnnnnnnnnnnnnnnnntctgttctgtctttagaaatgagctggcttgttccttgtcgaattggattttctctccactgaaaacttttccactgtgaacttagatgattagtttaaaattgtctcctctgcccagcaatggtctgttgtgcaaagtctggttgtagcatggggagaaatatctctctttctggaacaccaaatgtaactgaactctccttacctaatccagtatattttttttkagcaaaaggggagatcaggacggaagagagggcagagggaaggggtagaaagagaaaagaaaaccaytcaggcttttgcattgtgttttcagtatagcagggggccagtaaagcttagctccygaaaactttgtcaaaagtatcactaaagaaaactgtgaaagaattaattatattgcatcattctggagataaagagactctgtattgcagcagtatgccattctcatggacccaagggtaatgttatttattataaatatatatataaatctatttcttatttggaaccttttatg

SEQ ID NO: 17803 - DNA, 599 bp, Chicken  19866894226243_2
  misc_feature (1)..(6): n is any nucleotide
nnnnnntctgttctgtctttagaaatgagctggcttgttccttgtcgaattggattttctctccactgaaaacttttccactgtgaacttagatgattagtttaaaattgtctcctctgcccagcaatggtctgttgtgcaaagtctggttgtagcatggggagaaatatctctctttctggaacaccaaatgtaactgaactctccttacctaatccagtatattttttttkagcaaaaggggagatcaggacggaagagagggcagagggaaggggtagaaagagaaaagaaaaccaytcaggcttttgcattgtgttttcagtatagcagggggccagtaaagcttagctccygaaaactttgtcaaaagtatcactaaagaaaactgtgaaagaattaattatattgcatcattctggagataaagagactctgtattgcagcagtatgccattctcatggacccaagggtaatgttatttattataaatatatatataaatctatttcttatttggaaccttttatgaattgatctctgaaagcttcacaagttgagtctctcatctccattttacagatagatggaataactg

SEQ ID NO: 17804 - DNA, 600 bp, Chicken  19866894226243_3
ttctctccactgaaaacttttccactgtgaacttagatgattagtttaaaattgtctcctctgcccagcaatggtctgttgtgcaaagtctggttgtagcatggggagaaatatctctctttctggaacaccaaatgtaactgaactctccttacctaatccagtatattttttttkagcaaaaggggagatcaggacggaagagagggcagagggaaggggtagaaagagaaaagaaaaccaytcaggcttttgcattgtgttttcagtatagcagggggccagtaaagcttagctccygaaaactttgtcaaaagtatcactaaagaaaactgtgaaagaattaattatattgcatcattctggagataaagagactctgtattgcagcagtatgccattctcatggacccaagggtaatgttatttattataaatatatatataaatctatttcttatttggaaccttttatgaattgatctctgaaagcttcacaagttgagtctctcatctccattttacagatagatggaataactgagatactaactgtaaactacatgcaaaggaacgccatgagcactagttcaaattcca

SEQ ID NO: 17805 - DNA, 600 bp, Chicken  19866894226247_1
acatctatttaagatgtttgttgcagaacatcatactttcacgtatctgctaaaaaactaatttgcaaatgtattttggaaggaaaggaagaaaagagagagaagatacagtcctaaactttataaagccacataaactaaaaacatttgcctacaatctctgccaacactatgttaataaagccatatagacaaacccacaaacccccaaaactggcagctgacacatccttccccaaaaagcactggtgtggtgtctcccctccatttgatgacctggccagtacactgggctctggkactgcactcagagccagtggtgggyaagttaagttccttcccaaatcccygtgccccagcaatactcactcatgtgaggaaataccattggcgacaacaccttcatagcggctgatacccttctgctgggtgacactgatctgaccgcccagttcatctgcaataacacctgcatgtatcgcygacttgcacagcagtgaggtctgaaaagtagaagccatcaaaaccccaaactgagagggcaaatctgacaaagtggtagtgctctcacttccaagccaccgctacagaagtgttaga

SEQ ID NO: 17806 - DNA, 600 bp, Chicken  19866894226247_2
gaacatcatactttcacgtatctgctaaaaaactaatttgcaaatgtattttggaaggaaaggaagaaaagagagagaagatacagtcctaaactttataaagccacataaactaaaaacatttgcctacaatctctgccaacactatgttaataaagccatatagacaaacccacaaacccccaaaactggcagctgacacatccttccccaaaaagcactggtgtggtgtctcccctccatttgatgacctggccagtacactgggctctggkactgcactcagagccagtggtgggyaagttaagttccttcccaaatcccygtgccccagcaatactcactcatgtgaggaaataccattggcgacaacaccttcatagcggctgatacccttctgctgggtgacactgatctgaccgcccagttcatctgcaataacacctgcatgtatcgcygacttgcacagcagtgaggtctgaaaagtagaagccatcaaaaccccaaactgagagggcaaatctgacaaagtggtagtgctctcacttccaagccaccgctacagaagtgttagagctcataaagttctgcaaaggaatg

SEQ ID NO: 17807 - DNA, 600 bp, Chicken  19866894226247_3
taaaaaactaatttgcaaatgtattttggaaggaaaggaagaaaagagagagaagatacagtcctaaactttataaagccacataaactaaaaacatttgcctacaatctctgccaacactatgttaataaagccatatagacaaacccacaaacccccaaaactggcagctgacacatccttccccaaaaagcactggtgtggtgtctcccctccatttgatgacctggccagtacactgggctctggkactgcactcagagccagtggtgggyaagttaagttccttcccaaatcccygtgccccagcaatactcactcatgtgaggaaataccattggcgacaacaccttcatagcggctgatacccttctgctgggtgacactgatctgaccgcccagttcatctgcaataacacctgcatgtatcgcygacttgcacagcagtgaggtctgaaaagtagaagccatcaaaaccccaaactgagagggcaaatctgacaaagtggtagtgctctcacttccaagccaccgctacagaagtgttagagctcataaagttctgcaaaggaatgagagcaatagggagagacttaaaga

SEQ ID NO: 17808 - DNA, 600 bp, Chicken  19866894226247_4
ccatatagacaaacccacaaacccccaaaactggcagctgacacatccttccccaaaaagcactggtgtggtgtctcccctccatttgatgacctggccagtacactgggctctggkactgcactcagagccagtggtgggyaagttaagttccttcccaaatcccygtgccccagcaatactcactcatgtgaggaaataccattggcgacaacaccttcatagcggctgatacccttctgctgggtgacactgatctgaccgcccagttcatctgcaataacacctgcatgtatcgcygacttgcacagcagtgaggtctgaaaagtagaagccatcaaaaccccaaactgagagggcaaatctgacaaagtggtagtgctctcacttccaagccaccgctacagaagtgttagagctcataaagttctgcaaaggaatgagagcaatagggagagacttaaagagaaagaatagttatctttgaaaaaaaatatatgcttccaaaagtcaagtttttctcaaatgaggaatgtaatcatctggttctaggaaaatgtgwtgaagttttcacttgataaatatttggcccacctcagg

SEQ ID NO: 17809 - DNA, 600 bp, Chicken  19866894226247_5
cgcccagttcatctgcaataacacctgcatgtatcgcygacttgcacagcagtgaggtctgaaaagtagaagccatcaaaaccccaaactgagagggcaaatctgacaaagtggtagtgctctcacttccaagccaccgctacagaagtgttagagctcataaagttctgcaaaggaatgagagcaatagggagagacttaaagagaaagaatagttatctttgaaaaaaaatatatgcttccaaaagtcaagtttttctcaaatgaggaatgtaatcatctggttctaggaaaatgtgwtgaagttttcacttgataaatatttggcccacctcaggaaaacaaaggtaaaggcaaagcaaccactcttctttgcaaagagaaaacaataatggctcttgtggacttacctgaagccagacctacctgttactgcatagtgccttaagatttgaggcatggcatgcaytgggaaatgtggctgtttgtcattcacatggggccagcttgggcacctctagcacctggcaagcagggctgtctgcctgccccttccagggaggactgatgtgctgggattttggggtagtaggcctccag

SEQ ID NO: 17810 - DNA, 600 bp, Chicken  19866894226247_6
gcaaaggaatgagagcaatagggagagacttaaagagaaagaatagttatctttgaaaaaaaatatatgcttccaaaagtcaagtttttctcaaatgaggaatgtaatcatctggttctaggaaaatgtgwtgaagttttcacttgataaatatttggcccacctcaggaaaacaaaggtaaaggcaaagcaaccactcttctttgcaaagagaaaacaataatggctcttgtggacttacctgaagccagacctacctgttactgcatagtgccttaagatttgaggcatggcatgcaytgggaaatgtggctgtttgtcattcacatggggccagcttgggcacctctagcacctggcaagcagggctgtctgcctgccccttccagggaggactgatgtgctgggattttggggtagtaggcctccagggagtcctggaggtctctcccatcagaaaagctgaatctgtgttaatggtggagggaagatttccttcaaaaactcctccacctagataacatctgcatgaggtcatgtcgtttgctgcttttctttcccagtcaccctggacagcaggaataactcctaattagaatg

SEQ ID NO: 17811 - DNA, 600 bp, Chicken  19866894226252_1
taagaaaactcacagcagcttggcagaaagccaagtctgagttcactttgacaagcaccacacagtgatttccttgtgatttataccatcaaaaccaactcattatggaggaggaaataaaaagacaagtctctcccagggcaaggtcacagtacttgcaaaatggaagcagcactccctcccctcccaacgccacaattgttttgaaaaactttaaattacaagaatcattaagacagtagttggtaaaaacgatggaaattataagatagcaactaaaagaatataaagtggagaaaytacagagcaaaggtcacagagaatgacacagaagttacgatgtgatttagcagaacagaagccaggacaggatctgatcacacttctgagattggcatcaatatgaaagcaaaatctgcaggaggggaaacgttaaatgaatgactcatttggtacatatttcaggcagggaaattacagtcttcggggagcactgctcagtcacttcagcttcacagcagcctgaaacaagaacaaaacttcagttcagggggagggcccaggccttctggcagcctctgagtactgcaaaaaggcaaa

SEQ ID NO: 17812 - DNA, 600 bp, Chicken  19866894226257_1
ctcttttactgtactcagtacagacatcttctacctcttcccttacttgaaatcacctgttgacctccaggcctgcatttcgcacgttcacagaagggccttgtagcctcccctcctccatcgccccatatgcttgaagcagctggtcgctctgatctgtgatctattaaccagctgcacttggcacacacttgctgaggagagaggctgcaggtgagggtgtgcctctgagcatagccccgggctaaattaaaggcacgctgctcagctgtggcacaatactgggtggcttctgtctgygtgtgacccgcacacggtgtctcagtgcagtaacaaaagctgagggggcctaaagatctgttttgttacgcgatgtgccaaaaattgacaggaaggcatcttgtcttcctctagaatggctatttttaaggatgtttcctcactctgcaagttgaataaaccagttttgcaatctgctccaggccccgccctgcctaaccctggctagttaacctgtaacagactgcagaactggtttgagtcacacagtgaagaaagaggcgtaaattagccgttaatagcttaactctcctcaccaat

SEQ ID NO: 17813 - DNA, 600 bp, Chicken  19866894226267_1
tgacttgcctctaggtcagtataggctacaggaagtttgtctttggcaaagagtcttcctaaagcccagtggaaattctcaagtttctgctttcactttcaactgcggctaagagatggaaggatcacaagcaggagaggaaacttcttgccctcagtaccctgcagctttttttctggacctgtgatcctcgggagacaaagctatctgatgtccccagggcgacctttccttttcagtaggttttagtgcttgaggttcagcccgcagccctgtgattaaccacctctcctgagtagrcacagagcgcactatgtatcactactggaaacacaaagcccttcatcctacaaaactgtatcagcaaggagataccgcgcggtgccccgtggatccctgtggatgtgcgttccccaccactgacacagatggcgagcaacagaatcctccgtgacccatttttagatccatttgacacctgcttcatatgctcgtgtaaaaccagagatttcaagctgaaaaaaagcttgccatagttgttactggattagagggaatctttttttcagctcatacaacaaattccttttccgcctctgg

SEQ ID NO: 17814 - DNA, 599 bp, Chicken  19866894226269_1
  misc_feature (1)..(99): n is any nucleotide
nnnnnnnnnnnnnnnnnnnnnnnnnnnnnnnnnnnnnnnnnnnnnnnnnnnnnnnnnnnnnnnnnnnnnnnnnnnnnnnnnnnnnnnnnnnnnnnnnnnagtccaaatagctttaaagtctgagatcctgctgccagctttacatctcccagcagaaagcatttccagcattaggatgagagtgttgctgaatctgcatttgtgatctttaatactgctacgcaacatctttctaaaggtgcttgggagccaggttggatacttggggctgcaggaaaaatagcagggacagagggagcrctgagcagaggatgttggttatgtgaaggatgaaaagagagcgcttcagacctgaaactttccttttcttgtgccatttctttctgtgcatctgtgtatgtgggtgtgcgtgactatataaacagcaaaaaaaaaaaattctagatgttataaaagctataaatagctgctggagttacttgcacacaagaaatcagcttaactctccaagacttccttcagtttcttaaatattttccctttaatagctgtctttctggaggctatttttgactgctttaaatgctttctacattgtg

SEQ ID NO: 17815 - DNA, 600 bp, Chicken  19866894226272_1
cagatctactccagaggagctttgcagaaggagtgggctttgggtcttagctgggcactggtgaagtctggacttaagatattccatgtgcaggagaagccctttcacaatggaacactgtctattctcccacaggtcacgtgtttccagagttcaaggaaagcgatgccatgtttgctgcagaaagggtgagcttcactgctggaaagggagctggcactgcagggtagaccttgctgttgtagcccatgagatactaaatcttcagttcttgctttctcctatttcactcagattacrgatatgggtgcatattgctcycagctgtcacctgagcaattctgaatacagcagcttggccaaaaatggcttagagggaagggacagctgaccctgtcctggtcaattagtctcatcttgctaagtgcctgtagctgttagacagatcaatacaatgggaaaggcattacaacaaagatgtgatgacaaaagaactggcataatagagaggtgctataaaaaaaaaaaggaagaagattgcttacccgtatcagaaggttctagattcgcaggggaaaaattcaccaaggatggacttcc

SEQ ID NO: 17816 - DNA, 600 bp, Chicken  19866894226272_2
ttgcagaaggagtgggctttgggtcttagctgggcactggtgaagtctggacttaagatattccatgtgcaggagaagccctttcacaatggaacactgtctattctcccacaggtcacgtgtttccagagttcaaggaaagcgatgccatgtttgctgcagaaagggtgagcttcactgctggaaagggagctggcactgcagggtagaccttgctgttgtagcccatgagatactaaatcttcagttcttgctttctcctatttcactcagattacrgatatgggtgcatattgctcycagctgtcacctgagcaattctgaatacagcagcttggccaaaaatggcttagagggaagggacagctgaccctgtcctggtcaattagtctcatcttgctaagtgcctgtagctgttagacagatcaatacaatgggaaaggcattacaacaaagatgtgatgacaaaagaactggcataatagagaggtgctataaaaaaaaaaaggaagaagattgcttacccgtatcagaaggttctagattcgcaggggaaaaattcaccaaggatggacttccaggaaagaagccctccccagt

SEQ ID NO: 17817 - DNA, 600 bp, Chicken  19866894226275_1
tacttgcgttacaacataggccaacagcaaaaaacagaagtgtttgtggtcgtttttccattctacttatcacactatttttcatctgcacttcagtcccacaaatgctgcatttcacttgaaaaagcagctaatgataatcccaaaactcctatggtgacatcagtgctaaaaattgttacttagcagtgaattagcgcaagataggaaacaaaattggagagaaaatataggcaaaactcctctgcatgccaatcactacaagaaaatttcatcaaagttcataaaaatcactaaagyctacaacatgacaacttacttaagacagctcctttaggaaacacagagagttacgcagcttacaaagatgtgcacccgtgggggggaaaaagtcatcactttataaaagaagagcaaatattatttttgcccatattcaattgctgtgttcaggcactacatttattggacaatcttgagattctttcaaattcatcaaaatgcaaattcagtcaattaattttagctagcagatcattatagctgaaggagagacatgtaaaaattcatcccttgaacctaaggtgcaaaggcagaagg

SEQ ID NO: 17818 - DNA, 600 bp, Chicken  19866894226277_1
atgattagaaactcgggctccaaagctgaacatttccagtgagacagaaattctgtttcactggaccatggggaatcaagggtagctgactaaagtctcaattccgccactaaaacgtggatggtttccagtttgagtacatgcaataggctacatgtattttttttattatctaaagcatcaattaaaagttctatttctgagaataaaataggctaaattctcattttttcaacagatttactaaacttatacttttggattgacctgagtattaattctttatttggtcaaaagtgwggaagattatgagctcttctgttgtgcttctgaggtttttaaattacagctttctgaaaaatcacataaatttattgtgttcacattttaccagaagtcaaaaaacgtaaatttaaattatggttgttactgggaagatttttttttgtattttattttagaagatgaaaattgtaatgatcattttctgaatcctctggcatttctaaaataattacgagttatttggtaaatcccttaactaaaatgctgtttcagtcatattagtgacagaagtatatgctttgaattttctgcctt

SEQ ID NO: 17819 - DNA, 599 bp, Chicken  19866894226278_1
  misc_feature (1)..(135): n is any nucleotide
nnnnnnnnnnnnnnnnnnnnnnnnnnnnnnnnnnnnnnnnnnnnnnnnnnnnnnnnnnnnnnnnnnnnnnnnnnnnnnnnnnnnnnnnnnnnnnnnnnnnnnnnnnnnnnnnnnnnnnnnnnnnnnnnnnnnnnntaaaccagccttaagaagcctaactactttttttgagcaatctaagctaaatctagttttcaaaactgttctggcacagccagatagtgtttcagaggtttccaaatctatgaacaatgatccctatgatcactatttcccatcaacatgttagattgagtttcmaacttatttaacacaagaaaactctgaactctgaagccagctatcattkctgctgatgacttggaagctgctagtagcaagctaatctttgyttcagcatgacttaaaccattacccttactcttcaatttcagaatgcagtaaaatatgacataacctacaacgtactaagtgaaaatttcagaacaagtgatacctggtaggggaaagcaaaacccagtcattctacacattaaactcaaacagaactggagtttttgagctgcaatgaaacttccattatcacatttgggaaatca

SEQ ID NO: 17820 - DNA, 599 bp, Chicken  19866894226278_2
  misc_feature (1)..(86): n is any nucleotide
nnnnnnnnnnnnnnnnnnnnnnnnnnnnnnnnnnnnnnnnnnnnnnnnnnnnnnnnnnnnnnnnnnnnnnnnnnnnnnnnnnnnnntaaaccagccttaagaagcctaactactttttttgagcaatctaagctaaatctagttttcaaaactgttctggcacagccagatagtgtttcagaggtttccaaatctatgaacaatgatccctatgatcactatttcccatcaacatgttagattgagtttcmaacttatttaacacaagaaaactctgaactctgaagccagctatcattkctgctgatgacttggaagctgctagtagcaagctaatctttgyttcagcatgacttaaaccattacccttactcttcaatttcagaatgcagtaaaatatgacataacctacaacgtactaagtgaaaatttcagaacaagtgatacctggtaggggaaagcaaaacccagtcattctacacattaaactcaaacagaactggagtttttgagctgcaatgaaacttccattatcacatttgggaaatcaaatcagttcactatggctggttcaataacagcattttatcatcagttct

SEQ ID NO: 17821 - DNA, 599 bp, Chicken  19866894226278_3
  misc_feature (1)..(43): n is any nucleotide
nnnnnnnnnnnnnnnnnnnnnnnnnnnnnnnnnnnnnnnnnnntaaaccagccttaagaagcctaactactttttttgagcaatctaagctaaatctagttttcaaaactgttctggcacagccagatagtgtttcagaggtttccaaatctatgaacaatgatccctatgatcactatttcccatcaacatgttagattgagtttcmaacttatttaacacaagaaaactctgaactctgaagccagctatcattkctgctgatgacttggaagctgctagtagcaagctaatctttgyttcagcatgacttaaaccattacccttactcttcaatttcagaatgcagtaaaatatgacataacctacaacgtactaagtgaaaatttcagaacaagtgatacctggtaggggaaagcaaaacccagtcattctacacattaaactcaaacagaactggagtttttgagctgcaatgaaacttccattatcacatttgggaaatcaaatcagttcactatggctggttcaataacagcattttatcatcagttctaccatattttcttattgagaaaacaaaccaacaactaggaact

SEQ ID NO: 17822 - DNA, 600 bp, Chicken  19866894226284_1
aaatagctccttattaaaaaggacaaagttcagattgatttaaacctaaatgaaataacaggcaggcaatgcataaaagcttgttgctacagcacagctaactttgaattacctttttactttatgaaacattaaggcacagctaaatgtaacacaatctgacgggctttcttatgttttcttcaattatagcacacaaacatcatggaaagaatggtgtatttgccatttaatcagcctaactggccttctcccagaatttgacaattcccagtaacgctcgagaacaaattataaagytaattcaactcctttgcaaaccaatacaagcactgatggtagtcatccaggaagcaggtcactcggaaactattaagtcatgaaagttgcactgttcactgtatattcagaccacacttcacagaagtccactgaggtggagaacgtgaatttatagcctcacattacgttttcattattaaaagcatggatcagagaagctttctccaaattcattagctgtctaattgtgttttttacactttattatcatgtaatatccttattgaagataacaggccctactcttctccatgcaag

SEQ ID NO: 17823 - DNA, 600 bp, Chicken  19866894226286_1
ccttcccacagctgctgctgggggctcacagggccacagcactcaggaggagcattttttccccccatttcaatacgggggagcccagacacacaaggatgggggtcaggacaccccaccagcacagcgagtactgccctgggtcagggctaaggctgtgtgcctcggggggctctgggaatgcagccccagcctgggggcttcccgagcaccagtgggaaagcaactgccctgctggtattaagcttatagcaaggaaaggcaactaagggaagaaaacccagtgcttgtagggattgragcagcacaagacaccacgggagacaaaaagagtcgtcaaatgcacacggatgtgagtgcctgcatgagcagcaccacggggcctcggttcctgactcayctgtgcaaggacttctgcttttgcaagcccgtatagactcagcccgcccctgagcacaggcagctgtcctataggaggtacacagcgctggctgccgttggaaggaaaacaagagggcctcgggctctcgatatttttagcaggtgccaagatacacttccaaatacaaaagtgaccactgttacagtaaatctgcaaag

SEQ ID NO: 17824 - DNA, 600 bp, Chicken  19866894226286_2
gggggtcaggacaccccaccagcacagcgagtactgccctgggtcagggctaaggctgtgtgcctcggggggctctgggaatgcagccccagcctgggggcttcccgagcaccagtgggaaagcaactgccctgctggtattaagcttatagcaaggaaaggcaactaagggaagaaaacccagtgcttgtagggattgragcagcacaagacaccacgggagacaaaaagagtcgtcaaatgcacacggatgtgagtgcctgcatgagcagcaccacggggcctcggttcctgactcayctgtgcaaggacttctgcttttgcaagcccgtatagactcagcccgcccctgagcacaggcagctgtcctataggaggtacacagcgctggctgccgttggaaggaaaacaagagggcctcgggctctcgatatttttagcaggtgccaagatacacttccaaatacaaaagtgaccactgttacagtaaatctgcaaagtgcatttagatcctgggctgaggcagcagctgggacgaggcagcacggctccgtcactccctctgctcctctgcactcacaccggtgaactccgagcctc

SEQ ID NO: 17825 - DNA, 600 bp, Chicken  19866894226287_1
catggatgtatttttgcacaattaacacaagtaataattataagaaatatttatacaatacattttagagcttcacctatttaattttaaatgcattttcttttgttgcaattactttctttatattaacaatatgattgcacatacacaactttacaaggcaattaagccttgaaaaacagcaacaacagagctacagagaatggacaacggggagaagacggtcagtctgatcagagtaacttctcttgtgcttgaagaactgacattgggtaaaacgtaatttcatttatgactaaytattctcattagtttaactttcaacctgtgagcatgcaaacatggttttaaaattagatctgaatctgaaggcatccaaacacatctcagcttgtttcctgtgtttgtgcacccagctagatgttctggctctaagacagctgagaataacgtcctctacttagaggagaagaaggaaggcatccaaaggcagagtatcaaagtaacatgcaaggaaatctgcaaaatgccagaaaaagatgactttttagtacaattaattggccagttctgtcatcttggtaacctctgtaatccaca

SEQ ID NO: 17826 - DNA, 600 bp, Chicken  19866894226289_1
atcttttgttgaagaactgtgataactcttaatgctttcttttgtttcaaaggaggataaactggctggattaaagtgaaagtgacagtcaggattttggtgtctggagagagatctcagtttaagactgaaagctgtgtgacctccaccagtgaggacaaggtggagtggtcagtaagtaacctgcctttcatttggatacttggataggctgtttgttattggttgggtttttgtttgtttgttatactgaatgtgaaggttatgattaagttgaacaaatctaaatattgaagatawctttttcgtcttctgtgaatgactctaaaagtttttgagaaatacaaaggcccctgttggaagtacttattcactttttcagaagaaaggtgtcctctagctacaatcaagcttgttaaaggtagcatttaggaaatagtaattgaaggttttgactgaacgacttttcagagttcaaagtatttcatcttctttactacagcacaatgaatccctgggattcagtgaagatgaaagagttagttaagttttggatacttaaatctaaatactgaagagttccttccctttctgggcact

SEQ ID NO: 17827 - DNA, 600 bp, Chicken  19866894226291_1
gaaagtcacagatgacctctcaagaacgtcagggctgtttacagggagtcttcaagcacccttccttacaaacaaccttatttttatatcttctaagaagcaactgccaaagattagaagggatatacttgcacattccattttctaccaatacaaaaagctatcctccagtgaaaactaactcctagaaaacctagcaaatactttaaatcactgctgttttctattattattgttttgtgactggttcatgttacaggcatgcattgcaggacctgctgatttttccattggctctaygaaagattaatcaggcattccatagcagtagtttttaaagttatgtttaaagctctatttatatacttaaagcaatattatactattgaaaggaagctgtgtatatgatactggtttctacaactcagcgtagacaagttatgaattccgtagtagttgcagcagatattaacagttgtgtaaaaataaggtagcaaaacagatgaaggaaactaacagctttaagggtagcatcccactgaaccctcctgtgttatatacttacatataaacctagttcctcggcgtctaagaaagttt

SEQ ID NO: 17828 - DNA, 600 bp, Chicken  19866894226298_1
caccaggaatgctgtagtcttaggttgcgaagccaactgcagaaagcatggagtagcttcctgcaatggaacaagtgccttgtcctcctctcagtgaacaatcatttggaaaacaattgtataaaaccatgtaggataatccctagaatggcttagtttggaagggacctcaaacaccatccagttccaactccctgccataggcagggctgcacaccagctcaggctgccgaaggccccatccaacccggccttgagcgtctccagggatggggcacccacagcttctctgggcagctrcaccagggtctcaccactgtaccataggcatcaaatgaccatgctgytctacctttagttttgtctgcattagctacctatggttatgggtcagaagctggctacgggcttcttaaagaaaatataggccccaaattgtgtaaaataactttaatattgaaatatataaataatcgctactgaagaataacacagaagaccgtggtgattcattacgaagagatgctataaatgggaacaggaacattgctaggtaaggaggaaggaagctattttaggagtcctgaaaattgttctagt

SEQ ID NO: 17829 - DNA, 570 bp, Chicken  19866894226298_2
atggagtagcttcctgcaatggaacaagtgccttgtcctcctctcagtgaacaatcatttggaaaacaattgtataaaaccatgtaggataatccctagaatggcttagtttggaagggacctcaaacaccatccagttccaactccctgccataggcagggctgcacaccagctcaggctgccgaaggccccatccaacccggccttgagcgtctccagggatggggcacccacagcttctctgggcagctrcaccagggtctcaccactgtaccataggcatcaaatgaccatgctgytctacctttagttttgtctgcattagctacctatggttatgggtcagaagctggctacgggcttcttaaagaaaatataggccccaaattgtgtaaaataactttaatattgaaatatataaataatcgctactgaagaataacacagaagaccgtggtgattcattacgaagagatgctataaatgggaacaggaacattgctaggtaaggaggaaggaagctattttaggagtcctgaaaattgttctagttctgcatagggatcacg

SEQ ID NO: 17830 - DNA, 600 bp, Chicken  19866894226300_1
cgtacttttgctgtgtagaggaaaagcttttctaggggttggaaaaaaagcactttcttttccactaattcctacttccaacccttctgtattgcattagaagtggtacgccgtgttctggggattgggctgttaaatactgaataagggtctgcgacttgcgagttgggaagtcacaaccaaatcaatatgtgtgaaaggaagagaaatatttctgtgccacatatagagaactcaacttgtttaaaaactgcatgttgtgtgcctaatttgcatgtaaaatgatggtgattgcaggcrcagttgcagaaaatgcaaattaggcatggaaagaggaaatatttgtgtgtgatggccactaaaggcatcagcccccagtccactctkggtacatgtatacagattacatctatttggttcgttttcatgtgctatacatcaatttcatttatcaaaagaaaaataaagttctaaatcaaataaagcctataaggagacactttgtagaagtaatctaaataatctcactttactgctccagataattaacactcttcagcaagaactttcctctaaatatcagtcttctttttagagaga

SEQ ID NO: 17831 - DNA, 600 bp, Chicken  19866894226300_2
tgtattgcattagaagtggtacgccgtgttctggggattgggctgttaaatactgaataagggtctgcgacttgcgagttgggaagtcacaaccaaatcaatatgtgtgaaaggaagagaaatatttctgtgccacatatagagaactcaacttgtttaaaaactgcatgttgtgtgcctaatttgcatgtaaaatgatggtgattgcaggcrcagttgcagaaaatgcaaattaggcatggaaagaggaaatatttgtgtgtgatggccactaaaggcatcagcccccagtccactctkggtacatgtatacagattacatctatttggttcgttttcatgtgctatacatcaatttcatttatcaaaagaaaaataaagttctaaatcaaataaagcctataaggagacactttgtagaagtaatctaaataatctcactttactgctccagataattaacactcttcagcaagaactttcctctaaatatcagtcttctttttagagagatttgccattttactgcattcattatgtacaccacagtacagtcaagccatgtaccagaaatactgcagggatcacgcggaatgtaat

SEQ ID NO: 17832 - DNA, 600 bp, Chicken  19866894226300_3
tgaagtttgcagtgaacaaaaaaaagccatctgtaaaaaccggatgagatgcataacttctaaaatcaaagctgaaaggtcgctgtcttcagaatctctttgttagcataaacaatataaatgctgttaaaatcattctccaggaacaattttcatagctgtcactgggcccaagtctgcaagcacttctttgaggaaaactggttcctttgatggagctacccttgctagcggagccattcgttgtgcaggtcctttcagaattagctccgattatagataatttattggagcagaaaracttttgtgcttttctagcaaaaccatttcgggcagaactcatcttaaaagaaaggactgagcaagcattcatgtgacattagcagctggacagtttgtaagtgaaattaatgctgcgttggtattttcatcaaataactacagcccatttgattgtaagcacaaggagacatggcactggttttgttggtgtttacacaacacccagccctcctgaagcccaggagtcccagtcctatggatggtaaaaacattactgtcacccaccactaattctgcaatgactgcatctctaatcac

SEQ ID NO: 17833 - DNA, 600 bp, Chicken  19866894226303_1
ctcccgtggccctttgttggactctttccagcatgtccatgtgtctctcatactggggatcccagcattggacacagatctccaggtgtggccttaccagtgctgagtagaggggaatgttcacttgacttgctggtgacattttacttaatgcagcccaagctaccatcagatttcttagcagcaagggcacagtgttgactcatgttcaaattgatgtccttcaagacacccaaggtgcttttctgcagagctgctgtccagctgggtggcccacagcacatatggtgcctggagtcrtccctctccacctgcagcccactgcaatctccttgttgacctccatgaaattcccatcagctcacctmtctatactgttgaggtccatctgcatgttgtcatggctctctggtgagccagccactscccccaggtatttgtcatatggggatttactgcaggtgtactctgctccaccagccagaccattaatgaagatgttaaacagggctgtacccagtacacgatgaactgaagctcgaacagtctcagttgatatgtcatgggatgcttgcagtaccactaatacagacattgatt

SEQ ID NO: 17834 - DNA, 600 bp, Chicken  19866894226303_2
tggacacagatctccaggtgtggccttaccagtgctgagtagaggggaatgttcacttgacttgctggtgacattttacttaatgcagcccaagctaccatcagatttcttagcagcaagggcacagtgttgactcatgttcaaattgatgtccttcaagacacccaaggtgcttttctgcagagctgctgtccagctgggtggcccacagcacatatggtgcctggagtcrtccctctccacctgcagcccactgcaatctccttgttgacctccatgaaattcccatcagctcacctmtctatactgttgaggtccatctgcatgttgtcatggctctctggtgagccagccactscccccaggtatttgtcatatggggatttactgcaggtgtactctgctccaccagccagaccattaatgaagatgttaaacagggctgtacccagtacacgatgaactgaagctcgaacagtctcagttgatatgtcatgggatgcttgcagtaccactaatacagacattgatttcattcattcagttatctctgaaaatctcacccctctttgagaccccattatttcagagtgtgaatgg

SEQ ID NO: 17835 - DNA, 600 bp, Chicken  19866894226303_3
gacttgctggtgacattttacttaatgcagcccaagctaccatcagatttcttagcagcaagggcacagtgttgactcatgttcaaattgatgtccttcaagacacccaaggtgcttttctgcagagctgctgtccagctgggtggcccacagcacatatggtgcctggagtcrtccctctccacctgcagcccactgcaatctccttgttgacctccatgaaattcccatcagctcacctmtctatactgttgaggtccatctgcatgttgtcatggctctctggtgagccagccactscccccaggtatttgtcatatggggatttactgcaggtgtactctgctccaccagccagaccattaatgaagatgttaaacagggctgtacccagtacacgatgaactgaagctcgaacagtctcagttgatatgtcatgggatgcttgcagtaccactaatacagacattgatttcattcattcagttatctctgaaaatctcacccctctttgagaccccattatttcagagtgtgaatggccttttctgatgcagtttaccttgagtagattctctagggccagtgaattctccatgc

SEQ ID NO: 17836 - DNA, 600 bp, Chicken  19866894226303_4
tactgcaggtgtactctgctccaccagccagaccattaatgaagatgttaaacagggctgtacccagtacacgatgaactgaagctcgaacagtctcagttgatatgtcatgggatgcttgcagtaccactaatacagacattgatttcattcattcagttatctctgaaaatctcacccctctttgagaccccattatttcagagtgtgaatggccttttctgatgcagtttaccttgagtagattctctagggccagtgaattctccatgcagtggaaaacagtgcagacatgccaasgctaccttaaggccaggaagatctataaactaatcagcctacctctgtgtctgaaatcattagttctgatgtagagcagcacctgcttctttgtgtatatcaccacactgaactgaccctgctcttagacctgagccagtgctkcatgtatggcctttatttgctttactcttctgggatagtgtctctcattagctactacagtgatgacaaacacagtacctgacttaagctgagctataacaaatagctatcaaatagctcctgcctctctgcagcttcagtaacttagagtgagga

SEQ ID NO: 17837 - DNA, 600 bp, Chicken  19866894226303_5
atttcattcattcagttatctctgaaaatctcacccctctttgagaccccattatttcagagtgtgaatggccttttctgatgcagtttaccttgagtagattctctagggccagtgaattctccatgcagtggaaaacagtgcagacatgccaasgctaccttaaggccaggaagatctataaactaatcagcctacctctgtgtctgaaatcattagttctgatgtagagcagcacctgcttctttgtgtatatcaccacactgaactgaccctgctcttagacctgagccagtgctkcatgtatggcctttatttgctttactcttctgggatagtgtctctcattagctactacagtgatgacaaacacagtacctgacttaagctgagctataacaaatagctatcaaatagctcctgcctctctgcagcttcagtaacttagagtgaggattcacagtgggcttggtcctgagaagcaccaactttgagcattctcaagtgagaagagaggatttattatatacacgcatatacacatgcaccaaactcacatgaatggagaggagactcctttctgacagggtggctgcactg

SEQ ID NO: 17838 - DNA, 600 bp, Chicken  19866894226304_1
gactaatcaaaattcctttgtttccacatctaccattaaaatacgtccctcccttggttgcctgctgaatgcacaagtttaaccactcagttgattggactcaaaaaagctgttactggctctacgtagactttgcccacagataattgctagatgggagcaatactccaggcaacttccagcaggcttggtgcttaattttgcagctctgagcatttcttgatgtacctcacctggcttagttgaggtttttctgcattacaactggggaaagttagccaagcgctgtgaatggcggtygctggaacttgcttcatgtagtagtcaactgagtgttaaccaaggtggtgttactaaagatttgctgtgccctttgaaaagaggatgtgtggtacactgcaaaggcaaagctcttcactgggggagcatstaggacctgcttctccaggacttggaataagtgcaatttttcccccttgccattaattggagctaagctgaatgttttatgaaaaccaacaacataagtccaagtctcctggagaactactcgtgctaattgagatttctgttgatgctagaggtccatgaacaaggcta

SEQ ID NO: 17839 - DNA, 595 bp, Chicken  19866894226304_10
cagctgtgattgtagttgttagttctgggagtttcaactgttttatcactgtggcagtgtctgaaattggcctgtgaagatttccarttgttcaggattttggagagaagagcacgytggggcggtgattggaaaaaggttttcaagacctatttttttttttttaatatacatgcacccaagtataaatagcacttgttcacatatatgtgaaagagaaagtctggaagaataggcggtagcttttgttagaccagcaaacctgtctgcaagatgcarggaagttttctggtgcatcarcctgcccatctgacaaaaaaaacatggcccatttttggcccatctgacaaaagcagcagccttctggctaattgcttgataggcaactgcagttttgctctaatttacttattcaagctcttgctcaaatttattttgttttattggactactcacatgagtaaagacatactgggctagacagtaatgccaagcttgtacattattaattgctgagctctgtggaggtgttgcagctgggcgatttgctcgtggcctcctgtatttctaggaaaatggcacgccttgcctttca

SEQ ID NO: 17840 - DNA, 600 bp, Chicken  19866894226304_2
ctttgcccacagataattgctagatgggagcaatactccaggcaacttccagcaggcttggtgcttaattttgcagctctgagcatttcttgatgtacctcacctggcttagttgaggtttttctgcattacaactggggaaagttagccaagcgctgtgaatggcggtygctggaacttgcttcatgtagtagtcaactgagtgttaaccaaggtggtgttactaaagatttgctgtgccctttgaaaagaggatgtgtggtacactgcaaaggcaaagctcttcactgggggagcatstaggacctgcttctccaggacttggaataagtgcaatttttcccccttgccattaattggagctaagctgaatgttttatgaaaaccaacaacataagtccaagtctcctggagaactactcgtgctaattgagatttctgttgatgctagaggtccatgaacaaggctaggtgtatawcaggcatgggatgaaacctgtattataggcggtagtgtttctctttgttctcagtagggatgggcttctccgtttttgtattgcaattgagaaagcaagaacagaaaagagatctggtggg

SEQ ID NO: 17841 - DNA, 600 bp, Chicken  19866894226304_3
tgcttcatgtagtagtcaactgagtgttaaccaaggtggtgttactaaagatttgctgtgccctttgaaaagaggatgtgtggtacactgcaaaggcaaagctcttcactgggggagcatstaggacctgcttctccaggacttggaataagtgcaatttttcccccttgccattaattggagctaagctgaatgttttatgaaaaccaacaacataagtccaagtctcctggagaactactcgtgctaattgagatttctgttgatgctagaggtccatgaacaaggctaggtgtatawcaggcatgggatgaaacctgtattataggcggtagtgtttctctttgttctcagtagggatgggcttctccgtttttgtattgcaattgagaaagcaagaacagaaaagagatctggtgggaacaatcagttggcacccagtgctgcagagcccatctcctgctgcttctgctggctctgtggggttgttgctgatgggatttcttggggagcactgggcatgttcaggtgcaggggatgcagcagtgctccccgaggacactgcgggaagcccaaggcacactgtctgtgtttaacagc

SEQ ID NO: 17842 - DNA, 600 bp, Chicken  19866894226304_4
cttgcctgagcaaaactgagcccagctctttatcttttcagcctcctatatcctaacctggaaagtaaaaggagatgacgaaagcgcatggtaggaaggacttagcagttggagaggcagacatggtaaatggacagagactgaaataatacagggaaaaaaaataacaaagtaggaaatctgttggtgataaatgaatgtggaaggtatctgaggggaagatttggtgtacacattgacttacccagatctgtgtctgtgttatttttcaactcttattttaagactgagagaacaaawctgaaaagtgaatctaaatcyayggaaagggatgtaattaagcatcagaggaaaagaaaacacaagaaatgtaaaacatttaaacaaattaacttttctgctcttaaaggacagtgccagtgccagtgctgtcctgtttggaggaatgtatttgttgtggtttatggctgctttgaatatagagaaatcagaggacagctgtgattgtagttgttagttctgggagtttcaactgttttatcactgtggcagtgtctgaaattggcctgtgaagatttccarttgttcaggattttggag

SEQ ID NO: 17843 - DNA, 600 bp, Chicken  19866894226304_5
ccagctctttatcttttcagcctcctatatcctaacctggaaagtaaaaggagatgacgaaagcgcatggtaggaaggacttagcagttggagaggcagacatggtaaatggacagagactgaaataatacagggaaaaaaaataacaaagtaggaaatctgttggtgataaatgaatgtggaaggtatctgaggggaagatttggtgtacacattgacttacccagatctgtgtctgtgttatttttcaactcttattttaagactgagagaacaaawctgaaaagtgaatctaaatcyayggaaagggatgtaattaagcatcagaggaaaagaaaacacaagaaatgtaaaacatttaaacaaattaacttttctgctcttaaaggacagtgccagtgccagtgctgtcctgtttggaggaatgtatttgttgtggtttatggctgctttgaatatagagaaatcagaggacagctgtgattgtagttgttagttctgggagtttcaactgttttatcactgtggcagtgtctgaaattggcctgtgaagatttccarttgttcaggattttggagagaagagcacgytggggcggt

SEQ ID NO: 17844 - DNA, 600 bp, Chicken  19866894226304_6
agctctttatcttttcagcctcctatatcctaacctggaaagtaaaaggagatgacgaaagcgcatggtaggaaggacttagcagttggagaggcagacatggtaaatggacagagactgaaataatacagggaaaaaaaataacaaagtaggaaatctgttggtgataaatgaatgtggaaggtatctgaggggaagatttggtgtacacattgacttacccagatctgtgtctgtgttatttttcaactcttattttaagactgagagaacaaawctgaaaagtgaatctaaatcyayggaaagggatgtaattaagcatcagaggaaaagaaaacacaagaaatgtaaaacatttaaacaaattaacttttctgctcttaaaggacagtgccagtgccagtgctgtcctgtttggaggaatgtatttgttgtggtttatggctgctttgaatatagagaaatcagaggacagctgtgattgtagttgttagttctgggagtttcaactgttttatcactgtggcagtgtctgaaattggcctgtgaagatttccarttgttcaggattttggagagaagagcacgytggggcggtga

SEQ ID NO: 17845 - DNA, 600 bp, Chicken  19866894226304_7
aagactgagagaacaaawctgaaaagtgaatctaaatcyayggaaagggatgtaattaagcatcagaggaaaagaaaacacaagaaatgtaaaacatttaaacaaattaacttttctgctcttaaaggacagtgccagtgccagtgctgtcctgtttggaggaatgtatttgttgtggtttatggctgctttgaatatagagaaatcagaggacagctgtgattgtagttgttagttctgggagtttcaactgttttatcactgtggcagtgtctgaaattggcctgtgaagatttccarttgttcaggattttggagagaagagcacgytggggcggtgattggaaaaaggttttcaagacctatttttttttttttaatatacatgcacccaagtataaatagcacttgttcacatatatgtgaaagagaaagtctggaagaataggcggtagcttttgttagaccagcaaacctgtctgcaagatgcarggaagttttctggtgcatcarcctgcccatctgacaaaaaaaacatggcccatttttggcccatctgacaaaagcagcagccttctggctaattgcttgataggcaac

SEQ ID NO: 17846 - DNA, 600 bp, Chicken  19866894226304_8
tctaaatcyayggaaagggatgtaattaagcatcagaggaaaagaaaacacaagaaatgtaaaacatttaaacaaattaacttttctgctcttaaaggacagtgccagtgccagtgctgtcctgtttggaggaatgtatttgttgtggtttatggctgctttgaatatagagaaatcagaggacagctgtgattgtagttgttagttctgggagtttcaactgttttatcactgtggcagtgtctgaaattggcctgtgaagatttccarttgttcaggattttggagagaagagcacgytggggcggtgattggaaaaaggttttcaagacctatttttttttttttaatatacatgcacccaagtataaatagcacttgttcacatatatgtgaaagagaaagtctggaagaataggcggtagcttttgttagaccagcaaacctgtctgcaagatgcarggaagttttctggtgcatcarcctgcccatctgacaaaaaaaacatggcccatttttggcccatctgacaaaagcagcagccttctggctaattgcttgataggcaactgcagttttgctctaatttacttattcaag

SEQ ID NO: 17847 - DNA, 600 bp, Chicken  19866894226304_9
gaatatagagaaatcagaggacagctgtgattgtagttgttagttctgggagtttcaactgttttatcactgtggcagtgtctgaaattggcctgtgaagatttccarttgttcaggattttggagagaagagcacgytggggcggtgattggaaaaaggttttcaagacctatttttttttttttaatatacatgcacccaagtataaatagcacttgttcacatatatgtgaaagagaaagtctggaagaataggcggtagcttttgttagaccagcaaacctgtctgcaagatgcarggaagttttctggtgcatcarcctgcccatctgacaaaaaaaacatggcccatttttggcccatctgacaaaagcagcagccttctggctaattgcttgataggcaactgcagttttgctctaatttacttattcaagctcttgctcaaatttattttgttttattggactactcacatgagtaaagacatactgggctagacagtaatgccaagcttgtacattattaattgctgagctctgtggaggtgttgcagctgggcgatttgctcgtggcctcctgtatttctaggaaaatgg

SEQ ID NO: 17848 - DNA, 600 bp, Chicken  19866894226305_1
tgtaagcagtgacagaaccactaaaaagcttgagatgattaatgtaggtgggaaataagaaggatgcaagacacgggaaaacagttaagacacgcagggcttttcacagctctggcacagctctcatacaactgatgcatgctaagctttccaaagtggtgagagtgaatggatcatatttagctggttccgagtaaaggctcaagtgattgacttcattttgtccaacatttttccttctttcttgagaagcatccagcagtcaacagtccattaaagagattgctatgggaaacccaygactctcctttgattcactcattcttgttaacagctttgttggaagaatctattgcacagccctgtggtgcaatagtcctgcccaaagtccatgtatgcacggagactgacctccccagtgctatgttttcctaagacctctaagctgctatgtgtaggttagagtcactacagcaaacacaacactgtggatctggatcacagcaggcaaatctggcacaacccaaagctacagaactgcctctttaggacctttgttaaggaaacagagaatgttagagagcagttcactctgtagca

SEQ ID NO: 17849 - DNA, 600 bp, Chicken  19866894226305_2
aactgcctctttaggacctttgttaaggaaacagagaatgttagagagcagttcactctgtagcagtggacaaggaggtttgggctgattctcaagcaatctagctagcagattgtgacttggcacccactgctactttgcctgtttccctgctgctccaggaattgagcaaactgtgagcgatctgtctgcacgcgtcatagcatatgctgcaccatgcaccagaattagcacactgtcagaccagctgcacgggccaaactgctcacccctcctgtccacctgaacatgtcccagggygcagaatgcagtgggactcactgctcagggctctgcagagaaggcaacgggactctcggatctgcaaaggatggcactgaaggcttcatctggatgaatcagctgctcgctgcaggattctgtgggaacagcgctgctactgagattcaacagtagttatctataaagcaaaaaggagttttatcaagtgtgtagtgctaaacattatccagagtgcaaattctcactggaaattgcctccacagcagatagactgaactatcaaaacttcgtgacacagcactccttgtctcagcacac

SEQ ID NO: 17850 - DNA, 600 bp, Chicken  19866894226308_1
gtgtttatacgtggctctagacacacgctccttttccatactcagtttcaggaggaactccttcaccatgggaacattatctttttttaatgtatatagcactcatactatacgtgaccaatgtggttccatccacatcatcgtgcagtttaagcaacaacaatgttgggccacctgccatgaaaaacctcagcttctggcttgactgctggggagaaatttcacaggtcttgtggaaagtgaggcatgaaaatatactgtgggattgcaagcagcttatcagagagaatgtgccttgcraagtcagagctgaacagagtatttcatgtctttggcaaatgtggtgtgcatgatctgaaccattaatcaaatgctgacagcctgcttggggaagcggagtgtcaaatggaggagggcttgcacagcccaatccaaatggcatctgggggaaaagaagagggggaaaaaaaaaaacaaggaaaagaatgtttatggtactggaatgattttacttgcatttactctaaacgtttggaaacttatattgatctgaggagaagctgatgtgagtggagagactcaaatcagcattccacgttg

SEQ ID NO: 17851 - DNA, 600 bp, Chicken  19866894226308_2
ttattttgggaggaatccatactcagttttcatagtgatgagaggtgcgtgcagtcactgatgtgagaaaggaggttttaaatcttgtggtgctactgtaaattaacagaaattcattagtgtcactacagctatgtttaatttccagcaaagccatagagaccagctgatcaccagaaccagtggtattcatatagctctgctggccgtggaaattcatggctaagagattataattttgcctgctcttctaaattactgttatattttattgataggagaaggctattttttgaaaawctctgtctgtcttgtattatactaaagaaactaagatgatgtagcagtagtcaaccatgagcaggggctgatctaggagagtgaagaaaacaagaaacaaaaggaagaaaacatgaaaattattattattattattattattttaacggttcctgatgacattattttagtcttggaattgctccaggagraaagggggagtgaacatgtttgaaatgtcytgatctgagtgcgaagtagtatttcactgggtttaattttacagaaggacgtgtctttattgtttgtgctgcccttaat

SEQ ID NO: 17852 - DNA, 600 bp, Chicken  19866894226308_3
atatagctctgctggccgtggaaattcatggctaagagattataattttgcctgctcttctaaattactgttatattttattgataggagaaggctattttttgaaaawctctgtctgtcttgtattatactaaagaaactaagatgatgtagcagtagtcaaccatgagcaggggctgatctaggagagtgaagaaaacaagaaacaaaaggaagaaaacatgaaaattattattattattattattattttaacggttcctgatgacattattttagtcttggaattgctccaggagraaagggggagtgaacatgtttgaaatgtcytgatctgagtgcgaagtagtatttcactgggtttaattttacagaaggacgtgtctttattgtttgtgctgcccttaatttcccaaatctgtgagtttccttagttcattacactgatacagcatttatggacttgtacgtgcagtaagttcatgtagttaataaatgatgttacagcatttgcactgcattcctcatagcgtcctatggctggagtctcatgaaattaaatctgtcattaaataaaaagctttattgacagttgcatct

SEQ ID NO: 17853 - DNA, 576 bp, Chicken  19866894226308_4
gctaagagattataattttgcctgctcttctaaattactgttatattttattgataggagaaggctattttttgaaaawctctgtctgtcttgtattatactaaagaaactaagatgatgtagcagtagtcaaccatgagcaggggctgatctaggagagtgaagaaaacaagaaacaaaaggaagaaaacatgaaaattattattattattattattattttaacggttcctgatgacattattttagtcttggaattgctccaggagraaagggggagtgaacatgtttgaaatgtcytgatctgagtgcgaagtagtatttcactgggtttaattttacagaaggacgtgtctttattgtttgtgctgcccttaatttcccaaatctgtgagtttccttagttcattacactgatacagcatttatggacttgtacgtgcagtaagttcatgtagttaataaatgatgttacagcatttgcactgcattcctcatagcgtcctatggctggagtctcatgaaattaaatctgtcattaaataaaaagctttattgacagttgcatctatgagg

SEQ ID NO: 17854 - DNA, 599 bp, Chicken  19866894226311_1
  misc_feature (1)..(152): n is any nucleotide
nnnnnnnnnnnnnnnnnnnnnnnnnnnnnnnnnnnnnnnnnnnnnnnnnnnnnnnnnnnnnnnnnnnnnnnnnnnnnnnnnnnnnnnnnnnnnnnnnnnnnnnnnnnnnnnnnnnnnnnnnnnnnnnnnnnnnnnnnnnnnnnnnnnnnnnntaatgcctgtgggtttgtttggggttttcttgtagtagctctgaaaagtttctgctcagttctagcatagcaggctttgtgaactttgcatgaagtgctgcaccctgaggcaccggtaaccatttggtggtcttgtctgtatataagwatatataaataagcaatattatatttgtgtgtataagtactttaaaaagtacttaattatttataaaatagctattttgtaacagtaacactgaaatacataggcaacataascagctaccastggtagcatctccactgttgatgtcttagaagcagcttaaagaaagactgtatcctgaaactccaactctaggaacagaggttgtgctgcgactgctcttactgagaacttgaccttagttactggagtctgaaatgcaaatcactcatgatcatgagagggctccaaaaacctgc

SEQ ID NO: 17855 - DNA, 599 bp, Chicken  19866894226311_2
  misc_feature (1)..(39): n is any nucleotide
nnnnnnnnnnnnnnnnnnnnnnnnnnnnnnnnnnnnnnntaatgcctgtgggtttgtttggggttttcttgtagtagctctgaaaagtttctgctcagttctagcatagcaggctttgtgaactttgcatgaagtgctgcaccctgaggcaccggtaaccatttggtggtcttgtctgtatataagwatatataaataagcaatattatatttgtgtgtataagtactttaaaaagtacttaattatttataaaatagctattttgtaacagtaacactgaaatacataggcaacataascagctaccastggtagcatctccactgttgatgtcttagaagcagcttaaagaaagactgtatcctgaaactccaactctaggaacagaggttgtgctgcgactgctcttactgagaacttgaccttagttactggagtctgaaatgcaaatcactcatgatcatgagagggctccaaaaacctgctcatcgaagaacataacacccttgagcagctgagatgttgggttagtggagggatgaaaaacctcccctgtaacaaaatatcgtattgttcaatagataaacaactaactgaa

SEQ ID NO: 17856 - DNA, 599 bp, Chicken  19866894226311_3
  misc_feature (1)..(29): n is any nucleotide
nnnnnnnnnnnnnnnnnnnnnnnnnnnnntaatgcctgtgggtttgtttggggttttcttgtagtagctctgaaaagtttctgctcagttctagcatagcaggctttgtgaactttgcatgaagtgctgcaccctgaggcaccggtaaccatttggtggtcttgtctgtatataagwatatataaataagcaatattatatttgtgtgtataagtactttaaaaagtacttaattatttataaaatagctattttgtaacagtaacactgaaatacataggcaacataascagctaccastggtagcatctccactgttgatgtcttagaagcagcttaaagaaagactgtatcctgaaactccaactctaggaacagaggttgtgctgcgactgctcttactgagaacttgaccttagttactggagtctgaaatgcaaatcactcatgatcatgagagggctccaaaaacctgctcatcgaagaacataacacccttgagcagctgagatgttgggttagtggagggatgaaaaacctcccctgtaacaaaatatcgtattgttcaatagataaacaactaactgaagagtcttcag

SEQ ID NO: 17857 - DNA, 528 bp, Chicken  19866894226311_4
ctcccctgtaacaaaatatcgtattgttcaatagataaacaactaactgaagagtcttcaggaaaccctagtctagaatatttctgaattatttatattctaattacattgttctgtttgagaagtgtacgctcttggcatattcttagcatactttaggtgctagtatggaaaaaaagagatttgttttgttttacatctacctttcctcctgtgaactttaagaagtggaatatcatgctttgaaggaggtaagatgacacattcactcctagaattcttgcagagcgactagaaaayatcatgacttaaaaatgcactttttgtacatatttacaaacactgttttgatctttgtttttaaaggctagatcatagtgtgctaatccctacatttttatctgttaaagcagagaaatcagagataggaatctcatttgggtgtactcgttacttgaacatgagcaaaatggcatacagttgctatatgaatttacattcagtttcggtgtttctcaacacaaacct

SEQ ID NO: 17858 - DNA, 600 bp, Chicken  19866894226312_1
gttcaactcaagatttttttaatattctttagctgggagacacaaatcacaaccccaactcatggacgtgctctgagcacagcactttctccctttttctaaaacaaaagagtccaacagctgttcagaaattaacttcttcccagtcccataacagcaaccgtactgaattaacatctaatctgtatggagggggaaacaaaactaacacccacacgatttcactttgtggctccaaactggaaaggaccgagctatcactagcccatttatctgcgcctattgtgctttatgagttcygtttctatctgtgctatatcgccacctagtgagggcccttcctacacggcaacatcacatccaggctaaccgcgaggctgagccgaagagcatctcacatctccatgtatactacaatgttttctgaacaaaacacgtccattaacttcagtttcctagcctttaatcttctagatcttgctgcacaaggatgaatgaaatcaatcttactctgtgcacgcatactgtgagttatcacaaatccaaagcactgctgcaaacaggctcgtggaaacgggggctttatgattagaagcatct

SEQ ID NO: 17859 - DNA, 539 bp, Chicken  19866894226313_1
ttggaagctggaggttgttggcagtacctgtagtacacacgaactatagcatcatgttgcattattaggtgcttatcaaagcactcaatcaactcaaggcatagaaaaaaaaagtgattatgctccagtgctgttcttatgtaaacacatacatgaatcaaagaacacagatataagagatctcaagcaataatgcatcttctttgttcattatgaccgaggacccaagacaagctcacacatccacctatgtgaaattctgcactgtgcagataatcagcttatttctactttggctaytatctcttcccacttcaacacatcccctgtagtctccttcaataagcagccctcccctttgcgctccccctcttctgctcatgcttagctcaggccagcagcacccacccaggctccagccctgctttgtgcactactgaggggacccataggcatcctcgtttcacaggctgctcagaacatcagcactccgctccttcctaaaacattcacatgagaaatacacaagaagagaagaa

SEQ ID NO: 17860 - DNA, 599 bp, Chicken  19866894226314_1
  misc_feature (1)..(235): n is any nucleotide
nnnnnnnnnnnnnnnnnnnnnnnnnnnnnnnnnnnnnnnnnnnnnnnnnnnnnnnnnnnnnnnnnnnnnnnnnnnnnnnnnnnnnnnnnnnnnnnnnnnnnnnnnnnnnnnnnnnnnnnnnnnnnnnnnnnnnnnnnnnnnnnnnnnnnnnnnnnnnnnnnnnnnnnnnnnnnnnnnnnnnnnnnnnnnnnnnnnnnnnnnnnnnnnnnnnnnnnnnnnnnnnnnnnnnnnnnnnctttatatctaccctgctgtcatatatctgtctcctgcagaaaataatgagctcacccagtgtgkttttttttctctttcacctcttctgtaagttaggcagcttaactgcgtagaacataccccgttattactaaatctgattttatgattcagtttcattgtccaaatgcacgcacaccaatacagacagataagcagggagaaatctgttacgcaatgcatgaaggcattttaaaatgaggttttaaagccacgagacaaaaatgtggaatattttgatgtaaatatcacatttcccaagctcttgttctgggtgtcatcgctgcttctattttgactcatgcagtgattgatctggtttc

SEQ ID NO: 17861 - DNA, 600 bp, Chicken  19866894226317_1
gcttatcttaatgactagatctgcactatttggcctctgggccaaaggaccattcttatgtcatgttagatgtttgtagtttgaggggcaacacctgggccactgtatgtaatgaatgtaacatgatttcctttggagaaagctaccatgtaaataagagtgcacctctcacagacaacatccacagtgccacagaggagctaatgcagtacaggatcaaagcccaggttataacacgttaatctgctactttaggcaaacttttatttttctgagtctcttaggatgatgaactcttcmagacagaggtttttactagatgctcattcaccacctgactagtttgagccaactatgtttgagagccagtatcagtaggcagcgcgtaagactaaatttgcgtttgcatccacagtgaaattcctgctgcgctcacctgctcacaagaagaaaacaagtgcccaaacactgagctaaggaatgaggatgggtcagtgatcaggttagtgatccctgttctaggcatgcctgggagcaatcaagcctttacctcctacagtctctggatgtgacacattgctttgtctcataataatgagg

SEQ ID NO: 17862 - DNA, 600 bp, Chicken  19866894226319_1
ccacgtggcaagtcagtagaaactacaatgctgcataaagacgaaatggacttggcattacagggagaaatcttttccactctggacttttttttccctgcatcctctcctaagaatgttttccccaggcctttttatcagaaggtacacagggtagctctcaaagcagctctggggaagcgagggctgagtgactggagagccagaactttcctccagccttctgtgggatatttcattctgtttggattaacacagcttcagaaattcccacagatttgttttatggtatgatttccygcwttgcccagaccatatgatttatttcagttaatttttaataacaaaactgaacccaataacctggcatataacccactaattctgtagagcagctaatgtccaatcctccctggggcttcaagcagtgatggtagtaaaagtgtaactgtaatgcacagatgaaacacagagcacactgtgcagggcaagcaaatatttctggttctctgatgcaggcacacaatgcagtctgcctgatctagctcaggctccctcaaaatatcacactctttgctttgggcttttggtttcttcacc

SEQ ID NO: 17863 - DNA, 600 bp, Chicken  19866894226319_2
cgtggcaagtcagtagaaactacaatgctgcataaagacgaaatggacttggcattacagggagaaatcttttccactctggacttttttttccctgcatcctctcctaagaatgttttccccaggcctttttatcagaaggtacacagggtagctctcaaagcagctctggggaagcgagggctgagtgactggagagccagaactttcctccagccttctgtgggatatttcattctgtttggattaacacagcttcagaaattcccacagatttgttttatggtatgatttccygcwttgcccagaccatatgatttatttcagttaatttttaataacaaaactgaacccaataacctggcatataacccactaattctgtagagcagctaatgtccaatcctccctggggcttcaagcagtgatggtagtaaaagtgtaactgtaatgcacagatgaaacacagagcacactgtgcagggcaagcaaatatttctggttctctgatgcaggcacacaatgcagtctgcctgatctagctcaggctccctcaaaatatcacactctttgctttgggcttttggtttcttcaccatg

SEQ ID NO: 17864 - DNA, 600 bp, Chicken  19866894226320_1
cctacttttactggattaaactactttgcaaaaagtttcaggtagctcaaatttttctacgaaacacagcaaagtttaaaagagtatatgcacccagctctgcatagatcaactccaagtaaaataccagttatcttaaaactctgtcaatatttcttgtttgtatttatctggagttagctacattgttctgcattctcttaccttgatcttttgggtgtaagctgatcatactccacctggtgttttaatggaataagtgggcggatagcatcaaacagaggcagcctgcttggttcrttaatcacgagctttaggtcacccacaagcactgggaggttcatagatctgcaaaaatacagtgagtaaagaggcaggggtcatcaacacagagcactattaaaaatcttgctgttaatgtggcttcaatattggtgtgtcccttcaacctaaggaagttatttatataaatcttcatttaaccaaaacaaaataacatctgaaaaagtaaacttcccgtaagcaaacaggaagaatacctccttcaaaataactgaaatctattatccattggttttatcttttatgggcacataactt

SEQ ID NO: 17865 - DNA, 600 bp, Chicken  19866894226323_1
acagatcttcttatccccaagccaaatcaggcagccctgaacctggcccttccaaagccacaattcagtaagcagccatcagtgcaccaaatcttccattcaactggcaggcacaacacaagacacgtgcaaacaggtgcttgtatgcatttatggacctattagagaacatcatgtagagttcttttctgacaagatagctaaaaatgaaaggggaggtcctgtttttaccagtcaagccaagatgcccagacacagacttgcttcccacgcatctccctgcaagccacttctgctacryagctgccatgaagcagcctgcattctacacagcacactgctgaagcacragtctgttgactaagatccgctgccctggcagctgcaaatctggcagcagctcttacaacaarctgtgtgcacgtacctggataattcctgaaagaaaggcgagggtcacagctacttgcacccgcttgtcatccctaagactgtagtaatctgaggcatctgtagcgttagttgagttatagcctacagagatcacttcatcaggcacttgtctcacagcaaccccgccaaccatcatactaatcacag

SEQ ID NO: 17866 - DNA, 600 bp, Chicken  19866894226323_2
cagatcttcttatccccaagccaaatcaggcagccctgaacctggcccttccaaagccacaattcagtaagcagccatcagtgcaccaaatcttccattcaactggcaggcacaacacaagacacgtgcaaacaggtgcttgtatgcatttatggacctattagagaacatcatgtagagttcttttctgacaagatagctaaaaatgaaaggggaggtcctgtttttaccagtcaagccaagatgcccagacacagacttgcttcccacgcatctccctgcaagccacttctgctacryagctgccatgaagcagcctgcattctacacagcacactgctgaagcacragtctgttgactaagatccgctgccctggcagctgcaaatctggcagcagctcttacaacaarctgtgtgcacgtacctggataattcctgaaagaaaggcgagggtcacagctacttgcacccgcttgtcatccctaagactgtagtaatctgaggcatctgtagcgttagttgagttatagcctacagagatcacttcatcaggcacttgtctcacagcaaccccgccaaccatcatactaatcacagc

SEQ ID NO: 17867 - DNA, 600 bp, Chicken  19866894226323_3
tccaaagccacaattcagtaagcagccatcagtgcaccaaatcttccattcaactggcaggcacaacacaagacacgtgcaaacaggtgcttgtatgcatttatggacctattagagaacatcatgtagagttcttttctgacaagatagctaaaaatgaaaggggaggtcctgtttttaccagtcaagccaagatgcccagacacagacttgcttcccacgcatctccctgcaagccacttctgctacryagctgccatgaagcagcctgcattctacacagcacactgctgaagcacragtctgttgactaagatccgctgccctggcagctgcaaatctggcagcagctcttacaacaarctgtgtgcacgtacctggataattcctgaaagaaaggcgagggtcacagctacttgcacccgcttgtcatccctaagactgtagtaatctgaggcatctgtagcgttagttgagttatagcctacagagatcacttcatcaggcacttgtctcacagcaaccccgccaaccatcatactaatcacagcaaaagtgcctgaaataagggggaaaggaaaataatacattaaaattctg

SEQ ID NO: 17868 - DNA, 600 bp, Chicken  19866894226323_4
caacacaagacacgtgcaaacaggtgcttgtatgcatttatggacctattagagaacatcatgtagagttcttttctgacaagatagctaaaaatgaaaggggaggtcctgtttttaccagtcaagccaagatgcccagacacagacttgcttcccacgcatctccctgcaagccacttctgctacryagctgccatgaagcagcctgcattctacacagcacactgctgaagcacragtctgttgactaagatccgctgccctggcagctgcaaatctggcagcagctcttacaacaarctgtgtgcacgtacctggataattcctgaaagaaaggcgagggtcacagctacttgcacccgcttgtcatccctaagactgtagtaatctgaggcatctgtagcgttagttgagttatagcctacagagatcacttcatcaggcacttgtctcacagcaaccccgccaaccatcatactaatcacagcaaaagtgcctgaaataagggggaaaggaaaataatacattaaaattctggcaggtataagaaacagttctaggcttctttactcctgcacagatccacagaattatttgata

SEQ ID NO: 17869 - DNA, 600 bp, Chicken  19866894226325_1
ctagaacaaagagcaattgaagttcttcgccgtcaccgcagataccgctggttggatgctgagctggaggaagcaaaaccagcgaagacatatcccatgtaacagttgcataaatgtttacttaacacttcttaatctgtctctatatgacctagctttttggagaactgtgtacatactaagtaaaatattgtaatcgtgcaaactgtcttttatcaagtggtgttgtctttttaattatgggaagctgtagctgatcacagttcttgactttaatagaaaatgaaagcaaacttacayattatttgcttagttggtgagcgttaaagtattttgatgactgggagtggggagagtaggctaatcacattagctagaagaagctgaggtttgtatggaaactagttttaaaaaccagattgagaacagggatgaaatgagtgacaaataaaccttgtattttcacctcaaagctttctactgtttgcctttgttggaggtgatggtaggaggggaggaacagggacaaactgggcaaataatgaaggtatgaaaggtaggagcctaatggtggagtagaaatctgaggtgaagattaga

SEQ ID NO: 17870 - DNA, 600 bp, Chicken  19866894226326_1
gcggcataactgggtctgtttctttttttcttcaagttgcaaactcaactgttgcagagatactgtgcactgaatggagaatgagatctccaagtggtgattcaactcttcattttatttagcctctccattactaaccttgagcgactaccttcctagctccagtactttagataaatatttaaaatgaagtttgctgagtaataatcatcataatgatgaaagctatacaatatgattcatagaatagtttgggtggaagggactttaaagatcatccagttctaatccccttgctgyagatcagttgccacttaccagatcaggctgcccagggccccattcaaactgaccttaagcacctccagggatccataactcttgggtaacctattgtagtgcctcactgacctctgagtaaagaatttcatcctaacatctaacctaaatcttctctcttttattttgaaaccattcccccttgccctatcaccatcagactgcacaaagagttggtctccatcttgtttataaaccccttttaaatacaagaaggctgcaatgaagtctcttcaaggtcttctcttctgtagrctaaat

SEQ ID NO: 17871 - DNA, 600 bp, Chicken  19866894226326_2
tgctgyagatcagttgccacttaccagatcaggctgcccagggccccattcaaactgaccttaagcacctccagggatccataactcttgggtaacctattgtagtgcctcactgacctctgagtaaagaatttcatcctaacatctaacctaaatcttctctcttttattttgaaaccattcccccttgccctatcaccatcagactgcacaaagagttggtctccatcttgtttataaaccccttttaaatacaagaaggctgcaatgaagtctcttcaaggtcttctcttctgtagrctaaataacaccaactccctcagcctttcttcatcagagaggtacttcagctctctcatcacccttgtggcctcctgtggaccctccccaacaacttcacatcttccttatcctgggtrccccagagctgaatgcagtaatgcaggtagggcctcacaagggagagtatcaggtcctttgacctgctatctayatttcttttgatccagttttctgtcattggcaaacttgctgagggtgtgctctcagatcaaatgtctgtgttaccaaaatgaggtgttcagtagtgctggtactggt

SEQ ID NO: 17872 - DNA, 600 bp, Chicken  19866894226326_3
ctgagtaaagaatttcatcctaacatctaacctaaatcttctctcttttattttgaaaccattcccccttgccctatcaccatcagactgcacaaagagttggtctccatcttgtttataaaccccttttaaatacaagaaggctgcaatgaagtctcttcaaggtcttctcttctgtagrctaaataacaccaactccctcagcctttcttcatcagagaggtacttcagctctctcatcacccttgtggcctcctgtggaccctccccaacaacttcacatcttccttatcctgggtrccccagagctgaatgcagtaatgcaggtagggcctcacaagggagagtatcaggtcctttgacctgctatctayatttcttttgatccagttttctgtcattggcaaacttgctgagggtgtgctctcagatcaaatgtctgtgttaccaaaatgaggtgttcagtagtgctggtactggtccctgtacagagccttgaagaacaccatgtgtcaccagtctccacctggacatcaagtccttggctgcagctcgttgagtgtagccatacaggtaattccttatccaccaagtgatcca

SEQ ID NO: 17873 - DNA, 580 bp, Chicken  19866894226326_4
tatcaccatcagactgcacaaagagttggtctccatcttgtttataaaccccttttaaatacaagaaggctgcaatgaagtctcttcaaggtcttctcttctgtagrctaaataacaccaactccctcagcctttcttcatcagagaggtacttcagctctctcatcacccttgtggcctcctgtggaccctccccaacaacttcacatcttccttatcctgggtrccccagagctgaatgcagtaatgcaggtagggcctcacaagggagagtatcaggtcctttgacctgctatctayatttcttttgatccagttttctgtcattggcaaacttgctgagggtgtgctctcagatcaaatgtctgtgttaccaaaatgaggtgttcagtagtgctggtactggtccctgtacagagccttgaagaacaccatgtgtcaccagtctccacctggacatcaagtccttggctgcagctcgttgagtgtagccatacaggtaattccttatccaccaagtgatccatccatcaaatccatgactctgatttacatacagtgatgtgcaggatagtgtcaa

SEQ ID NO: 17874 - DNA, 600 bp, Chicken  19866894226327_1
aaaggagaatagctgtgatactcttgtgatgtctgtacatgagtatttttgcactgaaggaatgcaaatgcatttttgctgtgttacagcacagtttcagacagagcagcaatgatgcactgtaaacagaccatgttaaaacacatagttctatctagatccttctgcagcattttctctaaatagttattttgtaataggcattttatttgctctgcggaggccctaaatagtatatgtccgacttgaggagcatgcatgttctggaacttgttttaggggctctttatttagcaggcrtgcagcaggcaagstctcyggctctcaggcacagctccgggcagagcagcagctccgggctccctgcgcttatctccctgtgttgttcatccacagaaggttatttgggtagattttccctcccccagtgactggtaaatggaggcagaagatggaaaaacacagcacaagtgcgtgattggtggctccaaaccatttttatttgtttcagagtgttttgaggtacattaggaaataaagacaaattctatgcatgcccagagaaggtactgaagagaattttcctctcggttatgttag

SEQ ID NO: 17875 - DNA, 600 bp, Chicken  19866894226327_2
gtgatactcttgtgatgtctgtacatgagtatttttgcactgaaggaatgcaaatgcatttttgctgtgttacagcacagtttcagacagagcagcaatgatgcactgtaaacagaccatgttaaaacacatagttctatctagatccttctgcagcattttctctaaatagttattttgtaataggcattttatttgctctgcggaggccctaaatagtatatgtccgacttgaggagcatgcatgttctggaacttgttttaggggctctttatttagcaggcrtgcagcaggcaagstctcyggctctcaggcacagctccgggcagagcagcagctccgggctccctgcgcttatctccctgtgttgttcatccacagaaggttatttgggtagattttccctcccccagtgactggtaaatggaggcagaagatggaaaaacacagcacaagtgcgtgattggtggctccaaaccatttttatttgtttcagagtgttttgaggtacattaggaaataaagacaaattctatgcatgcccagagaaggtactgaagagaattttcctctcggttatgttagaagaaattgagctt

SEQ ID NO: 17876 - DNA, 600 bp, Chicken  19866894226327_3
actcttgtgatgtctgtacatgagtatttttgcactgaaggaatgcaaatgcatttttgctgtgttacagcacagtttcagacagagcagcaatgatgcactgtaaacagaccatgttaaaacacatagttctatctagatccttctgcagcattttctctaaatagttattttgtaataggcattttatttgctctgcggaggccctaaatagtatatgtccgacttgaggagcatgcatgttctggaacttgttttaggggctctttatttagcaggcrtgcagcaggcaagstctcyggctctcaggcacagctccgggcagagcagcagctccgggctccctgcgcttatctccctgtgttgttcatccacagaaggttatttgggtagattttccctcccccagtgactggtaaatggaggcagaagatggaaaaacacagcacaagtgcgtgattggtggctccaaaccatttttatttgtttcagagtgttttgaggtacattaggaaataaagacaaattctatgcatgcccagagaaggtactgaagagaattttcctctcggttatgttagaagaaattgagcttctctg

SEQ ID NO: 17877 - DNA, 600 bp, Chicken  19866894226342_1
gatgctccccacagatgaggaagagctggggatcatcaccagccatggatcaggatcactacgagaacttccagcagtgctggcaagtgtgcccatgtgttccatgcactccaagtggagctggtctgtgtgtgccccgttctgtgctttgagcatccgtgtaaagccatccgtgtcactgatctgtgagagctgatcagatacgaacctgttacatccctcccccctcactctgttcttggtgggctctttgagggcagcccccacctgcaccgggtgcacagagcactcaaatgctgrtctgggaggggaaaggccagcagcccttcagccctgctcagggctgggatgggccarcttctggtaatgcaaagtgaaaacaagccagagaacgagtaacagcagagaggaggataaaacgaaaccaaactaaaatcagaacggatgcaattgaacacttatcacatgagagcctccagaagaatacaggacaggaggatcaaagtatggcgtaactatcgaaccatttccttcaacctaaacatagctggccctcgcagcatgctattattggctacagatggtgcatgtgtgcatgta

SEQ ID NO: 17878 - DNA, 600 bp, Chicken  19866894226342_2
actacgagaacttccagcagtgctggcaagtgtgcccatgtgttccatgcactccaagtggagctggtctgtgtgtgccccgttctgtgctttgagcatccgtgtaaagccatccgtgtcactgatctgtgagagctgatcagatacgaacctgttacatccctcccccctcactctgttcttggtgggctctttgagggcagcccccacctgcaccgggtgcacagagcactcaaatgctgrtctgggaggggaaaggccagcagcccttcagccctgctcagggctgggatgggccarcttctggtaatgcaaagtgaaaacaagccagagaacgagtaacagcagagaggaggataaaacgaaaccaaactaaaatcagaacggatgcaattgaacacttatcacatgagagcctccagaagaatacaggacaggaggatcaaagtatggcgtaactatcgaaccatttccttcaacctaaacatagctggccctcgcagcatgctattattggctacagatggtgcatgtgtgcatgtaggaggagccgtggctcttcctgcagctgtgcagccctgcagcatgcacgcagtgggg

SEQ ID NO: 17879 - DNA, 458 bp, Chicken  19866894226342_3
aatcagaacggatgcaattgaacacttatcacatgagagcctccagaagaatacaggacaggaggatcaaagtatggcgtaactatcgaaccatttccttcaacctaaacatagctggccctcgcagcatgctattattggctacagatggtgcatgtgtgcatgtaggaggagccgtggctcttcctgcagctgtgcagccctgcagcatgcacgcagtggggcaggccctgcgacctgcaccaaagggctgggttgggctgtaagccctgccaacaccgggcacctcaccgtgctgcrgggacacagaatggggcaggagggcagcacagagtgactgcatggggaaaggaggagaaacgtgcccctccattctcccttccagtgcatgcagctcaggaagggccctggtgggctcacagctttgttacagaacagagcgctggaggaatgcattg

SEQ ID NO: 17880 - DNA, 600 bp, Chicken  19866894226343_1
tttaagtatgctgtggaaatagattggagcctctgaaggcatgtcttgaaattagtagcaaatgcatccttacgtgtcctactgcatcctatttcagtaaaaaaaaaaaaggcaatagaaaagtgtggcagataaatatgagagggaaaatacattttctcgttcagaatacttgcagctagtaaatggacaaacattttgcttgtcagacatcttccccctttcccttattccagttaaatgttacgatagtaactgcactgacagctactggaataatgtatgtaccatgctggtctrcctttcaagcagaggaacatagaagctcagtcttktaggtgcacaagccagctaaaattgtatgagttgtatgaaatgctttgaattcaagttgcagaagttgaagcatgccattgttttgtgatattaataagagcagcaagattgatagagaaagagtagggtgaagtaaaatttataatgcaaatttggagtgttcagatactgagaaaatatcaggaacaaaagcagctgaaggaggggagcagtgtggaatctgatttaataggattaaaataactgttcaaatttctagtggga

SEQ ID NO: 17881 - DNA, 600 bp, Chicken  19866894226343_2
aaggcatgtcttgaaattagtagcaaatgcatccttacgtgtcctactgcatcctatttcagtaaaaaaaaaaaaggcaatagaaaagtgtggcagataaatatgagagggaaaatacattttctcgttcagaatacttgcagctagtaaatggacaaacattttgcttgtcagacatcttccccctttcccttattccagttaaatgttacgatagtaactgcactgacagctactggaataatgtatgtaccatgctggtctrcctttcaagcagaggaacatagaagctcagtcttktaggtgcacaagccagctaaaattgtatgagttgtatgaaatgctttgaattcaagttgcagaagttgaagcatgccattgttttgtgatattaataagagcagcaagattgatagagaaagagtagggtgaagtaaaatttataatgcaaatttggagtgttcagatactgagaaaatatcaggaacaaaagcagctgaaggaggggagcagtgtggaatctgatttaataggattaaaataactgttcaaatttctagtgggatacttcatccactgaaagactccagccagagatga

SEQ ID NO: 17882 - DNA, 600 bp, Chicken  19866894226345_1
tttcaaaattatgacttggagtatatctatatatatggatatgtatatattggtattggtatatacatatccaatatatgtatatatttatatttatttacttagttcttcatatttatgaaaaaaaaggtcatgaaaatgatgtcacaatggtgtccttgatgctttcaaggattctgataactagaacaaactagatccagtttcacattatcaaaataacctatctgattcaaaatctaaattcacagatatactgttaaaatacttcatattcaggagtatatttcattggtttayatcttcattgcttttttgacaaaattaaaaaagatgtataccatgaaatgctctatctgtggaagtacaagtatttagttgctctttcattttgagaggcatctcatcattctggtttctcacagaagacaaaacaattaaaatgaataaaaatcagatatttgtaagatctgttctctctctagtgaaaaggacaaagttttttgtagtttgttgggaagttttgtttgtaatagggtagagaaaaattaaagtaacacaagcaaaagcatttgcagttacaaagcatgatagctttct

SEQ ID NO: 17883 - DNA, 600 bp, Chicken  19866894226359_1
tatcaaggaaatttaattttaaactggattagctaaccatattaacatcacaagtagatgctcttagctggaattaaagtggccttcatttgttatttgttttgtttttcacttcgttttgcaactgaattaagctaattagggcttccaagggactgtatcagcacaagatttcagcacaggtttaatgaggctgttttaattcaccctttgagatgtggctggggtttttggttatcacctgtgtgctggacggtcttgccccaaaccacaggaaaagggaggaagggtgattccccrtgtaaaactggtgcaaaagtgctcgaaggggcaagttttacatcagcatatcttggggtcaaaacaacacctagcccccagatggccttgtttgtagggctggagggatctaaaagcagtraagtggtgaactggatggagtcaagttgagacgagctcagtcaatgcagagtggttgctgtgcaagcaggcaggcagacggggagcgtgctgacttgccatgtcatcacatccgaagggacagaggaacttgtggtgggagacagggattggtcaggaaagctggtcagaaaacttgta

SEQ ID NO: 17884 - DNA, 600 bp, Chicken  19866894226359_2
caactgaattaagctaattagggcttccaagggactgtatcagcacaagatttcagcacaggtttaatgaggctgttttaattcaccctttgagatgtggctggggtttttggttatcacctgtgtgctggacggtcttgccccaaaccacaggaaaagggaggaagggtgattccccrtgtaaaactggtgcaaaagtgctcgaaggggcaagttttacatcagcatatcttggggtcaaaacaacacctagcccccagatggccttgtttgtagggctggagggatctaaaagcagtraagtggtgaactggatggagtcaagttgagacgagctcagtcaatgcagagtggttgctgtgcaagcaggcaggcagacggggagcgtgctgacttgccatgtcatcacatccgaagggacagaggaacttgtggtgggagacagggattggtcaggaaagctggtcagaaaacttgtaccttcttcatttagtctcccaaactgaattgctattgtatttctatcaccctctggccccaaactcacttccagtgatgttatgttcattaatctgctcttaagtaggataaacttctgtt

SEQ ID NO: 17885 - DNA, 600 bp, Chicken  19866894226360_1
ttaaataagtagtaaacgcatagggtgagttctagttctcataaaattgctgatgcccatatttactcaaagcatatcaaagttatttaaaggagatttagaattaccaagacattcaaataattttcttatagctttctctagcgttaatcctaatttcaaaagccaaagggaagagacatggagtgttacatgtaccttttatatacacagagaactaaaatcaagtattcaagtataattcaagttcttatttcaagaactcaaaattctgagccaatctgtagaattagttaaagyaatttccatataaattaaatgatacatttcgtttcaatctgaattttcctgattttttctgaactgaacagaaaagcccaatacttgctcaggtccaaagattttaccatgtcatgctacatcaactggagaagcaaaggagctgagagacagagaacaayagaactagcataatgttcattataacattcatgatattacttcattggagtaagctatgtcagtaagtgttatttattgtatattcagttagttggttttctacctacagaactctcaagttcattagactctcctgag

SEQ ID NO: 17886 - DNA, 600 bp, Chicken  19866894226360_2
aaagccaaagggaagagacatggagtgttacatgtaccttttatatacacagagaactaaaatcaagtattcaagtataattcaagttcttatttcaagaactcaaaattctgagccaatctgtagaattagttaaagyaatttccatataaattaaatgatacatttcgtttcaatctgaattttcctgattttttctgaactgaacagaaaagcccaatacttgctcaggtccaaagattttaccatgtcatgctacatcaactggagaagcaaaggagctgagagacagagaacaayagaactagcataatgttcattataacattcatgatattacttcattggagtaagctatgtcagtaagtgttatttattgtatattcagttagttggttttctacctacagaactctcaagttcattagactctcctgaggtctgacttaaaatggaataataacaagtgcttgaaccactgacataattgatgtatttctttaagtacaaaaagagaaaataaaatatggattacttttttctctagcaaaatgaaaactaggcatctttcccatgctaaatatttacattcccattacc

SEQ ID NO: 17887 - DNA, 600 bp, Chicken  19866894226360_3
tcacagaagaatgtctttctgaattttgttgctgcctggtattaatattcaaatccaacaaaccccccttgggcaaagcagaatgactccatttattttaccacgtgaaaacacagtgcagccaacaagtgtatatttgcagcaggacaggggaagagtatctagctatttacaaaagaagcagagaagaatgttataacaacattaccagagaacagcattaatgtttaaggtaaacctaagataaacatgttacggtacaaactcttggtgaaattattcgcacttttgttttacacrtttattcacccaaacagctacagtccaagatgcatactcaggtgcactcccccaaatcatgcaaatcagtaatgccatggcagtatgttctaagctgtggatcataaggccacagtatgtgtggcacagtgagaaaaatgcatcagactccacaaatcagagggagcttgctttccataagctgccacacaatgccacatgcttgtcctagccatgcagtttgacatacttgatctacaaacaatgggatttgcagcactattcaagacttgaaaaaataatttgggtgaggatttgctt

SEQ ID NO: 17888 - DNA, 600 bp, Chicken  19866894226360_4
ggatcataaggccacagtatgtgtggcacagtgagaaaaatgcatcagactccacaaatcagagggagcttgctttccataagctgccacacaatgccacatgcttgtcctagccatgcagtttgacatacttgatctacaaacaatgggatttgcagcactattcaagacttgaaaaaataatttgggtgaggatttgcttcacacagaacatagtcatgaaaacctgcatcattttttgccaaccatcctgtagctccttccatgacataaaattgatttgctgcaaattttcataarttcttcctgggatcttacactacaaaggaaacatgaaacagctgaacatagaaatttaccatatactaaaacacgtcagttgccctcgtttcttataaaatctcactgccatttgattttcataaatggtattttattctgaaatatatatagaatttactttaataaaaacttatcgctaattgcagttttatctccagaattaaagactccagcaagtctctcccgagaaattagcatgttcagtgccccactgtatgcatgtcactgtcatattagtgacatttctcttgcccttac

SEQ ID NO: 17889 - DNA, 599 bp, Chicken  19866894226364_1
  misc_feature (1)..(71): n is any nucleotide
nnnnnnnnnnnnnnnnnnnnnnnnnnnnnnnnnnnnnnnnnnnnnnnnnnnnnnnnnnnnnnnnnnnnnnncctgaaagacttgcttctcctttttctaactatatcaatttgtctaataaaagacatacccctctccttgccagttttatcataacaaagcctgaatttagtcataaatctgaaaagagctagtctattcttgtagaaatactacttttgctggggttccacatgagcaggggtgagggtcaaatattacccagtggagcatttctggctgttgagagtttccccctgmtgttcttggacaccttactgatttctgatttgttgcactgaatttctggtcatcccatgttttcctgaagcattcacatgcgagtgccgatgggccctggcctagagtaattaattaaatacaaacatgtgggatgccaacttagccttcaaagacacagatgtgcaaattcagtgctttgcataatartatattgcaaaagcacagacagatatttctgtaataatacaggcaaagttaaagtgtggttatgacagtaaaattcaatagattatgaagagttcaatcttgcatagtat

SEQ ID NO: 17890 - DNA, 600 bp, Chicken  19866894226364_2
gctagtctattcttgtagaaatactacttttgctggggttccacatgagcaggggtgagggtcaaatattacccagtggagcatttctggctgttgagagtttccccctgmtgttcttggacaccttactgatttctgatttgttgcactgaatttctggtcatcccatgttttcctgaagcattcacatgcgagtgccgatgggccctggcctagagtaattaattaaatacaaacatgtgggatgccaacttagccttcaaagacacagatgtgcaaattcagtgctttgcataatartatattgcaaaagcacagacagatatttctgtaataatacaggcaaagttaaagtgtggttatgacagtaaaattcaatagattatgaagagttcaatcttgcatagtattatcagtctaaggaatcagtctggatggtgtctgagataattttttcttccatatatgaacattagctagatatcgagtagcagcaatccatacaaggtttgatccatatctcagaaatggggcacagtagacttaataattaatcaaatttacaccaaagaattaaaggaatgtgtggaatagctgatg

SEQ ID NO: 17891 - DNA, 600 bp, Chicken  19866894226368_1
tattctatttgtttatttgtggtaagggaagcaagtatcttggccagttccactacaaaaaaagatcactgtaatttttgtttttcaagaggaatgaagaattaaagaggaaataaactgtgcaaatatttgattttaaaagttatctgttgactgcataatagtaagttttactgtgggattttacaagcaatatatagtaattctaatgtgatgacataaaagaaactgaatgccaaccttctcagacaaacatttgggtatttccattccttgtcatctgtgaggggtgcccacagrctcagagtttctgtgcagtgcacaacgttggagtttttttgatagtgtaattttgggaggggctctcaccaaggtgatgtaatttgcagcagtgaggccaaggtgtatggctccaggttactcctttgatgtttctgaagatgtcagaggaaagggccaccaagcagttattatttttggcagacacatgcttgtagcaaaggcttaaaaatataaaatcaagacaaaaaaggaaatattaaaaataactgtcaggatatagtttagaccttagcaataattcagttttttgtgataagt

SEQ ID NO: 17892 - DNA, 599 bp, Chicken  19866894226372_1
  misc_feature (1)..(4): n is any nucleotide
nnnnaatagaatagaatagaatagaatagaatagaatagaatagttggaagggatcttttatgatcatataatcaaagaatcatagaaacatagaatgacttgggttggaatcatcctcagagttccatccagttccaaccctcctgctgtaggtggagtagtcaaaacctagatcaggctgcccagggcccagccaaactgaccttgaatgtctccagaagtgaggcattcacaacctctctagacagtctgttccatattttcagtgaaaaacttccacacgacgtctaatctacacyttttctcctttagtttaaaaccattctccttcttctcaatgctgtctawccatgtaaaaagtttatttccctccttcttataatctcttttaaattttggaaggccatgagatgagatgtccctggaaccttgtcttctccaaaccaaacaaactcaactctctyagcctgtcttcataggattggtgctccagacctctgagcacccttgtggccctcttctggaccctctccaacagctccacatccttcttgtgttgggcaccccagatctggacacagtgctccagatgggcctt

SEQ ID NO: 17893 - DNA, 600 bp, Chicken  19866894226372_2
agggatcttttatgatcatataatcaaagaatcatagaaacatagaatgacttgggttggaatcatcctcagagttccatccagttccaaccctcctgctgtaggtggagtagtcaaaacctagatcaggctgcccagggcccagccaaactgaccttgaatgtctccagaagtgaggcattcacaacctctctagacagtctgttccatattttcagtgaaaaacttccacacgacgtctaatctacacyttttctcctttagtttaaaaccattctccttcttctcaatgctgtctawccatgtaaaaagtttatttccctccttcttataatctcttttaaattttggaaggccatgagatgagatgtccctggaaccttgtcttctccaaaccaaacaaactcaactctctyagcctgtcttcataggattggtgctccagacctctgagcacccttgtggccctcttctggaccctctccaacagctccacatccttcttgtgttgggcaccccagatctggacacagtgctccagatgggccttgcaagatgtccttcacaaaagggacaaccacctccctctccctgctgatc

SEQ ID NO: 17894 - DNA, 600 bp, Chicken  19866894226372_3
aaacctagatcaggctgcccagggcccagccaaactgaccttgaatgtctccagaagtgaggcattcacaacctctctagacagtctgttccatattttcagtgaaaaacttccacacgacgtctaatctacacyttttctcctttagtttaaaaccattctccttcttctcaatgctgtctawccatgtaaaaagtttatttccctccttcttataatctcttttaaattttggaaggccatgagatgagatgtccctggaaccttgtcttctccaaaccaaacaaactcaactctctyagcctgtcttcataggattggtgctccagacctctgagcacccttgtggccctcttctggaccctctccaacagctccacatccttcttgtgttgggcaccccagatctggacacagtgctccagatgggccttgcaagatgtccttcacaaaagggacaaccacctccctctccctgctgatcactcctcttgatgcagctcagggtaccattggctttccaggctgcaagagcacactactggctcatgttcagcttttcgtccacgtccttctctgcaggactgctctcaatgactt

SEQ ID NO: 17895 - DNA, 600 bp, Chicken  19866894226374_1
tgcagccatcgtggtctgtctgttgagagagaggcctgggattcatttgaaagggggcttcccatgtggattcagtcagtatggcctaatgtggggatggaaataatacccactatcacaggatttactgttcctctcgtgccttgaatactgatggatttctgaacgttttccactctcagaggtaattatggccttgaaagagattacttgattgagttaaatgccttacaaaaatggtagctctatgaaattaataaatacctagatatatacatcaaagtccttcttgaaagcccygcaaaacatgaaattacgtttttcattttgacatgctttgagatagtaatgtaaggtgtatgatttacccaaaatttaacatttgttataagaaaacaaaataatcagtcatgagctctcctgtctttcagartgaaatactgaggttaatgttagggtagcaactgaatcgtatctcttcttgtttacactggtgacaagtgctgtttcttcaaggagctgcagtaatagcaaatcagatgaaacccccatcctagactgtgctacattcagttcagttcccaaagacggagagaactg

SEQ ID NO: 17896 - DNA, 502 bp, Chicken  19866894226374_2
ctctcgtgccttgaatactgatggatttctgaacgttttccactctcagaggtaattatggccttgaaagagattacttgattgagttaaatgccttacaaaaatggtagctctatgaaattaataaatacctagatatatacatcaaagtccttcttgaaagcccygcaaaacatgaaattacgtttttcattttgacatgctttgagatagtaatgtaaggtgtatgatttacccaaaatttaacatttgttataagaaaacaaaataatcagtcatgagctctcctgtctttcagartgaaatactgaggttaatgttagggtagcaactgaatcgtatctcttcttgtttacactggtgacaagtgctgtttcttcaaggagctgcagtaatagcaaatcagatgaaacccccatcctagactgtgctacattcagttcagttcccaaagacggagagaactgagaggtttgtgcagcagtcatccagctaaatcacc

SEQ ID NO: 17897 - DNA, 599 bp, Chicken  19866894226376_1
  misc_feature (1)..(169): n is any nucleotide
nnnnnnnnnnnnnnnnnnnnnnnnnnnnnnnnnnnnnnnnnnnnnnnnnnnnnnnnnnnnnnnnnnnnnnnnnnnnnnnnnnnnnnnnnnnnnnnnnnnnnnnnnnnnnnnnnnnnnnnnnnnnnnnnnnnnnnnnnnnnnnnnnnnnnnnnnnnnnnnnnnnnnnnnntttttttttttttttttgtgtgtgtgtgtgttggcagaaaacaccttagaagttactggtgtggctctgtaactgggaaggtttgaagaaaagaaacaggtggtgaagatgaaaaggatacatgaaagcargtgctgtcaggaacttaaatgtcacatttcaaatagagcctgagatctaattgaatccagggaaggtgatgatatcctctatatgactttttagttttggtctggttatatcatttctaagggtcaaaatgaggaagagatgttagtttgtagggaggaaaaagatgaaaatccagcagaaagtagagtcaccgggtaattcttattttattactgtctatggatcctgatgactaggacatttcctcctttttcatttgtttactagttagaactcatataaattttatcagttaaaa

SEQ ID NO: 17898 - DNA, 600 bp, Chicken  19866894226379_1
attgatatgacagcctaaagacataaccaagacagtttgctggtggagcaagtatctcttatgagatgagcttgtaccactgggaaaattagacaagtttttctgcatgtgactcattttaaatgcctgaaacttgaagcagtagccttcaaaactaagcagatattgagatcattgtcttctggtatagtagttgtgcctcagatcatctcaaacagaaagtagctgatgctgttgaagaaaagagggaggaagaaatagaagaaggaggagaccaaggaataaagacatcagaagacraaaggaggttttaatctaagaaaatcactgtctctgagttcatggtgtttattatccagcaggattgtgaaagcacccatttttttctttggaaagaagtgtaggattccttgaggagcatccaaaataagcacccaatataaaatacagtgattattttctaagaaatgttccctccctgaaaactgggtgcttctgtcctttccagcttttatatactactttttttctagcgcacagtagttgcttcatttcaccttcatagttgccctgagagcacttgattcggttgatgaaatg

SEQ ID NO: 17899 - DNA, 600 bp, Chicken  19866894226379_2
ccagcaggattgtgaaagcacccatttttttctttggaaagaagtgtaggattccttgaggagcatccaaaataagcacccaatataaaatacagtgattattttctaagaaatgttccctccctgaaaactgggtgcttctgtcctttccagcttttatatactactttttttctagcgcacagtagttgcttcatttcaccttcatagttgccctgagagcacttgattcggttgatgaaatgtgttatgtcccagaagtacagatcaagagctgctgattgttaagcattacagggyatttactgcgctggtagctcagagatgttggttacattttgtactcacaaagggcctaaatatgtttagtttgctttggccacaggcaccttgtttttcacaatgggttagtgaggttggggcctgtgtaatcagaagggtagttctggagagcagtatttcaaaacagggcgcttctaataaatctttcaacaattgcctgtatgtaatttccagtatatggagttggaagtgagaaggatgcgtcagagcttgatgatgttctgctaccactgtactttttcagcatcacatgtaccc

SEQ ID NO: 17900 - DNA, 600 bp, Chicken  19866894226382_1
acaatgaaaagtgtggtccattcatccactgcgtgcagagcataaatccttacaccatccatgcaccccttcctttcaaggcaactttgatcaggatcttaatttgcctagagatgcaatcaataactgtgtcatcccaatactggatgataaattatcagtgccactgtaaatattttttcattgggcaaatgcagcatcttgcacagctgcctgcagagacgagccagcagacaggcctagcaattattttacagtaatgaggctttctctccctcctgatatgctccaaaacttctrtacccaaagttattatcagtctggagccctatcaattggctcccataaagacaatgtctatttcttaacaagcatctgttctcgcaggtggggggttgataagctggaatgtacgggctgtgaaatggaaccatatcaaagcaattaacagtttttcagtttcataaaccactctctcttcttctcaatgctactgtcataacattttctctgggtgaaaggcagatttccatacaaatatggttttgcttggaacgtgccagaagcatttccatattagcctaatgtctctcttgagga

SEQ ID NO: 17901 - DNA, 600 bp, Chicken  19866894226382_2
caattggctcccataaagacaatgtctatttcttaacaagcatctgttctcgcaggtggggggttgataagctggaatgtacgggctgtgaaatggaaccatatcaaagcaattaacagtttttcagtttcataaaccactctctcttcttctcaatgctactgtcataacattttctctgggtgaaaggcagatttccatacaaatatggttttgcttggaacgtgccagaagcatttccatattagcctaatgtctctcttgaggaaaagctgggatagcgatccatgtacgtgggcrcatttactcttttgcattggaaccacacagtcactggtatgttggaactggaaggcaggttacttgcttcagtgattatatttacgtgatgttcattatgaggaacaggaggtcccatgtaaatgtcattggtagaaaggtttgtagagtattagctgatgtaacaaaggctaaaccaggacccttctgccttgcagatagcagctgaacatagctaaagctgaacctttttcagtagccttttcaaactgcttacttgcaattttcgaggaaaagtacatttttagataacaggatccc

SEQ ID NO: 17902 - DNA, 599 bp, Chicken  19866894226386_1
  misc_feature (1)..(16): n is any nucleotide
nnnnnnnnnnnnnnnntgtaaaactgatctttgttagtttaggaataagtgagaaaaaccactttaataggcatttaagtgattaacatactgtcatggacttactgtagggaggtcctctgggtagtttgttcattgctttatccggtgtgctccatttagtcagtgtttaccttctttgagccctgccttggctaggatatgaagaaaggagaggaaagaaatcaaaagctacaaaaaccaaaagtggtctgaggtacagataaatctagatccagctgtaacaacagggctgtgggyttctaaattttaatctccccaaagaatctgtatcaaattctttagcccasaggtcaaaagggattttaggaatggaaaaggacaactcagcttgtaaagtcttctgggcaaaggccttctgttgtctgtctgagcacatctgtggaatatgtgtataggaatatgtgtattggaaagatacttcaaagccacatggtaatataaatatcttatactttcctgtcttctatcatgttgctagsttcaaaggtgatagcttttatacaagaggcaattccgatgaattagacagcaaacac

SEQ ID NO: 17903 - DNA, 600 bp, Chicken  19866894226386_2
gagaaaaaccactttaataggcatttaagtgattaacatactgtcatggacttactgtagggaggtcctctgggtagtttgttcattgctttatccggtgtgctccatttagtcagtgtttaccttctttgagccctgccttggctaggatatgaagaaaggagaggaaagaaatcaaaagctacaaaaaccaaaagtggtctgaggtacagataaatctagatccagctgtaacaacagggctgtgggyttctaaattttaatctccccaaagaatctgtatcaaattctttagcccasaggtcaaaagggattttaggaatggaaaaggacaactcagcttgtaaagtcttctgggcaaaggccttctgttgtctgtctgagcacatctgtggaatatgtgtataggaatatgtgtattggaaagatacttcaaagccacatggtaatataaatatcttatactttcctgtcttctatcatgttgctagsttcaaaggtgatagcttttatacaagaggcaattccgatgaattagacagcaaacacaattttcgtatggaacaaataggtaggcagactacgtgtgttctcaaacag

SEQ ID NO: 17904 - DNA, 600 bp, Chicken  19866894226386_3
aaaagtggtctgaggtacagataaatctagatccagctgtaacaacagggctgtgggyttctaaattttaatctccccaaagaatctgtatcaaattctttagcccasaggtcaaaagggattttaggaatggaaaaggacaactcagcttgtaaagtcttctgggcaaaggccttctgttgtctgtctgagcacatctgtggaatatgtgtataggaatatgtgtattggaaagatacttcaaagccacatggtaatataaatatcttatactttcctgtcttctatcatgttgctagsttcaaaggtgatagcttttatacaagaggcaattccgatgaattagacagcaaacacaattttcgtatggaacaaataggtaggcagactacgtgtgttctcaaacagagcccatagtcatagcaggaagctgtctgaggaatttctctgagttttgtcattctggtggtatttagatatgaaaaaatgtgtgtgcaggctgtgtggcttcagagacttagtttgactattactggtaagaaattaaaatgaagttccataagttggttgagatgatgtgatgtgaaaccctagcaacat

SEQ ID NO: 17905 - DNA, 599 bp, Chicken  19866894226388_1
  misc_feature (1)..(17): n is any nucleotide
nnnnnnnnnnnnnnnnnctgactaaatggagcacaccggataaagcaatgaacaaactacccagaggacctccctacagtaagtccatgacagtatgttaatcacttaaatgcctattaaagtggtttttctcacttattcctaaactaacaaagatcagttttacatatcatttaagaaagctccagattgtaacttccttccatcctgcatggtttcttgtgttctttcatctacccttcctaaaatctatggaagcccattgatactgtgaatgtgcccaatattcatagcagcttytagattgtccaaaaggttctactgacatcttagagtttgtcatcatcttctagggctataaggtggtctgaattctgtctttgagtatgttatgatttgggtataaatctatcaagaggacaaaaaaaaaaaaagtagtattttaaaccaaaacaaaatcacttacagatggccaaaaatcactatttcctctatgaataagttatcaattccatcagaagttttgcacccatccctgctaaatgtgtctgacaagacaatatatcaaatagaattcacatattccataagctgctagt

SEQ ID NO: 17906 - DNA, 599 bp, Chicken  19866894226389_1
  misc_feature (1)..(129): n is any nucleotide
nnnnnnnnnnnnnnnnnnnnnnnnnnnnnnnnnnnnnnnnnnnnnnnnnnnnnnnnnnnnnnnnnnnnnnnnnnnnnnnnnnnnnnnnnnnnnnnnnnnnnnnnnnnnnnnnnnnnnnnnnnnnnnnnntccttacctgacacaacttagaaacagggcctatttcttccagtaaacctaaggctgcacagatgagtaattggttttgtgtgtctacgtagaagtagaacagtttagctttgggtcactgaaactcccacgtaatggtaatcttctgtctgagtgtattgtatgagactrtatttgtcagatctgatcactgctgttccctgcattcagtctcattttgtagcacagasctgccactaacaccactttccaaagtggtcctctgagcatcttctgtactccaaaaagtaccctggaaattattgggaaccccgcagctgtagtggcttttccagtaagtttgttgacatgtattttctagagacatttattttacagtagtagctgggccaaggagtctgatggtacttcmgttgttaagtaggactctaggaaggaatatgccaacaaaatgcgttgcaaagaaactg

SEQ ID NO: 17907 - DNA, 599 bp, Chicken  19866894226389_2
  misc_feature (1)..(70): n is any nucleotide
nnnnnnnnnnnnnnnnnnnnnnnnnnnnnnnnnnnnnnnnnnnnnnnnnnnnnnnnnnnnnnnnnnnnnntccttacctgacacaacttagaaacagggcctatttcttccagtaaacctaaggctgcacagatgagtaattggttttgtgtgtctacgtagaagtagaacagtttagctttgggtcactgaaactcccacgtaatggtaatcttctgtctgagtgtattgtatgagactrtatttgtcagatctgatcactgctgttccctgcattcagtctcattttgtagcacagasctgccactaacaccactttccaaagtggtcctctgagcatcttctgtactccaaaaagtaccctggaaattattgggaaccccgcagctgtagtggcttttccagtaagtttgttgacatgtattttctagagacatttattttacagtagtagctgggccaaggagtctgatggtacttcmgttgttaagtaggactctaggaaggaatatgccaacaaaatgcgttgcaaagaaactgccacccatttagttttcctgcartttgacatctgtaacagtcatcaccagtctttcttg

SEQ ID NO: 17908 - DNA, 575 bp, Chicken  19866894226389_3
gggtcactgaaactcccacgtaatggtaatcttctgtctgagtgtattgtatgagactrtatttgtcagatctgatcactgctgttccctgcattcagtctcattttgtagcacagasctgccactaacaccactttccaaagtggtcctctgagcatcttctgtactccaaaaagtaccctggaaattattgggaaccccgcagctgtagtggcttttccagtaagtttgttgacatgtattttctagagacatttattttacagtagtagctgggccaaggagtctgatggtacttcmgttgttaagtaggactctaggaaggaatatgccaacaaaatgcgttgcaaagaaactgccacccatttagttttcctgcartttgacatctgtaacagtcatcaccagtctttcttgtatagaagcaggttgcctctaattaatggtgagtagaagactggactgcattgaaaggatctttccaatacaaattttcataggaagtagcagacttttgtactctcatttttcttactatgctggtataaacacacaaataactgtgtatatatatt

SEQ ID NO: 17909 - DNA, 494 bp, Chicken  19866894226389_4
ctgttccctgcattcagtctcattttgtagcacagasctgccactaacaccactttccaaagtggtcctctgagcatcttctgtactccaaaaagtaccctggaaattattgggaaccccgcagctgtagtggcttttccagtaagtttgttgacatgtattttctagagacatttattttacagtagtagctgggccaaggagtctgatggtacttcmgttgttaagtaggactctaggaaggaatatgccaacaaaatgcgttgcaaagaaactgccacccatttagttttcctgcartttgacatctgtaacagtcatcaccagtctttcttgtatagaagcaggttgcctctaattaatggtgagtagaagactggactgcattgaaaggatctttccaatacaaattttcataggaagtagcagacttttgtactctcatttttcttactatgctggtataaacacacaaataactgtgtatatatatt

SEQ ID NO: 17910 - DNA, 599 bp, Chicken  19866894226395_1
  misc_feature (1)..(83): n is any nucleotide
nnnnnnnnnnnnnnnnnnnnnnnnnnnnnnnnnnnnnnnnnnnnnnnnnnnnnnnnnnnnnnnnnnnnnnnnnnnnnnnnnnngctgttttcccacatgggctgccctatcgtttccagcagcaggtacttctgcattaaagcacgttcgtgtgagtgccttagagatggttgtaccgagcagcagcaaaggtgttatgatggactgaggcataatggagatttccctctgattggcaccatcagaggcctttcctggatggcgccagcagagatgggctcacagtaggaagagctgtgstgtgctgacgtgtggctccttattctcgtcccgttctcagattaagaccttccaggaagcctgtgtcatggtgcgaaaacctgctctagaacttttcacctacctgaagaactccaactttgcccaccccgtcgtcagatatgtgatttgtatcttttgtctctcggcttggtggtggaacaccgatgggatgcaggcaggtgaatgtaagcacatgagggcagtgttctgctgtgtgctgagcactgtggtttgtccttcaggagccgcctctgccccctctgttgtcagtaaagcca

SEQ ID NO: 17911 - DNA, 599 bp, Chicken  19866894226405_1
  misc_feature (1)..(85): n is any nucleotide
nnnnnnnnnnnnnnnnnnnnnnnnnnnnnnnnnnnnnnnnnnnnnnnnnnnnnnnnnnnnnnnnnnnnnnnnnnnnnnnnnnnnngacccctataacatgtttctacgtattcgagaggtatatatacaatcctcatgaaatgcaggattgacaggccagactaccacaactagttccttcatgttcaacactaaatcttctgtagcatggggtctctgagctccgggaatgccagctccctttcaccgggcccgtatcctgcgcatgtgcaatatctcctaccactagatattgtaccracacctcctcctctgcctctctaacgtgcctgcagacttttcctctcaatcaaatggctcagaaggcaaaaaattttgctgcaagggtttatggccatacgacctgataaggaaaatggtgtgtccagccagttctttcagctgtccgagccgagctgtgtttcaatgtccaccctgcagatcgggcacttcttgctggtggccagccactggtccacgcatacttgatggaagagatgcatgcagggtaacctcctgtgggaagagaagcaccatcgaccttttaaaattgcataaaa

SEQ ID NO: 17912 - DNA, 486 bp, Chicken  19866894226405_2
gctgcaagggtttatggccatacgacctgataaggaaaatggtgtgtccagccagttctttcagctgtccgagccgagctgtgtttcaatgtccaccctgcagatcgggcacttcttgctggtggccagccactggtccacgcatacttgatggaagagatgcatgcagggtaacctcctgtgggaagagaagcaccatcgaccttttaaaattgcataaaaccccttggtttcatagtctatgagctcactgctttccttctgcatccccccattaggaaaaatgttttctcagaaagygtggtgatrcagtggcacagacttcccaggaaggtgggggtgtccctgtccctggaggcatgcaagaaccacggagatttggcacttggggacatgggtttagtgcccgtggtcggggtgctgggggttgtactggatgatgagtggtcttttgcaacctgaatgattctgtgatccacaatccat

SEQ ID NO: 17913 - DNA, 477 bp, Chicken  19866894226405_3
gtttatggccatacgacctgataaggaaaatggtgtgtccagccagttctttcagctgtccgagccgagctgtgtttcaatgtccaccctgcagatcgggcacttcttgctggtggccagccactggtccacgcatacttgatggaagagatgcatgcagggtaacctcctgtgggaagagaagcaccatcgaccttttaaaattgcataaaaccccttggtttcatagtctatgagctcactgctttccttctgcatccccccattaggaaaaatgttttctcagaaagygtggtgatrcagtggcacagacttcccaggaaggtgggggtgtccctgtccctggaggcatgcaagaaccacggagatttggcacttggggacatgggtttagtgcccgtggtcggggtgctgggggttgtactggatgatgagtggtcttttgcaacctgaatgattctgtgatccacaatccat

SEQ ID NO: 17914 - DNA, 600 bp, Chicken  19866894226408_1
aaaggagacacaaacatgagaattaacagaactaattttactttctgtttccatcttatactgcacatcaaatgggagatcaaaacatctctagagaaaagaatgttgtgaagtgtggtggtacattttggctttgatacacatagaatagaatcacagaatcatctaagttggaaaagaccttcaagatcatcaagtccagccatccctgacctacaaagttccatcactaaactatgttccttagtgccttgtccacacatgtagcaaaaacagcagattagtccaagcaatatcttmttagaagaatttaagttttcatcactgaaagtaggctgatggagatttggtttcatggatgcatgaaagccttgagatttctcagtgtctctgactagagggtgcttcataggaagagttgatgaagtgagcaaaggtacagatgtccagtcagttactttatcgccatccatccaaaattgagggatatcatgattttccttgcattttaggaaaggtctcaaatattgttgtagaaggcagctgtacagctttattttactatattttattttattttattttattattattttttaa

SEQ ID NO: 17915 - DNA, 600 bp, Chicken  19866894226411_1
aaccacatcagacagttcccttaggattctggaatgcatctcatcaggacccatagacttgtggatgttcagcttcctcaggtggtcatgaatctgatccttgcttaaaatgggaggatgttgcttccccacttccctcctaccaaaccaaatgtttgagggttgtgtggtgagcagttagtggagaagacaggcaaaaaactgttgagtacctcagccttcttgtctgttgttaccagtttgcctgtgtcactcactagggggattacgccctgctggatgttccatttctggttgaargtgcctgtagaagcttttcttgttctttttggcatccctagccaagttcagttctagcttggccttggctttcctgaccccatccctatgcagcctagcagcttccttatattcttccctcagtacctgtccgtttccactgcctgtgcattctcttcttgctcttcacttgaactagttggtcccagttcagccattctggtctcttgccttcctttcctgacttggtacacctgggatggagagctcttgcacactgaagaaagcctcctaaaaaaatctgccagctctgctctgcgc

SEQ ID NO: 17916 - DNA, 600 bp, Chicken  19866894226411_2
cttgccttcctttcctgacttggtacacctgggatggagagctcttgcacactgaagaaagcctcctaaaaaaatctgccagctctgctctgcgcccttgtccatgaggagtttcccagggggttttgttgactaactccatgaagagctggaagctagttttcctaacgtttagcttcctagctgtactcttcacttgtctcatgtccctccagagtgtgaactcaaccacagcatggtcactacagcccaggcagcctccaatcctgatgtcaccaatcagttcatttcattggtgarcaacaggtccagtattgcatcacccttaaagggctgtcagttacttgactcaggaagtcatcctcagtgcattccaggagcctcctggattgcctacagctggctgtgctacttttccagcagatgtctgggtgtagtcctatggaactggccccaaatccagatggaacagaggctttgccacactggctgcagttttcacaagaaatgctccacagctgtagatttggaccgtacggttttatacctcctggactcccttttttcctaaattgccttttttcctaaattgcacatgtt

SEQ ID NO: 17917 - DNA, 600 bp, Chicken  19866894226422_1
gcaggttgacaggtgggaattgggttttgttagtgaagctgcctgacacacacacttctctccttgaatttggtcttacctggaactgagccaacacttgctgcagattacggatcacctccacattttctttcagttcctcatcttccacagtctccagcagcttttggaggtcaagtttgcatctgcaaagcagacacaggaatagacccacaagtcttacttggcaggtttatgtcacacataccagtaagtaacaaatttccccatagaatacacaaatgagatctggatcaacaratcgatggcattctgtttatcccaacaaggatatttaatgctgaaagacacttcctcagcacaagtagggtggggtaacagacttacacagcatgctgctgaagttgctctagtttggcattcatcttctcgttttcttgttctgtctaagagaaaccagaattacactgaattgtaggaagtgcaatgtaaaagtaagaagccagaagacagccaattgatttgtagcaaaacacacgctgccagtctgtggcaaatcaagacactgaaatgtcttccacaattactttgattaccttg

SEQ ID NO: 17918 - DNA, 600 bp, Chicken  19866894226424_1
cctgagtgtccccaaggccatactggtccctgaagtttttcctctccaggttcaggacttcacactttcacctgctgaatttcatcagtttcctgtcaacccatctctccagcctgtcaaagtccttttgatcctcaagtacatcagccactccatccagttttgtgtcattagcatagagccttagggtgcaccctgctcagtcattatccttaatgtagatgttaaacaggacagaacccagttttgcccccctgcgataaactgttaattactggcctccaactagactttggaccmctgttcaccrtacactggacttcgcctttcagaccatttttagctcatctcacwgtctgcttgcctagctcctacatcagcggtttgtctgtgccttgaaatggtttttaggatttgctactctatctccattcccaagcaccaagatgaagctgaccagcctgtaggtccctagaacctccttagaatcataaaatcatagaattgcccaggttggaaaagatcttcaagatcatcaagtccaaccactatctaaccatactaccctaactctaaaaaccctccaataaaatcatgtcc

SEQ ID NO: 17919 - DNA, 600 bp, Chicken  19866894226424_2
cccaaggccatactggtccctgaagtttttcctctccaggttcaggacttcacactttcacctgctgaatttcatcagtttcctgtcaacccatctctccagcctgtcaaagtccttttgatcctcaagtacatcagccactccatccagttttgtgtcattagcatagagccttagggtgcaccctgctcagtcattatccttaatgtagatgttaaacaggacagaacccagttttgcccccctgcgataaactgttaattactggcctccaactagactttggaccmctgttcaccrtacactggacttcgcctttcagaccatttttagctcatctcacwgtctgcttgcctagctcctacatcagcggtttgtctgtgccttgaaatggtttttaggatttgctactctatctccattcccaagcaccaagatgaagctgaccagcctgtaggtccctagaacctccttagaatcataaaatcatagaattgcccaggttggaaaagatcttcaagatcatcaagtccaaccactatctaaccatactaccctaactctaaaaaccctccaataaaatcatgtccctgaacacca

SEQ ID NO: 17920 - DNA, 600 bp, Chicken  19866894226424_3
ggacttcacactttcacctgctgaatttcatcagtttcctgtcaacccatctctccagcctgtcaaagtccttttgatcctcaagtacatcagccactccatccagttttgtgtcattagcatagagccttagggtgcaccctgctcagtcattatccttaatgtagatgttaaacaggacagaacccagttttgcccccctgcgataaactgttaattactggcctccaactagactttggaccmctgttcaccrtacactggacttcgcctttcagaccatttttagctcatctcacwgtctgcttgcctagctcctacatcagcggtttgtctgtgccttgaaatggtttttaggatttgctactctatctccattcccaagcaccaagatgaagctgaccagcctgtaggtccctagaacctccttagaatcataaaatcatagaattgcccaggttggaaaagatcttcaagatcatcaagtccaaccactatctaaccatactaccctaactctaaaaaccctccaataaaatcatgtccctgaacaccacatccatacggtttttaaacatattcagggatggtgactcaacc

SEQ ID NO: 17921 - DNA, 600 bp, Chicken  19866894226425_1
agagtctgcatgccgcaattgtaaaaatctgcaccagcggagatgaccttttcataatgtttcaacgtctacaacctcactgtgctcacatccactatttggtctccagaaacattcagcaagcatcgatgaatatcaatgagtgcctttatttccatgtagaagaattcagtgacatagcttcacacgcacttctatgtcagatgccattttgtcatagcgctcctctgctgccatctgtcacacagaaacaacatgtaatgcaatgctggtgggaaggttcagcctacactgccatarcaccaatatctgcctctgatgttgtgggccaacataataaaataggaggcattactttcagagcagctctcttctaagtgcatttctatttataaacttggtatgtacagaatgcaaaataggtgttagaaaacagaaagagggaaacagtgatagcagattgagtatgctaaactttagcactaattaaatcatttggaaaaatatcatagtttggtgtactgtttctggctatggatcaaagaataatcaaagtttctgtatacagcagtattgagaaaagttgccatcaatctttac

SEQ ID NO: 17922 - DNA, 600 bp, Chicken  19866894226426_1
cttcacttttatctgaaaactacttcatggtcgtggttgtgatgtgtgaaaccttcatagaatcacagaatcattgaagtccccattcccaccctaccccaccatgcccactgaccacatccctcagtgccacatcccccactgtccttaacacctccagtgatgctgaaactgaattggaagacagaactggaggacagcttagagcaaaggaaaaggatataggagctatgggagtcagtgttctttgctgtgttaatgcacgcagggctgagctctggcaatgggacatggagcgcrgggtcaccggttgtgataatgctgctgatgggtttgaagagaaaaaaagtcttaatcccattgtttagcataaactgctccttcgttattgaatttagggagaaatacaagccctgtgcagggcttgactttttaatagctatattttattaggtaagtgtgttttttatgatgactcgggttttggtggttactaacattggttttagctttgctagcgatgcgctggaaatttgccaagcacggcaatacagttcatgccctgaagcttgtacagtctcaaaaaggaggatactgcag

SEQ ID NO: 17923 - DNA, 472 bp, Chicken  19866894226427_1
atcatagaatcatagaatcatagaatcacagaatcatagaatggcctgggttgaaaaggatcacaatgatcatcgagtttcaacccccctgctatgtgcagcgttgccaaccactagaccaggctgcccagagccacatccagcctggccttgagtgcctccagggatgaggcatccacaacctccttgggcaacctgttccagtgtgtcaccaggttaacagatctacattcttcttccagcactgggcctaggatgaaagactgagttctgtgctgttcaaagctactagttttgccygaggttgatgtggcaactgcgatcacattgacgctctctttctcaaataaatgttgtactttgagaaatgaaacagaaatgtttctcttctcttaggcaaaactggaagttcaaggaagcagcattatttattttttttcccttggaagcaaacgcaatacgtagaagacgg

SEQ ID NO: 17924 - DNA, 600 bp, Chicken  19866894226431_1
acaaacaaactgaccaagagctgaagtcttctgaaaatgttctgcacctttgatgggtttaacttggttaaacttggttaaaattatgtgctaatgttccctgactggatgaaacatagacagttcctaaaccaaaatattttgaatattagaaaccacttttcacctacaattactttccccttcatttcagtggcaggggccctgtgacaagtcaacagtttacctacatggactagatagggacactagcatacacacatgcttctaaaaaccattttgttgatattcagtttgaamccagacacatgtgaaagaaaggcataactatgcaccagggtaagggagcatctctgtgagggaattgcttcatagtaatctccctrttctatgctgccaggttgcgagcttgttttcttacgtttgcaaggacaagcagatttggggttttgtctacagcaaacgcaaatggcacactaattatgaagtggcttttggccatctagctgccacttcatcttgttatgcagtactaaaacatatcttggtatgaaaatctcgtttatccttcctttagcgcagaaataaagtattcataaa

SEQ ID NO: 17925 - DNA, 600 bp, Chicken  19866894226431_2
tgtgctaatgttccctgactggatgaaacatagacagttcctaaaccaaaatattttgaatattagaaaccacttttcacctacaattactttccccttcatttcagtggcaggggccctgtgacaagtcaacagtttacctacatggactagatagggacactagcatacacacatgcttctaaaaaccattttgttgatattcagtttgaamccagacacatgtgaaagaaaggcataactatgcaccagggtaagggagcatctctgtgagggaattgcttcatagtaatctccctrttctatgctgccaggttgcgagcttgttttcttacgtttgcaaggacaagcagatttggggttttgtctacagcaaacgcaaatggcacactaattatgaagtggcttttggccatctagctgccacttcatcttgttatgcagtactaaaacatatcttggtatgaaaatctcgtttatccttcctttagcgcagaaataaagtattcataaattaaaaaaaaaaaaaaaaaaaaaaaaagccttccaacaccacccagcttgtaaaataactccctataaagaacaaatttaacacag

SEQ ID NO: 17926 - DNA, 600 bp, Chicken  19866894226432_1
gtctgttggtaatttcttattagcgcacaataggtcccacacatctttagtgaatgaagctcgggagcatcatagaaaagttacatggccatttcagaaacaaaactaaatctgtcccaagtaggaaaaaaatcataaattttaaatccttatactaagatactcaaagtggtgtgactatgacattgctgttccttctttctttgttcattaatccctgcctttcacaaaatcatacatgcacaagacagagaaccaatcagtttgtatattagctgccaatggcacatcttcccacaytttatagctgccccctaaatatctcaaagctcagtatacctcagatgtgggacagaatctacctctctgtggctttgagagctatttttggccctacttgttcctatgaattcctcttgaagagaaaacttaaagtttctcattgcagcaataaattcactccaatgagaaacactttgcttaacatttagaatttgctacgtatcactctgtattttttaacattaaacaattttactgagcaagttttggtctgcctggctatctgtgtacaacattgcagaattgattgtaaacaat

SEQ ID NO: 17927 - DNA, 599 bp, Chicken  19866894226433_1
  misc_feature (1)..(113): n is any nucleotide
nnnnnnnnnnnnnnnnnnnnnnnnnnnnnnnnnnnnnnnnnnnnnnnnnnnnnnnnnnnnnnnnnnnnnnnnnnnnnnnnnnnnnnnnnnnnnnnnnnnnnnnnnnnnnnnnnctcctggcaccagaccggacctacaaacacgggcatttttggccaccaaaatagacacgcagccgagccccgggcacatggccacactcccagcagcgccgttcctggagcacagacagacctcacggctgcctgccctgttcctgggagcacgcagacagcactatctgggcctaatgggaatcaycacacttctatagcctgttacatcagaccactgaacgctgttctgcaaactaggaaactgggataaacacgagtttggcttggcttaatttcccccaagacaaagaacttaagcgttttaacccaaatatttgttcactgatgaatccacgaagctcacacatcaaccactgtactgatggagataaatcaattgctcagtcacagtgacctacatttcatcgcrtcaatcatctttattgctactgacatctagtggcaacacttagctgcgtttcagaattcstgtaaagcagcctt

SEQ ID NO: 17928 - DNA, 600 bp, Chicken  19866894226433_2
cagacagacctcacggctgcctgccctgttcctgggagcacgcagacagcactatctgggcctaatgggaatcaycacacttctatagcctgttacatcagaccactgaacgctgttctgcaaactaggaaactgggataaacacgagtttggcttggcttaatttcccccaagacaaagaacttaagcgttttaacccaaatatttgttcactgatgaatccacgaagctcacacatcaaccactgtactgatggagataaatcaattgctcagtcacagtgacctacatttcatcgcrtcaatcatctttattgctactgacatctagtggcaacacttagctgcgtttcagaattcstgtaaagcagccttacgttctctcaagccagaaaaaagggagaatccctgggggagaaatgcactgtgctctgtgagtggctgaggtcattcctgagtttgaacagaggctgccaacactgcccagaagtaaaatttacctcgtgagctgtttgcatattcccgtgttctataaggacctacgtaaccattttcatacaggaaaagaaaatagtcaactgatctggcatgaacctgctga

SEQ ID NO: 17929 - DNA, 566 bp, Chicken  19866894226433_3
cctaatgggaatcaycacacttctatagcctgttacatcagaccactgaacgctgttctgcaaactaggaaactgggataaacacgagtttggcttggcttaatttcccccaagacaaagaacttaagcgttttaacccaaatatttgttcactgatgaatccacgaagctcacacatcaaccactgtactgatggagataaatcaattgctcagtcacagtgacctacatttcatcgcrtcaatcatctttattgctactgacatctagtggcaacacttagctgcgtttcagaattcstgtaaagcagccttacgttctctcaagccagaaaaaagggagaatccctgggggagaaatgcactgtgctctgtgagtggctgaggtcattcctgagtttgaacagaggctgccaacactgcccagaagtaaaatttacctcgtgagctgtttgcatattcccgtgttctataaggacctacgtaaccattttcatacaggaaaagaaaatagtcaactgatctggcatgaacctgctgagcaaagcacatcctccttttttaacc

SEQ ID NO: 17930 - DNA, 600 bp, Chicken  19866894226440_1
agttgctttaatataggggctgaggaaagcactccagcacatggctgcttcggtatagcttgtgatggtgtgaatgcagtgcagaaaccctctaattccctcccgtgctgtgggagctctgtttctaataaggttcggtgaaaaggtttatcaagtgtggagtggagttacaacggtctaaattgactgccatggggtcttttagattagcaactgtttcttgatcatccaaacaaaccaagcaggcattggttgagacagctctagtccctgacagggaaaaaacttaccaacaagagycagatcgttacctcctgtagttgcgcagcttgttgtctgacctggtagtgctgcagcaaaccagaaagaaagtgctggaacaggggcagaaccctgctggaacctcttgtgcagtctaatgaaagtctgaagtggctaatgaagtattcactatacgtatacttcacatatgtttatactatatgtagcatactctatgtatgccaaatcatgagtgttgttcaataagaaagcatgggaataacatatagcgaagaaaattggctcaagacaagccactctggggcaggttttttgcag

SEQ ID NO: 17931 - DNA, 600 bp, Chicken  19866894226442_1
gtctaatatatataaactaacacacatgacaaaaccgctttaacaagatttctacaggacaaagccccctgataactccctagcaatgacgactttgtgacagtccgatctaagcaacaggtagaaaatattttagtgttatccctggttattaacacataatcatccttcaggtagaattgtgcagatgtattgcataactgaaatttctattcctaaataaggttttatagaagaactcacagcacatttgcagttaggatctgattccataaccagagaagccagggctaggagccwtaccaacttggacaagttcttacggtttctaacgcagcctttctaatatctgaaaattcactgtcattaatcacttagtcacccttctgacattttatgccttgaaatatattgttctatgtatatgttagtagctcactgctgcaaattgttataaaacactatcatccaatatgaactgcaattaactgtctactggaatcaaaaccccatgtttgggcaaaaagatatttaagaagaaaccttgagttgggtttcaggattaatctgtcactgggracaagatgtactacagtgttg

SEQ ID NO: 17932 - DNA, 600 bp, Chicken  19866894226442_2
agaagccagggctaggagccwtaccaacttggacaagttcttacggtttctaacgcagcctttctaatatctgaaaattcactgtcattaatcacttagtcacccttctgacattttatgccttgaaatatattgttctatgtatatgttagtagctcactgctgcaaattgttataaaacactatcatccaatatgaactgcaattaactgtctactggaatcaaaaccccatgtttgggcaaaaagatatttaagaagaaaccttgagttgggtttcaggattaatctgtcactgggracaagatgtactacagtgttgaaagtaattctatggatacaagacaggtaggttttagatgagttttgcataattattacaaaaattctgaattgcaaatgttaccaaagtcatcttttcttctcattccgatataatgacttacaagccaacaatggctaaggattgatattgcaaaggctgcaacgtacgtattgtacatgtgcattctacttttcagataattcactttaaaatagtaacttaattgccattgcagttctacataattaatttaggaagaggttgaaaataagtayg

SEQ ID NO: 17933 - DNA, 600 bp, Chicken  19866894226442_3
racaagatgtactacagtgttgaaagtaattctatggatacaagacaggtaggttttagatgagttttgcataattattacaaaaattctgaattgcaaatgttaccaaagtcatcttttcttctcattccgatataatgacttacaagccaacaatggctaaggattgatattgcaaaggctgcaacgtacgtattgtacatgtgcattctacttttcagataattcactttaaaatagtaacttaattgccattgcagttctacataattaatttaggaagaggttgaaaataagtayggtgaccttacctgatgtctagttccatttattactgtactacttactataagataatgttttagttgagtagttttagttgttacgtggctttagcacagaaaagcaaagttaggcagatttttttttttaaatcttctcaacgttttaaactgtcagaatttctagcaagtattaagactaaaagttacacctgactgactaatgattcaaaaaatctaatgtgaaaatttgctcttggagactataaaagagctgctgcagaaaaagacagctctacagagtatttgatgagagtaa

SEQ ID NO: 17934 - DNA, 599 bp, Chicken  19866894226443_1
  misc_feature (1)..(91): n is any nucleotide
nnnnnnnnnnnnnnnnnnnnnnnnnnnnnnnnnnnnnnnnnnnnnnnnnnnnnnnnnnnnnnnnnnnnnnnnnnnnnnnnnnnnnnnnnnnaaaaaattgcctctataccgcttagagcttcacgtgttgctccaatactcaagcccaacctcagactggaataaattcaatggtaattctgcaaattactactgacacacgaaccagcatttgctcagcagtattatctctataaacacactggctataacacccagcaacaggcccacttcactctgaatttctagatctcacccctycaaactctctgcatctcccagcaaggccatgggactcacccagtggcagaagccatgatgcagcctccttcctccgcacgggtggtacagcagccagatgagtcgtgattcatgccaaaattgtggcccatctcatgggcaatggtagcagcaacaccaatggcgttatcaggagtggtcctgtgcaagaccaaagaggtaggtcggcatgtcacctgtgcctgtcctgtgcacctctggatcaacgggggtgaagtggcacttctcattgttacgtatagaaaacatctactgaaggc

SEQ ID NO: 17935 - DNA, 600 bp, Chicken  19866894226446_1
agagctttgtatgtgagttctgctgccacctcagctcattccagtgactacagcaacacactgttttgataggacagctgtgctctgttagtgctctggaactattagcacttctctggatcttcctgcagtagacagaggtcatgttaccagtgtaaaataatttcagtacaggccacaattaagcagaaattacagaatgtatgtttaaaggaaactaatactcagagagaggctagttcaagttgagtgtggttaagatagaaaagtccaacaagaagttgaaccaagcattagccygagctcttggcatcaagcatgcgtcttgtgtgactcctgactgtgacagccagctgccatcacatctcagttacactgttatttcagcctctgcactctggtattctagcatggcaagtcattaacttkcttcaytggggtgagagcaaagctgggctgcttatccttctgtgacttagtgcgcattctgagagaacagcattcattctgtcacacaagaagtcaaggaaagaataaagcactggatttaaaacctcctctattctacttcaaagagtgtcagcagcatttccttcgaaa

SEQ ID NO: 17936 - DNA, 600 bp, Chicken  19866894226446_2
agtagacagaggtcatgttaccagtgtaaaataatttcagtacaggccacaattaagcagaaattacagaatgtatgtttaaaggaaactaatactcagagagaggctagttcaagttgagtgtggttaagatagaaaagtccaacaagaagttgaaccaagcattagccygagctcttggcatcaagcatgcgtcttgtgtgactcctgactgtgacagccagctgccatcacatctcagttacactgttatttcagcctctgcactctggtattctagcatggcaagtcattaacttkcttcaytggggtgagagcaaagctgggctgcttatccttctgtgacttagtgcgcattctgagagaacagcattcattctgtcacacaagaagtcaaggaaagaataaagcactggatttaaaacctcctctattctacttcaaagagtgtcagcagcatttccttcgaaacggatgatgccatagggccaagctagcagcgtaccatgttgcagagcttccaaccagagctgcaacacagaaggcagctccatggaaatagcactgattcaaacaagcccaaaagaagatcttaagctg

SEQ ID NO: 17937 - DNA, 600 bp, Chicken  19866894226446_3
cagaggtcatgttaccagtgtaaaataatttcagtacaggccacaattaagcagaaattacagaatgtatgtttaaaggaaactaatactcagagagaggctagttcaagttgagtgtggttaagatagaaaagtccaacaagaagttgaaccaagcattagccygagctcttggcatcaagcatgcgtcttgtgtgactcctgactgtgacagccagctgccatcacatctcagttacactgttatttcagcctctgcactctggtattctagcatggcaagtcattaacttkcttcaytggggtgagagcaaagctgggctgcttatccttctgtgacttagtgcgcattctgagagaacagcattcattctgtcacacaagaagtcaaggaaagaataaagcactggatttaaaacctcctctattctacttcaaagagtgtcagcagcatttccttcgaaacggatgatgccatagggccaagctagcagcgtaccatgttgcagagcttccaaccagagctgcaacacagaaggcagctccatggaaatagcactgattcaaacaagcccaaaagaagatcttaagctgaaggcc

SEQ ID NO: 17938 - DNA, 600 bp, Chicken  19866894226446_4
acaagaagtcaaggaaagaataaagcactggatttaaaacctcctctattctacttcaaagagtgtcagcagcatttccttcgaaacggatgatgccatagggccaagctagcagcgtaccatgttgcagagcttccaaccagagctgcaacacagaaggcagctccatggaaatagcactgattcaaacaagcccaaaagaagatcttaagctgaaggcctcttcgcctatctgtgtggccctgaattgagagggcacagtgatatcataaaccactctcctttttctctttccctccsactgttacactttccctcgaattatcaagcagatgtcaagctctaaactccagtttttcttgtggttctcyggtactgacattacggtttcccctctagtgatataaaaaccactttgaaattaaaagatctttttgattctatttatggcttacttggggtggttttgattctgtttctgcctgtttgttttagaatatttrtaatattttaatcktaggccagtttttgtggtytggtgcaatgccacagaacgcaaagtggtgtaagcttattatctttcaatgtgaattcatgaaa

SEQ ID NO: 17939 - DNA, 600 bp, Chicken  19866894226446_5
gcatttccttcgaaacggatgatgccatagggccaagctagcagcgtaccatgttgcagagcttccaaccagagctgcaacacagaaggcagctccatggaaatagcactgattcaaacaagcccaaaagaagatcttaagctgaaggcctcttcgcctatctgtgtggccctgaattgagagggcacagtgatatcataaaccactctcctttttctctttccctccsactgttacactttccctcgaattatcaagcagatgtcaagctctaaactccagtttttcttgtggttctcyggtactgacattacggtttcccctctagtgatataaaaaccactttgaaattaaaagatctttttgattctatttatggcttacttggggtggttttgattctgtttctgcctgtttgttttagaatatttrtaatattttaatcktaggccagtttttgtggtytggtgcaatgccacagaacgcaaagtggtgtaagcttattatctttcaatgtgaattcatgaaatgaaggtactctaggacaattaagatacagtactacagcattaatgcatatgctggaccttttaattggaa

SEQ ID NO: 17940 - DNA, 600 bp, Chicken  19866894226446_6
gatcttaagctgaaggcctcttcgcctatctgtgtggccctgaattgagagggcacagtgatatcataaaccactctcctttttctctttccctccsactgttacactttccctcgaattatcaagcagatgtcaagctctaaactccagtttttcttgtggttctcyggtactgacattacggtttcccctctagtgatataaaaaccactttgaaattaaaagatctttttgattctatttatggcttacttggggtggttttgattctgtttctgcctgtttgttttagaatatttrtaatattttaatcktaggccagtttttgtggtytggtgcaatgccacagaacgcaaagtggtgtaagcttattatctttcaatgtgaattcatgaaatgaaggtactctaggacaattaagatacagtactacagcattaatgcatatgctggaccttttaattggaaagaagatccagtgtatgtacatagctccattttctgctttattgttaaggacctgttttttgtgtactgtatgcttgtgatccgacattatattgcagcatcatgtatgtgccgagaggtgtttgcctttag

SEQ ID NO: 17941 - DNA, 600 bp, Chicken  19866894226446_7
ggcctcttcgcctatctgtgtggccctgaattgagagggcacagtgatatcataaaccactctcctttttctctttccctccsactgttacactttccctcgaattatcaagcagatgtcaagctctaaactccagtttttcttgtggttctcyggtactgacattacggtttcccctctagtgatataaaaaccactttgaaattaaaagatctttttgattctatttatggcttacttggggtggttttgattctgtttctgcctgtttgttttagaatatttrtaatattttaatcktaggccagtttttgtggtytggtgcaatgccacagaacgcaaagtggtgtaagcttattatctttcaatgtgaattcatgaaatgaaggtactctaggacaattaagatacagtactacagcattaatgcatatgctggaccttttaattggaaagaagatccagtgtatgtacatagctccattttctgctttattgttaaggacctgttttttgtgtactgtatgcttgtgatccgacattatattgcagcatcatgtatgtgccgagaggtgtttgcctttaggcccgtgtgcaaat

SEQ ID NO: 17942 - DNA, 600 bp, Chicken  19866894226446_8
gtggccctgaattgagagggcacagtgatatcataaaccactctcctttttctctttccctccsactgttacactttccctcgaattatcaagcagatgtcaagctctaaactccagtttttcttgtggttctcyggtactgacattacggtttcccctctagtgatataaaaaccactttgaaattaaaagatctttttgattctatttatggcttacttggggtggttttgattctgtttctgcctgtttgttttagaatatttrtaatattttaatcktaggccagtttttgtggtytggtgcaatgccacagaacgcaaagtggtgtaagcttattatctttcaatgtgaattcatgaaatgaaggtactctaggacaattaagatacagtactacagcattaatgcatatgctggaccttttaattggaaagaagatccagtgtatgtacatagctccattttctgctttattgttaaggacctgttttttgtgtactgtatgcttgtgatccgacattatattgcagcatcatgtatgtgccgagaggtgtttgcctttaggcccgtgtgcaaatccaatgtttctcaaatgtt

SEQ ID NO: 17943 - DNA, 600 bp, Chicken  19866894226449_1
atatagtaacagttctgctggaattgaggttgtctttgcagagcacatgtgtggatgtgttctcaaagcatattgagttgtgtctgtagtaaacagacctcttgtactgctttttgtttgtttctcaagcttgaggtttctttaatttgcatcacattttcatctctgtggctgaaattagtgagttgatttgactcttctaatgcaaaagaacaatagaatacttagtaacagatacggggcagcagattagtgggacatagcatacaaacaactgttttctgctgtgtggttggaggytttgttttgttctgtgtgtttggtttggtgtaattgttttttctttaatgttgttgttggctgtggctgcggtaactctgacttttccagaagatgatcttyctgtaagaatgtttcttacacgtgaatttggtttggaacattttagatagcatygtaacaatgagccaacagcactaatagcacatgctgtgtttaaagacaaatgctttttttccctctctgcagtatttgccttcagaacagaatcctgcctatgtctcacagtctgcaaagtttgacccatcatcaaaaatttat

SEQ ID NO: 17944 - DNA, 600 bp, Chicken  19866894226449_2
tgtactgctttttgtttgtttctcaagcttgaggtttctttaatttgcatcacattttcatctctgtggctgaaattagtgagttgatttgactcttctaatgcaaaagaacaatagaatacttagtaacagatacggggcagcagattagtgggacatagcatacaaacaactgttttctgctgtgtggttggaggytttgttttgttctgtgtgtttggtttggtgtaattgttttttctttaatgttgttgttggctgtggctgcggtaactctgacttttccagaagatgatcttyctgtaagaatgtttcttacacgtgaatttggtttggaacattttagatagcatygtaacaatgagccaacagcactaatagcacatgctgtgtttaaagacaaatgctttttttccctctctgcagtatttgccttcagaacagaatcctgcctatgtctcacagtctgcaaagtttgacccatcatcaaaaatttatgaagtaagactgaaattaaaatttcctgccaattatcaaagaagaaacaaatagttacattcttttcctttgggagccttagcgatatatgtttggtttttt

SEQ ID NO: 17945 - DNA, 600 bp, Chicken  19866894226449_3
ttttcatctctgtggctgaaattagtgagttgatttgactcttctaatgcaaaagaacaatagaatacttagtaacagatacggggcagcagattagtgggacatagcatacaaacaactgttttctgctgtgtggttggaggytttgttttgttctgtgtgtttggtttggtgtaattgttttttctttaatgttgttgttggctgtggctgcggtaactctgacttttccagaagatgatcttyctgtaagaatgtttcttacacgtgaatttggtttggaacattttagatagcatygtaacaatgagccaacagcactaatagcacatgctgtgtttaaagacaaatgctttttttccctctctgcagtatttgccttcagaacagaatcctgcctatgtctcacagtctgcaaagtttgacccatcatcaaaaatttatgaagtaagactgaaattaaaatttcctgccaattatcaaagaagaaacaaatagttacattcttttcctttgggagccttagcgatatatgtttggttttttttctccttagaaaaagaatataagctttaagaaacatcgtatgtttctaaatca

SEQ ID NO: 17946 - DNA, 600 bp, Chicken  19866894226453_1
gttctgtgttgcactacatctttatttagcatatatgcaatgtgtattcaggcaattttggaacaatgtgaaatgtctcagcatatactctgaagagggttaattgaggctaatttcatttataccacatgccacctacagaagcatcagtttaaaagactctaagtgcagcctcaccagctcaaggcttcagatagcagatagaaaacaccttggccatcttctgagttttcataatcatttgcttgaagtctttgcttgcttccattatactaagagtgatataaattctaatacccygtggtaacagaaacataacagcatcagcatattccaaggtccaaggcatttagggatcctttaggagttgtagtggagggtgagcttaaggatttgtggcatgctgctgaagggctrtgcttcatgctgcctcatctactgatggaaagtagtggcgttatgtactttggatgcagagacaggctttttacttgttgkcagacatgtaatttcattacagggatacctgagcattaaactcctgtttcccttattcaactactgacagtatttgctatatggctttgtgataaataatag

SEQ ID NO: 17947 - DNA, 600 bp, Chicken  19866894226453_2
atttataccacatgccacctacagaagcatcagtttaaaagactctaagtgcagcctcaccagctcaaggcttcagatagcagatagaaaacaccttggccatcttctgagttttcataatcatttgcttgaagtctttgcttgcttccattatactaagagtgatataaattctaatacccygtggtaacagaaacataacagcatcagcatattccaaggtccaaggcatttagggatcctttaggagttgtagtggagggtgagcttaaggatttgtggcatgctgctgaagggctrtgcttcatgctgcctcatctactgatggaaagtagtggcgttatgtactttggatgcagagacaggctttttacttgttgkcagacatgtaatttcattacagggatacctgagcattaaactcctgtttcccttattcaactactgacagtatttgctatatggctttgtgataaataatagttctaaggtaaaataaaagatcaataaaaatcacaccccagggcagtggccaaagccctgagttgccagagttcagaaagcgtttggacaacagtctcagtggtatggtctgatttt

SEQ ID NO: 17948 - DNA, 600 bp, Chicken  19866894226453_3
agatagaaaacaccttggccatcttctgagttttcataatcatttgcttgaagtctttgcttgcttccattatactaagagtgatataaattctaatacccygtggtaacagaaacataacagcatcagcatattccaaggtccaaggcatttagggatcctttaggagttgtagtggagggtgagcttaaggatttgtggcatgctgctgaagggctrtgcttcatgctgcctcatctactgatggaaagtagtggcgttatgtactttggatgcagagacaggctttttacttgttgkcagacatgtaatttcattacagggatacctgagcattaaactcctgtttcccttattcaactactgacagtatttgctatatggctttgtgataaataatagttctaaggtaaaataaaagatcaataaaaatcacaccccagggcagtggccaaagccctgagttgccagagttcagaaagcgtttggacaacagtctcagtggtatggtctgattttttgggtgttcccatgaaaaatcaggagctggacttctgacaccaagctgagagaaagtgttgatctgcctgagtggggaag

SEQ ID NO: 17949 - DNA, 600 bp, Chicken  19866894226453_4
gtgattctatgatccttatgtatcccttccagctaagagtattgtatgattatatgattctttaagtaatctaatgtttaaagtagctcaaaaaatatgtctgagaagatccatcactgcatttacccaccttgcctgcatacagctgtcccttcccgcatatctctgctcagtttgttctcctcactctgtcctttgccctcacatcatctgcagcgtaggctgctcctcctgcttcctgccagagtcccatcctccaccacagggtgctgctatgaaagagttaagctgttttcctckatgctttctctcctttttgttttttctttctgcaagaacaggctcatgggagcagaggttggagctctcttcaccttttgcagtggcccycctggctcttctgctcctggggattcaactaggctgatgaaaatctccaaagaatgagacagaaacatgccatgacccacttgctgttagctagttgcgctgcccaactttcagatctgccacaatctagaccattttaagcacaaatacagttagtatttgtattactctattacatgtgaatgtaatagagagtatatacagcataga

SEQ ID NO: 17950 - DNA, 600 bp, Chicken  19866894226453_5
aaaaatatgtctgagaagatccatcactgcatttacccaccttgcctgcatacagctgtcccttcccgcatatctctgctcagtttgttctcctcactctgtcctttgccctcacatcatctgcagcgtaggctgctcctcctgcttcctgccagagtcccatcctccaccacagggtgctgctatgaaagagttaagctgttttcctckatgctttctctcctttttgttttttctttctgcaagaacaggctcatgggagcagaggttggagctctcttcaccttttgcagtggcccycctggctcttctgctcctggggattcaactaggctgatgaaaatctccaaagaatgagacagaaacatgccatgacccacttgctgttagctagttgcgctgcccaactttcagatctgccacaatctagaccattttaagcacaaatacagttagtatttgtattactctattacatgtgaatgtaatagagagtatatacagcatagatgaccatctttcagcttagtctctatgccagcaggactaaatcttacactcattccgtaaacattatgaatgtctgatgtcagtgtaatg

SEQ ID NO: 17951 - DNA, 600 bp, Chicken  19866894226458_1
cttgattccataggaacctgtatgtatcactgcaaagaatgtattaaacagcaatttcctcttaggataacaatataagtagtggtattggaattcctgacctgcttatcaaatagaaatactattttaatgcctgtagctgaaatgaagtgaaatactcagtgaccaccatgctactgattccatgaaggaaatgaaactggaaatgtatgcaaaaatagtgacaatgcttggtataaacacttattaaaactttatgaaggggtgtgggagaatactcccaatttatagttttgataytgaagatgtttgtttgtttcttttaagaaaaatggtggttcttatcgttttgctgaggaaagaaaaaccacctatgtttatttcggctctgggcattacaggatataatgacgcttccctcctcctctaccagacttggattctttaatctctgtcagtgcaggaaagcgaaatgctgtctgcagagctgttggattattcccaagccagcttcttccattaagagtattattttgtaatgtatcatggcctgggaccagtggtgaaacatcctttgaagctagagtcatctttctcact

SEQ ID NO: 17952 - DNA, 600 bp, Chicken  19866894226458_2
cactgagagcatttgcaacaaaattattaaacaattagaatcatagaatcattaaggttggaaaagacctctaagatcacctagtctaaccctcccctaccaccagtattgccagcttctccaggagaatgctgtgggggacagtggcaaaagctttgctaaaatctagtagactatgtcaacaaattagtttctgtatatcatgagttggttgttttttttttttgtataaatgcatttcaagcattttttgaggtatgagactgcagtaatagttataattgaatagaagcgtggaaygtatgttttcaatagtaaggtaatcagtttgttgagtataattaatttctctgtcttctaccatgttctgtgaaccagaatggttgacggtaagctgtccagattagtggtctgactttgttcaatcagtgtttgtcatctgrataaattctacttgaacacaaagctagaacatttataagtgcttgttgcatttagagaaaaattactgaaacataactaaataaaatgccactggttccagtggtagctttgtatacattgatgacttacatttagttataaattactgtagtcatt

SEQ ID NO: 17953 - DNA, 600 bp, Chicken  19866894226458_3
gtggcaaaagctttgctaaaatctagtagactatgtcaacaaattagtttctgtatatcatgagttggttgttttttttttttgtataaatgcatttcaagcattttttgaggtatgagactgcagtaatagttataattgaatagaagcgtggaaygtatgttttcaatagtaaggtaatcagtttgttgagtataattaatttctctgtcttctaccatgttctgtgaaccagaatggttgacggtaagctgtccagattagtggtctgactttgttcaatcagtgtttgtcatctgrataaattctacttgaacacaaagctagaacatttataagtgcttgttgcatttagagaaaaattactgaaacataactaaataaaatgccactggttccagtggtagctttgtatacattgatgacttacatttagttataaattactgtagtcatttctgtttttctttttctcctccccttacatgtatatcactgtgtgatgttatttgtgtcctccagagaaaagggttttctttcccctctgaaatactcaacgtttaataacttaaaagaataagaagcctctttaatccattt

SEQ ID NO: 17954 - DNA, 600 bp, Chicken  19866894226461_1
ggaatagccactgacatttttgtgattcacagaaaaactgcaatggaaatgtaactctggagatggactactgcaatcttcttttagacataaagacttaggcaaaggaaagtgaattttattattatcgttagttttctcttcacattctcgggtaccatttagcaaatactgctaatgacctctctgtgacaagaggtgcaaatgaaatgatgtgatgaaggagttgaaagtgagcaacaggtgaagcaatggggtgaacaaatgaggcactgtggagtaaagaacaagattacaagsaagaaaatgatattaaaaaggaacatggacacaggaaaaactgaaacagaatgaaatgttggaacagaacagatatgctcaaagggaacagaaatggctgagagagaagtgacgggtcccaacctctattacaaacacgtaactttcctcaacgagaaattcagcattaaaatcaaagttcagaacaagtttttaagagagttaacacaattttctcacctagcctatccacaagaatgccttattataatggaaagtgcatattgttgtgaggttgctcaacactgtcttgctcaagta

SEQ ID NO: 17955 - DNA, 600 bp, Chicken  19866894226461_2
gcattaaaatcaaagttcagaacaagtttttaagagagttaacacaattttctcacctagcctatccacaagaatgccttattataatggaaagtgcatattgttgtgaggttgctcaacactgtcttgctcaagtaacatttaaccctttactctaaggatctgttcaccataagaattaataaaacaattaaactatagtaatataatgaatgattttcattcttattaaagaaccattttccagtcattgtcttcattgctcacaggatcaggctaaacatctttcaaaaaaaaaawaaaaaatccaacaaattctcattgtgaaagttcaaaaaggtcatgcataaacaagtgcttgtaagtagaagactcagcctcctttaagacattcaactgagtcactgtattttcccttccagaaagggaataatatgaatcagtatattaatactgtacattcacacacaatttacatgaacttacctttgcatattaaaatacaaaatgattgtctacagtcaagatcaaacactatgacattgcagtaataaattgatacagaacactgaatgcagtgcaatgtgtagcattcaaatt

SEQ ID NO: 17956 - DNA, 587 bp, Chicken  19866894226464_1
ggactttggcagcacttgagactactggagctgtcagctccttcagcactaataatcacctgtcaaaaatgcagagcagactggggaagaaataaaagaggaaatgattaagcacctcaagctgtagccaaggcaatcaagaaactgaattcagctgctttagtaagtaccttttaatgcaacatgtccctcctcctatgcaggagtcctacggtgactccacaatagctctgtgcctgtggctttaaatttgctaacaaacagcctaagcactcatgcacaagatggatgccagggagkgagaaaagagaaagatttcagattacaaccagaacagcatttgtcacttgctgtagatggtgtgagaggcagtttccaggctcttggacttgtgaagaatattttctgttccactcctgatgtgcttggctgctttctgccaaaacctgttttaaatccattaacaaaaccaggccgagcctgcataacttttgattctcctggtggaaaaacggcactgagtgtatttctgggaatgacagacagccaccgttcccagcgctgccacgtgaagcactgctccctgg

SEQ ID NO: 17957 - DNA, 599 bp, Chicken  19866894226472_1
  misc_feature (1)..(126): n is any nucleotide
nnnnnnnnnnnnnnnnnnnnnnnnnnnnnnnnnnnnnnnnnnnnnnnnnnnnnnnnnnnnnnnnnnnnnnnnnnnnnnnnnnnnnnnnnnnnnnnnnnnnnnnnnnnnnnnnnnnnnnnnnnnnnnaaagcactgaagggcagaagcaaagcagtgatggggcactgagctgcgctgccagcagagccctgtgcagagcagagggtgcaagcatggcccaagagctctcggaagcaccaggtggtccagaaccacagaagcaatgagggaagacgaggtggaagcagcagtgccaggaaragaaggcaaagaacatggtagaggagatgctgcctctggggtgcagaacccctcacattcctggggtgagagtgaggagagcagagaggttaaaaaagaaggtaaatagaggtggagagctcctccaaggcacttcaggcagaactgagggtaaatgaaaaagagggaaaccaggagagctgtcaagagtgggacaagggaactgctcaggaaggargaatgcagcactawccagggtacggcagctgcacactgctacatgtctgcatagctatgcatctacatcacatctatgtcac

SEQ ID NO: 17958 - DNA, 600 bp, Chicken  19866894226472_2
ccaagagctctcggaagcaccaggtggtccagaaccacagaagcaatgagggaagacgaggtggaagcagcagtgccaggaaragaaggcaaagaacatggtagaggagatgctgcctctggggtgcagaacccctcacattcctggggtgagagtgaggagagcagagaggttaaaaaagaaggtaaatagaggtggagagctcctccaaggcacttcaggcagaactgagggtaaatgaaaaagagggaaaccaggagagctgtcaagagtgggacaagggaactgctcaggaaggargaatgcagcactawccagggtacggcagctgcacactgctacatgtctgcatagctatgcatctacatcacatctatgtcacaacttcagacatagctgcgtgtatttagaagtaatcaccartacagatatgcaccaaactgctgtggcagtgcaagagcggctggccaggcctcrgggcrcattcacctggggaaggtgcagcccgcaggacacagctgtgatgctgctccggcagcccacagactgtgtgcccctcccttaatcctawtgacaccaccttgtttccaaattcacaga

SEQ ID NO: 17959 - DNA, 600 bp, Chicken  19866894226472_3
aagcaccaggtggtccagaaccacagaagcaatgagggaagacgaggtggaagcagcagtgccaggaaragaaggcaaagaacatggtagaggagatgctgcctctggggtgcagaacccctcacattcctggggtgagagtgaggagagcagagaggttaaaaaagaaggtaaatagaggtggagagctcctccaaggcacttcaggcagaactgagggtaaatgaaaaagagggaaaccaggagagctgtcaagagtgggacaagggaactgctcaggaaggargaatgcagcactawccagggtacggcagctgcacactgctacatgtctgcatagctatgcatctacatcacatctatgtcacaacttcagacatagctgcgtgtatttagaagtaatcaccartacagatatgcaccaaactgctgtggcagtgcaagagcggctggccaggcctcrgggcrcattcacctggggaaggtgcagcccgcaggacacagctgtgatgctgctccggcagcccacagactgtgtgcccctcccttaatcctawtgacaccaccttgtttccaaattcacagatgttactgggaact

SEQ ID NO: 17960 - DNA, 600 bp, Chicken  19866894226472_4
gtgcagaacccctcacattcctggggtgagagtgaggagagcagagaggttaaaaaagaaggtaaatagaggtggagagctcctccaaggcacttcaggcagaactgagggtaaatgaaaaagagggaaaccaggagagctgtcaagagtgggacaagggaactgctcaggaaggargaatgcagcactawccagggtacggcagctgcacactgctacatgtctgcatagctatgcatctacatcacatctatgtcacaacttcagacatagctgcgtgtatttagaagtaatcaccartacagatatgcaccaaactgctgtggcagtgcaagagcggctggccaggcctcrgggcrcattcacctggggaaggtgcagcccgcaggacacagctgtgatgctgctccggcagcccacagactgtgtgcccctcccttaatcctawtgacaccaccttgtttccaaattcacagatgttactgggaactcctgtgccacacacatcctaaatgtcagtataatttccgagggttttaaaaatagtaacccagtaggtgtgaccccgtagcacagaagttaacagaagatattttcctg

SEQ ID NO: 17961 - DNA, 600 bp, Chicken  19866894226472_5
aaagaaggtaaatagaggtggagagctcctccaaggcacttcaggcagaactgagggtaaatgaaaaagagggaaaccaggagagctgtcaagagtgggacaagggaactgctcaggaaggargaatgcagcactawccagggtacggcagctgcacactgctacatgtctgcatagctatgcatctacatcacatctatgtcacaacttcagacatagctgcgtgtatttagaagtaatcaccartacagatatgcaccaaactgctgtggcagtgcaagagcggctggccaggcctcrgggcrcattcacctggggaaggtgcagcccgcaggacacagctgtgatgctgctccggcagcccacagactgtgtgcccctcccttaatcctawtgacaccaccttgtttccaaattcacagatgttactgggaactcctgtgccacacacatcctaaatgtcagtataatttccgagggttttaaaaatagtaacccagtaggtgtgaccccgtagcacagaagttaacagaagatattttcctgtacacataattatttttcaatgctgcagtgttttcaatcctgaattcttttccc

SEQ ID NO: 17962 - DNA, 600 bp, Chicken  19866894226472_6
aggtaaatagaggtggagagctcctccaaggcacttcaggcagaactgagggtaaatgaaaaagagggaaaccaggagagctgtcaagagtgggacaagggaactgctcaggaaggargaatgcagcactawccagggtacggcagctgcacactgctacatgtctgcatagctatgcatctacatcacatctatgtcacaacttcagacatagctgcgtgtatttagaagtaatcaccartacagatatgcaccaaactgctgtggcagtgcaagagcggctggccaggcctcrgggcrcattcacctggggaaggtgcagcccgcaggacacagctgtgatgctgctccggcagcccacagactgtgtgcccctcccttaatcctawtgacaccaccttgtttccaaattcacagatgttactgggaactcctgtgccacacacatcctaaatgtcagtataatttccgagggttttaaaaatagtaacccagtaggtgtgaccccgtagcacagaagttaacagaagatattttcctgtacacataattatttttcaatgctgcagtgttttcaatcctgaattcttttccctttta

SEQ ID NO: 17963 - DNA, 551 bp, Chicken  19866894226472_7
gtgggacaagggaactgctcaggaaggargaatgcagcactawccagggtacggcagctgcacactgctacatgtctgcatagctatgcatctacatcacatctatgtcacaacttcagacatagctgcgtgtatttagaagtaatcaccartacagatatgcaccaaactgctgtggcagtgcaagagcggctggccaggcctcrgggcrcattcacctggggaaggtgcagcccgcaggacacagctgtgatgctgctccggcagcccacagactgtgtgcccctcccttaatcctawtgacaccaccttgtttccaaattcacagatgttactgggaactcctgtgccacacacatcctaaatgtcagtataatttccgagggttttaaaaatagtaacccagtaggtgtgaccccgtagcacagaagttaacagaagatattttcctgtacacataattatttttcaatgctgcagtgttttcaatcctgaattcttttcccttttaaggagttggctttacaaaaaatgcagaacacaacaatgcc

SEQ ID NO: 17964 - DNA, 600 bp, Chicken  19866894226473_1
cttctattagtatggaattcttaatatgatggactatgatatgcctatactgctggaaattattgcattaccagtttaatggatttataagattattccctgtacagctttatacgtttaatttttgtatactttctcactttctgaaaaacagaatattctcataggtaacacagataactgaatttcttttctggaatcaacataagctttaaatgttaaagaataattccccaaatagcatggattatatagctctttcttgaatcagagagcttgatataatagctcttctgattmtagtaggttaagcagataaacaaatataaatatctaatgctgatctgaaaacactgaagaaaataaaactacattaattcctctgaaaacaagagcaaaattttgttttacttttccatgacctgcacaactagatattcacaaaacaatctgcttagtgaatttaattagggatactggtttcactgaaacatattaacaaatgttccctattcagctaattatttcaaaagaaagaatttgagattttgtgaacgaagtgcattttatgccattyacaatttatttagatgtctctgc

SEQ ID NO: 17965 - DNA, 600 bp, Chicken  19866894226473_2
tgatataatagctcttctgattmtagtaggttaagcagataaacaaatataaatatctaatgctgatctgaaaacactgaagaaaataaaactacattaattcctctgaaaacaagagcaaaattttgttttacttttccatgacctgcacaactagatattcacaaaacaatctgcttagtgaatttaattagggatactggtttcactgaaacatattaacaaatgttccctattcagctaattatttcaaaagaaagaatttgagattttgtgaacgaagtgcattttatgccattyacaatttatttagatgtctctgcctaaagtgtttcccacagtgagacaaattcacttcatcatcatggatcagcttgacagcatcctacagaggaacctgttgatctgattgaatatggaagttaacaagaagatggtgaaggcaaacaccggagcaagtaacaactcagartggatgacattcaaagatgagtaaatctagatattttacagagaaaataagcacaaaaaatagatcaaagttatagataaaaagaaaaaaawtgctcttactttacacacaatattgacacacctgtg

SEQ ID NO: 17966 - DNA, 600 bp, Chicken  19866894226473_3
tctgcttagtgaatttaattagggatactggtttcactgaaacatattaacaaatgttccctattcagctaattatttcaaaagaaagaatttgagattttgtgaacgaagtgcattttatgccattyacaatttatttagatgtctctgcctaaagtgtttcccacagtgagacaaattcacttcatcatcatggatcagcttgacagcatcctacagaggaacctgttgatctgattgaatatggaagttaacaagaagatggtgaaggcaaacaccggagcaagtaacaactcagartggatgacattcaaagatgagtaaatctagatattttacagagaaaataagcacaaaaaatagatcaaagttatagataaaaagaaaaaaawtgctcttactttacacacaatattgacacacctgtggtaaaactctactgctaatatagtcatctatgtctttttaagttcctgtatatacatgagtatgaaaggtaaatcatacagttcaataggttttatattttatttactaggctacttgcggtacatacagtctagatttagcaacattcaygaaaaatctttccagtgtgtt

SEQ ID NO: 17967 - DNA, 600 bp, Chicken  19866894226473_4
tgagattttgtgaacgaagtgcattttatgccattyacaatttatttagatgtctctgcctaaagtgtttcccacagtgagacaaattcacttcatcatcatggatcagcttgacagcatcctacagaggaacctgttgatctgattgaatatggaagttaacaagaagatggtgaaggcaaacaccggagcaagtaacaactcagartggatgacattcaaagatgagtaaatctagatattttacagagaaaataagcacaaaaaatagatcaaagttatagataaaaagaaaaaaawtgctcttactttacacacaatattgacacacctgtggtaaaactctactgctaatatagtcatctatgtctttttaagttcctgtatatacatgagtatgaaaggtaaatcatacagttcaataggttttatattttatttactaggctacttgcggtacatacagtctagatttagcaacattcaygaaaaatctttccagtgtgttggagtgagtgggaagagatggggggaagcaaaacactctcaggacaatttattttgagtttccatattgttttcatacttcagaatatatcc

SEQ ID NO: 17968 - DNA, 600 bp, Chicken  19866894226473_5
ggagcaagtaacaactcagartggatgacattcaaagatgagtaaatctagatattttacagagaaaataagcacaaaaaatagatcaaagttatagataaaaagaaaaaaawtgctcttactttacacacaatattgacacacctgtggtaaaactctactgctaatatagtcatctatgtctttttaagttcctgtatatacatgagtatgaaaggtaaatcatacagttcaataggttttatattttatttactaggctacttgcggtacatacagtctagatttagcaacattcaygaaaaatctttccagtgtgttggagtgagtgggaagagatggggggaagcaaaacactctcaggacaatttattttgagtttccatattgttttcatacttcagaatatatcctgactaaagaccgaataaagactgctgtctgacaaataaatagcagttctctccactttcagaactaatttaaaaaaattattcagaattcctacagttttccactcagaaatattatattaaaacatatataatagctgaaagcaaacaatttctagactgaagaggagtgatgaaaaaatatgtg

SEQ ID NO: 17969 - DNA, 600 bp, Chicken  19866894226475_1
tgtcttccgaattaattcagctgttcctccccgtgaatataaattcatcaaataggtatttttaaacacggatctgattctgaatcccttgtgaaactacacctttaatcagaagttgggggaacacagtagtaaaatccttattgggcaactcccacatctcggcttttagctgcattaaatcctgattaactcccagcttgctaacatctagttttaatatgtcaagtgcctgtatttctgcaagaagcctttcaggagcactgctatgcatcgtctgtcgtgagagccagacagggrccaaggacattcctgggcacacaggcaggcagacatctttactgaggtgacaaaaaggagagggaaatagcactagaatcaatgctgcgtgctggacttccaactccaggagaagctttgggcttattatttttgagaggayggtcagcccagtcttggtggagggacagacctgtttccaccatcacctctctgctggaatttttgctggagctgggaggttgtcatttggaagtgcagttatcgtgcacgtcgtgttctgacacagcagtacaaatgagcacgctggacacagcgtag

SEQ ID NO: 17970 - DNA, 600 bp, Chicken  19866894226475_2
attgggcaactcccacatctcggcttttagctgcattaaatcctgattaactcccagcttgctaacatctagttttaatatgtcaagtgcctgtatttctgcaagaagcctttcaggagcactgctatgcatcgtctgtcgtgagagccagacagggrccaaggacattcctgggcacacaggcaggcagacatctttactgaggtgacaaaaaggagagggaaatagcactagaatcaatgctgcgtgctggacttccaactccaggagaagctttgggcttattatttttgagaggayggtcagcccagtcttggtggagggacagacctgtttccaccatcacctctctgctggaatttttgctggagctgggaggttgtcatttggaagtgcagttatcgtgcacgtcgtgttctgacacagcagtacaaatgagcacgctggacacagcgtagagttttgtttaggatttttaggataaaggagacattttggaacagtaagccagagctgattgtgccaagtctggcttttatctagtagtcacagaagcaaytgtgtgagtgtcctggacaggttattgctctggccgtgata

SEQ ID NO: 17971 - DNA, 600 bp, Chicken  19866894226475_3
aactccaggagaagctttgggcttattatttttgagaggayggtcagcccagtcttggtggagggacagacctgtttccaccatcacctctctgctggaatttttgctggagctgggaggttgtcatttggaagtgcagttatcgtgcacgtcgtgttctgacacagcagtacaaatgagcacgctggacacagcgtagagttttgtttaggatttttaggataaaggagacattttggaacagtaagccagagctgattgtgccaagtctggcttttatctagtagtcacagaagcaaytgtgtgagtgtcctggacaggttattgctctggccgtgatacaggtgtcggtgttgatcagaattcatgcccatgcatttctgtagagcattgcagagagaattcagtacgcgattctgtactctccttccgacttcagaaaatacaattttaaagactctgctgtgtggtctgttttctactaaagcaatttgaagtagtttatgcttaatgagaaaacagctcttccctctgcaaagctgtgctcctggttcatttgtagcactgagtctctgttgtatttatcacccactgggtgaa

SEQ ID NO: 17972 - DNA, 600 bp, Chicken  19866894226477_1
aggaaaataaggaagaacagaaaaataatatgcatatgttcccaaatacaggaaacagattgaaaaaacattactcaatataatgtagtaagataagacacatactgtatatttaatgcagtgagcccataatgtgttaacgcttattataacttttctttttagttgtatagcataaatgtagtcaaaatctgttcatagcatgtccccacagtcataccttagtgtaacatttgacctggatagactggattgatgggcctacgttaactgtatgagtttcagtagggccaagtgtcsggtcctgcattttggtcacaacaaccccagrcaaccctacaggcttggggaggagtggctggaaagttgcctgattgaaagggaccttggtgtactgatggacagtcagctgaatatgagccagcagtgtgcccaggtggccaagaaggccaatggcatcctggcttgtgtcaggaatggtgtggtgagcaggacaagggaagtcatcctgcccctgttgatgttccttaaggtcttttccaacctgagcaattctatgtttctatggttctatgattctataactgtggtctatgatgg

SEQ ID NO: 17973 - DNA, 600 bp, Chicken  19866894226477_2
gcatatgttcccaaatacaggaaacagattgaaaaaacattactcaatataatgtagtaagataagacacatactgtatatttaatgcagtgagcccataatgtgttaacgcttattataacttttctttttagttgtatagcataaatgtagtcaaaatctgttcatagcatgtccccacagtcataccttagtgtaacatttgacctggatagactggattgatgggcctacgttaactgtatgagtttcagtagggccaagtgtcsggtcctgcattttggtcacaacaaccccagrcaaccctacaggcttggggaggagtggctggaaagttgcctgattgaaagggaccttggtgtactgatggacagtcagctgaatatgagccagcagtgtgcccaggtggccaagaaggccaatggcatcctggcttgtgtcaggaatggtgtggtgagcaggacaagggaagtcatcctgcccctgttgatgttccttaaggtcttttccaacctgagcaattctatgtttctatggttctatgattctataactgtggtctatgatggcactaacagaggtaaataataagcacctcca

SEQ ID NO: 17974 - DNA, 578 bp, Chicken  19866894226485_1
ctccactcttcatattttgttttagacatctgttcactgacatcaggtctttgcttctatgaagcattagatgctttaatgccagtgaagaagggaatttaggacatacccgttttctgaagccttcatcattggccagcttggatgtccccatatgttgaaaattgtctgtcatacctgtgcgcttcacatattggagggcaaagacagttttagggctacagccttcaccttagacttgagtcttccagttaggtactgcaagactgaggtctcctgtgccttaaaagaaaacctccygatacagaccaaatatacgcggtacatcacaaccgcccttcacagcatgatggttcacttcatcttccagctgaaacacctcaagtggctgagaactgctatgtccccctcactcacagacatcacaccattgcagatccacatccactgctgctgtatttcctagaagctccttgtgctgttggaaactccagcagcggcttcccaacctactatttccacaagagtagcaaagctgtgacagatcgcaagatggaatgtgggtccgtgtctcataa

SEQ ID NO: 17975 - DNA, 599 bp, Chicken  19866894226486_1
  misc_feature (1)..(5): n is any nucleotide
nnnnntgcatttttcacttgcaaactcagtgatgacaggtagagtatgatatgaactacagctagttagaactaaggcagcaaaaagctcacttgcctctaatgccagaaacattatctctcagtactgtttcaaagacttagctgcatcactattgttttggttgtttcatattccagcttctttttaatgggggctcagttctttcagagtatgctaccaacttcacactctactgttttctctatatccttgtaatagtagcctccatgatcccttatttctcccacctgtcatgcygctatgcttttacacttccatcaatggaattcctagaattgaacaacttcctgacaataattactgtaactttacttcagtccctctccatcctgttgccctacctatatgaagtaaactttgttcgatgcagacaaacatatgcaaagaccggggcataacgtgatgttactttaayctgtgcattttctcctttctctgctgcaattcattgccctctaggagttgctgaratctttttgagttatagtgcctgaatttactttacttgtagaaaaacatacactaatgttatggtg

SEQ ID NO: 17976 - DNA, 600 bp, Chicken  19866894226486_2
gcttctttttaatgggggctcagttctttcagagtatgctaccaacttcacactctactgttttctctatatccttgtaatagtagcctccatgatcccttatttctcccacctgtcatgcygctatgcttttacacttccatcaatggaattcctagaattgaacaacttcctgacaataattactgtaactttacttcagtccctctccatcctgttgccctacctatatgaagtaaactttgttcgatgcagacaaacatatgcaaagaccggggcataacgtgatgttactttaayctgtgcattttctcctttctctgctgcaattcattgccctctaggagttgctgaratctttttgagttatagtgcctgaatttactttacttgtagaaaaacatacactaatgttatggtgaattgggaaacttgggaaatgtatttttctgctatgtatttctgtccaatagaagcagatagtatatgagaacacaagcttatctgaaatagggacartgggcagcagttgatttagttaatatagcacattataaccactgtgcatcagagacatctgagaacgggcgcttcaccagt

SEQ ID NO: 17977 - DNA, 600 bp, Chicken  19866894226486_3
tactgttttctctatatccttgtaatagtagcctccatgatcccttatttctcccacctgtcatgcygctatgcttttacacttccatcaatggaattcctagaattgaacaacttcctgacaataattactgtaactttacttcagtccctctccatcctgttgccctacctatatgaagtaaactttgttcgatgcagacaaacatatgcaaagaccggggcataacgtgatgttactttaayctgtgcattttctcctttctctgctgcaattcattgccctctaggagttgctgaratctttttgagttatagtgcctgaatttactttacttgtagaaaaacatacactaatgttatggtgaattgggaaacttgggaaatgtatttttctgctatgtatttctgtccaatagaagcagatagtatatgagaacacaagcttatctgaaatagggacartgggcagcagttgatttagttaatatagcacattataaccactgtgcatcagagacatctgagaacgggcgcttcaccagtgtgtaatactcatgagaacaattttagctctgtgttatttacaggaggatctaaa

SEQ ID NO: 17978 - DNA, 600 bp, Chicken  19866894226486_4
gccctacctatatgaagtaaactttgttcgatgcagacaaacatatgcaaagaccggggcataacgtgatgttactttaayctgtgcattttctcctttctctgctgcaattcattgccctctaggagttgctgaratctttttgagttatagtgcctgaatttactttacttgtagaaaaacatacactaatgttatggtgaattgggaaacttgggaaatgtatttttctgctatgtatttctgtccaatagaagcagatagtatatgagaacacaagcttatctgaaatagggacartgggcagcagttgatttagttaatatagcacattataaccactgtgcatcagagacatctgagaacgggcgcttcaccagtgtgtaatactcatgagaacaattttagctctgtgttatttacaggaggatctaaacaaaagcgacagtttacagtggtaagcatgacaagaggtcctgaataaaaacatgcagaaagaacagaatggagtaatacagggaccttacrctcacttttgtaagccttgaaaatggttcggtgtgttacagatttagttgtgaatgcagatgatgtgccttc

SEQ ID NO: 17979 - DNA, 600 bp, Chicken  19866894226486_5
ttctgctatgtatttctgtccaatagaagcagatagtatatgagaacacaagcttatctgaaatagggacartgggcagcagttgatttagttaatatagcacattataaccactgtgcatcagagacatctgagaacgggcgcttcaccagtgtgtaatactcatgagaacaattttagctctgtgttatttacaggaggatctaaacaaaagcgacagtttacagtggtaagcatgacaagaggtcctgaataaaaacatgcagaaagaacagaatggagtaatacagggaccttacrctcacttttgtaagccttgaaaatggttcggtgtgttacagatttagttgtgaatgcagatgatgtgccttccactgcaatatctcaccatactggtgttgtagaagggtatgagtgactaaggacaataagagatatgggggtacgcatgcaaacacccattacaaaatagcaggatggagaagaattgattaaaggatgacttgccagaaagatgccttggttgaggggattggtgagaaagctgctgagataaggagtgtcttggtgaaaggagcttctttcacgggtttgcctgtt

SEQ ID NO: 17980 - DNA, 600 bp, Chicken  19866894226489_1
agtgctgggttttaggatatgaaaatgtgaatgtttgcttggatttgccaggaagagactaagaacgtagtttggggaggtgtttgattgagatgaggggttctgtgagcaggatgggtggctgaccatgcagtttgggggaagtgagacaggttgtgtctgttgtgatgtggaagaacagcaaactctgagagagctgaagggttggggacatggggccatggtgaagcagacctctgtctccacagctgcatttcttcctccctgctgagcatctgggccacaactccctggcatgakcaacacaagccatggctgtgggagcccctgggctgtactgctctctgactggtactgctctctgagtactaggcaggctggcggctgtggaggagagcagcatggccctccaagcagcccctgagagcagagctggggctgcaagcaatatccttccagcagcacttcccttggtgtgctgcagccargctgggacaagggagaggattgggttttgtggctcgagcatagctggagatgtgggtgtctgtggcagatcctgggtctgcagtaaaggacccaattggaatctggcagtta

SEQ ID NO: 17981 - DNA, 600 bp, Chicken  19866894226489_2
tgagagagctgaagggttggggacatggggccatggtgaagcagacctctgtctccacagctgcatttcttcctccctgctgagcatctgggccacaactccctggcatgakcaacacaagccatggctgtgggagcccctgggctgtactgctctctgactggtactgctctctgagtactaggcaggctggcggctgtggaggagagcagcatggccctccaagcagcccctgagagcagagctggggctgcaagcaatatccttccagcagcacttcccttggtgtgctgcagccargctgggacaagggagaggattgggttttgtggctcgagcatagctggagatgtgggtgtctgtggcagatcctgggtctgcagtaaaggacccaattggaatctggcagttactagttgacatcagttggaaatgtactggtgagaaaatgacttttggaccctctaccatccactgcagctcaatgagctacctagttgcatggtagcatgtacctaaagagcaacctgtctgaggtgcagcaccaagcagctctgtatttctagcagtttgaagtcaagcattctgactccagaagcc

SEQ ID NO: 17982 - DNA, 600 bp, Chicken  19866894226496_1
cacagctggcagctactttcctagtatatttcattatctcagtctgacagcagtgaatgtttctgctcacctctagcgagctcacaccaaacattgattgtatacttctactggacctagtctaatagtgaatatagcttttgagtaaccatgctttgcctaactagttcatggtttcaatttcagccagattcttcagatagcaagtgtatatgtgactgagaacctggcaggaagtggttctcaacaaaatactggttctgtgtgggaaacagtggagaaatccatggatggacattyggatccaaaactgtgttggggaaccatatgccggtaccattctactccaaaaagtaactttgtgaaagaaatttcaaaacagcaccgtttccatacctgacagggaaaagctgttgtctccaggtagacagctgtgctcaggcagacttgttgcattagtgctttgttgtggctgtatgattttagcacagtctttatgaaagtgttctttaacctgcccttagtgcaattaacaactggccttttttgcagatctggtaagcattgctagcatacatccagggcctttctctgagtgyt

SEQ ID NO: 17983 - DNA, 459 bp, Chicken  19866894226496_2
yggatccaaaactgtgttggggaaccatatgccggtaccattctactccaaaaagtaactttgtgaaagaaatttcaaaacagcaccgtttccatacctgacagggaaaagctgttgtctccaggtagacagctgtgctcaggcagacttgttgcattagtgctttgttgtggctgtatgattttagcacagtctttatgaaagtgttctttaacctgcccttagtgcaattaacaactggccttttttgcagatctggtaagcattgctagcatacatccagggcctttctctgagtgytgcgtgcttcctagagctatcagcyaaagttagtaatacctattttgtcattcagtgttaacagaaatgatacagagtacattcagagaaggatctattgtataagataaagcctctcttatagtcactctgaagaataaccccatatgagaacagttc

SEQ ID NO: 17984 - DNA, 434 bp, Chicken  19866894226496_3
catatgccggtaccattctactccaaaaagtaactttgtgaaagaaatttcaaaacagcaccgtttccatacctgacagggaaaagctgttgtctccaggtagacagctgtgctcaggcagacttgttgcattagtgctttgttgtggctgtatgattttagcacagtctttatgaaagtgttctttaacctgcccttagtgcaattaacaactggccttttttgcagatctggtaagcattgctagcatacatccagggcctttctctgagtgytgcgtgcttcctagagctatcagcyaaagttagtaatacctattttgtcattcagtgttaacagaaatgatacagagtacattcagagaaggatctattgtataagataaagcctctcttatagtcactctgaagaataaccccatatgagaacagttc

SEQ ID NO: 17985 - DNA, 600 bp, Chicken  19866894226498_1
cttaagggcagcttcctaagtcagttatgtatttggggtctattattgtttgaataagagtgaacagacaagatcttaactgctgtcttccaaatatacacaagtttgtttagacaaggtacactgctgtattgattcctatctcagtgatattcttcttggttaatttgctaggaaaatgagtacaataaatattcatgaagagaataagtccataggcattcagacactacccatccaaaatggtatttttattattctctacaacaacctgaaaggagcctgtggcaaaaggggagrtcggcctcttctcccaggtaactagtaataaaacaagagggaatggcctcaagktgcaccagggaaggttcaagttggatattaggaaaaaattattctccaaaagagcagtcaggcactggaatgggctgctcagggaggctgctgagtcaccatccctggagatgttctagaaacatttagatatggtactaagcaacatggcttagcgagaaacactggtggtaggcagacagttggactagatgatcttaggggtcttttctaaccttaatgattctacaagtctattccatgatt

SEQ ID NO: 17986 - DNA, 600 bp, Chicken  19866894226498_2
taagagtgaacagacaagatcttaactgctgtcttccaaatatacacaagtttgtttagacaaggtacactgctgtattgattcctatctcagtgatattcttcttggttaatttgctaggaaaatgagtacaataaatattcatgaagagaataagtccataggcattcagacactacccatccaaaatggtatttttattattctctacaacaacctgaaaggagcctgtggcaaaaggggagrtcggcctcttctcccaggtaactagtaataaaacaagagggaatggcctcaagktgcaccagggaaggttcaagttggatattaggaaaaaattattctccaaaagagcagtcaggcactggaatgggctgctcagggaggctgctgagtcaccatccctggagatgttctagaaacatttagatatggtactaagcaacatggcttagcgagaaacactggtggtaggcagacagttggactagatgatcttaggggtcttttctaaccttaatgattctacaagtctattccatgattctataactgaaaattgtgtggggttgtttgtggcttaggtacatagccaaaagt

SEQ ID NO: 17987 - DNA, 599 bp, Chicken  19866894226506_1
  misc_feature (1)..(162): n is any nucleotide
nnnnnnnnnnnnnnnnnnnnnnnnnnnnnnnnnnnnnnnnnnnnnnnnnnnnnnnnnnnnnnnnnnnnnnnnnnnnnnnnnnnnnnnnnnnnnnnnnnnnnnnnnnnnnnnnnnnnnnnnnnnnnnnnnnnnnnnnnnnnnnnnnnnnnnnnnnnnnnnnnncccctcaaactcctttttgggagccttctttgtaatggtgctataccagcttcatactgctgtattgaagtgaaaccctgtcaactactctacagtgacaggaaaactatcaagatgaaaagaaggggctcttcaagrttttagatgggagagccaagatcctccaatgatataaaggagcttgatgttaccaactgtcatgatttttgccaagtcttaaagtatttggaacaaattcttggccccactgggatcgaaatactaaaacatgtgaacaacagtggggtttgatggtgattttaatatcatccatgagagattcatctaagtaaaaacttaaagtttccttccttcaaaaaataataaactttgatgatgcaaagggaacctagactggaacgaaatgttccaatgcaaacatcagatcatatagaata

SEQ ID NO: 17988 - DNA, 600 bp, Chicken  19866894226508_1
atctgtaaaaagtgcagttctgttcaaaatgtatttgtggagtctttctccttcagtgaagttgtttttgttcagccttcagcatcagtcccacatgaagacggcttcctcatgctctttcgtaaactcttttgctggtaacattattcatggtgcattcctggaaagaaatgcaaatttaatcagcttttaagtctcactgcatatttgtgagtcagaaggtagagaactacttatgcactgggagccaatgcaagaaagaatttgcatttctcctctttcaagaacaattgccaaaayggtgaaactcaatgttggaagcttcaaaaataaaagtctaaaatattcatagaagcgtaggactaaagcaacatcaaaggactgctttggcctccccagaagatctctagtctcttaaagaaggcttctggaacacccaaggagcattttggaactaggcagttgtctcttgtcccctcaccttctccatctgtggctcatcttctccatatgagtgtataacacatacacggagtcctacacaacttccagctgcatgtgtcatcctctgcattttaggctctgtcttcatctattttt

SEQ ID NO: 17989 - DNA, 600 bp, Chicken  19866894226512_1
gtacttaattcactcctagaggcagttcatttaaactattgcacaagcattttaaagttatttccattttttgtataagaaaatgaaatcagttcataaaatatccagaaagttctgcattttgctcacgctttcacaatgagttttggagggacagagaaagacagttctcattttaccaacagctttttagtgcagtagaaaataaattcgatgcttaacagccccacctcctggtgaaaatgatgaaaacaaaattggatttctgctggggacatccattctgtggcatttttttgyaatctttagcttgcaaaatgaaaacacgtttcttttttacctttacatgacagctctatagcacattaagaactttgttttgttttgctttgatcattgccatatattccctcagttcacagggataatatatttaaatcatagacattttttgcctccttaatgtttctcttaaaatatctgagcaatccattctatgttcttcgtgactctccttagacaaatccaatgctaaaagatcagaaagaaatgaataaacaaacaaacaaacaagaacgacaggatctgggaacttcttaa

SEQ ID NO: 17990 - DNA, 600 bp, Chicken  19866894226513_1
gttctgcggcttcactctaccacagcacagaacacacacttggccctcattcctcattcttctcatcgtgccaccaagccagaacctctctccccaaaaccggatgcttcagattaatctggaaaaaggctaagcagaaagagaaaactcagatgaagcaacagactgtttcatctccctgtgctatggcttcgacacagaagatgctaacaaaatgcatctgtaatacctccacttaaaaaagtaattttagatttgtagtttagaaaaataacttattagctaagcttttccccaccyttctttccatctgcgtacagccccagcaaaagacttcacgcaattcagtgcctaatggcatacaatttcagtcttcagtgctcaatcagcctctccaagcagaaaatatgtaaatgaagagttacaacacgaaaacactctactcacatagaggacttgtatttctgyattctcaaaaaatgcataaatgattcccaggcaaagtgataggctcactttgattatttattgttaatagttcttttaaaaaataattaattctgcatggaatgtaaaggggacatgattgtagtaatgata

SEQ ID NO: 17991 - DNA, 600 bp, Chicken  19866894226513_2
tttcatctccctgtgctatggcttcgacacagaagatgctaacaaaatgcatctgtaatacctccacttaaaaaagtaattttagatttgtagtttagaaaaataacttattagctaagcttttccccaccyttctttccatctgcgtacagccccagcaaaagacttcacgcaattcagtgcctaatggcatacaatttcagtcttcagtgctcaatcagcctctccaagcagaaaatatgtaaatgaagagttacaacacgaaaacactctactcacatagaggacttgtatttctgyattctcaaaaaatgcataaatgattcccaggcaaagtgataggctcactttgattatttattgttaatagttcttttaaaaaataattaattctgcatggaatgtaaaggggacatgattgtagtaatgatattactacaatttatgcagaaagtaagcttaaattctttacaactttttaaaggttgctttagaaaaactcatagaaacactgtaattgcatgcaagattgcatggctttttcttaatggtgtgtattaatttacatctcttttatctgcagaacacaagatcagagcc

SEQ ID NO: 17992 - DNA, 600 bp, Chicken  19866894226520_1
tgtactttagtaatgtggaagcttaatgtgccacagattggtctggcttctcactgtattctgctccgttgctttctagtaaaaatcatcagcacctttgggattttaatacagcctactagaatgtcaaatggatattggtcacatgcatggctactccagttgtgacttctgaagggaacacaggtgccttcatttatcactgcagtaataataattttaaatcaactttactaaaataactggcagtcttgagggcagagtgctgtgggcttaaatctcctcagttatatttctgcrctaattaggagcaattcaaatgaaattaatattgtactctacctttctagtttcacgtgaaatttgaatttaaagttatgtacacagagtttctacacacattcatgtaacttgtttgtcactggacatccattctttatgcgtttctgaagaacaacatgcattttttattattattctaattccttgctagcttatagatgaaagaaacctgtaaaacactattgttctccttcacatgttaattgggtttgttcttttctgtgattatgcctatgacttttaatttgcactggcatt

SEQ ID NO: 17993 - DNA, 599 bp, Chicken  19866894226541_1
  misc_feature (1)..(51): n is any nucleotide
nnnnnnnnnnnnnnnnnnnnnnnnnnnnnnnnnnnnnnnnnnnnnnnnnnntcccagctgtccccggagaagagagtggacacagggaccctgtgtctctgctccaccgggagacacacagccaggccccttgcattccccaccgaagccttcctgctgctcctccgccacttgcactcctcccatcccatcccagccccgcaggacgcaccgcccaggccacgcagccctgagcaccccacagccaaacctttctggagcaacaggagctgagcaggaacctccagagtgtgggagccrcaaggtgctcagagagctcgctgtgcgctcactggaagctaatccctgctcgcccygtcacccggcccaacgccaagctggcattagtgcacagcagtggcctttgttcggcagcacggggacaagagggccttgtgcacggccctgctgcaatgccagcyctcggggcagcctggcatgttgtgctttgggatgtgctggcaaggtgctgactagagctgcactgagctacgtgtttcgtgcaaataggaaggcaggcttttggactctgaaggttgctgcaggatgatgtcgaaagc

SEQ ID NO: 17994 - DNA, 600 bp, Chicken  19866894226541_2
gctgtccccggagaagagagtggacacagggaccctgtgtctctgctccaccgggagacacacagccaggccccttgcattccccaccgaagccttcctgctgctcctccgccacttgcactcctcccatcccatcccagccccgcaggacgcaccgcccaggccacgcagccctgagcaccccacagccaaacctttctggagcaacaggagctgagcaggaacctccagagtgtgggagccrcaaggtgctcagagagctcgctgtgcgctcactggaagctaatccctgctcgcccygtcacccggcccaacgccaagctggcattagtgcacagcagtggcctttgttcggcagcacggggacaagagggccttgtgcacggccctgctgcaatgccagcyctcggggcagcctggcatgttgtgctttgggatgtgctggcaaggtgctgactagagctgcactgagctacgtgtttcgtgcaaataggaaggcaggcttttggactctgaaggttgctgcaggatgatgtcgaaagctaaggctgctcccctaggaagacaaagcagctgtgtttccccacacagctgctggtc

SEQ ID NO: 17995 - DNA, 600 bp, Chicken  19866894226541_3
cctccgccacttgcactcctcccatcccatcccagccccgcaggacgcaccgcccaggccacgcagccctgagcaccccacagccaaacctttctggagcaacaggagctgagcaggaacctccagagtgtgggagccrcaaggtgctcagagagctcgctgtgcgctcactggaagctaatccctgctcgcccygtcacccggcccaacgccaagctggcattagtgcacagcagtggcctttgttcggcagcacggggacaagagggccttgtgcacggccctgctgcaatgccagcyctcggggcagcctggcatgttgtgctttgggatgtgctggcaaggtgctgactagagctgcactgagctacgtgtttcgtgcaaataggaaggcaggcttttggactctgaaggttgctgcaggatgatgtcgaaagctaaggctgctcccctaggaagacaaagcagctgtgtttccccacacagctgctggtcctccrgggtctccacaaggctcagcatcactcacagggtgccatgccccctccagctccatcagactgcggagacaagccctggacctgcaccaccaaatacctg

SEQ ID NO: 17996 - DNA, 600 bp, Chicken  19866894226541_4
ccggcccaacgccaagctggcattagtgcacagcagtggcctttgttcggcagcacggggacaagagggccttgtgcacggccctgctgcaatgccagcyctcggggcagcctggcatgttgtgctttgggatgtgctggcaaggtgctgactagagctgcactgagctacgtgtttcgtgcaaataggaaggcaggcttttggactctgaaggttgctgcaggatgatgtcgaaagctaaggctgctcccctaggaagacaaagcagctgtgtttccccacacagctgctggtcctccrgggtctccacaaggctcagcatcactcacagggtgccatgccccctccagctccatcagactgcggagacaagccctggacctgcaccaccaaatacctgcaagccttgtggtttggaaactcatgatccatctcccccagaactgaagcatagaaatccatctttttttaacacacccttcctgcctttccattaaaggctggctgctggtgcagctcttttagagcgctaaaaacagcctttgtcagactgtttgactagaggtcatatctcatgtagctgtaatcatagagtgaagg

SEQ ID NO: 17997 - DNA, 600 bp, Chicken  19866894226548_1
aatgaagcctggccgcctcttttccatttctcatttcccgtttgctgccctgcagtgagcactgcgtgctctgcccctggtaatggtcccactgatgtccctgggcacacccccttctccctgtgctgttattcctctcttgcagctcaggtctggaggatggcggctgatggagcacttcccagcagcgctggcacagctctgcagcctcctgacggttatcccctgttctgctctcctggggcaaggaccccggagctgtttgtctgtgggggcaggagggcaaactcccagcactcygcatcccaccgctgtgccccactccaggtcagccaaaggggcgacttctgttattggtttgtttttgtttttctttctctgaaactggcaaaaggtcccagcagaaaactgcagctccaggagtgcttctgccctccctgcaggaggccgacgtgcggctgctgcgcaggactgaccttgggcagctttgctatgagagccctccagaggagcagctcctgttcgtgcaggccgagctgtgatgccaacaccccgcgggcactgccatgggagcacgtggccatccccgcaccgcgctcc

SEQ ID NO: 17998 - DNA, 600 bp, Chicken  19866894226548_2
ctgttattggtttgtttttgtttttctttctctgaaactggcaaaaggtcccagcagaaaactgcagctccaggagtgcttctgccctccctgcaggaggccgacgtgcggctgctgcgcaggactgaccttgggcagctttgctatgagagccctccagaggagcagctcctgttcgtgcaggccgagctgtgatgccaacaccccgcgggcactgccatgggagcacgtggccatccccgcaccgcgctccttgcaggcagctccgtgcgccgcacgtgcagacatctcaccccctgsctgctcgggatgcctgcgattcctgctgcgaggcagttgttgtgctggggaggttgggattcctcgggctggggctgcgggctccatccgtgccctgtccccatggccgcacggctccaggccagctgcagtgctctgcaggccgggcattcctggcgttcccgaggggagaggagccgggatgctggggagcgggtctggtgtcagacccacactgccttaaccccatcrgggtgggagaagggagctctgttgctccccaaaccaccctgtggggtgagggtgcaggtggtggggttg

SEQ ID NO: 17999 - DNA, 600 bp, Chicken  19866894226548_3
ggccatccccgcaccgcgctccttgcaggcagctccgtgcgccgcacgtgcagacatctcaccccctgsctgctcgggatgcctgcgattcctgctgcgaggcagttgttgtgctggggaggttgggattcctcgggctggggctgcgggctccatccgtgccctgtccccatggccgcacggctccaggccagctgcagtgctctgcaggccgggcattcctggcgttcccgaggggagaggagccgggatgctggggagcgggtctggtgtcagacccacactgccttaaccccatcrgggtgggagaagggagctctgttgctccccaaaccaccctgtggggtgagggtgcaggtggtggggttggctgcatccggggcacttcttgcctttgctgcccggagggacaaagtgacaaagtgaaggtgacagctctgcaggcagtggtggggactggagcatcgtctgctgtgtcgtgtcctgtgcccgtggtttggggtttgctagggctgtgttggatgaccatcctggtgccatcccacctctcccctttcccaggaagggagagaagtgagtacagttggatgctcagcagct

SEQ ID NO: 18000 - DNA, 600 bp, Chicken  19866894226553_1
tctgcctcaaaaattccaacaaaaatgcacatattttttttatttaatctgagggttctttcagagaaacaggattgctactgtgtttttacatatagaagaataattacattaaaaaaaaatttgaagcagcagaattcactaccataattatctcctttaaatatgaaaaatgcatagaatggtatttatctaaatatatacagatgacaattacagtctggtttagattagaaataataggtagaagccttagatgaatctagaaatgtggaatatttgtaaaaataccagaatttwwaaaaaaaaatagttattaggtcattcttatctaaccaatcatgaatttctaacctgtactaacaacattttttggtttacagcaacagatgaatgacatatccaaaagattatggtggtggtattatcatttaagaaaatgagccagaggttcattacctatagcaaatgctagtcagtcagcccaaagtaggtctgcacttagtcattcaagctagagtatgaaaaatgtaaacggatattatggtagtcacattactcttttgtattctgttagctgagcaaattgattcaccttta

SEQ ID NO: 18001 - DNA, 600 bp, Chicken  19866894226553_2
ctgcctcaaaaattccaacaaaaatgcacatattttttttatttaatctgagggttctttcagagaaacaggattgctactgtgtttttacatatagaagaataattacattaaaaaaaaatttgaagcagcagaattcactaccataattatctcctttaaatatgaaaaatgcatagaatggtatttatctaaatatatacagatgacaattacagtctggtttagattagaaataataggtagaagccttagatgaatctagaaatgtggaatatttgtaaaaataccagaatttwwaaaaaaaaatagttattaggtcattcttatctaaccaatcatgaatttctaacctgtactaacaacattttttggtttacagcaacagatgaatgacatatccaaaagattatggtggtggtattatcatttaagaaaatgagccagaggttcattacctatagcaaatgctagtcagtcagcccaaagtaggtctgcacttagtcattcaagctagagtatgaaaaatgtaaacggatattatggtagtcacattactcttttgtattctgttagctgagcaaattgattcacctttac

SEQ ID NO: 18002 - DNA, 600 bp, Chicken  19866894226554_1
agaatgggatctgttaagaatttatgcagcgttcctactgaaataaacaatgtggttttcccacattttttctatgtagcactgtatcttgaaactctgtataatccaatgtggcaccagccattagtaatttatattactattacatgcaaataaattagagaatctgatttttaggtactctaactataccaatattagaaactattaaacataaatgtgcttgcagaatagaaaagaaaataggataacttttattttaggaaatgaatttatagcagttgtttcacaaaatgggaratgaacaggaaatgagtacaagagtccaaaatcactgaggtaactggaaagctaagaaatcacaatttgaagctgattgattgatgctttaatactgcttgcatcacgggatatttttgaaatatatttgagttaatcatcatgatcacccattgtgatgttggacagaaaattttagcaagaaatgagtcatgtgaagaggaatgctgttagagagatggcgtcygtctttttacatgtcctaactggagtatgggaaagattcaaatacagtgttagggataaaaataaaataaaagt

SEQ ID NO: 18003 - DNA, 600 bp, Chicken  19866894226554_2
cagaatagaaaagaaaataggataacttttattttaggaaatgaatttatagcagttgtttcacaaaatgggaratgaacaggaaatgagtacaagagtccaaaatcactgaggtaactggaaagctaagaaatcacaatttgaagctgattgattgatgctttaatactgcttgcatcacgggatatttttgaaatatatttgagttaatcatcatgatcacccattgtgatgttggacagaaaattttagcaagaaatgagtcatgtgaagaggaatgctgttagagagatggcgtcygtctttttacatgtcctaactggagtatgggaaagattcaaatacagtgttagggataaaaataaaataaaagtattaattcagaacatcatgtctgaaaagatctatatatgctttcaaaatacatcccacaaggtatttttaaaagtatgctaaagcttacagtaaagttgcactactcagttcaattgctattccctcctgatggggatgagtaggtagtcgagttttcagctttattgctttccttctaggttctcttcagctcctaaagcttgtcgtcatttccaagttagaagg

SEQ ID NO: 18004 - DNA, 600 bp, Chicken  19866894226559_1
attgaaatccacagcatttttgcttgcatgaagactccaggactcaaatagcaaaagttgcatgaaatactgccatctatagcttgcactgcaaaaaatctttgcagcgtaatttgggacagacagagaagcacagtgttttgcatcactgactatgtctataatgtctttcaacttatgatcagagcaaaacaatctgttccttctgcagactcagctgaagatattcgggaggtctgcccgaactgtccgctcctggcaaatctaaatgacactgatgtgttagcagctgtttccagygccctcaatgactacaacagcaaaaatcctgatgtctacctcatgctccttgagatcggaagagccgtaaaacaggtaactgctagaacaatgtctaccctgccatgcaaacagaataattcctctgtagtacttgagcagtgctagctagtcgtgtttacaatcagattgagcttgctttaaattgccctactgaattgcccatgatttccctagtgttttgtgtcatcttagccacagggttctctttgacttctgtgggagatgcagagctagaagccacaacatttgccttttatc

SEQ ID NO: 18005 - DNA, 600 bp, Chicken  19866894226560_1
aaaacaaaaaccatttgttctcaagtttctaaaatggagttcaagaaatggactgtaacattttcacagtgtgctgcagaagtggagtctggaggcggaatttgcttttgcagcgctgaccgcctgcagaagccaaccccagcagcagccaaggccattatctttgcagagcaagtcatcacataggaatacaggagagaaaataggcagcaacatccaggcaataaattcacctacttaattcaatgcaaagctccttttcttgacccaaaactttcagctggagacgcatcttacatwaacgttttccctgctatcatcagtgttcttttagggactcgagagatttcatgtattttaaatattgcagaaaatagtattataaagattttataaatgtggcacttaagcatgcagctcacctatacaaaatgcaacaaatgtgagcgtaggtgctttagaggtctgcactggcatttcagatacagagagaaaaaatagagctcagggtatctcagactctctccttcagggctcccacacacatccattgatgtgttcaggatcacttccctttggaaagtgctgtttcgttaagag

SEQ ID NO: 18006 - DNA, 600 bp, Chicken  19866894226565_1
actgctggttgcagatgcagtgcataacataaacttcatgcctagtcataatcaaggcattagtatcgttactgcagagagtgccccaaatatggcaacggggcaggctgctaacctcacgctgcttgctcagccaccacagcagttgcaaaacttgttgctttcagctcagcaggagcaagtggaacaaatccaaaacatcaatgtgatggcaaaccaaatagagactgctcagcctgaacaaatgcacgtcatcaccctttccaaggaagcactagaacatctccatgctcatcaagrgcaaaatgaagaaatccatttagcaggatcttcccatccagattagcacatgcagctggctcaggaatcaagtcaactgtctcactctagccaagatacagttycttctcattgaattagtgaagaatagaattaaaatgtacatatttctgaatccysccaggagtctgtgtcagtaaataagtcagctcatgagcatcctattcaagcacagcctttttaaaatgcttatttgtcactggagggctgggctttagcatgcttctcatccaagcagtgattacacacatcacactttct

SEQ ID NO: 18007 - DNA, 600 bp, Chicken  19866894226565_2
aggctgctaacctcacgctgcttgctcagccaccacagcagttgcaaaacttgttgctttcagctcagcaggagcaagtggaacaaatccaaaacatcaatgtgatggcaaaccaaatagagactgctcagcctgaacaaatgcacgtcatcaccctttccaaggaagcactagaacatctccatgctcatcaagrgcaaaatgaagaaatccatttagcaggatcttcccatccagattagcacatgcagctggctcaggaatcaagtcaactgtctcactctagccaagatacagttycttctcattgaattagtgaagaatagaattaaaatgtacatatttctgaatccysccaggagtctgtgtcagtaaataagtcagctcatgagcatcctattcaagcacagcctttttaaaatgcttatttgtcactggagggctgggctttagcatgcttctcatccaagcagtgattacacacatcacactttcttttctgcagcataatcttatctgaagatgctttggtgatttttggtgggtggctttccattttcttgaccttatttattttagacttttttactgttatcagtt

SEQ ID NO: 18008 - DNA, 600 bp, Chicken  19866894226565_3
tgctttcagctcagcaggagcaagtggaacaaatccaaaacatcaatgtgatggcaaaccaaatagagactgctcagcctgaacaaatgcacgtcatcaccctttccaaggaagcactagaacatctccatgctcatcaagrgcaaaatgaagaaatccatttagcaggatcttcccatccagattagcacatgcagctggctcaggaatcaagtcaactgtctcactctagccaagatacagttycttctcattgaattagtgaagaatagaattaaaatgtacatatttctgaatccysccaggagtctgtgtcagtaaataagtcagctcatgagcatcctattcaagcacagcctttttaaaatgcttatttgtcactggagggctgggctttagcatgcttctcatccaagcagtgattacacacatcacactttcttttctgcagcataatcttatctgaagatgctttggtgatttttggtgggtggctttccattttcttgaccttatttattttagacttttttactgttatcagttggtatttctccaccatgtagtccatacctcactagcgattaaagcttttttttt

SEQ ID NO: 18009 - DNA, 600 bp, Chicken  19866894226565_4
gctttcagctcagcaggagcaagtggaacaaatccaaaacatcaatgtgatggcaaaccaaatagagactgctcagcctgaacaaatgcacgtcatcaccctttccaaggaagcactagaacatctccatgctcatcaagrgcaaaatgaagaaatccatttagcaggatcttcccatccagattagcacatgcagctggctcaggaatcaagtcaactgtctcactctagccaagatacagttycttctcattgaattagtgaagaatagaattaaaatgtacatatttctgaatccysccaggagtctgtgtcagtaaataagtcagctcatgagcatcctattcaagcacagcctttttaaaatgcttatttgtcactggagggctgggctttagcatgcttctcatccaagcagtgattacacacatcacactttcttttctgcagcataatcttatctgaagatgctttggtgatttttggtgggtggctttccattttcttgaccttatttattttagacttttttactgttatcagttggtatttctccaccatgtagtccatacctcactagcgattaaagctttttttttc

SEQ ID NO: 18010 - DNA, 600 bp, Chicken  19866894226574_1
caagtagttcagtaaacaaattggcttttgtaatgtggaaccgtaggaatagatacaatttcaaaatcagctttatagataccaggatttagtttacagacaagagaaaattactgtcattgacaagtattttgtaacatgttcaaaatcaaattcactgttgtatggatagcttcgtcatttcaaagttacttagtatatactgtagttgatcagtgttggggaatggggagtaactaatatgattgtatattagacctgtagaattagggcagccagcaaaagtcactagttcaaaayagaattacttatgtgtatctggacataatctaaagctagacgaaaacctaaatgataaagattgatttcttcccacatctttctctctacaattgttttccccctccttcatggcaacaagtttatatatacataaggggtgcttttcatggtgaggttagtattgattgtgcaaatgtaagaatttgtgactagaactttaaaaaagtatagataagttggtttaggcctatgctaagcatagagcttttacttggaagagtgctgatctattttgttgacttggactgctacagagtc

SEQ ID NO: 18011 - DNA, 600 bp, Chicken  19866894226575_1
caaaatagtacaggtctgcctgttctagatattatagctatgtaaccaagtatgtttttttgttttttaaacaaaatttgtttagagcagggacaaaacagaatcatcatcaacatttcatggctttcacattcaacagttacatgtgttccttgagtacagcctataccaaagtcacagcccacttctgggcagagaccaatattcaagcacacaaataatcttcaaaaatcctctaacacaatgacccgtcagggtccacttatagtataaaagcttacagtttaaattgatcatacraagatccaatgctataatgtgtggaggcctttgaacacagcacactgcatcaccagcaaaacacctccaacccagcactgagtagagaggcacgccccaacaataccaaacagcagttgaactcaccctgtatcacaactgttcttacctcaaagaggatgtgaactctgaaaaagaagcccagccagtttctttggctggcataggttcttctgtactccacacatcagacccaacagaatccagattggtaccgtgagcagtctccatgggtacatcgaagttagctgaccaatttgg

SEQ ID NO: 18012 - DNA, 600 bp, Chicken  19866894226576_1
cacaatgtactccttaacggtctggaatggcttctgcataagaatgaggtatgttgttgttgagtgagactgaagtgttcagaaacttagaattgaatactctttaaatagctaaacagtgacttctgctgctcagggtacagctgcacaaacaaaagctgccctaattggagttggaatttgctgtgtgaagttacttaagagtaacttctacattaaaacttcgcattagaaatgtggaatctttctgtgcactcactgagaaataagctgctgtatatacatagagttagagtatgyaaatgagaagctgcctcagaatagctaacaggccataaattaacagctgcacataccatgtgtggttaaagaacccactacaatactttctctgtcaactcaattttattctgctctgagagaaaccatagcgtggaggtctctgaggttatatttgccttgtaaacagaatatatatcgtaaatctatgctttgtcatgggaaaaacctataccttcatataagtgcttttgaaaagcattcatatcgtatttaaactcaataccctttgttttcaggacrgtgtgaaatggaagttga

SEQ ID NO: 18013 - DNA, 600 bp, Chicken  19866894226576_2
catagagttagagtatgyaaatgagaagctgcctcagaatagctaacaggccataaattaacagctgcacataccatgtgtggttaaagaacccactacaatactttctctgtcaactcaattttattctgctctgagagaaaccatagcgtggaggtctctgaggttatatttgccttgtaaacagaatatatatcgtaaatctatgctttgtcatgggaaaaacctataccttcatataagtgcttttgaaaagcattcatatcgtatttaaactcaataccctttgttttcaggacrgtgtgaaatggaagttgatgacttatagaatgcacttgatctttctcctgtcagctgtcactgttatgtacttctgtctttcctcaccttaataaatgatttttaagaagaaaagcatacaaagcctaggaataatgaccagcctctacaactgcattgtctgcagttttaaatgttagaagatggtgattaggtcacttatagtaataaggtgcacagatgttgtaaatcagttgcaaaggaaggatgttgcagctccagtaggtgagaactgctcagtgtctgtgctaagaagccatc

SEQ ID NO: 18014 - DNA, 600 bp, Chicken  19866894226598_1
agagtcagtgatgcaaccacccattctgcacaccatcaaagggaagcagtgatgattaaatgcaggcaatttatttggacagcacaagctattcagagaaattaagatgtcaggagggcttcatgtacactatggcaagagaaatcatgatacagagcagttgttttctcttgttacgctgtgcttccacatcaggagatcaagcgggccataaggaaagaactacagtgctatagcagagctttggttaacattagaatattttctgatctccttggcaattctttcagttatcccttrttttttcatacgcagctcttgcaacaaattgcatagcttgtaaatgacaaagtagacacactctaatggacagggcaaaaaataaaaaaaaatcaatagtaggcggcattacatcctgcattatctttgtccaatgcctcaagaaaagcaagtcacttctaagcatacaactcctcctgcctgaaatgctaattcattcctgttgccactctacacaagaggactggatgtttttattttttccccttctgacccagaatgataactatcatgggagaagatctgcttgtaatcaatatc

SEQ ID NO: 18015 - DNA, 600 bp, Chicken  19866894226598_2
caagctattcagagaaattaagatgtcaggagggcttcatgtacactatggcaagagaaatcatgatacagagcagttgttttctcttgttacgctgtgcttccacatcaggagatcaagcgggccataaggaaagaactacagtgctatagcagagctttggttaacattagaatattttctgatctccttggcaattctttcagttatcccttrttttttcatacgcagctcttgcaacaaattgcatagcttgtaaatgacaaagtagacacactctaatggacagggcaaaaaatraaaaaaaatcaatagtaggcggcattacatcctgcattatctttgtccaatgcctcaagaaaagcaagtcacttctaagcatacaactcctcctgcctgaaatgctaattcattcctgttgccactctacacaagaggactggatgtttttattttttccccttctgacccagaatgataactatcatgggagaagatctgcttgtaatcaatatcggaggtttcctatggaaacttacagctgaggaactaagtgaaaaccagaacgtttcctgcttcctcagcaaaggctcagcctca

SEQ ID NO: 18016 - DNA, 600 bp, Chicken  19866894226606_1
ctgtgacaccaaagagctcctcaaagtatcaggctgtcccccaccgaaggaaagcgttagtccatctgccacaacccccagcagatcagaatcccatgccataggagctgcttcctttcactcagaaaatgctgttttcttggttggcttgtttggcgtgttggtttttgtgtgtgcgtgtgctttttctcccagaagaaaactagatgttttctcctcttcagctaaatgccaacacttaaactccctggtggaaatttcagttaactccattaaaatcccccagccattcctgctcartttttttgctgaagagcttgtcccctcaggagcaaagagacagatagacctgcttttctgtaacaaacctcacttatcagctataatcaggtgatattccaggccttgctctctactcagcactcaagtacacaacttctcaggctggcaagtctgttctagtcgtgccattgaggagaagggcaggtgaaagtcccctctctgcccttcagatgtgggaatgaggtcccttctcagttaactccaagatcatctcttatattttaccaaccgtggcttagtgtggatgcattcaggaga

SEQ ID NO: 18017 - DNA, 599 bp, Chicken  19866894226608_1
  misc_feature (1)..(147): n is any nucleotide
nnnnnnnnnnnnnnnnnnnnnnnnnnnnnnnnnnnnnnnnnnnnnnnnnnnnnnnnnnnnnnnnnnnnnnnnnnnnnnnnnnnnnnnnnnnnnnnnnnnnnnnnnnnnnnnnnnnnnnnnnnnnnnnnnnnnnnnnnnnnnnnnnnntttgcatatggaaaactgttcatttctaaaatgtatttagcagcagaaaagatggcaaatttaaaaaacggtgtaagtcattgcagctaacagaaaacagcaatttcatgtatttatgggctacaaatgtaattatttcatcagatattctgraattatgttaactaacatttctgatgtagcatgcagtcttttaattactgcaacatcaaaatataatttaaaaattgagttgtttgaaacagtttcaagctagatgacctgcatatccaaaaagtaggatatgagcctgtttgtttatctgttatctctataaaaatatctgctttttgtcagttctcatttagcgccattagatttagttcgtatttctctcagaagtggtaaatgtagaaattctacaaaggagataatttaaaattttaatatagcttgtaaaaatatttcctttt

SEQ ID NO: 18018 - DNA, 538 bp, Chicken  19866894226608_2
tgtttatctgttatctctataaaaatatctgctttttgtcagttctcatttagcgccattagatttagttcgtatttctctcagaagtggtaaatgtagaaattctacaaaggagataatttaaaattttaatatagcttgtaaaaatatttccttttttgttgacactgtggcagttaatctgaacaagtagctgttatttcagttttgacacatgtatctcatcatgttctctaaagtttttgtgattttttttttttccatttttttatacaacttcaatggggtttttttcctccrtttgctctaaatgttgttgattgctcttttccagttggaagattcatttagttttctgaaacatgagtagttcacgttggcaataatgagatttaaattattttcacaaaacaaagcttttcatggatttctttgatactcgtatgaagagttgtggtccattttgatgtgattgtggaatacgtcactgctggtatacatagtgggaagaattttaaaatacaacttttaatttcaa

SEQ ID NO: 18019 - DNA, 599 bp, Chicken  19866894226610_1
  misc_feature (1)..(168): n is any nucleotide
nnnnnnnnnnnnnnnnnnnnnnnnnnnnnnnnnnnnnnnnnnnnnnnnnnnnnnnnnnnnnnnnnnnnnnnnnnnnnnnnnnnnnnnnnnnnnnnnnnnnnnnnnnnnnnnnnnnnnnnnnnnnnnnnnnnnnnnnnnnnnnnnnnnnnnnnnnnnnnnnnnnnnnnncctaacctaaagagaagacatgatgcattgtcactgcatcagtggacaagggaagagccactgatatcacctatcttgacttcagtaaggcctttggcatggtagcccacaacgtccttctctccaaattgraaagatacagatttgataggtggactgttggatggatgaagaactggctgtagggtcaagtccagaggatgatggtcagtggctcaacgtctggatggagaatggtgatgagtggtgtcccccagggattgatgctggtgccaatactctttaatatcttcatcagtgacattgacagtggggtcaagcgcaccctcagcaagtttgtagatgacaccaagctgtggggtgcggtcgacacaccagaagaatggggtgccatccagagagagggacctagacaggcttgagcaatgggc

SEQ ID NO: 18020 - DNA, 599 bp, Chicken  19866894226612_1
  misc_feature (1)..(64): n is any nucleotide
nnnnnnnnnnnnnnnnnnnnnnnnnnnnnnnnnnnnnnnnnnnnnnnnnnnnnnnnnnnnnnnntttgtgcttggagccctcctcggcccatctcactgcactgcaccccttccccacacagaggaaccagccacctcttcccgacttcagcacctccgtgtagaaaggcaactcatggcaatggaacggccaagaaatgtggcacacggctcacggggacagcgaagaggttgggacactcaggtctgtgggtgatagcagcaccctgtcccacctcacacaggggctgcaacccaacmgaaaggcccttcctcagagcccctctgaccacgaatggcaggagcagcaygcctctggaagcgactggtttgctccagtagcctctttacaagcaccgagggacagctccgcgggaatcgctgtgattttaaaaggccacttataagctttaatgctgcgctgggggagagggtagggagaaggggggccagggagggtggctgcattgactgcttaggacttaaagctgtaaacctcttcttccctctctcgttgctgggacatttttattggcgagatgaagggagacagagcacag

SEQ ID NO: 18021 - DNA, 599 bp, Chicken  19866894226612_2
  misc_feature (1)..(14): n is any nucleotide
nnnnnnnnnnnnnntttgtgcttggagccctcctcggcccatctcactgcactgcaccccttccccacacagaggaaccagccacctcttcccgacttcagcacctccgtgtagaaaggcaactcatggcaatggaacggccaagaaatgtggcacacggctcacggggacagcgaagaggttgggacactcaggtctgtgggtgatagcagcaccctgtcccacctcacacaggggctgcaacccaacmgaaaggcccttcctcagagcccctctgaccacgaatggcaggagcagcaygcctctggaagcgactggtttgctccagtagcctctttacaagcaccgagggacagctccgcgggaatcgctgtgattttaaaaggccacttataagctttaatgctgcgctgggggagagggtagggagaaggggggccagggagggtggctgcattgactgcttaggacttaaagctgtaaacctcttcttccctctctcgttgctgggacatttttattggcgagatgaagggagacagagcacagctccacaacttgctcttcttctagagggtaatgacccagttagcagctct

SEQ ID NO: 18022 - DNA, 600 bp, Chicken  19866894226615_1
taatgatgaccaccagtgacacagcatcaacatttaagtggttaaaactctgttactctctgttactctgagatcaatttctatttttagtatgaagtcagggtatatcttgttatgtgaatgtggggccggaatccgagcacgcactttgaaataagtggaagttaaatgcctgtacatctctgtgattcttgacttgtgtcttgaacacaacatcaagagaagattatctgtattagtagtacctcttctacaaaaataattggacatttacagactgtggaaacaaattgggataaytgtttacttgaatttttgtccagaagcagggggaatctgtgccagccctcttaaaaatggatgttgtttcagtcagtaaaggtttgaggaaagccrgagtgaaaaaggaagagtgacaattttcttaactctaaagagcgttccactctactggctcgagtacataccagtcttcaaataaacagcctttctgttttgaagacctgcactcaataggaatctgagtaaaataagtttaagatgcctgcagctcccctctctataaatagcatagattctctcaatgaaacaaaaggcaga

SEQ ID NO: 18023 - DNA, 600 bp, Chicken  19866894226615_2
gtcagggtatatcttgttatgtgaatgtggggccggaatccgagcacgcactttgaaataagtggaagttaaatgcctgtacatctctgtgattcttgacttgtgtcttgaacacaacatcaagagaagattatctgtattagtagtacctcttctacaaaaataattggacatttacagactgtggaaacaaattgggataaytgtttacttgaatttttgtccagaagcagggggaatctgtgccagccctcttaaaaatggatgttgtttcagtcagtaaaggtttgaggaaagccrgagtgaaaaaggaagagtgacaattttcttaactctaaagagcgttccactctactggctcgagtacataccagtcttcaaataaacagcctttctgttttgaagacctgcactcaataggaatctgagtaaaataagtttaagatgcctgcagctcccctctctataaatagcatagattctctcaatgaaacaaaaggcagagagcaccagtaaaaggttgtgtttgcatatacagtgtaaactgaaatgccttggcttttagataaaatcccacactgacccagtgaggcgtgacat

SEQ ID NO: 18024 - DNA, 600 bp, Chicken  19866894226615_3
aataggaatctgagtaaaataagtttaagatgcctgcagctcccctctctataaatagcatagattctctcaatgaaacaaaaggcagagagcaccagtaaaaggttgtgtttgcatatacagtgtaaactgaaatgccttggcttttagataaaatcccacactgacccagtgaggcgtgacattgataaaactatgtacctagtacaatcagaacgtatgggttaaagacctttgcctaccacacagatagaagcctgtaatcaaaatcaaactcccacatcttgctcttaaaatctktgggataagtgtaaggtttaatgcaggtaatttttcaacagtggcagttatttttcgtagarttggaatgtgcctctttatcactgtgcagacactccatctcagttgcaacatgacagtgaagtttgtttaacacacagaaaggtgaataaaaggatcagtgtatttttaacctgtgtgaagatatcacttttcacatgattttatttgcaagtaaatcaagcacatcatttctgggttcctattgttcagagaaaatgtgatttctatctgatggcctctcataacattttaccttac

SEQ ID NO: 18025 - DNA, 600 bp, Chicken  19866894226615_4
gattctctcaatgaaacaaaaggcagagagcaccagtaaaaggttgtgtttgcatatacagtgtaaactgaaatgccttggcttttagataaaatcccacactgacccagtgaggcgtgacattgataaaactatgtacctagtacaatcagaacgtatgggttaaagacctttgcctaccacacagatagaagcctgtaatcaaaatcaaactcccacatcttgctcttaaaatctktgggataagtgtaaggtttaatgcaggtaatttttcaacagtggcagttatttttcgtagarttggaatgtgcctctttatcactgtgcagacactccatctcagttgcaacatgacagtgaagtttgtttaacacacagaaaggtgaataaaaggatcagtgtatttttaacctgtgtgaagatatcacttttcacatgattttatttgcaagtaaatcaagcacatcatttctgggttcctattgttcagagaaaatgtgatttctatctgatggcctctcataacattttaccttacgcgggaagctattgttggctgtttratcaaagtgccacgctgtttttacaagagatgactga

SEQ ID NO: 18026 - DNA, 600 bp, Chicken  19866894226615_5
ggtaatttttcaacagtggcagttatttttcgtagarttggaatgtgcctctttatcactgtgcagacactccatctcagttgcaacatgacagtgaagtttgtttaacacacagaaaggtgaataaaaggatcagtgtatttttaacctgtgtgaagatatcacttttcacatgattttatttgcaagtaaatcaagcacatcatttctgggttcctattgttcagagaaaatgtgatttctatctgatggcctctcataacattttaccttacgcgggaagctattgttggctgtttratcaaagtgccacgctgtttttacaagagatgactgatgagctgtatagacatagatcattgtcaaaagaagaaaataatggtggtaaatgcttttatcattttccaagttgttgcctagaaagcttttccattgatcagtgcagtacctagcggaacgtagaggtgattagatttgattaggacacactaaaacttgtcacattagttaaatacacagatattactgcattacagagtcatacaggcttgaaaccttaaagaaaaaaaaaaaagaaaaaggcatgccttctttgtgaaa

SEQ ID NO: 18027 - DNA, 600 bp, Chicken  19866894226615_6
attttaccttacgcgggaagctattgttggctgtttratcaaagtgccacgctgtttttacaagagatgactgatgagctgtatagacatagatcattgtcaaaagaagaaaataatggtggtaaatgcttttatcattttccaagttgttgcctagaaagcttttccattgatcagtgcagtacctagcggaacgtagaggtgattagatttgattaggacacactaaaacttgtcacattagttaaatacacagatattactgcattacagagtcatacaggcttgaaaccttaaagraaaaaaaaaaagaaaaaggcatgccttctttgtgaaatttcactttacttgtaagggaattcagaaatctgagactggtgttctcacctcattacttatatgtattttcctcatgctcccactttgcagtttggctgacttaaaaatctttttggaagkgtgcaaccagctgtatctgtgctttcaccaacgatgtccaacccttttagtctgcagtccaaacattttaaaaatgtcagacagccacagaatcagggcatttcatttgccttgttctcctttgcattcagatgacacaaa

SEQ ID NO: 18028 - DNA, 600 bp, Chicken  19866894226615_7
agcttttccattgatcagtgcagtacctagcggaacgtagaggtgattagatttgattaggacacactaaaacttgtcacattagttaaatacacagatattactgcattacagagtcatacaggcttgaaaccttaaagaaaaaaaaaaaagaaaaaggcatgccttctttgtgaaatttcactttacttgtaagggaattcagaaatctgagactggtgttctcacctcattacttatatgtattttcctcatgctcccactttgcagtttggctgacttaaaaatctttttggaagkgtgcaaccagctgtatctgtgctttcaccaacgatgtccaacccttttagtctgcagtccaaacattttaaaaatgtcagacagccacagaatcagggcatttcatttgccttgttctcctttgcattcagatgacacaaagaaaatggaaactgtctatgtctcttcagtcastgtgaagctgaagtaagccagttcttgtgcctcccttcctacagccccaaacacaggaggcttatggattacagagagggaacgtggttaatcagtctgttctccatctccctccagctggtgcat

SEQ ID NO: 18029 - DNA, 578 bp, Chicken  19866894226615_8
gaaatttcactttacttgtaagggaattcagaaatctgagactggtgttctcacctcattacttatatgtattttcctcatgctcccactttgcagtttggctgacttaaaaatctttttggaagkgtgcaaccagctgtatctgtgctttcaccaacgatgtccaacccttttagtctgcagtccaaacattttaaaaatgtcagacagccacagaatcagggcatttcatttgccttgttctcctttgcattcagatgacacaaagaaaatggaaactgtctatgtctcttcagtcastgtgaagctgaagtaagccagttcttgtgcctcccttcctacagccccaaacacaggaggcttatggattacagagagggaacgtggttaatcagtctgttctccatctccctccagctggtgcatggttctttggaaatcataggtaggggatacacgcaaggatgaccctcagactgctttttactggacaagaatgagaccatgaaacaatatcagatcatttttcagcttttcttggtctgttgtgaaagtagaagtaaagaagtaatccttat

SEQ ID NO: 18030 - DNA, 600 bp, Chicken  19866894226618_1
tcctcggtatgaggttaggtcaggaggagcacaggagcatgctgaacagcaaggtgttaaagggaaggaagggttcccagcctccccagcagcacgccatacctgggatcgtgaggtgggccatcctgagacagcagcaggaattcaatcatgttcccagacttctgcccatactccattagcacgctgatggggtgcttcccagagagcaggctcagctgagccgctgcaggtgacagctctggctctgaatgcaaaggctgcgacgaggagattgaggaggtgggtttcagaacaagmgccgttggatcgaactcaggaagaggacgacaagactcacctgttccagctcagagctgtcagacacaaatggcatktcagtgtgaggtccgtcgggactcccatcctctgcttcttgcatcaggatcctcatggcgttygctgctgcctcctgcttggcgagttttttgcttcctgcttctgctggtgggaacgggcgcccattaatcactgcctggaacttaaaccttcrgaaggaaaccaacaaagagacaaaartcaacgagggaaatcaagtggtgtcctcagagcaagcgtttg

SEQ ID NO: 18031 - DNA, 600 bp, Chicken  19866894226618_2
cagcctccccagcagcacgccatacctgggatcgtgaggtgggccatcctgagacagcagcaggaattcaatcatgttcccagacttctgcccatactccattagcacgctgatggggtgcttcccagagagcaggctcagctgagccgctgcaggtgacagctctggctctgaatgcaaaggctgcgacgaggagattgaggaggtgggtttcagaacaagmgccgttggatcgaactcaggaagaggacgacaagactcacctgttccagctcagagctgtcagacacaaatggcatktcagtgtgaggtccgtcgggactcccatcctctgcttcttgcatcaggatcctcatggcgttygctgctgcctcctgcttggcgagttttttgcttcctgcttctgctggtgggaacgggcgcccattaatcactgcctggaacttaaaccttcrgaaggaaaccaacaaagagacaaaartcaacgagggaaatcaagtggtgtcctcagagcaagcgtttgctcttggaagtcgatgagaaggagcaggcagctccgggctgggagcaaacctttgctgctacgtgcagaaaggagag

SEQ ID NO: 18032 - DNA, 600 bp, Chicken  19866894226618_3
gaattcaatcatgttcccagacttctgcccatactccattagcacgctgatggggtgcttcccagagagcaggctcagctgagccgctgcaggtgacagctctggctctgaatgcaaaggctgcgacgaggagattgaggaggtgggtttcagaacaagmgccgttggatcgaactcaggaagaggacgacaagactcacctgttccagctcagagctgtcagacacaaatggcatktcagtgtgaggtccgtcgggactcccatcctctgcttcttgcatcaggatcctcatggcgttygctgctgcctcctgcttggcgagttttttgcttcctgcttctgctggtgggaacgggcgcccattaatcactgcctggaacttaaaccttcrgaaggaaaccaacaaagagacaaaartcaacgagggaaatcaagtggtgtcctcagagcaagcgtttgctcttggaagtcgatgagaaggagcaggcagctccgggctgggagcaaacctttgctgctacgtgcagaaaggagagctccgtgtctgggtctcacttcacagcatctccagagctgcttaggagagatgcagcagctct

SEQ ID NO: 18033 - DNA, 572 bp, Chicken  19866894226618_4
gtgacagctctggctctgaatgcaaaggctgcgacgaggagattgaggaggtgggtttcagaacaagmgccgttggatcgaactcaggaagaggacgacaagactcacctgttccagctcagagctgtcagacacaaatggcatktcagtgtgaggtccgtcgggactcccatcctctgcttcttgcatcaggatcctcatggcgttygctgctgcctcctgcttggcgagttttttgcttcctgcttctgctggtgggaacgggcgcccattaatcactgcctggaacttaaaccttcrgaaggaaaccaacaaagagacaaaartcaacgagggaaatcaagtggtgtcctcagagcaagcgtttgctcttggaagtcgatgagaaggagcaggcagctccgggctgggagcaaacctttgctgctacgtgcagaaaggagagctccgtgtctgggtctcacttcacagcatctccagagctgcttaggagagatgcagcagctctagatttcatcctgcaggaaaggaacgagctgccttgttctgcaggccacacagacagctggaaa

SEQ ID NO: 18034 - DNA, 546 bp, Chicken  19866894226618_5
ggctgcgacgaggagattgaggaggtgggtttcagaacaagmgccgttggatcgaactcaggaagaggacgacaagactcacctgttccagctcagagctgtcagacacaaatggcatktcagtgtgaggtccgtcgggactcccatcctctgcttcttgcatcaggatcctcatggcgttygctgctgcctcctgcttggcgagttttttgcttcctgcttctgctggtgggaacgggcgcccattaatcactgcctggaacttaaaccttcrgaaggaaaccaacaaagagacaaaartcaacgagggaaatcaagtggtgtcctcagagcaagcgtttgctcttggaagtcgatgagaaggagcaggcagctccgggctgggagcaaacctttgctgctacgtgcagaaaggagagctccgtgtctgggtctcacttcacagcatctccagagctgcttaggagagatgcagcagctctagatttcatcctgcaggaaaggaacgagctgccttgttctgcaggccacacagacagctggaaa

SEQ ID NO: 18035 - DNA, 600 bp, Chicken  19866894226622_1
acctgaggccttccagtggtaagcagcttctttcctttacttttgtgtctgtggcttgcagtccaggacttcactgctatgcgtcactgctacaccttccattttgttacagtggcaaaatcagaaattgcaggttacgactgctatgaacctagaacatctccaaatgcagcctgggaactgcctttaactgcacacaatacatgccatcaatattgtaatgtacaatgctctctgctgtattaaaagcccttttagccatgctggctctgtttgaacatatttgctatgttttctaamttctgttgcacctttctgcaaatctgttgtggtgtttcttgtaacagccacttgaaggtgtgactgtctgccattatcattcagatgcagataaataatacctagaagcttgaaacattagggactgctcagccctacagtacgtgcgtgtgcctcctgctgtgggcgtagggcagagcggctgctcctacagcaggaggctgtactgcagatcttctagaatcccttccaattgatgttttgtaacttttatgctacttgaaagacctccgccttgaacgtgtgaggtttgtgtgcctc

SEQ ID NO: 18036 - DNA, 600 bp, Chicken  19866894226626_1
ttaaagcatacaatctgataactagcacacctacctgtagttatagatattcattttgtactattgtgttttacttacaaagcatactcaatattacaccacagcagcaagctgctgaagaatgcctcacctactggccaacagaaagcacttggaacaccttttccagaagtcagggcagaactaagaatcagaactaagggcataagggcataggaaaatgctttccaggtgctatgttttagtttatcagttacctggttgctacatcagttgcagtagattagaaaaactctactyttagttgaaaatctggaccatatacgcatagcacaagttctttttttttttttttaaaccaactgatcccttcaagttacttcttgtgttctccaagagcatggggctttgtaaattaaacaatgcctagtggaagggctgacagagaacactatcaaccctcatgataaaacaagactgagttggtggaagtagcagctttcttagcatcatgcactgggcttcagctgcattatctgctgcacaaacaactgaaacatttcctggagaaaataggaacttgaagtaagagctctgtcc

SEQ ID NO: 18037 - DNA, 599 bp, Chicken  19866894226632_1
  misc_feature (1)..(186): n is any nucleotide
nnnnnnnnnnnnnnnnnnnnnnnnnnnnnnnnnnnnnnnnnnnnnnnnnnnnnnnnnnnnnnnnnnnnnnnnnnnnnnnnnnnnnnnnnnnnnnnnnnnnnnnnnnnnnnnnnnnnnnnnnnnnnnnnnnnnnnnnnnnnnnnnnnnnnnnnnnnnnnnnnnnnnnnnnnnnnnnnnnnnnnnnnnctctctgactataggcacaatttggtttccagagtataccttctttgtgccttctttgaagccatagcgccatttctgtagagggcagaagagagcagctgtggtaacatttgrtatgttgggagagtcccagtgagatacaacagaagggccaggtgaaagaataggttgtggggacaaaaggaagacgtaagtagtaattccaggttttagggcaccacaatcttaattacatctcctcataatctgcctctggcagggaaaggaatccagcgtgtctctcttagctgtggaattcattctctttttgtgtctgtgtgctctgtttttaaggtaaaagtggaattgcaggtgcagttgcctcatatgtatccccamgtggctcctcagctttttgcaagatcaaatgcact

SEQ ID NO: 18038 - DNA, 600 bp, Chicken  19866894226632_2
tagagggcagaagagagcagctgtggtaacatttgrtatgttgggagagtcccagtgagatacaacagaagggccaggtgaaagaataggttgtggggacaaaaggaagacgtaagtagtaattccaggttttagggcaccacaatcttaattacatctcctcataatctgcctctggcagggaaaggaatccagcgtgtctctcttagctgtggaattcattctctttttgtgtctgtgtgctctgtttttaaggtaaaagtggaattgcaggtgcagttgcctcatatgtatccccamgtggctcctcagctttttgcaagatcaaatgcactgcacaggcagcagcagttgcagctcaacactcgtctcacttctcacatcagctctttggattcaggtgaactgtgcatatgtgaggctgtgcagtggctgaaggagaacagcctgccctatttggaaaacagtaaggtctctgctgaaggcgtttcaaaggaaacagcarctaaagaaacaattcaacgtatgtggatctacagccatcacatatacaggcaggagttgaggaagaagatcttygagtgtgcgaagaaattaaac

SEQ ID NO: 18039 - DNA, 600 bp, Chicken  19866894226632_3
ttagctgtggaattcattctctttttgtgtctgtgtgctctgtttttaaggtaaaagtggaattgcaggtgcagttgcctcatatgtatccccamgtggctcctcagctttttgcaagatcaaatgcactgcacaggcagcagcagttgcagctcaacactcgtctcacttctcacatcagctctttggattcaggtgaactgtgcatatgtgaggctgtgcagtggctgaaggagaacagcctgccctatttggaaaacagtaaggtctctgctgaaggcgtttcaaaggaaacagcarctaaagaaacaattcaacgtatgtggatctacagccatcacatatacaggcaggagttgaggaagaagatcttygagtgtgcgaagaaattaaacctgactggcttctgcctgacaggaaaacctggggtgatctgtgtggagggcatcagagaaaactgtgaggagttctggcgtgttatcaggtatcccaactggaagcatatctcatgcaaacatgtggagactgtagaagcagagggaagcagtgatcatctgcgcctctttcgagcttttgaagacttgcagtttcaggcccatg

SEQ ID NO: 18040 - DNA, 600 bp, Chicken  19866894226632_4
ttgcctcatatgtatccccamgtggctcctcagctttttgcaagatcaaatgcactgcacaggcagcagcagttgcagctcaacactcgtctcacttctcacatcagctctttggattcaggtgaactgtgcatatgtgaggctgtgcagtggctgaaggagaacagcctgccctatttggaaaacagtaaggtctctgctgaaggcgtttcaaaggaaacagcarctaaagaaacaattcaacgtatgtggatctacagccatcacatatacaggcaggagttgaggaagaagatcttygagtgtgcgaagaaattaaacctgactggcttctgcctgacaggaaaacctggggtgatctgtgtggagggcatcagagaaaactgtgaggagttctggcgtgttatcaggtatcccaactggaagcatatctcatgcaaacatgtggagactgtagaagcagagggaagcagtgatcatctgcgcctctttcgagcttttgaagacttgcagtttcaggcccatggcgattatggcctgaggaacgactatcacatggatctgggccagttccttgaattcctgaaacagcatcaaagt

SEQ ID NO: 18041 - DNA, 600 bp, Chicken  19866894226632_5
ggcttctgcctgacaggaaaacctggggtgatctgtgtggagggcatcagagaaaactgtgaggagttctggcgtgttatcaggtatcccaactggaagcatatctcatgcaaacatgtggagactgtagaagcagagggaagcagtgatcatctgcgcctctttcgagcttttgaagacttgcagtttcaggcccatggcgattatggcctgaggaacgactatcacatggatctgggccagttccttgaattcctgaaacagcatcaaagtggacatatttttcagattttatttggygttgaaggcaaacttgcagacaaataagagggraaaaaaaagcatgtaaaagaatgctaaccttggacagcaagagatgaagctgacattgacatttgtccctaagcyatggctgctgtgaaaaggggaaattcagtgttgaacacagaacagttcaagtagatgttcctggctctgaattctgaattgcagtgtattttttgaaagaggtgcttgtttacttattttcggagatcttaaaagcagcatttttcactgagcaaagcagcatttctcacttctctcaaagaagtgctggca

SEQ ID NO: 18042 - DNA, 600 bp, Chicken  19866894226632_6
tgtgtggagggcatcagagaaaactgtgaggagttctggcgtgttatcaggtatcccaactggaagcatatctcatgcaaacatgtggagactgtagaagcagagggaagcagtgatcatctgcgcctctttcgagcttttgaagacttgcagtttcaggcccatggcgattatggcctgaggaacgactatcacatggatctgggccagttccttgaattcctgaaacagcatcaaagtggacatatttttcagattttatttggygttgaaggcaaacttgcagacaaataagagggraaaaaaaagcatgtaaaagaatgctaaccttggacagcaagagatgaagctgacattgacatttgtccctaagcyatggctgctgtgaaaaggggaaattcagtgttgaacacagaacagttcaagtagatgttcctggctctgaattctgaattgcagtgtattttttgaaagaggtgcttgtttacttattttcggagatcttaaaagcagcatttttcactgagcaaagcagcatttctcacttctctcaaagaagtgctggcaaggtgataaaaatcctaggtggtgctatcccga

SEQ ID NO: 18043 - DNA, 600 bp, Chicken  19866894226632_7
gtgtggagggcatcagagaaaactgtgaggagttctggcgtgttatcaggtatcccaactggaagcatatctcatgcaaacatgtggagactgtagaagcagagggaagcagtgatcatctgcgcctctttcgagcttttgaagacttgcagtttcaggcccatggcgattatggcctgaggaacgactatcacatggatctgggccagttccttgaattcctgaaacagcatcaaagtggacatatttttcagattttatttggygttgaaggcaaacttgcagacaaataagagggrraaaaaaagcatgtaaaagaatgctaaccttggacagcaagagatgaagctgacattgacatttgtccctaagcyatggctgctgtgaaaaggggaaattcagtgttgaacacagaacagttcaagtagatgttcctggctctgaattctgaattgcagtgtattttttgaaagaggtgcttgtttacttattttcggagatcttaaaagcagcatttttcactgagcaaagcagcatttctcacttctctcaaagaagtgctggcaaggtgataaaaatcctaggtggtgctatcccgaa

SEQ ID NO: 18044 - DNA, 600 bp, Chicken  19866894226632_8
tgcaaacatgtggagactgtagaagcagagggaagcagtgatcatctgcgcctctttcgagcttttgaagacttgcagtttcaggcccatggcgattatggcctgaggaacgactatcacatggatctgggccagttccttgaattcctgaaacagcatcaaagtggacatatttttcagattttatttggygttgaaggcaaacttgcagacaaataagagggraaaaaaaagcatgtaaaagaatgctaaccttggacagcaagagatgaagctgacattgacatttgtccctaagcyatggctgctgtgaaaaggggaaattcagtgttgaacacagaacagttcaagtagatgttcctggctctgaattctgaattgcagtgtattttttgaaagaggtgcttgtttacttattttcggagatcttaaaagcagcatttttcactgagcaaagcagcatttctcacttctctcaaagaagtgctggcaaggtgataaaaatcctaggtggtgctatcccgaattacactgttctgtaatcatccctcctgtgctttgttactaagctgaggtgcagagctttagttaacttcttca

SEQ ID NO: 18045 - DNA, 600 bp, Chicken  19866894226634_1
acttgttttattgactgtgtcacaattcaatccatttccagcctgacatttctggtccttcctctctctcaaagcttttctttacacagcagctctgttccccaaagggttggtggtttttctttctttctttctttctttttttttttttccttgctgcaattcaaaacctctggaggatttgtgttttctctcagcctgagctggggctgcaggtagaggttggcatcagtggcgataccatggggacacgtgccacagggcatcctgctgttgccccctatccgcgcctctcatgcrgagcctcatgcaattttatattcaatttcccttctcgcaggtgacaaaatggaattataaatgttgcctctaatgaaatcaactcctggtgtttggctgggagcaaaggttgcagcaccatggagagtgcaggagagggggtgggctgctgctggggacatccaagggcccggagcagtgggttgtgctggggacactgcatgctggcatctgctgcctgctgctggtccctgctgcaagccagcccacgatggcttcttgtcttatcctgcccgttcacatcagcagctctccaggaca

SEQ ID NO: 18046 - DNA, 600 bp, Chicken  19866894226634_2
gtgagagcctttaggctccaaccaatgataacaacagtaactgaatttgatacatatctccaccgtctggagatgaagaaagtctggtgatgacagcttggaatggaaaaacagtctttcaaattaaatcctgcctgggcttggggaaattggacctgttgttcttggggtatagctgcaaaatggctcaacccaacacgggagcccagagctacgcatgcagagatgcatccatgggtgaacagcaaagagctgagcagagctgggatgggaacgtaaagggttgaaatgagcaccctrttttcagccttgcgccatcccccgttcctccaagagaaatattcaccacggtacagcattgcaaagttcactattaaatatttaattcgcacttaacaactcaatacattcggcgctatcaaagggtccggggcttgctcccagcctgctctgattaacaaagtacctggccagcaaagatctgctgatccagtcacccagggctttgttacacgctgttcagtgccggtggagaggcagcattaactaggaagcatcgatttcagcattagccggcttttacattcgaaagcagacaat

SEQ ID NO: 18047 - DNA, 600 bp, Chicken  19866894226638_1
aaaaaatatgtaatatttacttagctcttctgatagacagcaacgcctgcaatcttctatattgtgctcagtcatagagagacaaagttttgaggaaatactgcaggcattcaggtagattttctacacacacaattctatattcattcttcagaagcaatccacaccatctcttgattaaggtttatgctcccaggcacttggtaggaagaatctcctgaaagagttcctactgcccagatgattaatcaaactcagtggctccatcgtattgaggtggtatgaaaagagacagcgttrgatacatcaagaaatacaatgtgcattgagaagccagtaacaatgatgaactcctcggtctctaatgagtggacaaagttcatgtgctccatcactgcaaccttcactgttaatggagaaagtgtcacacggtgccattttctgttccctttgtgatctttgttacagcagcaatttatcagaactctggacagaggagcctctttgtcctgtgagcagcatgccactgctatttccacatcctaaaaataccttgtgactagataattctgttttcctctcagatagcaagcacaagca

SEQ ID NO: 18048 - DNA, 600 bp, Chicken  19866894226642_1
tctgtttttccacagaattcctacctcatgcaggaggcacataatgagtagctattaaatacattgctttacccttatcatatgtggcccaaagccctacttactgcagacgttttatattcttgtccaaaggcagagttattcatttcttcggaagtttttgtaatgcctgtttctctaactttttcaacaatgcaaattccagtgtttcctaacttaaagtgcagtcttaatattcttttaacgtcattgtgtataattataggtatgcatgtgtatttatacggtgtaatgtgaacraacaaataggtgtatataaaggttcttaaaactttgttctgtaagctgtgagaaacacaaagttatgtgagggcacaaagagctctaatagtgactggcaagaagagaaagcaaagatattctgtactatttttaaccattgtgttacatcatgcaattttgcagagattagtcaccatatcaaaacgttgatggaaataatagtgaaaaggagttggcgaacttcaaacgcatatgaggtaactctgtaagagttacaaatgacttctggcattttaaggtgaaatggaaaaactacag

SEQ ID NO: 18049 - DNA, 600 bp, Chicken  19866894226651_1
tgcatttttagcctctgagatcatttagtactttactgtattggagcagtcgctgtttcctgcattaaacagcgttgtatgcagtgtgcctgccacagcatttgcagctgcttagcatgagcctgggtcctaagacacgtgccacttaaagcaagtgactgtgtctattgccaagagcctcaaatccactcacggttagtgtgccttctgcgcacttagctcagcttagtctagcttgtttacaaagagataaggcaatgcatgcactgctgggactgcgctgacataggaaatgagccwctggatctgtcyccgttaaccagatccgtgctctcttgcacaacatagcgaggaaaggctggctgttgtgaacagtgagccctcactttgacaagcgccagatggtccgacttctttcaaattcctcccggtccagctgcaccccttcctaaagttttgttgtggttttttggttttttttcttcacttggagtgttcagcagcccggccggctctccccatcccatgccagcccctgtcccctttgtcctgccagcagtgccaacaggggcacgctgtcagctcgcrtgcggctgtgcc

SEQ ID NO: 18050 - DNA, 600 bp, Chicken  19866894226651_2
ctctgagatcatttagtactttactgtattggagcagtcgctgtttcctgcattaaacagcgttgtatgcagtgtgcctgccacagcatttgcagctgcttagcatgagcctgggtcctaagacacgtgccacttaaagcaagtgactgtgtctattgccaagagcctcaaatccactcacggttagtgtgccttctgcgcacttagctcagcttagtctagcttgtttacaaagagataaggcaatgcatgcactgctgggactgcgctgacataggaaatgagccwctggatctgtcyccgttaaccagatccgtgctctcttgcacaacatagcgaggaaaggctggctgttgtgaacagtgagccctcactttgacaagcgccagatggtccgacttctttcaaattcctcccggtccagctgcaccccttcctaaagttttgttgtggttttttggttttttttcttcacttggagtgttcagcagcccggccggctctccccatcccatgccagcccctgtcccctttgtcctgccagcagtgccaacaggggcacgctgtcagctcgcrtgcggctgtgccacagcacaaagg

SEQ ID NO: 18051 - DNA, 427 bp, Chicken  19866894226651_3
ggaaatgagccwctggatctgtcyccgttaaccagatccgtgctctcttgcacaacatagcgaggaaaggctggctgttgtgaacagtgagccctcactttgacaagcgccagatggtccgacttctttcaaattcctcccggtccagctgcaccccttcctaaagttttgttgtggttttttggttttttttcttcacttggagtgttcagcagcccggccggctctccccatcccatgccagcccctgtcccctttgtcctgccagcagtgccaacaggggcacgctgtcagctcgcrtgcggctgtgccacagcacaaaggggccrggagcgtgttcttccaagcgcatgctgctgccggtcagcgtgggcaccgggccagctgggggaaagccagagctattcacatgttaacgtgaagctgg

SEQ ID NO: 18052 - DNA, 398 bp, Chicken  19866894226651_4
aaccagatccgtgctctcttgcacaacatagcgaggaaaggctggctgttgtgaacagtgagccctcactttgacaagcgccagatggtccgacttctttcaaattcctcccggtccagctgcaccccttcctaaagttttgttgtggttttttggttttttttcttcacttggagtgttcagcagcccggccggctctccccatcccatgccagcccctgtcccctttgtcctgccagcagtgccaacaggggcacgctgtcagctcgcrtgcggctgtgccacagcacaaaggggccrggagcgtgttcttccaagcgcatgctgctgccggtcagcgtgggcaccgggccagctgggggaaagccagagctattcacatgttaacgtgaagctgg

SEQ ID NO: 18053 - DNA, 600 bp, Chicken  19866894226652_1
ggattacgactcagtggtcaagtatgcacctgccatccgaatattaccagaccagagactacgctggaaacaaaggtggtgatccaaatcttccttccctgcctatccagtccttcttttctctttgctctcttttcatcttgcattagaatgtaacacaagacatatcaccacagcttatcaccaataagctacagatatatgaatacatacacactctgtgtcttttgctaagtatagtagggtgacacaaataaacatttaatcaattgtttagtgtcacttcattttaatttagcmtgagggaagggaaaagggaaagccatagtttgtgcagcactgggagcagcattaggggcagcccagcatgaaaaacatgtggtacaacaagcagwggcattgatgttttgaacagatgaccttggcatcaggtctttcaattcaaacatctgaccccccaaaattaataatgtgccacaatacccaatttctgctgaggtgggatttctgaagttatactggatttggaaaacaataaattatctctctcactcacaattgtttactctgcacatgctcaacttttacagtttaactctc

SEQ ID NO: 18054 - DNA, 600 bp, Chicken  19866894226652_2
tccctgcctatccagtccttcttttctctttgctctcttttcatcttgcattagaatgtaacacaagacatatcaccacagcttatcaccaataagctacagatatatgaatacatacacactctgtgtcttttgctaagtatagtagggtgacacaaataaacatttaatcaattgtttagtgtcacttcattttaatttagcmtgagggaagggaaaagggaaagccatagtttgtgcagcactgggagcagcattaggggcagcccagcatgaaaaacatgtggtacaacaagcagwggcattgatgttttgaacagatgaccttggcatcaggtctttcaattcaaacatctgaccccccaaaattaataatgtgccacaatacccaatttctgctgaggtgggatttctgaagttatactggatttggaaaacaataaattatctctctcactcacaattgtttactctgcacatgctcaacttttacagtttaactctccaaatatgtgaaattgcgccaatgtaaaatcagactctaattaaagcaactttccctaamaaagtggaggaagtaggagcagtactgtggctacc

SEQ ID NO: 18055 - DNA, 600 bp, Chicken  19866894226652_3
gcccagcatgaaaaacatgtggtacaacaagcagwggcattgatgttttgaacagatgaccttggcatcaggtctttcaattcaaacatctgaccccccaaaattaataatgtgccacaatacccaatttctgctgaggtgggatttctgaagttatactggatttggaaaacaataaattatctctctcactcacaattgtttactctgcacatgctcaacttttacagtttaactctccaaatatgtgaaattgcgccaatgtaaaatcagactctaattaaagcaactttccctaamaaagtggaggaagtaggagcagtactgtggctacctactttctaacttagcagaatttaaagaaacagaataatgatattctgaagagaaaagtgacttttgtctttagtccgagcagttaagcaagttgagaaaatatatcagggacagcctgtgccacctggaagatcttttaatttactagaagcaatcctaaagaggactgactgccccctctgaaggagttgcaccaaaacagctagaaaatcatatgcctatctaacaggaattgaacaaaaatatgttgttaattgaagaaca

SEQ ID NO: 18056 - DNA, 599 bp, Chicken  19866894226656_1
  misc_feature (1)..(90): n is any nucleotide
nnnnnnnnnnnnnnnnnnnnnnnnnnnnnnnnnnnnnnnnnnnnnnnnnnnnnnnnnnnnnnnnnnnnnnnnnnnnnnnnnnnnnnnnnntgcagctgaaggtgacatttattatgtgcagattttaagtggttaggtgctgtgcaagtaataactaatgagcaagtcaaacaatagataatctacacagctgagagcttccaggtgccaataagaaaactgtaacaccttaaaaaagaatgtgttttcaacagccattagcataaaaacaagacttggcacagctacacatgatacttygaggttgattatataattaaaggcataaggtgacaatcgtaggcaaaaatgatcaaggaacccaagstgaatgagattatttctacagaatcagagcagctctggttctgtggcccagaagaggcaaagtacccaccaacctgcactgggatcttggagctatcagtgacatccaaatactgccctttagaccagcaccaacacagcattattctcaactttcacactatccagccactaccaaatgagccaggctagctgccagctgcaccctgcaaarcataatacaagatttaatg

SEQ ID NO: 18057 - DNA, 599 bp, Chicken  19866894226656_2
  misc_feature (1)..(23): n is any nucleotide
nnnnnnnnnnnnnnnnnnnnnnntgcagctgaaggtgacatttattatgtgcagattttaagtggttaggtgctgtgcaagtaataactaatgagcaagtcaaacaatagataatctacacagctgagagcttccaggtgccaataagaaaactgtaacaccttaaaaaagaatgtgttttcaacagccattagcataaaaacaagacttggcacagctacacatgatacttygaggttgattatataattaaaggcataaggtgacaatcgtaggcaaaaatgatcaaggaacccaagstgaatgagattatttctacagaatcagagcagctctggttctgtggcccagaagaggcaaagtacccaccaacctgcactgggatcttggagctatcagtgacatccaaatactgccctttagaccagcaccaacacagcattattctcaactttcacactatccagccactaccaaatgagccaggctagctgccagctgcaccctgcaaarcataatacaagatttaatggaagatgcagcagatgtttgcattccccctagcaagtggagtcctactgatgacccgcagcactgct

SEQ ID NO: 18058 - DNA, 523 bp, Chicken  19866894226656_3
acagctacacatgatacttygaggttgattatataattaaaggcataaggtgacaatcgtaggcaaaaatgatcaaggaacccaagstgaatgagattatttctacagaatcagagcagctctggttctgtggcccagaagaggcaaagtacccaccaacctgcactgggatcttggagctatcagtgacatccaaatactgccctttagaccagcaccaacacagcattattctcaactttcacactatccagccactaccaaatgagccaggctagctgccagctgcaccctgcaaarcataatacaagatttaatggaagatgcagcagatgtttgcattccccctagcaagtggagtcctactgatgacccgcagcactgctctgatgaaccaccagctgagaactgtgccttctcctctcacaggagaaacttgccccaggaagcaaggcaagcagctcggcttcagcacagacagaaaagcagcctcatactgactgcaaggaacaggaggaaaaca

SEQ ID NO: 18059 - DNA, 600 bp, Chicken  19866894226659_1
tcaagaacaagtttagattagatagataattctttaatggctcagattagatttaaaaaataattccactttgtgatgattgcctggttgccttaaggttcaaatcagctttcatgataaggtgagagataatggcctgaagttgcaccaggggaggttcaggtgggtagttgaacaattttttctccaagagcagtgctgcagtggcacaggctgcacagggaggtggtggagtcaccatccctggaggtgttccagaactgtgtggacgtggcactgaggaacgtggtcagtgggcayggtgggggtgggctggcagttggatattgcaaagggtaacacagtgggcaaagatgggtctctcttgcagtccaaaagacaagagcttaatagaactcatgactcccaaatcccagctgtcttcagtagattttctcacttttaacagtaggatcgagtmgattttttttttttttaaagcttcatttttttttaattttgtacttcattgcatttctgtgaccgttctccccacagggatatgtgttgatttctaccgacgctcactacaaacactgaaggagaagaaaaaccaccagt

SEQ ID NO: 18060 - DNA, 600 bp, Chicken  19866894226659_2
aggtgggtagttgaacaattttttctccaagagcagtgctgcagtggcacaggctgcacagggaggtggtggagtcaccatccctggaggtgttccagaactgtgtggacgtggcactgaggaacgtggtcagtgggcayggtgggggtgggctggcagttggatattgcaaagggtaacacagtgggcaaagatgggtctctcttgcagtccaaaagacaagagcttaatagaactcatgactcccaaatcccagctgtcttcagtagattttctcacttttaacagtaggatcgagtmgattttttttttttttaaagcttcatttttttttaattttgtacttcattgcatttctgtgaccgttctccccacagggatatgtgttgatttctaccgacgctcactacaaacactgaaggagaagaaaaaccaccagttaggcatgaacctccaattaataacgggactgttgaaataaagccttgtctacacacttcttgtgtctatgcgcttcctgaaaggtgccgccgcctctcacaagaagtacatgtacagctctgtgagtacagctctatgcattgggcaggctagggcctg

SEQ ID NO: 18061 - DNA, 600 bp, Chicken  19866894226664_1
gagacagatggcagcaaaacgacagtctgacaaaatggtgtctgacacacaagtgtgtatgaagtaaaggtgtggaattgaattcctccatgcagaaaaaattgcactcacaaacattcactgatgcttgctgaacatttatgcagaccgaagagtggatgtcagcacactgaggcagtgggtggtgcactttagcagtggtgacagtgacatgacagaaaagccatgctttggatggccatgcacagcttcacaccacagaatgaagaatgcactgatcagctcatcatccacataatytggcagattacaatcaggaaactatgtacagagctgaatactgtcttactgcattggaaataatgatggcaacatcacaatatcacaaagtgatattgcccttaaaccgatgacattttgctaggtggataccaccaatgctcacacaggaatgctcatgcttctcttgaaacaaggccttgtacttttctgaagaccagggagcacgttgtcagtcttggcaggactgttctaccacatccaccctatagtccagatttgatcgcttctgatttgcatctgatctggccaattaaagat

SEQ ID NO: 18062 - DNA, 600 bp, Chicken  19866894226669_1
gtcctgcagaccactggagttactggtatttctaaactagacccttctagtcctaaacaaagcattgtcaaacttagcatttcttttttaacaatcatgtcacagggtaggtagggaggaaaatcagaacctattcagtattgtaaatagagcagattgttatccgaagatgttatctacctataacaagcaaaataattcagcacacgtagaggtctctattcagattgatgagctaaaatgaaatctgttgattaagctaattgcacacctccatagatgaatattactgttttcttyggtttggctttttccaaaaagggaagatatctgataaatatccagttcttcatataaggcttytcatatgttacattcttttgttgtcttactgtggtttttttttttagtgtgatcattttaaacgtgttgcaaaactaggttttctatcagaagcttgtgtgcttatgatgggctttattttttatcctactttactcctggagttcaagcatcacaygaagaaaacctggatgtaggaagacgataaaacaccactttcagctttttgtatcttcttgaagtatttcataattcaga

SEQ ID NO: 18063 - DNA, 544 bp, Chicken  19866894226669_2
attgtcaaacttagcatttcttttttaacaatcatgtcacagggtaggtagggaggaaaatcagaacctattcagtattgtaaatagagcagattgttatccgaagatgttatctacctataacaagcaaaataattcagcacacgtagaggtctctattcagattgatgagctaaaatgaaatctgttgattaagctaattgcacacctccatagatgaatattactgttttcttyggtttggctttttccaaaaagggaagatatctgataaatatccagttcttcatataaggcttytcatatgttacattcttttgttgtcttactgtggtttttttttttagtgtgatcattttaaacgtgttgcaaaactaggttttctatcagaagcttgtgtgcttatgatgggctttattttttatcctactttactcctggagttcaagcatcacaygaagaaaacctggatgtaggaagacgataaaacaccactttcagctttttgtatcttcttgaagtatttcataattcagaattaaat

SEQ ID NO: 18064 - DNA, 387 bp, Chicken  19866894226669_3
attcagattgatgagctaaaatgaaatctgttgattaagctaattgcacacctccatagatgaatattactgttttcttyggtttggctttttccaaaaagggaagatatctgataaatatccagttcttcatataaggcttytcatatgttacattcttttgttgtcttactgtggtttttttttttagtgtgatcattttaaacgtgttgcaaaactaggttttctatcagaagcttgtgtgcttatgatgggctttattttttatcctactttactcctggagttcaagcatcacaygaagaaaacctggatgtaggaagacgataaaacaccactttcagctttttgtatcttcttgaagtatttcataattcagaattaaat

SEQ ID NO: 18065 - DNA, 599 bp, Chicken  19866894226671_1
  misc_feature (1)..(27): n is any nucleotide
nnnnnnnnnnnnnnnnnnnnnnnnnnntgggtttctttgcatacagggctggcttcctagagaagctgaattccaatgagtttgtcgctctttctcgcttgatggaaggctttatcttagatactgagcagatctgcggcagaaaaagtatgtccttgcgaggagcacttcaaagtcaagccaataaatttgtgaataggttccatgaggagaggaagacaaagttaaggtatgtctgtgtagaagaccttcatgttcttacgtgcataatttttatcaattctacaccaggaaaacacraatctttcataggaaagcacaaattttcattgcctggatcactcataacttagttgtacttaggaggggcaggctggacagccattttaaaacacaattattttcaattgtttcaggcttttacaattttcagaacagtttctttaaactggattgttcaatgattaagtaaataaggacagcttgtagctacgggaaggactcagaagtgatgttggaggatggggttgctctgtctcaggagttagttggaaagaacctccaggaaaaaacaaggggggaaaaaaaaacaacccaca

SEQ ID NO: 18066 - DNA, 599 bp, Chicken  19866894226675_1
  misc_feature (1)..(157): n is any nucleotide
nnnnnnnnnnnnnnnnnnnnnnnnnnnnnnnnnnnnnnnnnnnnnnnnnnnnnnnnnnnnnnnnnnnnnnnnnnnnnnnnnnnnnnnnnnnnnnnnnnnnnnnnnnnnnnnnnnnnnnnnnnnnnnnnnnnnnnnnnnnnnnnnnnnnnnnnnnnnntgtgttgtcccccagctcacgtagaatctgcttggatattcccagttctaggaaatgctattaaggatagctggcccttttgaccatggagcaaggcctgagtggtaactgtcaaaggtgctcacctgctgctaatgaagttyaccagggacctggcagcatggctggtcccactgctgggccagggggtcgcatggggtgggttcctgcagaggggcaccgaggtgrtcccacctccagccatgaccttgctggtagccactaaagctgacagggtgcttctcctcttctggtgagagtgtgcagctggacttcccatgtactcccaggtaaaactgtggggtgcattttcatacaatcatagaactgtctgagttggaagggatctttagaggtcatttagtccaaatcccctgcaatgaacagggacatctacagctag

SEQ ID NO: 18067 - DNA, 599 bp, Chicken  19866894226675_2
  misc_feature (1)..(72): n is any nucleotide
nnnnnnnnnnnnnnnnnnnnnnnnnnnnnnnnnnnnnnnnnnnnnnnnnnnnnnnnnnnnnnnnnnnnnnnntgtgttgtcccccagctcacgtagaatctgcttggatattcccagttctaggaaatgctattaaggatagctggcccttttgaccatggagcaaggcctgagtggtaactgtcaaaggtgctcacctgctgctaatgaagttyaccagggacctggcagcatggctggtcccactgctgggccagggggtcgcatggggtgggttcctgcagaggggcaccgaggtgrtcccacctccagccatgaccttgctggtagccactaaagctgacagggtgcttctcctcttctggtgagagtgtgcagctggacttcccatgtactcccaggtaaaactgtggggtgcattttcatacaatcatagaactgtctgagttggaagggatctttagaggtcatttagtccaaatcccctgcaatgaacagggacatctacagctagatcagactgctcagagcctggtccagtcactacagttttggcaactcactctattgtaagtaacgttacaagcagttaggatatt

SEQ ID NO: 18068 - DNA, 600 bp, Chicken  19866894226676_1
tatttctcgttctacccccagtggatccagagaacaactcatcgtgtttttctctgcaacagccttttacatcttggaatactgttaccacctcctcgttcctaaattaaacaaacccagtttcattggtctattctcctaggttaatgtttctaaacttcttccttgttcttgcccttctccaaacttttctcccatcctttttgaagttcagcatccaaaatggggcacagcccttgaaacccagctccccgctgccgatcaacctgatccagctctccaatgatcacaacacagaaygggctttctcctctttccccattcttttccccatcatttgtggttcagtgcaaaccccggctccttcgctggaatactgctatggaatcgcattttggtaatgacactctgatggattttaaatgcatttctctgctgtgacacagctgaggtttgcaacacagctgaaaagaaggtgaaaaatctctacctggtgccacacaaatgaacgtatgtaatctttttcgtttcagtaaactcgcttttaaaatgtctaggttttagcatcgcagacataatcctcttttgaaatacatatta

SEQ ID NO: 18069 - DNA, 599 bp, Chicken  19866894226678_1
  misc_feature (1)..(272): n is any nucleotide
nnnnnnnnnnnnnnnnnnnnnnnnnnnnnnnnnnnnnnnnnnnnnnnnnnnnnnnnnnnnnnnnnnnnnnnnnnnnnnnnnnnnnnnnnnnnnnnnnnnnnnnnnnnnnnnnnnnnnnnnnnnnnnnnnnnnnnnnnnnnnnnnnnnnnnnnnnnnnnnnnnnnnnnnnnnnnnnnnnnnnnnnnnnnnnnnnnnnnnnnnnnnnnnnnnnnnnnnnnnnnnnnnnnnnnnnnnnnnnnnnnnnnnnnnnnnnnnnnnnnnnnnnnnnnnnnaatacgtgcttatttagcaacactttcktgttagttgagtgccgggaagactgtgaacctgaagtcctcagccaatgaggaaccaggggagaaagagataagcatcgagtaatagggcatcaaagacgtaaggctgttttctgtgcgcccttctgcttgccggtactattctctctggctgtgtttttatgccccagggctgttgccggcctccagcaatggagggatgcagcatagtcctctccatcctcccaccaaacttatctctgtccaaggatgagcaggtgtccaggaagagagagataccgttctsataaagtatttgga

SEQ ID NO: 18070 - DNA, 600 bp, Chicken  19866894226678_2
ttagcaacactttcktgttagttgagtgccgggaagactgtgaacctgaagtcctcagccaatgaggaaccaggggagaaagagataagcatcgagtaatagggcatcaaagacgtaaggctgttttctgtgcgcccttctgcttgccggtactattctctctggctgtgtttttatgccccagggctgttgccggcctccagcaatggagggatgcagcatagtcctctccatcctcccaccaaacttatctctgtccaaggatgagcaggtgtccaggaagagagagataccgttctsataaagtatttggatatttccaacaatttgacctcgctcttcccttccccctacgaaatccaccaagatcccccccccagacacccttttcaccccatagaagtcccctttcccccttctcagctcccctacacaatgtccccctctaactccagaccccctttccaccccatggaagccccgctcaccccttttcccccccacaactccttctctcagcccccagaactactttccacccccatagaagcccctcacagccccccagcttcctcctgccaaccccctctccatccccag

SEQ ID NO: 18071 - DNA, 565 bp, Chicken  19866894226695_1
ttggtagtcttatcacatgagactgcattgttatgagaccattcctgtccaatactcttcggtgataatgaatttttccagcatccactctaaagaaaagaatgcaagttatctaggagcaaaggaaatttgcaagtgaattctaattatgcagtattccaatgcccctagctagattacccacagtcttagtgatgtccgttgtgctaattttcaatgtgacaatcacaaaattaggaagtaccaaaatttaacctgtgaaattgatggactgtacagagcatttaatatcactttctytctaaaagcttttgctttattcaatgaccaggaaaaaataagagtggtcatacaataggagaccatttggggattcaggttcttttctgttgctgttgtttcagaattttagatgagaattataggagaataatgtgcagtcccccaggaaagagaactgaacacattgttgtaaattctaaggcataataaacaagccaactaaaaccaagctttttagaatagctcttaattaggagataaaaaaagaattttaggcatacag

SEQ ID NO: 18072 - DNA, 600 bp, Chicken  19866894226696_1
ttaagttattttttcctcaatcttaaatgtttttttcttgcgataatgattgacaagcaacctccctgtcttatcatgtcatcttatcattttcttttctcatcatgttttctcccactatcctgctgaggagtgagaatgagtgagcagctgggtgagcatttggctgttagacaaagcaaacctactaaagcttcttgtataatgctatgtctgggattagttatggtatatttacctgtgatgagtgctgtactactataaaaaaactactttcaaagatgcaggtttttggggggyatgtctgcacaggtctgtcataagcataacataagctttggttttctcatggatatctttgagttgcaggggtttgttctccttaataaaatcctgtgaggtctactgtatatctgagctgagttattagttttcattgtatgagcatagatagtaataaaagatgtcagaaactgacatgatgtttgggaatttaatggggtatattttcttcttgataggcacatatattttctattaatgctaataggaattatatgtatgcataaggagaacataccactttgcatgtaaatttca

SEQ ID NO: 18073 - DNA, 599 bp, Chicken  19866894226697_1
  misc_feature (1)..(11): n is any nucleotide
nnnnnnnnnnnggagccgacctaactggctgctgaaaatactgagtttagttttactgaacaccgtttctgacagcaagtaatatctacctttgttcttagcaaatggtctcgttttgttgtccttccacaccagatgaaacacactaaatttgtactgaatttggattaagtgagatgacaagaatcagatctgtgatgataacacctatgtttccgtaacaagaggattgtgtacttatgtgttgtgaactgaaaagaatgaggtagcaaaatctttcttgggtatcatcagagattyttgctcttctggatctgttttccagataatgggatcaatgaaagtgctgtccttcattgcagacggattctatatatattacccaatgcttgttgtcattctctgtattgccacatactttaggtaagtaatgtgcaagacttatcctctacatttctttatattaataacttcaatttcatcacttaggaagagactcacttccagatgatgaggtgtgacatattaatgaaaatgcaaaaaataaagcaatagttttatattcatttgcgttaaatgtatacattttaagratatcc

SEQ ID NO: 18074 - DNA, 582 bp, Chicken  19866894226697_2
gagattyttgctcttctggatctgttttccagataatgggatcaatgaaagtgctgtccttcattgcagacggattctatatatattacccaatgcttgttgtcattctctgtattgccacatactttaggtaagtaatgtgcaagacttatcctctacatttctttatattaataacttcaatttcatcacttaggaagagactcacttccagatgatgaggtgtgacatattaatgaaaatgcaaaaaataaagcaatagttttatattcatttgcgttaaatgtatacattttaagratatcctttgtatgagctcctaactgattgattttctttaaaacttattccattttccactaaacattaattaatcagattttgggttcttttctgttcaagcttcaaagcccacaaaaatttacgttatgctatttgaaattaaaattactgtgaggaagctatattttcagaagttttctgatatgcagatttgcaaaagccataggtaatgaacattccagcagacttgcaacaaatatatgtggaaatgagtgtttaattaaaatctattaaagaaag

SEQ ID NO: 18075 - DNA, 600 bp, Chicken  19866894226700_1
gaagcctccacatttcatctgctgcttttttccttacctgctgaagtcaaacatccattgtcttttaaattcccaagatgcctacagcatcatgcaaagcctccacttagcagccatagaagtatgtggacccatcccactacaatttctttaacaacttattttattatgggatctgatgcagcttgaaatgcatcaaataaacttagaactttctacaataattttctattgaagcaaaaacaggtaaaaggaatttaacttctggtgcaaattcaattacagacctaattcacctcyctgcctttccagggttaaagtaaagctataccgtgtggcatttgaatcactgggatacttaggcagcagtgaaaggaagcaagtaattattgcctaacttcagttatttgaaagatggaaggagacagacattttagagtggactcataatgcttgaaataaactgggaaaagttcttaattaaacattgtgaaaaacattctgaatatgagattcttctactattgtggcctattctaacaagagaaataaaactttcccatgaaaaactctggacaatgttgttagtgacttttgttt

SEQ ID NO: 18076 - DNA, 599 bp, Chicken  19866894226705_1
  misc_feature (1)..(112): n is any nucleotide
nnnnnnnnnnnnnnnnnnnnnnnnnnnnnnnnnnnnnnnnnnnnnnnnnnnnnnnnnnnnnnnnnnnnnnnnnnnnnnnnnnnnnnnnnnnnnnnnnnnnnnnnnnnnnnnntgaaagcctttagatagctgctcagtcatcatgtagaggcaacagctctgctggcattatttgcagaatttttgatgaaagaagatctctgaatgttaatgtggattaatccctgactaaattcacaaaataaggctgaaataaggggttaccatgacatttgacccccttaaaaataaaagtgctcyttttatatgtgccatgcatttttgcaccatacagggaaagatttacgatatacttcgagtctcttatcttctgcctccagcttttatagggtgtaggaactactgcaagaatgagattcctgctatgaacacacaaactcaggagcagcagctgaagtggcttaatgtgctaaacaaatatttcacactcggagatcctcagaaaagcaggttttacagtacacttgaaactgggtcaaagcaagaggaattctgtagtatgtttcttggtgtactggattacaaatgtggccttattc

SEQ ID NO: 18077 - DNA, 600 bp, Chicken  19866894226714_1
taaaggtgagaacgaagcatggtcattccaagaagaagtcattttgaaaccagcacagtgcaatgagtgtccctgtaagtgcatccttcttgcaatagaaggaatctgttcaaccaatattaatcttcattatgctcagtgagtaaaaaaataaataaattggatcttgtaataaagttattgcatctaatgtttcccataacatgatgcgcatggtttactgatgcatctcaaggaggctgtaagaaaaaaaagcaggctcattccctccaagtgctaaccacaaccttatagacaggragrggragaaggaggcagctgcctgcagtcccaccttggcaaaatggggccaagcctcaagagatgaggaagctaaatcttgaaaaaggcaagtccttgccagcctagactgggttggaacagaagaggagttacctttaattctacgactaggccgtgctgttcctctgggcttttctgatcctctcaaactgattttcacagcagcagcagggacggaggctatcgcgacagcagggatggagattgctatcacagccgacttcatttccaaatgttcactgaaaggcaatcagaggt

SEQ ID NO: 18078 - DNA, 600 bp, Chicken  19866894226714_2
aggtgagaacgaagcatggtcattccaagaagaagtcattttgaaaccagcacagtgcaatgagtgtccctgtaagtgcatccttcttgcaatagaaggaatctgttcaaccaatattaatcttcattatgctcagtgagtaaaaaaataaataaattggatcttgtaataaagttattgcatctaatgtttcccataacatgatgcgcatggtttactgatgcatctcaaggaggctgtaagaaaaaaaagcaggctcattccctccaagtgctaaccacaaccttatagacaggragrggragaaggaggcagctgcctgcagtcccaccttggcaaaatggggccaagcctcaagagatgaggaagctaaatcttgaaaaaggcaagtccttgccagcctagactgggttggaacagaagaggagttacctttaattctacgactaggccgtgctgttcctctgggcttttctgatcctctcaaactgattttcacagcagcagcagggacggaggctatcgcgacagcagggatggagattgctatcacagccgacttcatttccaaatgttcactgaaaggcaatcagaggtgat

SEQ ID NO: 18079 - DNA, 600 bp, Chicken  19866894226714_3
tgagaacgaagcatggtcattccaagaagaagtcattttgaaaccagcacagtgcaatgagtgtccctgtaagtgcatccttcttgcaatagaaggaatctgttcaaccaatattaatcttcattatgctcagtgagtaaaaaaataaataaattggatcttgtaataaagttattgcatctaatgtttcccataacatgatgcgcatggtttactgatgcatctcaaggaggctgtaagaaaaaaaagcaggctcattccctccaagtgctaaccacaaccttatagacaggragrggragaaggaggcagctgcctgcagtcccaccttggcaaaatggggccaagcctcaagagatgaggaagctaaatcttgaaaaaggcaagtccttgccagcctagactgggttggaacagaagaggagttacctttaattctacgactaggccgtgctgttcctctgggcttttctgatcctctcaaactgattttcacagcagcagcagggacggaggctatcgcgacagcagggatggagattgctatcacagccgacttcatttccaaatgttcactgaaaggcaatcagaggtgatgtt

SEQ ID NO: 18080 - DNA, 600 bp, Chicken  19866894226714_4
cctagactgggttggaacagaagaggagttacctttaattctacgactaggccgtgctgttcctctgggcttttctgatcctctcaaactgattttcacagcagcagcagggacggaggctatcgcgacagcagggatggagattgctatcacagccgacttcatttccaaatgttcactgaaaggcaatcagaggtgatgttctccctcctgcctgcatgtagacagactttctgctgagccaatgtcaaatacacacagaggaagcaccacagtggctggatcaaagtaaaaaaactyagaaaccacttcagtgagctccacattcatcatggtctcctggaggtcttcttcacygatccaaatgaacaaccctagaaagcaacttctgtagcagccaaagaaaacaaagaattacaatcagaaaaagaaagaaagamagaaaaaagaaactaatggtaaataaagcaatcaagttgagattgggttttctccttgcttgaaaaactccaacaagaccacagacygtgtatgcattagtcagctcctaactgagcctgtcaagagtgctaggacacagtatgtgttgcacagactgac

SEQ ID NO: 18081 - DNA, 600 bp, Chicken  19866894226714_5
tgttcctctgggcttttctgatcctctcaaactgattttcacagcagcagcagggacggaggctatcgcgacagcagggatggagattgctatcacagccgacttcatttccaaatgttcactgaaaggcaatcagaggtgatgttctccctcctgcctgcatgtagacagactttctgctgagccaatgtcaaatacacacagaggaagcaccacagtggctggatcaaagtaaaaaaactyagaaaccacttcagtgagctccacattcatcatggtctcctggaggtcttcttcacygatccaaatgaacaaccctagaaagcaacttctgtagcagccaaagaaaacaaagaattacaatcagaaaaagaaagaaagamagaaaaaagaaactaatggtaaataaagcaatcaagttgagattgggttttctccttgcttgaaaaactccaacaagaccacagacygtgtatgcattagtcagctcctaactgagcctgtcaagagtgctaggacacagtatgtgttgcacagactgacagtttgggcctcttcacaactacaaatgcctgcatcttgctagaggaaacccgggat

SEQ ID NO: 18082 - DNA, 600 bp, Chicken  19866894226714_6
agattgctatcacagccgacttcatttccaaatgttcactgaaaggcaatcagaggtgatgttctccctcctgcctgcatgtagacagactttctgctgagccaatgtcaaatacacacagaggaagcaccacagtggctggatcaaagtaaaaaaactyagaaaccacttcagtgagctccacattcatcatggtctcctggaggtcttcttcacygatccaaatgaacaaccctagaaagcaacttctgtagcagccaaagaaaacaaagaattacaatcagaaaaagaaagaaagamagaaaaaagaaactaatggtaaataaagcaatcaagttgagattgggttttctccttgcttgaaaaactccaacaagaccacagacygtgtatgcattagtcagctcctaactgagcctgtcaagagtgctaggacacagtatgtgttgcacagactgacagtttgggcctcttcacaactacaaatgcctgcatcttgctagaggaaacccgggatgcttgtgcatgtgctgaggtcacagcaaggcctttctttcagagttctgttttggatatcatatgctcagcagagctctgttt

SEQ ID NO: 18083 - DNA, 600 bp, Chicken  19866894226714_7
gactttctgctgagccaatgtcaaatacacacagaggaagcaccacagtggctggatcaaagtaaaaaaactyagaaaccacttcagtgagctccacattcatcatggtctcctggaggtcttcttcacygatccaaatgaacaaccctagaaagcaacttctgtagcagccaaagaaaacaaagaattacaatcagaaaaagaaagaaagamagaaaaaagaaactaatggtaaataaagcaatcaagttgagattgggttttctccttgcttgaaaaactccaacaagaccacagacygtgtatgcattagtcagctcctaactgagcctgtcaagagtgctaggacacagtatgtgttgcacagactgacagtttgggcctcttcacaactacaaatgcctgcatcttgctagaggaaacccgggatgcttgtgcatgtgctgaggtcacagcaaggcctttctttcagagttctgttttggatatcatatgctcagcagagctctgtttagcccaaaccatgggacaggctgtccagaaagtcagtgcaatctccattcttggagatattcaaaactccgctgcaaagtacctgag

SEQ ID NO: 18084 - DNA, 600 bp, Chicken  19866894226718_1
gttttattccagtaattaattttcactggttaattcctgacgactttccaatgttgcgctggtgcagtgaatcagaatcattacacgagtgaggttaaagctgccttggtgatgctctgagaaaagagatggactccactgcacctcttgtgcccagcacaagggttctgccttggagctgctctgttatgtgaaaccttattatgcacgtaagtggtgtaaactgaagggctgaatgatgacagaagctgtctggagctatccaggaggtgtaatgctctgcgtagctttgcactactygggtgagcactttggaaggaggcatgtgccagaaaacayggcactgctaaatgtttctgacgtattatttagcttcaggcaatgtttaaaagctgcataattgctcacagctatatttaagttgtattattgcaattgtcaaaggagacagatattaattcctgtatttcttcacagttattaatactcccattttttacctttattactcaaaatggttaatggctctgaaataaagaatctttaagggcatcacagtggagaaatggctggttctgttacagctgctttccagagatc

SEQ ID NO: 18085 - DNA, 600 bp, Chicken  19866894226718_2
acgactttccaatgttgcgctggtgcagtgaatcagaatcattacacgagtgaggttaaagctgccttggtgatgctctgagaaaagagatggactccactgcacctcttgtgcccagcacaagggttctgccttggagctgctctgttatgtgaaaccttattatgcacgtaagtggtgtaaactgaagggctgaatgatgacagaagctgtctggagctatccaggaggtgtaatgctctgcgtagctttgcactactygggtgagcactttggaaggaggcatgtgccagaaaacayggcactgctaaatgtttctgacgtattatttagcttcaggcaatgtttaaaagctgcataattgctcacagctatatttaagttgtattattgcaattgtcaaaggagacagatattaattcctgtatttcttcacagttattaatactcccattttttacctttattactcaaaatggttaatggctctgaaataaagaatctttaagggcatcacagtggagaaatggctggttctgttacagctgctttccagagatcttctcacccccgttcctcgtagttcagcttcactctcct

SEQ ID NO: 18086 - DNA, 600 bp, Chicken  19866894226719_1
gcataagctcctgtaatagtctgtagtgacaaggagattgttctgttacaaaagcaaaggcagccaggagaagttccattgaaatgtaacagtgctgctccccaagaaaggaaattcgctactgaaagcgtgaatgtattcctttacatttgcgatctaaactaccctaacaccacacaaatacagctgacacagcagtggaacctgcatgctttagactcctgatggcacatctggggacatcccccaccccacttgcaaactcttctctcatcctgttaaaatgccatctcctcacayctaactccattgctcacctttgataagaaccatatgtttctgttcaagtgcacagctcagtctttcagcttaattaacagacaaaagaggagagcactgaacatgacttctgtttactttgattcttttgcacttgctcctccaagtcactgtctgcatttggcctacgtcgacaatttcagacacacagaagtaaactgctcctagatctgcacagcaatgtttatcacaaactccataaacacacacgccctttcatcgagcctactaaattcttctccttgacagcaagcagcaacc

SEQ ID NO: 18087 - DNA, 600 bp, Chicken  19866894226722_1
ggtgaatggacaagatctactgcttacgtgttagcaaggtgcgttgtaaagacgtagacgaactgcgaaggctgctttcctgttccaccacctccacctcccacaccatccgaccgtaagcccggggcagtaccatgaggtgtgctggaagaactggtctcattcaggtttggcagcgggttggaccctgggccaagctgcgaggccgtggacatcgcaggatctgctacattacaatctgtgggagcacaggacaggagttactaaaaccagcgctgcgagagaagcacagcagcctaygctgaatggcactgctgtstggaccagaacgaacagaggagatggagggaagcaggaaggctcccggcaccaccagatggcagcacccgaccggcagtccccgcaatcttggtggccgatgtccccaggcacataagcggcccaactcctcctttggtctctccttcatctcagggtggccccaggctcatctcatctcccttcccatggtggtaacaacaggcacccgggtagcaggggaaagaggagctgcttttcgccagcgataattattaatcatcattaattattgagtaatat

SEQ ID NO: 18088 - DNA, 600 bp, Chicken  19866894226722_2
ctgcttacgtgttagcaaggtgcgttgtaaagacgtagacgaactgcgaaggctgctttcctgttccaccacctccacctcccacaccatccgaccgtaagcccggggcagtaccatgaggtgtgctggaagaactggtctcattcaggtttggcagcgggttggaccctgggccaagctgcgaggccgtggacatcgcaggatctgctacattacaatctgtgggagcacaggacaggagttactaaaaccagcgctgcgagagaagcacagcagcctaygctgaatggcactgctgtstggaccagaacgaacagaggagatggagggaagcaggaaggctcccggcaccaccagatggcagcacccgaccggcagtccccgcaatcttggtggccgatgtccccaggcacataagcggcccaactcctcctttggtctctccttcatctcagggtggccccaggctcatctcatctcccttcccatggtggtaacaacaggcacccgggtagcaggggaaagaggagctgcttttcgccagcgataattattaatcatcattaattattgagtaatattcctaattaatattaataa

SEQ ID NO: 18089 - DNA, 600 bp, Chicken  19866894226725_1
agtagttaagctcagaaaagtccacacaactttcagtaagtatatttctttttacaggccaaaattcaggaaaagtttcctgaaataacaatcaaaactagctttactgacgtagagcacattactttaacaggcggattaaaagtgaagacattgtatatatttgatttaaatatatacagaaaatactatatataaacataaatgacccagtcaatcacagaaaaaacaggccttcttcagtaactatattaaaatacatagttaaccaaaattaactgtgcagacggaattataaarccttccartaaatccaaaacccaagcagtcaatcagtattatgtcaacagcacttcaattattaccaagtagatttatataagaaaaatttcagacatgtttgttaggttagtgaggaggatgcttacatagccagcacttcgtatttttcctgttgtagattattaaagagtatgtgygaagtgatgtacatgtaaattagtgaaaacaaattatactcactgatctttttctcctcctcctcagtggagtaacactatataactaaagacaaatttaactatcactgtacataacaca

SEQ ID NO: 18090 - DNA, 600 bp, Chicken  19866894226725_2
agctcagaaaagtccacacaactttcagtaagtatatttctttttacaggccaaaattcaggaaaagtttcctgaaataacaatcaaaactagctttactgacgtagagcacattactttaacaggcggattaaaagtgaagacattgtatatatttgatttaaatatatacagaaaatactatatataaacataaatgacccagtcaatcacagaaaaaacaggccttcttcagtaactatattaaaatacatagttaaccaaaattaactgtgcagacggaattataaarccttccartaaatccaaaacccaagcagtcaatcagtattatgtcaacagcacttcaattattaccaagtagatttatataagaaaaatttcagacatgtttgttaggttagtgaggaggatgcttacatagccagcacttcgtatttttcctgttgtagattattaaagagtatgtgygaagtgatgtacatgtaaattagtgaaaacaaattatactcactgatctttttctcctcctcctcagtggagtaacactatataactaaagacaaatttaactatcactgtacataacacatcatttag

SEQ ID NO: 18091 - DNA, 600 bp, Chicken  19866894226725_3
cagaaaatactatatataaacataaatgacccagtcaatcacagaaaaaacaggccttcttcagtaactatattaaaatacatagttaaccaaaattaactgtgcagacggaattataaarccttccartaaatccaaaacccaagcagtcaatcagtattatgtcaacagcacttcaattattaccaagtagatttatataagaaaaatttcagacatgtttgttaggttagtgaggaggatgcttacatagccagcacttcgtatttttcctgttgtagattattaaagagtatgtgygaagtgatgtacatgtaaattagtgaaaacaaattatactcactgatctttttctcctcctcctcagtggagtaacactatataactaaagacaaatttaactatcactgtacataacacatcatttagaacattgtctccagagtcgatctctaaattagcagaaaatacatttcttctgctttgagaatacttacatcttgtactgtttaaaggaagtgagtatgtttaatacatgtgcacccatacagttatgccaagtgttgcaacattaggattagggtttttttccccctggtt

SEQ ID NO: 18092 - DNA, 565 bp, Chicken  19866894226727_1
atccaaacttgaatgccagctgagaagagactgtaagtcactgttctctgactccgactcagaactgcaccacacccagggatggcccatctgcaaacaaacacaaagagagaaacagcaatttctttgtaccctgatccagaactacaaagcccagttcatttcctgacttactcagagagccaaaacacagcaagaactttgcgaggcgagcagcctactcctgagcccacacttaacagcacatggcagggctgtagctctgcaacagaaactgacatttcagagcaactgaattaygattttccagtgcttttgctgtgctctcccctggctggtgctcagggggatgctaagctgctttggagcatttggctttgtctgatgstaygcgtttgggyactgatgggacaggcaacagcaagttcaaaaccaaggcatgctgctgacagctgtgagccagcggtgactccaagggtcatccactcactggaagctccctcactgtactgtaagaactttttacatcggaaacaacttattacaaacactacagaacctttgt

SEQ ID NO: 18093 - DNA, 477 bp, Chicken  19866894226727_2
atctgcaaacaaacacaaagagagaaacagcaatttctttgtaccctgatccagaactacaaagcccagttcatttcctgacttactcagagagccaaaacacagcaagaactttgcgaggcgagcagcctactcctgagcccacacttaacagcacatggcagggctgtagctctgcaacagaaactgacatttcagagcaactgaattaygattttccagtgcttttgctgtgctctcccctggctggtgctcagggggatgctaagctgctttggagcatttggctttgtctgatgstaygcgtttgggyactgatgggacaggcaacagcaagttcaaaaccaaggcatgctgctgacagctgtgagccagcggtgactccaagggtcatccactcactggaagctccctcactgtactgtaagaactttttacatcggaaacaacttattacaaacactacagaacctttgt

SEQ ID NO: 18094 - DNA, 474 bp, Chicken  19866894226727_3
tgcaaacaaacacaaagagagaaacagcaatttctttgtaccctgatccagaactacaaagcccagttcatttcctgacttactcagagagccaaaacacagcaagaactttgcgaggcgagcagcctactcctgagcccacacttaacagcacatggcagggctgtagctctgcaacagaaactgacatttcagagcaactgaattaygattttccagtgcttttgctgtgctctcccctggctggtgctcagggggatgctaagctgctttggagcatttggctttgtctgatgstaygcgtttgggyactgatgggacaggcaacagcaagttcaaaaccaaggcatgctgctgacagctgtgagccagcggtgactccaagggtcatccactcactggaagctccctcactgtactgtaagaactttttacatcggaaacaacttattacaaacactacagaacctttgt

SEQ ID NO: 18095 - DNA, 464 bp, Chicken  19866894226727_4
cacaaagagagaaacagcaatttctttgtaccctgatccagaactacaaagcccagttcatttcctgacttactcagagagccaaaacacagcaagaactttgcgaggcgagcagcctactcctgagcccacacttaacagcacatggcagggctgtagctctgcaacagaaactgacatttcagagcaactgaattaygattttccagtgcttttgctgtgctctcccctggctggtgctcagggggatgctaagctgctttggagcatttggctttgtctgatgstaygcgtttgggyactgatgggacaggcaacagcaagttcaaaaccaaggcatgctgctgacagctgtgagccagcggtgactccaagggtcatccactcactggaagctccctcactgtactgtaagaactttttacatcggaaacaacttattacaaacactacagaacctttgt

SEQ ID NO: 18096 - DNA, 600 bp, Chicken  19866894226731_1
aatgcagaagaaaagcagaggttcatcagtgtttttctctcccttacagggtaccacccagccccagatgtgcctctccaggaaccagggagcaagtagcaaaggcacctgcagtaacaagcaaattggtcagctagaaaatcaaggtaaatggagaatttgcagggatgagaggcagttgctgctctggcttcaccttagacctgcctgaaatctagctttgagcacagacctttgcagcatgaggtaacacaaagttgtagccacaagtaggccctgacagaacaaatagccttgaaragctctcacagagcagatcatttgctacctttcttcacctccacaagccatcttagtagatttggtaactcgcatatttaagcagttccacaaccacagatgccagggaaacaaaaacaagtctgtgatggtgatgagtcccttaggatccagaacttgatgcagaatgtctcctagaaggaagtctgcacaaagacctgttaccacatttgtactaggaactgagaaccaactctttaggtgctgtgatctatcactgcacagmgctggctttgttgacatagtatatgattggagacc

SEQ ID NO: 18097 - DNA, 600 bp, Chicken  19866894226731_2
acaagtaggccctgacagaacaaatagccttgaaragctctcacagagcagatcatttgctacctttcttcacctccacaagccatcttagtagatttggtaactcgcatatttaagcagttccacaaccacagatgccagggaaacaaaaacaagtctgtgatggtgatgagtcccttaggatccagaacttgatgcagaatgtctcctagaaggaagtctgcacaaagacctgttaccacatttgtactaggaactgagaaccaactctttaggtgctgtgatctatcactgcacagmgctggctttgttgacatagtatatgattggagaccttcagggagcaaacaacagcctacttggaagaggccccatgccaacaggactgaagaagtgccagtagatgtatgagcttcctctgatctaagacagcaacratattcagctacaactagattcaaactaatggccatgatgaccgtaagcacttttgagggatatctgtgccagtacagagtttgacacagagatgtagtctttgaattgaggttatatttactacctgtagagactcataagatggaggtagatggcttcatg

SEQ ID NO: 18098 - DNA, 600 bp, Chicken  19866894226731_3
ccagggaaacaaaaacaagtctgtgatggtgatgagtcccttaggatccagaacttgatgcagaatgtctcctagaaggaagtctgcacaaagacctgttaccacatttgtactaggaactgagaaccaactctttaggtgctgtgatctatcactgcacagmgctggctttgttgacatagtatatgattggagaccttcagggagcaaacaacagcctacttggaagaggccccatgccaacaggactgaagaagtgccagtagatgtatgagcttcctctgatctaagacagcaacratattcagctacaactagattcaaactaatggccatgatgaccgtaagcacttttgagggatatctgtgccagtacagagtttgacacagagatgtagtctttgaattgaggttatatttactacctgtagagactcataagatggaggtagatggcttcatgtacatagactgagtaatgactgccttgcacacatgccgtgcagtgcagtgctacttaagcacaccaatctgggcctacagtgctgcattccaggagcagaaatctctgtagcacactcctcagcatggctgatccac

SEQ ID NO: 18099 - DNA, 600 bp, Chicken  19866894226732_1
cagggctacctatccctctaatcatcattctgacatatagcatccccaaaataccgtcaaggagctccatgtgctttgatggatctgcaatgaggccacagtaattttggacatcaaattactcttttttttttttttaactaaagtttttaacttcaacatgtgaatggtaattttccatgcataaatttctaaccagaccaaaatgttttgcatgaaaaattaaaaagaatatacaactttaaatgagagacgtgccatttattattgatgacatctggaagactgacatataatcayagaagcaccaaggttggaaaaggcctccaagatcatccaagttcaactgtccacctcccagtatttcccctctaaaccacatcccttagtatcacatctaaaagtttcctgaactaaacatcttgtacatttatccactaataacaattactcctcaaaatacataacagaaaactttgcaatgattttaatctctttcagagacgaggatgctgagcacttcaataggaaccactgatttcagctggttaataccagaactttttttatacgaagttcaaagtgttttacaaagctatt

SEQ ID NO: 18100 - DNA, 600 bp, Chicken  19866894226742_1
cacaaatcatggaagcagatccaagagcagcacgagtgacccagctaccagacatagtgtcaaagtgtaaactgatctccaggatttgggattgtaaataagctgtcatatgaaaccataccaacagtcaccccttctccccctgttgttggcagggccttggggtaggatgaaagacaacaattttcctatgacctgtaaagcagggactgtctggatgggatggatgtgtctgacttccttgcgcagggaaggctggagtagatgaaggaggttgggttgcaggatttgctgttttgktgttgtgattctttyggatacagaggctggagatggttaggtttggttacccaggtgacactgggtgtgtagtaattttaattgctacaactttggaggtggaagggacaaatctgctaatargacagtattcctaacaaaaaaaaaaaagatatttgaatgaaaaatacatagcctgagaagcacaattaacacatgtggtgtattattgaaattgctttttattaaaaatgtaataaattgctgtcttctccttctctagattgtttactaaacgaagagaatttctcagtgaggtgc

SEQ ID NO: 18101 - DNA, 600 bp, Chicken  19866894226742_2
cagatccaagagcagcacgagtgacccagctaccagacatagtgtcaaagtgtaaactgatctccaggatttgggattgtaaataagctgtcatatgaaaccataccaacagtcaccccttctccccctgttgttggcagggccttggggtaggatgaaagacaacaattttcctatgacctgtaaagcagggactgtctggatgggatggatgtgtctgacttccttgcgcagggaaggctggagtagatgaaggaggttgggttgcaggatttgctgttttgktgttgtgattctttyggatacagaggctggagatggttaggtttggttacccaggtgacactgggtgtgtagtaattttaattgctacaactttggaggtggaagggacaaatctgctaatargacagtattcctaacaaaaaaaaaaaagatatttgaatgaaaaatacatagcctgagaagcacaattaacacatgtggtgtattattgaaattgctttttattaaaaatgtaataaattgctgtcttctccttctctagattgtttactaaacgaagagaatttctcagtgaggtgccccaagcacaaggta

SEQ ID NO: 18102 - DNA, 600 bp, Chicken  19866894226742_3
acagtcaccccttctccccctgttgttggcagggccttggggtaggatgaaagacaacaattttcctatgacctgtaaagcagggactgtctggatgggatggatgtgtctgacttccttgcgcagggaaggctggagtagatgaaggaggttgggttgcaggatttgctgttttgktgttgtgattctttyggatacagaggctggagatggttaggtttggttacccaggtgacactgggtgtgtagtaattttaattgctacaactttggaggtggaagggacaaatctgctaatargacagtattcctaacaaaaaaaaaaaagatatttgaatgaaaaatacatagcctgagaagcacaattaacacatgtggtgtattattgaaattgctttttattaaaaatgtaataaattgctgtcttctccttctctagattgtttactaaacgaagagaatttctcagtgaggtgccccaagcacaaggtaagaatcctcacctgtattagacctgttttttgctgccctcttctggtatttaaatctgctttggtagttttatacctggataacatctgtaatcagaggtgcttttag

SEQ ID NO: 18103 - DNA, 600 bp, Chicken  19866894226755_1
tagaagggatttagattgactttgctaacttggtaatttccaaaggagtatatttctgtccagttaaggcagggctccttttggacacttgttgatacatcagtttcattttacatttagaaatcgactttgtctaaaaacttgtgaatatgggatgtttgttaaagaaaaattccaggctcttctccagaaaattctgaatggaaatctttcccaatagctgaacaaactctattaatttcaactgtttttctgtaatacactgtttaatctgaacatggccttccattgaattacttrcagttcatctctgatccatttaacgtaacacagtgtattttgagacaagattaatttgatttgacagagtaaattagcaatccagttggcaccraagtctataaagtactcaatgaggtgaactcttttctgtatagaataagtgtaactattcttgcagttttgaacagcaagagaaaggcactgctatttaaataggaattgatttactcagggcagagattggagacaaaaagctctgtattcaaggataaactgagacttatcttggtccttgaagtgaaaatgcgtggtatttaa

SEQ ID NO: 18104 - DNA, 600 bp, Chicken  19866894226755_2
atacatcagtttcattttacatttagaaatcgactttgtctaaaaacttgtgaatatgggatgtttgttaaagaaaaattccaggctcttctccagaaaattctgaatggaaatctttcccaatagctgaacaaactctattaatttcaactgtttttctgtaatacactgtttaatctgaacatggccttccattgaattacttrcagttcatctctgatccatttaacgtaacacagtgtattttgagacaagattaatttgatttgacagagtaaattagcaatccagttggcaccraagtctataaagtactcaatgaggtgaactcttttctgtatagaataagtgtaactattcttgcagttttgaacagcaagagaaaggcactgctatttaaataggaattgatttactcagggcagagattggagacaaaaagctctgtattcaaggataaactgagacttatcttggtccttgaagtgaaaatgcgtggtatttaaagttttgtgactccagggaagaggtggtatcaatcgtatgcagataaagagtgaggtgtactgatggcaaaaaatgcatgaaatgtggaagtgt

SEQ ID NO: 18105 - DNA, 599 bp, Chicken  19866894226761_1
  misc_feature (1)..(185): n is any nucleotide
nnnnnnnnnnnnnnnnnnnnnnnnnnnnnnnnnnnnnnnnnnnnnnnnnnnnnnnnnnnnnnnnnnnnnnnnnnnnnnnnnnnnnnnnnnnnnnnnnnnnnnnnnnnnnnnnnnnnnnnnnnnnnnnnnnnnnnnnnnnnnnnnnnnnnnnnnnnnnnnnnnnnnnnnnnnnnnnnnnnnnnnnnttgggagtgactcaaggttgcgatgagcatatctcaccttttttacaagtcatttgaacgtcttaagaaattacactgaaattgggatattttaagaaaatattaaggcacaaamatgttaattcacacttctgaaagttaaatttatcctcgcaggttaagatactgccaattacagacatttataggaaaaccattttcatactcccgggctccctctgcgattgaaagaagcatacaaaactactccataagaaaacaaatccaacaattaaatctgcttaacctaaataagatgtttctgacaccaaagacattcaatccagcgcagtgaaccatccacaaaaacatgctgcattaacagcagcggtgtaagcttttagtattaacctcctgtyactacggaacaaatgc

SEQ ID NO: 18106 - DNA, 600 bp, Chicken  19866894226761_2
aatattaaggcacaaamatgttaattcacacttctgaaagttaaatttatcctcgcaggttaagatactgccaattacagacatttataggaaaaccattttcatactcccgggctccctctgcgattgaaagaagcatacaaaactactccataagaaaacaaatccaacaattaaatctgcttaacctaaataagatgtttctgacaccaaagacattcaatccagcgcagtgaaccatccacaaaaacatgctgcattaacagcagcggtgtaagcttttagtattaacctcctgtyactacggaacaaatgctggctacaaaagctagccattaactgttaaatcaagctatggagaaatgatgaatactcatcaggtcctgaaaatatccacacattcttgacagaatcataattctagttgattttacaccaaagacactcttttgttctaagctggccgctttctagttgtactcagtgcccttcacaggtgcacgtcagaaaaagcaagagagaacttaagtttaaaaggcttgactcctgaacattacacaaccaatgcgtagtttatccattctaattgtgtttaaaagc

SEQ ID NO: 18107 - DNA, 600 bp, Chicken  19866894226762_1
ggctgctgaagtgtggtggctgaaactgcaggttgagataagcatttgtttcattctctctctgactggtcttgctaataaattggtgccagttgtccccaccacctcttctctgtcttgcagacttcctcttcctcatcctttccccccctggtatttggcttcttgattttagttatgtcccagctctttctatttcagctgtctgaaacaagagattttctcctgtgctgttgttaaactctggaggaaaccatatcttagtgatatcattaaggtctctcattgtatcttctctgragagatatgctgaaatcctaccagagaggtgggtggctgttcaaaggtacagaagaagcatggtaatttcacgatcccctgagatccagaggaggctgtcctggatcactagggtaacattgctgagaagttctcaccaacttctatctgtgttctacagttagtctttgtaatggtgtgttatgaccagggccatcactgacatgaaagacaaacagtaagcgtctgatcctgtcttccacattcctgtgaaggatgagtgcattcctctgtgagtgactccccagagatcagggtgtt

SEQ ID NO: 18108 - DNA, 600 bp, Chicken  19866894226762_2
ctaccagagaggtgggtggctgttcaaaggtacagaagaagcatggtaatttcacgatcccctgagatccagaggaggctgtcctggatcactagggtaacattgctgagaagttctcaccaacttctatctgtgttctacagttagtctttgtaatggtgtgttatgaccagggccatcactgacatgaaagacaaacagtaagcgtctgatcctgtcttccacattcctgtgaaggatgagtgcattcctctgtgagtgactccccagagatcagggtgttttcccacttaggggaasgtatggcatctggcctacatgaacaccttgaaaaatcaaatgaaacaacatatttagcatattgaatatattacacagtyatycagattagtgatttgaaatgatctggactagattattctgcttatatttaatgtatgatggaatgtagtgaaatacatctgttttcatgctgcctactagcttcttgacagcttgatagagctttatgtctgccagttctaagagcttgaacatctgggcctgtgwataaaaattgaagccaaacctctgactgagaaacccaaaatacccctgttt

SEQ ID NO: 18109 - DNA, 600 bp, Chicken  19866894226762_3
gtcctggatcactagggtaacattgctgagaagttctcaccaacttctatctgtgttctacagttagtctttgtaatggtgtgttatgaccagggccatcactgacatgaaagacaaacagtaagcgtctgatcctgtcttccacattcctgtgaaggatgagtgcattcctctgtgagtgactccccagagatcagggtgttttcccacttaggggaasgtatggcatctggcctacatgaacaccttgaaaaatcaaatgaaacaacatatttagcatattgaatatattacacagtyatycagattagtgatttgaaatgatctggactagattattctgcttatatttaatgtatgatggaatgtagtgaaatacatctgttttcatgctgcctactagcttcttgacagcttgatagagctttatgtctgccagttctaagagcttgaacatctgggcctgtgwataaaaattgaagccaaacctctgactgagaaacccaaaatacccctgtttgcagaatatgaagtgcttgatcatgtagcrgagctgctctggcttcatgtgtgtctgctgtattgatcctacccaaggat

SEQ ID NO: 18110 - DNA, 600 bp, Chicken  19866894226762_4
ctggatcactagggtaacattgctgagaagttctcaccaacttctatctgtgttctacagttagtctttgtaatggtgtgttatgaccagggccatcactgacatgaaagacaaacagtaagcgtctgatcctgtcttccacattcctgtgaaggatgagtgcattcctctgtgagtgactccccagagatcagggtgttttcccacttaggggaasgtatggcatctggcctacatgaacaccttgaaaaatcaaatgaaacaacatatttagcatattgaatatattacacagtyatycagattagtgatttgaaatgatctggactagattattctgcttatatttaatgtatgatggaatgtagtgaaatacatctgttttcatgctgcctactagcttcttgacagcttgatagagctttatgtctgccagttctaagagcttgaacatctgggcctgtgwataaaaattgaagccaaacctctgactgagaaacccaaaatacccctgtttgcagaatatgaagtgcttgatcatgtagcrgagctgctctggcttcatgtgtgtctgctgtattgatcctacccaaggatgga

SEQ ID NO: 18111 - DNA, 600 bp, Chicken  19866894226762_5
cctctgtgagtgactccccagagatcagggtgttttcccacttaggggaasgtatggcatctggcctacatgaacaccttgaaaaatcaaatgaaacaacatatttagcatattgaatatattacacagtyatycagattagtgatttgaaatgatctggactagattattctgcttatatttaatgtatgatggaatgtagtgaaatacatctgttttcatgctgcctactagcttcttgacagcttgatagagctttatgtctgccagttctaagagcttgaacatctgggcctgtgwataaaaattgaagccaaacctctgactgagaaacccaaaatacccctgtttgcagaatatgaagtgcttgatcatgtagcrgagctgctctggcttcatgtgtgtctgctgtattgatcctacccaaggatggagacaggacttctccttccctccacttcattccctcacrggagctgtccacagctgcatcacatctgcatgctcttcctcttcattttggatctcatcatctgtgatgagctcgtatcccagtgaagcccagccaaatgctcaagctggcaggagatgggctgtggg

SEQ ID NO: 18112 - DNA, 600 bp, Chicken  19866894226762_6
aaaaatcaaatgaaacaacatatttagcatattgaatatattacacagtyatycagattagtgatttgaaatgatctggactagattattctgcttatatttaatgtatgatggaatgtagtgaaatacatctgttttcatgctgcctactagcttcttgacagcttgatagagctttatgtctgccagttctaagagcttgaacatctgggcctgtgwataaaaattgaagccaaacctctgactgagaaacccaaaatacccctgtttgcagaatatgaagtgcttgatcatgtagcrgagctgctctggcttcatgtgtgtctgctgtattgatcctacccaaggatggagacaggacttctccttccctccacttcattccctcacrggagctgtccacagctgcatcacatctgcatgctcttcctcttcattttggatctcatcatctgtgatgagctcgtatcccagtgaagcccagccaaatgctcaagctggcaggagatgggctgtgggttcttggttccatcaagtctatggtcccagctgtttaaaagtcaagtcccttctggccttttcctccttgtgtgggtttga

SEQ ID NO: 18113 - DNA, 600 bp, Chicken  19866894226762_7
tgcttatatttaatgtatgatggaatgtagtgaaatacatctgttttcatgctgcctactagcttcttgacagcttgatagagctttatgtctgccagttctaagagcttgaacatctgggcctgtgwataaaaattgaagccaaacctctgactgagaaacccaaaatacccctgtttgcagaatatgaagtgcttgatcatgtagcrgagctgctctggcttcatgtgtgtctgctgtattgatcctacccaaggatggagacaggacttctccttccctccacttcattccctcacrggagctgtccacagctgcatcacatctgcatgctcttcctcttcattttggatctcatcatctgtgatgagctcgtatcccagtgaagcccagccaaatgctcaagctggcaggagatgggctgtgggttcttggttccatcaagtctatggtcccagctgtttaaaagtcaagtcccttctggccttttcctccttgtgtgggtttgaagcgttttcccgtgagtgtgaaatgcagatcagatttctttggaggcagacaggactctgtttgcttttgggattctttcagggagaaaaa

SEQ ID NO: 18114 - DNA, 599 bp, Chicken  19866894226763_1
  misc_feature (1)..(49): n is any nucleotide
nnnnnnnnnnnnnnnnnnnnnnnnnnnnnnnnnnnnnnnnnnnnnnnnntctttcagcaaacattttgggtgaaacaaattttgcctgatggatcacaagaagcacatagagttgatgctcaccatgctgtaatgtgatggaaagtacagcaataatagtgggatggcaaaagcctaggctgcagcaatgagaacaagaccaaatgcagcagccgtggacacagaaatgaagtaagcaaattttcttcctcatgaaagacctcaggtaggcagggatctccaacaagagataccctcatktccactgccaaccctaaatgagaatcctggctccaccccttccagtcactcaggtgcactgagtgcactggagctcccctaggttggcctgccttcccatcaggtgctcaatcactgcttcaggctgtgacttaccatttccactacaatgatccttcatagaaaacactgtgtcagcaatattgtaatctttaaatccaatgcctattaacttaagtgtccatgaatgcagctgccacagaagccaaattaaatctctattcacatagccctgttcacacagaacatgcatgaaaatc

SEQ ID NO: 18115 - DNA, 600 bp, Chicken  19866894226763_2
cccctaggttggcctgccttcccatcaggtgctcaatcactgcttcaggctgtgacttaccatttccactacaatgatccttcatagaaaacactgtgtcagcaatattgtaatctttaaatccaatgcctattaacttaagtgtccatgaatgcagctgccacagaagccaaattaaatctctattcacatagccctgttcacacagaacatgcatgaaaatcctccgtttaaagtctctaccctgtatttaatctgaaaacaatgatgccaccagagccattgggaaaacaaataccrcattgttcttggtcaacgcagctcaaaatgaagtgttaacttttcccacctacagtatacagcgtagaataccaattgtaactccaggatagtaatgaactcattcaaaaaataaacaaaaaagagtaaaaaaagactcttttttacagttactgtatcaggatgaaaagcccagatccaccagaacaagataaaattaagaacttwactctaatgagaaacatagaggttggtacctccaggagcaagaagcatgatcatgtaactgcttacttctcttcacacactttcaaaataccc

SEQ ID NO: 18116 - DNA, 600 bp, Chicken  19866894226763_3
gaacatgcatgaaaatcctccgtttaaagtctctaccctgtatttaatctgaaaacaatgatgccaccagagccattgggaaaacaaataccrcattgttcttggtcaacgcagctcaaaatgaagtgttaacttttcccacctacagtatacagcgtagaataccaattgtaactccaggatagtaatgaactcattcaaaaaataaacaaaaaagagtaaaaaaagactcttttttacagttactgtatcaggatgaaaagcccagatccaccagaacaagataaaattaagaacttwactctaatgagaaacatagaggttggtacctccaggagcaagaagcatgatcatgtaactgcttacttctcttcacacactttcaaaatacccttccaaccctggcctacagtgtgttccatacagagaaggcaaaatcagcttctctttcccaccggcctttgagcttccagagtctcacctatcttcctataccttcgggctattccagcagaaaggtgggacacctgcacagcatccagagcaccacacaaactgagagtttaaatgcactacagctcagaaagtatggtggccaca

SEQ ID NO: 18117 - DNA, 600 bp, Chicken  19866894226774_1
tctctggttccacacagcagcacactctggtgaaaagccttttcctaacaccaggctaaccatttctgccacagctccttgccattcccttgggttctgtcactgtcaccagagggaccagcacctgtgcctccactccccttgtgaggaagatgtagaaagactgttacaggtcagactgattttatcatttgtagaaaataagaaaagaaattccatttgtatttctcctttccagcttatctctgaaagctttcataaatctgttgcaaactccaatctcttgtacaaatttagggrctamtttagaatccttttgccatccaatctcatgtctctacgacatgyaaaattgtatacggattctaaaattcattcctctgctttatgccagctgctgccacctattggagttttagtttaaggtgctgtatgcgatttgatggktaagaaagagactgagaaacctgagttctgcttcccttttctcctttgactgtcctatatacaacctctcagtggttttttcatgatggaaaaaaaggaaatggcaatagttccttagcaaagtttgcaaatctctctggtgctcactgattc

SEQ ID NO: 18118 - DNA, 600 bp, Chicken  19866894226774_2
tggttccacacagcagcacactctggtgaaaagccttttcctaacaccaggctaaccatttctgccacagctccttgccattcccttgggttctgtcactgtcaccagagggaccagcacctgtgcctccactccccttgtgaggaagatgtagaaagactgttacaggtcagactgattttatcatttgtagaaaataagaaaagaaattccatttgtatttctcctttccagcttatctctgaaagctttcataaatctgttgcaaactccaatctcttgtacaaatttagggrctamtttagaatccttttgccatccaatctcatgtctctacgacatgyaaaattgtatacggattctaaaattcattcctctgctttatgccagctgctgccacctattggagttttagtttaaggtgctgtatgcgatttgatggktaagaaagagactgagaaacctgagttctgcttcccttttctcctttgactgtcctatatacaacctctcagtggttttttcatgatggaaaaaaaggaaatggcaatagttccttagcaaagtttgcaaatctctctggtgctcactgattcagag

SEQ ID NO: 18119 - DNA, 600 bp, Chicken  19866894226774_3
caccaggctaaccatttctgccacagctccttgccattcccttgggttctgtcactgtcaccagagggaccagcacctgtgcctccactccccttgtgaggaagatgtagaaagactgttacaggtcagactgattttatcatttgtagaaaataagaaaagaaattccatttgtatttctcctttccagcttatctctgaaagctttcataaatctgttgcaaactccaatctcttgtacaaatttagggrctamtttagaatccttttgccatccaatctcatgtctctacgacatgyaaaattgtatacggattctaaaattcattcctctgctttatgccagctgctgccacctattggagttttagtttaaggtgctgtatgcgatttgatggktaagaaagagactgagaaacctgagttctgcttcccttttctcctttgactgtcctatatacaacctctcagtggttttttcatgatggaaaaaaaggaaatggcaatagttccttagcaaagtttgcaaatctctctggtgctcactgattcagagcactagaacgatttccttctatcctggaatgcagagtagccaaa

SEQ ID NO: 18120 - DNA, 567 bp, Chicken  19866894226774_4
ggaagatgtagaaagactgttacaggtcagactgattttatcatttgtagaaaataagaaaagaaattccatttgtatttctcctttccagcttatctctgaaagctttcataaatctgttgcaaactccaatctcttgtacaaatttagggrctamtttagaatccttttgccatccaatctcatgtctctacgacatgyaaaattgtatacggattctaaaattcattcctctgctttatgccagctgctgccacctattggagttttagtttaaggtgctgtatgcgatttgatggktaagaaagagactgagaaacctgagttctgcttcccttttctcctttgactgtcctatatacaacctctcagtggttttttcatgatggaaaaaaaggaaatggcaatagttccttagcaaagtttgcaaatctctctggtgctcactgattcagagcactagaacgatttccttctatcctggaatgcagagtagccaaaattcacctgttaaagaactcacctcacccaacctgcatcttcagtgagaccatgagaggtcttcag

SEQ ID NO: 18121 - DNA, 600 bp, Chicken  19866894226784_1
ctacatcttttgtttatcttataagacatttttagtttaatctcatcttaagttatacataatgcaaaccagtaccacctgtaagtagttctaggaggcctttgttacccaaacgcagtgaaaggaagagcaggaaagctgcagagccccacagctgggaaggggatgcacatcccctgctgccctgtgccaagtggcacacagcacactgaactgaggggtgctgagagcccccgggatgtctgagtctctcaagtgccctgtgatggcactgagcagacacaacttgaaaccaagcawaccaagcaggaaaaaaaaaaggatccatgtascatctgygcagttctgtatggtagtaggggtcagctcttcccttttggcgtctatgaatcatggagccttgggagcttcctgcagaagggaacaagctgcagagctctacacacacagcaagcctggggaaaccatacttaaagccaagcaatgtttattcaagcccttggcagagcccgtggccaygtggtaggcgagtaataycgttctgcaactcaagtttagcagagtatgagaactgctcaacagcttttgcaagggctgtca

SEQ ID NO: 18122 - DNA, 600 bp, Chicken  19866894226784_2
tagtttaatctcatcttaagttatacataatgcaaaccagtaccacctgtaagtagttctaggaggcctttgttacccaaacgcagtgaaaggaagagcaggaaagctgcagagccccacagctgggaaggggatgcacatcccctgctgccctgtgccaagtggcacacagcacactgaactgaggggtgctgagagcccccgggatgtctgagtctctcaagtgccctgtgatggcactgagcagacacaacttgaaaccaagcawaccaagcaggaaaaaaaaaaggatccatgtascatctgygcagttctgtatggtagtaggggtcagctcttcccttttggcgtctatgaatcatggagccttgggagcttcctgcagaagggaacaagctgcagagctctacacacacagcaagcctggggaaaccatacttaaagccaagcaatgtttattcaagcccttggcagagcccgtggccaygtggtaggcgagtaataycgttctgcaactcaagtttagcagagtatgagaactgctcaacagcttttgcaagggctgtcagagacttcgggaatggcttgatactgggctaa

SEQ ID NO: 18123 - DNA, 600 bp, Chicken  19866894226784_3
atctcatcttaagttatacataatgcaaaccagtaccacctgtaagtagttctaggaggcctttgttacccaaacgcagtgaaaggaagagcaggaaagctgcagagccccacagctgggaaggggatgcacatcccctgctgccctgtgccaagtggcacacagcacactgaactgaggggtgctgagagcccccgggatgtctgagtctctcaagtgccctgtgatggcactgagcagacacaacttgaaaccaagcawaccaagcaggaaaaaaaaaaggatccatgtascatctgygcagttctgtatggtagtaggggtcagctcttcccttttggcgtctatgaatcatggagccttgggagcttcctgcagaagggaacaagctgcagagctctacacacacagcaagcctggggaaaccatacttaaagccaagcaatgtttattcaagcccttggcagagcccgtggccaygtggtaggcgagtaataycgttctgcaactcaagtttagcagagtatgagaactgctcaacagcttttgcaagggctgtcagagacttcgggaatggcttgatactgggctaaagctcca

SEQ ID NO: 18124 - DNA, 600 bp, Chicken  19866894226784_4
ggtgctgagagcccccgggatgtctgagtctctcaagtgccctgtgatggcactgagcagacacaacttgaaaccaagcawaccaagcaggaaaaaaaaaaggatccatgtascatctgygcagttctgtatggtagtaggggtcagctcttcccttttggcgtctatgaatcatggagccttgggagcttcctgcagaagggaacaagctgcagagctctacacacacagcaagcctggggaaaccatacttaaagccaagcaatgtttattcaagcccttggcagagcccgtggccaygtggtaggcgagtaataycgttctgcaactcaagtttagcagagtatgagaactgctcaacagcttttgcaagggctgtcagagacttcgggaatggcttgatactgggctaaagctccacctaggcactccacacgccttaggaattccaacaatttgcagctctctgatcccggtaggaggttctttctttgtaatctcctaacaaatcaaacacaatcattttattctgcatgaaaatagcaaactcgggtatctttctgagtcagaggatttaaagttcaagtcattctgaaagcc

SEQ ID NO: 18125 - DNA, 600 bp, Chicken  19866894226784_5
gatgtctgagtctctcaagtgccctgtgatggcactgagcagacacaacttgaaaccaagcawaccaagcaggaaaaaaaaaaggatccatgtascatctgygcagttctgtatggtagtaggggtcagctcttcccttttggcgtctatgaatcatggagccttgggagcttcctgcagaagggaacaagctgcagagctctacacacacagcaagcctggggaaaccatacttaaagccaagcaatgtttattcaagcccttggcagagcccgtggccaygtggtaggcgagtaataycgttctgcaactcaagtttagcagagtatgagaactgctcaacagcttttgcaagggctgtcagagacttcgggaatggcttgatactgggctaaagctccacctaggcactccacacgccttaggaattccaacaatttgcagctctctgatcccggtaggaggttctttctttgtaatctcctaacaaatcaaacacaatcattttattctgcatgaaaatagcaaactcgggtatctttctgagtcagaggatttaaagttcaagtcattctgaaagcctcgctctaattaagagaa

SEQ ID NO: 18126 - DNA, 531 bp, Chicken  19866894226785_1
atatttcacttgtattagagatttgatgatgaaatgcccaaatttaatacagctattacttgtatgagtacaaaataattcatccaaagcttgaagtctattagctgccaaccagtctaacaatttacatgattttctgattaaaagcaccctgaagactactgcagtaataatgaggtgtttcttaaagaatccaaagcaatacacttatttaaaaacatttattatagcagcagtttaaacatagtgatttttttggagacaagaaaaaaaatatttgtttctctggcaaaattactyctttataaattttcagaacattagctctgaagctgcaactttctgtaaagtattgagtgtatgggaaggggaagataatttactccattttgaactatttaagacaaagaatctttgcaataaatgctatcatctctaacagttctctttctctttcctcacagcctaaacaaaaattctccaaaacttcataggcaaatatgttgcactgacacacacgggaaaaatgat

SEQ ID NO: 18127 - DNA, 600 bp, Chicken  19866894226790_1
cactattctgagtaacagctttcagcctataatcaaatgccatgtttcttccttcatttgatttcacagaaaaaaattcactgtgagttttcataatagaaattcatttcttgacaacaggaagcaacccaagctgccacctgcaacattcagaatcttgcattaaaaaagctctttctggacagaaagcgtagcagatcacagataagattatctgatgcacttaactcttgcgtggataatagttctgctctgtaatttgaaatgaacttgcaaaggatgctgtggggatacaacctkctgctgttgcttcactagaagtagacagtcacccttattctgaatgatttttgataataatcacaatacttccccatggtttgctttggggaaatctccagtgtttcttttatttcagttattcattctccttcctacaaagtgaatggtaacctggagggcctgtgacatttgaggccttttcagaaacaatgataaatgctttctttgctgacttctggatggaggtgttgcctaccccatggcctttttttcactaataggtagagcagcactttctgttttgcacagatgaagcag

SEQ ID NO: 18128 - DNA, 600 bp, Chicken  19866894226795_1
acctgcatgaattttccccactagaagtttgttgtgactttttggcttgcaggaaggtcatttttagctcggacttctgtatcccagcattggtcccatagggaatgagtgtcagaagtcagctggagtagtgttaaatataaagcgacctttattatgtactgcttagcagaagatacttaatcttaattttttttcaaaaacaatattggagcccaatctatttatattttctttttaattctcgtaaatccattctgcttgggcttaaattatgagcgaagggattacttgcctgarttcacacgatgttacctccagagcataagcaacccgaaagctgattaaactcacaggttggtattgtggcaacagaagttcctattcaccttctttaaaagcttcactgtgtgcctgagattatttcagtgacacataacatttcatgaaaagatttccttttcagatgggattgttattatctatctatctaattattcttgcagatgcttattttatcacttaagcttttatttttttgaatcagtggaaaaatattcacttaaaccaggtaaattttaagggatttgggcaactgag

SEQ ID NO: 18129 - DNA, 567 bp, Chicken  19866894226796_1
gtcatctgtgctgggattcatttagccttctgtgtccattgacatgatgtagtaactgaagttcctacactgatttgattattggacctgcagtctcatcctagaagcaaggtgttaggactgtaacgtaaccactggtttcaaggaatgccctgtttactttgaatgctgtcgacagcatctagctagacactcaaaaatgaatggtgacagcatgcattgtgaagcacaaggataaagatggtgtcacaagttgatgcaagaagagaatcagcatgggaaaagagcaaacctgattcyaatcagtgtgtcatgctcccagaatagccccttccaaaataaggcttcttaaactctctcgataatgaagcaacaagagctataaatagaaagcaggaacttcaaggtacagagagacaagaaatccttcccaaggagaactcactgtgatgaggaatacattgaggtgtatatgcatactcatttattgggttaaatgcaaggaaaggtaaaaaaaatgttcctcctcaggaaaaagaaaataaaaatgcttcatctcaaagaaag

SEQ ID NO: 18130 - DNA, 600 bp, Chicken  19866894226800_1
gagctgttcacatgaataccctattaagtaaccctaggacttcaacttatgtgtgtagaagaattacagcaagaatcacatgcatcccataaacttggttttagtgcttaaaattttaatcttcagcctaaaaaaaagacttgcataaaaatgaaaacagactggtagcacacaaaattaactgtttagtaaaagattgtttatatctgtgttgttgaaccagaacaaaattttaagaaaaaaatagaaaccatcttgcatataactgatcagaatcaggtgagtaaaaatatggaatamataaagaaattcagtgcaaacctctatgtataaagcaaccaagaargaaaatcaaaccatttgaggttgtaaagataaattaaggcttgtatacagctcttatgtaaaagtacttgtgccttactcttccaatgatgtgcattttgtgcatcattctattttgaaaggagaaaaataacagtgatcagagacaagcgaaacttaattgaatgtaagcgtgtaaaggagactgtgaagggttggaactgttcaaagcacagaagaatcccaataaccagaacagcaaatggcatacagaca

SEQ ID NO: 18131 - DNA, 600 bp, Chicken  19866894226800_2
ttatgtgtgtagaagaattacagcaagaatcacatgcatcccataaacttggttttagtgcttaaaattttaatcttcagcctaaaaaaaagacttgcataaaaatgaaaacagactggtagcacacaaaattaactgtttagtaaaagattgtttatatctgtgttgttgaaccagaacaaaattttaagaaaaaaatagaaaccatcttgcatataactgatcagaatcaggtgagtaaaaatatggaatamataaagaaattcagtgcaaacctctatgtataaagcaaccaagaargaaaatcaaaccatttgaggttgtaaagataaattaaggcttgtatacagctcttatgtaaaagtacttgtgccttactcttccaatgatgtgcattttgtgcatcattctattttgaaaggagaaaaataacagtgatcagagacaagcgaaacttaattgaatgtaagcgtgtaaaggagactgtgaagggttggaactgttcaaagcacagaagaatcccaataaccagaacagcaaatggcatacagacatagattgatggtttagggttttgtttttgttgtctttttttgttgt

SEQ ID NO: 18132 - DNA, 549 bp, Chicken  19866894226806_1
  misc_feature (1)..(9): n is any nucleotide
nnnnnnnnnacacatatagagggaattacttaaaaaactgtgaaaggctagataaactttattacagatcacaacgtgataagcaactgcatgcaatactttttatgcatttttcatgaaataactactcagaaaaataaatggccagctgaaacttcttatggaagccagcaccaaggaaagcccttttccaactgagtggccagtcagacgtttggttaattctctctctgtccattaccttgcattcttgactacacagtggcaaatatcccagatgtagaagtatcacagccagaycagtagtgtgaaagtgacactcctcaggagagggaaatgagcaacaagagcacaagtatctcacttgtgacccaaagctctaattacactgttattaaggttagtggcataatgacatttctgagcatccttccaaataataattttttgcatccagagacatacatgaaatataggtaggtgtgctggatccaaactgcaattctggatcggaactcccaacgtgcttatcttggaatatcacttcta

SEQ ID NO: 18133 - DNA, 600 bp, Chicken  19866894226807_1
agtaggcacaaggaaaaaggaaatgtaatgaaatcacattggtcagtttgaacacctaatgatggtcaggtggaacctggcttatttctggatacagctggatgctcatgttgtgcagtcaccctgccataatctaaggtattttttatgacacacctgactcacctattttcagctattttcatatgtagaaactattttcctgcatatggcatatattcttgactcagctgttgggatttttgttggttgttagtttttttggttggttggttgttgcgtttcttagaaaagcaatamattcacaatgttaggtttttttaattaataggtatttgctttaaataggytttgaaaacaaagaaaattttccataccatttcccttckttgtaaataagtctctttaagaatcaaaggagattccttaatttcctgatagaagtttaataaacacatgtagagcaaaagaagctacattaattctcacagcagaatcagacaaaagcttcaagcaatgtaaaaactggctttaccaagctgaatagtaggaaacaaagaatagctgaagtcaggaagtgtattgtaggcatggaacaga

SEQ ID NO: 18134 - DNA, 600 bp, Chicken  19866894226807_2
aacacctaatgatggtcaggtggaacctggcttatttctggatacagctggatgctcatgttgtgcagtcaccctgccataatctaaggtattttttatgacacacctgactcacctattttcagctattttcatatgtagaaactattttcctgcatatggcatatattcttgactcagctgttgggatttttgttggttgttagtttttttggttggttggttgttgcgtttcttagaaaagcaatamattcacaatgttaggtttttttaattaataggtatttgctttaaataggytttgaaaacaaagaaaattttccataccatttcccttckttgtaaataagtctctttaagaatcaaaggagattccttaatttcctgatagaagtttaataaacacatgtagagcaaaagaagctacattaattctcacagcagaatcagacaaaagcttcaagcaatgtaaaaactggctttaccaagctgaatagtaggaaacaaagaatagctgaagtcaggaagtgtattgtaggcatggaacagaagttaatagcgtttaatagctctggtgaagcgggaggctgctgtgaatta

SEQ ID NO: 18135 - DNA, 600 bp, Chicken  19866894226807_3
ggatacagctggatgctcatgttgtgcagtcaccctgccataatctaaggtattttttatgacacacctgactcacctattttcagctattttcatatgtagaaactattttcctgcatatggcatatattcttgactcagctgttgggatttttgttggttgttagtttttttggttggttggttgttgcgtttcttagaaaagcaatamattcacaatgttaggtttttttaattaataggtatttgctttaaataggytttgaaaacaaagaaaattttccataccatttcccttckttgtaaataagtctctttaagaatcaaaggagattccttaatttcctgatagaagtttaataaacacatgtagagcaaaagaagctacattaattctcacagcagaatcagacaaaagcttcaagcaatgtaaaaactggctttaccaagctgaatagtaggaaacaaagaatagctgaagtcaggaagtgtattgtaggcatggaacagaagttaatagcgtttaatagctctggtgaagcgggaggctgctgtgaattattagagtcctgtaaagggttgcaacaaatttcctttgct

SEQ ID NO: 18136 - DNA, 600 bp, Chicken  19866894226812_1
agatgctcttaaataaatagaactcatctgctttatgtagcacttgaaaactttgtaattcagaataatcccatgacaacagaccgctgattgacatttgggagttaaaacataggtagccgttcactaagggacagttctacttgttgaaaatacttcttagatgccaaaagtacaagggaaggagatgccaggggaattccaactacaaatgtaatgcttttgaccaaattcttaagagctttccctgttggctgaaattcacttgagaagtggcttgcacttcattacagtcgcatwtctyayatctgagaactaccatccctgaataaggagtgagaagttacaattacttccattatattcattayatgtaacataaacgtcgtgacttcttaggctgtttaaaaatacagattacatttctgtgtcctgtgtgaattacttcagataacacataaaataacaagaattgcacgtgagacttaactccttgtgtttacagtggtgccaaactcaaaatgattatgtgaaagaataactttttaaaacagaccttgctggaaactgagacctcaacagctttttaatttattttta

SEQ ID NO: 18137 - DNA, 600 bp, Chicken  19866894226812_2
gctcttaaataaatagaactcatctgctttatgtagcacttgaaaactttgtaattcagaataatcccatgacaacagaccgctgattgacatttgggagttaaaacataggtagccgttcactaagggacagttctacttgttgaaaatacttcttagatgccaaaagtacaagggaaggagatgccaggggaattccaactacaaatgtaatgcttttgaccaaattcttaagagctttccctgttggctgaaattcacttgagaagtggcttgcacttcattacagtcgcatwtctyayatctgagaactaccatccctgaataaggagtgagaagttacaattacttccattatattcattayatgtaacataaacgtcgtgacttcttaggctgtttaaaaatacagattacatttctgtgtcctgtgtgaattacttcagataacacataaaataacaagaattgcacgtgagacttaactccttgtgtttacagtggtgccaaactcaaaatgattatgtgaaagaataactttttaaaacagaccttgctggaaactgagacctcaacagctttttaatttatttttaacgt

SEQ ID NO: 18138 - DNA, 600 bp, Chicken  19866894226812_3
tcttaaataaatagaactcatctgctttatgtagcacttgaaaactttgtaattcagaataatcccatgacaacagaccgctgattgacatttgggagttaaaacataggtagccgttcactaagggacagttctacttgttgaaaatacttcttagatgccaaaagtacaagggaaggagatgccaggggaattccaactacaaatgtaatgcttttgaccaaattcttaagagctttccctgttggctgaaattcacttgagaagtggcttgcacttcattacagtcgcatwtctyayatctgagaactaccatccctgaataaggagtgagaagttacaattacttccattatattcattayatgtaacataaacgtcgtgacttcttaggctgtttaaaaatacagattacatttctgtgtcctgtgtgaattacttcagataacacataaaataacaagaattgcacgtgagacttaactccttgtgtttacagtggtgccaaactcaaaatgattatgtgaaagaataactttttaaaacagaccttgctggaaactgagacctcaacagctttttaatttatttttaacgttt

SEQ ID NO: 18139 - DNA, 600 bp, Chicken  19866894226812_4
catgacaacagaccgctgattgacatttgggagttaaaacataggtagccgttcactaagggacagttctacttgttgaaaatacttcttagatgccaaaagtacaagggaaggagatgccaggggaattccaactacaaatgtaatgcttttgaccaaattcttaagagctttccctgttggctgaaattcacttgagaagtggcttgcacttcattacagtcgcatwtctyayatctgagaactaccatccctgaataaggagtgagaagttacaattacttccattatattcattayatgtaacataaacgtcgtgacttcttaggctgtttaaaaatacagattacatttctgtgtcctgtgtgaattacttcagataacacataaaataacaagaattgcacgtgagacttaactccttgtgtttacagtggtgccaaactcaaaatgattatgtgaaagaataactttttaaaacagaccttgctggaaactgagacctcaacagctttttaatttatttttaacgtttagcagcttatagcaggaattccatttccgttaattgatgaaatgagagaggaactgaatagggaa

SEQ ID NO: 18140 - DNA, 600 bp, Chicken  19866894226812_5
atttctgtgtcctgtgtgaattacttcagataacacataaaataacaagaattgcacgtgagacttaactccttgtgtttacagtggtgccaaactcaaaatgattatgtgaaagaataactttttaaaacagaccttgctggaaactgagacctcaacagctttttaatttatttttaacgtttagcagcttatagcaggaattccatttccgttaattgatgaaatgagagaggaactgaatagggaaataaacacctcacggcagtggcccaacatactaagagaagaccgtggctrttaacagctgtgtctcatttttcacgtgcaagttgtgtgaaagataaaatatcagcaacaccacagtacacattttttaccttatacaaaaaagtagatctgtttgaaaagtacatgcaagtgtgctggctggaatttaaagtatttttttattcataaaaattaaaatgctgaccctttaaaggtgagcgtgaacagtgtttgactgcatgaattacaatcagaagaaaataactcatcaacttaattccaacttaacgtttcctaatgtgattgtcctcaaaaagaaraaaaactact

SEQ ID NO: 18141 - DNA, 600 bp, Chicken  19866894226812_6
accgtggctrttaacagctgtgtctcatttttcacgtgcaagttgtgtgaaagataaaatatcagcaacaccacagtacacattttttaccttatacaaaaaagtagatctgtttgaaaagtacatgcaagtgtgctggctggaatttaaagtatttttttattcataaaaattaaaatgctgaccctttaaaggtgagcgtgaacagtgtttgactgcatgaattacaatcagaagaaaataactcatcaacttaattccaacttaacgtttcctaatgtgattgtcctcaaaaagaaraaaaactacttacagtacaattttccttagaagtaactgtgatctctagtataaatattccaatctcactggctttctttcatactgtcctatcttccaaagttcagtagtaagttgtggggatccccttctccctggccaacttcatctgtttttttgaaaaaaacacttgttatcccataacagttttgaaatccatttttattttttatttttttttcagttgtgccagaacaaatttgtattttgtactattggatggtccaggggcttggtcccaagggggagaaagggggaagg

SEQ ID NO: 18142 - DNA, 600 bp, Chicken  19866894226816_1
tttctccttcagtgaataaacatatttaaaagtagaataactgaactagaaagaaatcacatggaatttttataagagcatatctgtggtagcctccaaacaatacgctaccatctgcacttctgatttcagaaagcagcaatgagtaatagcatttgattgtctgtaggagttggggtaggaggatggttgatcactactccaacccaacctcattgttttatgaagatcaagagaatcattctgatcctgcttgcacaccagcataaactgactcccagcgtaagaaattttgggctmatggcttctattctctgctctacaggagaaagatattggtaagaattggtctaagycgtcactgacaactgagagatctattactgcatgtcaggcattccccactcttgtagaacctctacaattaaccatcacatacattactgatcacagttttgctaataatttatcttcaaaaaccttgacaaaaacctggaagtgaagcagctctcattttcattccacttccttccagagctccaagggtttctagctccccagccctcctctattgctttcatacagcactgtttccattaa

SEQ ID NO: 18143 - DNA, 600 bp, Chicken  19866894226816_2
tcacatggaatttttataagagcatatctgtggtagcctccaaacaatacgctaccatctgcacttctgatttcagaaagcagcaatgagtaatagcatttgattgtctgtaggagttggggtaggaggatggttgatcactactccaacccaacctcattgttttatgaagatcaagagaatcattctgatcctgcttgcacaccagcataaactgactcccagcgtaagaaattttgggctmatggcttctattctctgctctacaggagaaagatattggtaagaattggtctaagycgtcactgacaactgagagatctattactgcatgtcaggcattccccactcttgtagaacctctacaattaaccatcacatacattactgatcacagttttgctaataatttatcttcaaaaaccttgacaaaaacctggaagtgaagcagctctcattttcattccacttccttccagagctccaagggtttctagctccccagccctcctctattgctttcatacagcactgtttccattaatatcaggttttttgtttaagaaccttatcttttgagataactatccagccccagaa

SEQ ID NO: 18144 - DNA, 599 bp, Chicken  19866894226817_1
  misc_feature (1)..(1): n is any nucleotide
nctaagaatttccggtcaaaaaggtctgtcttgactgttcacctgcaatcaatatagtagtcaaaaggagatttatatgagttttttttacttctttggctggtagagtaaaacagttatgatcaactaggttattgaaaaattccttatttattaatcaaatattgccttctagatgaaattcaggccaggagataggaataaaatttatagctgctgaaccgtaaatcacaatccagtctcttgcagtcatgttcacatgattagaagtacttaatttattgtaggtacacacttttygccagggcctttgaacacaaataactgactgtgagcctgccccttgcccagcacaatcacaaggtaaaacagaactagttgacacaccttcacattagttttgtacatcctcatttggagggtgttcaaagtctattgcatacacattcatgtctctcttcatgtaactttagtttctatttgtatagaaacacctgttttctcactttacrttgtcccacttggaggacagtaacccctggggaacaaactccacacttcagcttaattatgcttctttttgctgactacaagaaaaa

SEQ ID NO: 18145 - DNA, 600 bp, Chicken  19866894226817_2
gctgctgaaccgtaaatcacaatccagtctcttgcagtcatgttcacatgattagaagtacttaatttattgtaggtacacacttttygccagggcctttgaacacaaataactgactgtgagcctgccccttgcccagcacaatcacaaggtaaaacagaactagttgacacaccttcacattagttttgtacatcctcatttggagggtgttcaaagtctattgcatacacattcatgtctctcttcatgtaactttagtttctatttgtatagaaacacctgttttctcactttacrttgtcccacttggaggacagtaacccctggggaacaaactccacacttcagcttaattatgcttctttttgctgactacaagaaaaaaagtaaggttcaatctgaggaggaactgaatcagatccacaactgataactagcacagcttctgtaaagaatccaacttcaactccctgaaatttagggaggtagttgcagggtaggcatgtttcggaacacaaggtccatatcctggcctttatctcagtgtctgatcaactactcccagtaccttttccccatgaaaaaaagtgtctcctc

SEQ ID NO: 18146 - DNA, 599 bp, Chicken  19866894226818_1
  misc_feature (1)..(92): n is any nucleotide
nnnnnnnnnnnnnnnnnnnnnnnnnnnnnnnnnnnnnnnnnnnnnnnnnnnnnnnnnnnnnnnnnnnnnnnnnnnnnnnnnnnnnnnnnnnnagaaagaaaacaatgctttacaacattttgaccgtatcagagcaattgttcttatgagtgaacataaccacgctacagttaggactgttataaagaggttgcccgactgctgcatgccttgtgctggacaggtgacaaatctgtgcctgaaagggtaacaggctgcatgcactgtgcctgagctgtgctctagtggaggttgtgctgrgaatgaattttgacccagtgatgcttctttggtggggtggctgctggtttgggtgagagggctggagccaascrtaacagaagctggtgtttgcagaaaaggaaatgaagagctgaatagtaaattcaatgtgtttacagtgtcacagcagaaacacattagcttcatgcctattactttaaaatgactcagattaaataatgttaataacttctttcttctcatattactacaaacgagggactcagacttctcccaggccttcgaggatccctctctgttataaagtacttacataa

SEQ ID NO: 18147 - DNA, 599 bp, Chicken  19866894226818_2
  misc_feature (1)..(20): n is any nucleotide
nnnnnnnnnnnnnnnnnnnnagaaagaaaacaatgctttacaacattttgaccgtatcagagcaattgttcttatgagtgaacataaccacgctacagttaggactgttataaagaggttgcccgactgctgcatgccttgtgctggacaggtgacaaatctgtgcctgaaagggtaacaggctgcatgcactgtgcctgagctgtgctctagtggaggttgtgctgrgaatgaattttgacccagtgatgcttctttggtggggtggctgctggtttgggtgagagggctggagccaascrtaacagaagctggtgtttgcagaaaaggaaatgaagagctgaatagtaaattcaatgtgtttacagtgtcacagcagaaacacattagcttcatgcctattactttaaaatgactcagattaaataatgttaataacttctttcttctcatattactacaaacgagggactcagacttctcccaggccttcgaggatccctctctgttataaagtacttacataatgcaaagcaaaataaatatccaagtaacatgtaggaacatgtcaaacactgtgggataccataaaaatatgt

SEQ ID NO: 18148 - DNA, 599 bp, Chicken  19866894226818_3
  misc_feature (1)..(18): n is any nucleotide
nnnnnnnnnnnnnnnnnnagaaagaaaacaatgctttacaacattttgaccgtatcagagcaattgttcttatgagtgaacataaccacgctacagttaggactgttataaagaggttgcccgactgctgcatgccttgtgctggacaggtgacaaatctgtgcctgaaagggtaacaggctgcatgcactgtgcctgagctgtgctctagtggaggttgtgctgrgaatgaattttgacccagtgatgcttctttggtggggtggctgctggtttgggtgagagggctggagccaascrtaacagaagctggtgtttgcagaaaaggaaatgaagagctgaatagtaaattcaatgtgtttacagtgtcacagcagaaacacattagcttcatgcctattactttaaaatgactcagattaaataatgttaataacttctttcttctcatattactacaaacgagggactcagacttctcccaggccttcgaggatccctctctgttataaagtacttacataatgcaaagcaaaataaatatccaagtaacatgtaggaacatgtcaaacactgtgggataccataaaaatatgttc

SEQ ID NO: 18149 - DNA, 600 bp, Chicken  19866894226818_4
gtaaattcaatgtgtttacagtgtcacagcagaaacacattagcttcatgcctattactttaaaatgactcagattaaataatgttaataacttctttcttctcatattactacaaacgagggactcagacttctcccaggccttcgaggatccctctctgttataaagtacttacataatgcaaagcaaaataaatatccaagtaacatgtaggaacatgtcaaacactgtgggataccataaaaatatgttcataagtagactcgtatggagagttccatgaaagcctggaggctttkaacaactctgtcatctgaatcaggtaactgctgggtgtgccattctgtcccarcatcaagggagtcaggatttcttctgcttttcatggctttattttaaagttagcagatactggatgcttttgagatttatacagaggtgcaagaaagagctgaatgatttcagggaagatgcagggacctataagaagagcaggaatggctttgcgtgctgtaccaaaaccagtcatgttggagtttgcagtggttttggaaaagttgcagagcaggtgtagccagtctaagcctggtcttgtgact

SEQ ID NO: 18150 - DNA, 600 bp, Chicken  19866894226818_5
attactttaaaatgactcagattaaataatgttaataacttctttcttctcatattactacaaacgagggactcagacttctcccaggccttcgaggatccctctctgttataaagtacttacataatgcaaagcaaaataaatatccaagtaacatgtaggaacatgtcaaacactgtgggataccataaaaatatgttcataagtagactcgtatggagagttccatgaaagcctggaggctttkaacaactctgtcatctgaatcaggtaactgctgggtgtgccattctgtcccarcatcaagggagtcaggatttcttctgcttttcatggctttattttaaagttagcagatactggatgcttttgagatttatacagaggtgcaagaaagagctgaatgatttcagggaagatgcagggacctataagaagagcaggaatggctttgcgtgctgtaccaaaaccagtcatgttggagtttgcagtggttttggaaaagttgcagagcaggtgtagccagtctaagcctggtcttgtgactcctaattttactacagggaagagccggagggatagcaccacagaataggcagg

SEQ ID NO: 18151 - DNA, 599 bp, Chicken  19866894226827_1
  misc_feature (1)..(22): n is any nucleotide
nnnnnnnnnnnnnnnnnnnnnncatggtttgtttgtgcaataaagatttcttgttttatttttctttttcctatattgacagcatttataggttgttatattggtgcctgttttgaaatagcaggctactgaactcttttttccttccactccctgaaaccagctttgatataaccgtacctccattccggggctgcatgaagaatgtgaaaaccccagagactgcatctgttgtttttgatgagactgttggtgttagcaagaaatgttcagatgactggaaggtaagtaacagcattrttctaaaacatttggtaaagttcatagtctcaggtttgtctgtaaaaacatggacattgttttacttagatcaaaaactagctttgkttatcatgtgatggtaaagaaagaaaacgacttyagtgtgaagatacaaagakaaaggagtctgcacycctgctgtgattgtttgctccagtacatagtccatcctcttaatactgtgctctaagaaatcacatttaccacatagatctgttggcctccagttgctgttactgattaggtcagaatatgtagtcacctaatactaatcagga

SEQ ID NO: 18152 - DNA, 600 bp, Chicken  19866894226827_2
ataggttgttatattggtgcctgttttgaaatagcaggctactgaactcttttttccttccactccctgaaaccagctttgatataaccgtacctccattccggggctgcatgaagaatgtgaaaaccccagagactgcatctgttgtttttgatgagactgttggtgttagcaagaaatgttcagatgactggaaggtaagtaacagcattrttctaaaacatttggtaaagttcatagtctcaggtttgtctgtaaaaacatggacattgttttacttagatcaaaaactagctttgkttatcatgtgatggtaaagaaagaaaacgacttyagtgtgaagatacaaagakaaaggagtctgcacycctgctgtgattgtttgctccagtacatagtccatcctcttaatactgtgctctaagaaatcacatttaccacatagatctgttggcctccagttgctgttactgattaggtcagaatatgtagtcacctaatactaatcaggatctatcttctcgttaaggtgcttatgcttcataattgagtcacttctcaatctttctccttgacagagctaagcttccactacagtct

SEQ ID NO: 18153 - DNA, 600 bp, Chicken  19866894226827_3
caggctactgaactcttttttccttccactccctgaaaccagctttgatataaccgtacctccattccggggctgcatgaagaatgtgaaaaccccagagactgcatctgttgtttttgatgagactgttggtgttagcaagaaatgttcagatgactggaaggtaagtaacagcattrttctaaaacatttggtaaagttcatagtctcaggtttgtctgtaaaaacatggacattgttttacttagatcaaaaactagctttgkttatcatgtgatggtaaagaaagaaaacgacttyagtgtgaagatacaaagakaaaggagtctgcacycctgctgtgattgtttgctccagtacatagtccatcctcttaatactgtgctctaagaaatcacatttaccacatagatctgttggcctccagttgctgttactgattaggtcagaatatgtagtcacctaatactaatcaggatctatcttctcgttaaggtgcttatgcttcataattgagtcacttctcaatctttctccttgacagagctaagcttccactacagtctctcacaggaaggcaattgctccacttgtgtgttg

SEQ ID NO: 18154 - DNA, 600 bp, Chicken  19866894226827_4
ttccttccactccctgaaaccagctttgatataaccgtacctccattccggggctgcatgaagaatgtgaaaaccccagagactgcatctgttgtttttgatgagactgttggtgttagcaagaaatgttcagatgactggaaggtaagtaacagcattrttctaaaacatttggtaaagttcatagtctcaggtttgtctgtaaaaacatggacattgttttacttagatcaaaaactagctttgkttatcatgtgatggtaaagaaagaaaacgacttyagtgtgaagatacaaagakaaaggagtctgcacycctgctgtgattgtttgctccagtacatagtccatcctcttaatactgtgctctaagaaatcacatttaccacatagatctgttggcctccagttgctgttactgattaggtcagaatatgtagtcacctaatactaatcaggatctatcttctcgttaaggtgcttatgcttcataattgagtcacttctcaatctttctccttgacagagctaagcttccactacagtctctcacaggaaggcaattgctccacttgtgtgttgtgaaatctcctgtgccccc

SEQ ID NO: 18155 - DNA, 600 bp, Chicken  19866894226827_5
gaaaccagctttgatataaccgtacctccattccggggctgcatgaagaatgtgaaaaccccagagactgcatctgttgtttttgatgagactgttggtgttagcaagaaatgttcagatgactggaaggtaagtaacagcattrttctaaaacatttggtaaagttcatagtctcaggtttgtctgtaaaaacatggacattgttttacttagatcaaaaactagctttgkttatcatgtgatggtaaagaaagaaaacgacttyagtgtgaagatacaaagakaaaggagtctgcacycctgctgtgattgtttgctccagtacatagtccatcctcttaatactgtgctctaagaaatcacatttaccacatagatctgttggcctccagttgctgttactgattaggtcagaatatgtagtcacctaatactaatcaggatctatcttctcgttaaggtgcttatgcttcataattgagtcacttctcaatctttctccttgacagagctaagcttccactacagtctctcacaggaaggcaattgctccacttgtgtgttgtgaaatctcctgtgcccccatgagttttgctaca

SEQ ID NO: 18156 - DNA, 600 bp, Chicken  19866894226827_6
tgaaaaccccagagactgcatctgttgtttttgatgagactgttggtgttagcaagaaatgttcagatgactggaaggtaagtaacagcattrttctaaaacatttggtaaagttcatagtctcaggtttgtctgtaaaaacatggacattgttttacttagatcaaaaactagctttgkttatcatgtgatggtaaagaaagaaaacgacttyagtgtgaagatacaaagakaaaggagtctgcacycctgctgtgattgtttgctccagtacatagtccatcctcttaatactgtgcyctaagaaatcacatttaccacatagatctgttggcctccagttgctgttactgattaggtcagaatatgtagtcacctaatactaatcaggatctatcttctcgttaaggtgcttatgcttcataattgagtcacttctcaatctttctccttgacagagctaagcttccactacagtctctcacaggaaggcaattgctccacttgtgtgttgtgaaatctcctgtgcccccatgagttttgctacattccttttaaaatgggacagtgtggcttttcagtgttgtcttacccagtgct

SEQ ID NO: 18157 - DNA, 600 bp, Chicken  19866894226827_7; identical to SEQ ID NO: 18156

SEQ ID NO: 18158 - DNA, 600 bp, Chicken  19866894226827_8; identical to SEQ ID NO: 18156

SEQ ID NO: 18159 - DNA, 599 bp, Chicken  19866894226833_1
  misc_feature (1)..(222): n is any nucleotide
nnnnnnnnnnnnnnnnnnnnnnnnnnnnnnnnnnnnnnnnnnnnnnnnnnnnnnnnnnnnnnnnnnnnnnnnnnnnnnnnnnnnnnnnnnnnnnnnnnnnnnnnnnnnnnnnnnnnnnnnnnnnnnnnnnnnnnnnnnnnnnnnnnnnnnnnnnnnnnnnnnnnnnnnnnnnnnnnnnnnnnnnnnnnnnnnnnnnnnnnnnnnnnnnnnnnnnnnnnnnnntgaaagtttacaagccctaatttaccacatgtgcagcatgctgggcttttatgtagttttgtttgtccaacaaaagtytttcccagtcagggtgctgttggcactgctgtctcattaataaaggacagcgtgcagtaattgcagtgggaaatggaggtgacaaatcagttaaaaataataaaaataaataaaaatcacagaatcgtggaactgtaggggttggaagggacctctggagatcgagtccaacctccctgcaaagcaggcccctacagcaagtgaaatcccttacaattccmaaacactaaaaattaccaaaaacttgcagccttgcattgaaggaaccttgaacttaagtaagaggcatcaacttccat

SEQ ID NO: 18160 - DNA, 599 bp, Chicken  19866894226833_2
  misc_feature (1)..(1): n is any nucleotide
ntgaaagtttacaagccctaatttaccacatgtgcagcatgctgggcttttatgtagttttgtttgtccaacaaaagtytttcccagtcagggtgctgttggcactgctgtctcattaataaaggacagcgtgcagtaattgcagtgggaaatggaggtgacaaatcagttaaaaataataaaaataaataaaaatcacagaatcgtggaactgtaggggttggaagggacctctggagatcgagtccaacctccctgcaaagcaggcccctacagcaagtgaaatcccttacaattccmaaacactaaaaattaccaaaaacttgcagccttgcattgaaggaaccttgaacttaagtaagaggcatcaacttccatgttcatctcttctaacatggcagctcggttcctgagcctactgacatggccaacaatttgtagcaactaataagatagaactgtttctcttcacagcagaaactgatgtaaatgtctracttgtttgacaaatgccctaaatgtagttgggtgatggctttgtcagtaaactctgtgtggttcttctatttgccagtagctggaaataaccatgacatttt

SEQ ID NO: 18161 - DNA, 488 bp, Chicken  19866894226833_3
cacagaatcgtggaactgtaggggttggaagggacctctggagatcgagtccaacctccctgcaaagcaggcccctacagcaagtgaaatcccttacaattccmaaacactaaaaattaccaaaaacttgcagccttgcattgaaggaaccttgaacttaagtaagaggcatcaacttccatgttcatctcttctaacatggcagctcggttcctgagcctactgacatggccaacaatttgtagcaactaataagatagaactgtttctcttcacagcagaaactgatgtaaatgtctracttgtttgacaaatgccctaaatgtagttgggtgatggctttgtcagtaaactctgtgtggttcttctatttgccagtagctggaaataaccatgacatttttaggaacagaacaagacctgagtagctccactcaactaccagtgaagaaaagatgttgatttttgtcaatatcttcctcataaag

SEQ ID NO: 18162 - DNA, 600 bp, Chicken  19866894226841_1
ttcatgaatacaataagcttaatctttttcagccagtttatttcatagtgaaaataaagccctgacagcctgaggccatgaggcatcaaatacaaagtcagctataaactagtatagatctaacatcattctgttaatatatgttcagaaggcaaaggcttcacaaacatgcattgtttttatgtcctgtgcataaatcttgtcttcagtgggagagaacggaagactgggagcaatatctactgactgctctacagaggtacagtttgggctctagacagcaattgaaaaatgggatcyccagagttttaattctctcataagccaatagtcctttatactgatgcacatatgcacatactcatacgcatacamaagcgtaaaaatagcctcaagttcttctgaacctgtgactcttgccagtttgaccacactctctgggctgtccaagaatttagacaaaaacatcaatcaaacgacccagctgtactggaatgtgttcagccaccactcccactctgagacttagagtttattttagctactgttttgtattctggggtttcactgccattagtcagtggaaattgtttggttatt

SEQ ID NO: 18163 - DNA, 600 bp, Chicken  19866894226841_2
ccatgaggcatcaaatacaaagtcagctataaactagtatagatctaacatcattctgttaatatatgttcagaaggcaaaggcttcacaaacatgcattgtttttatgtcctgtgcataaatcttgtcttcagtgggagagaacggaagactgggagcaatatctactgactgctctacagaggtacagtttgggctctagacagcaattgaaaaatgggatcyccagagttttaattctctcataagccaatagtcctttatactgatgcacatatgcacatactcatacgcatacamaagcgtaaaaatagcctcaagttcttctgaacctgtgactcttgccagtttgaccacactctctgggctgtccaagaatttagacaaaaacatcaatcaaacgacccagctgtactggaatgtgttcagccaccactcccactctgagacttagagtttattttagctactgttttgtattctggggtttcactgccattagtcagtggaaattgtttggttattcacggagtggaaaatgatagtatatgtaattataattacaattttacatagaatcatagaatggattgggttgca

SEQ ID NO: 18164 - DNA, 600 bp, Chicken  19866894226853_1
tgagtgcagctgagcatcttataaactaggtgacgtatcatccaaggaacagttatcaccctagcacttgatcactacatagacatatgtgagctgttgtttgttgttttgatgtggttgcacagtatatgtttgcaaatgtatgtctaaaccatatgtcaacatttgctttaatatactcctggaggctacctacccagaaatcagccaaacaacttcaaaactgctataaatacatgcacctctcattacatttcacacagttatgtatatgctcctataggcacaatggttgcctgrtacacggggcttaatttacatatcttgccttttgcaagctaaacacaatttggtacactgttttaagtttattattccagtatcctttgatgttctaatttactttgtgtaccagcatttaatttactactaatcttttaaaggattgagtaagaatcatggtatcctcattccgtaaagacttctgtaacaaacttgggtgatagcttagtttaacaggaaggtagagttgcagttcattacagaacagtgagctccagctatattgaattactgccaagaaatatttacaggctacag

SEQ ID NO: 18165 - DNA, 438 bp, Chicken  19866894226853_2
tatcctcattccgtaaagacttctgtaacaaacttgggtgatagcttagtttaacaggaaggtagagttgcagttcattacagaacagtgagctccagctatattgaattactgccaagaaatatttacaggctacaggtcatagaccttacccttcaatcaatggtagtctacaggaacacttcctgaagtttgttaatgcattctgctagcctgacaagtgagtgtaagataactctgccaaccccactaccttcctgagtgctgctttgaggccaacaaaacatccaagtttttttkttttttttttttttgaataaataactcatcaaaacatatgagaatagaaggtttcaaacatagtaaagcagttggcatagtcatcctagagttaattagaagcacaatggcactctcttcaagcctcctagaccaagg

SEQ ID NO: 18166 - DNA, 598 bp, Chicken  19866894226854_1
gaatatgtatatagtagggatatagataatgtatatattgagtgaacagacagtgagatggattaaaaactgtctggacaaccaggcccagagggcagtagtcagtggtgcaatgtctggttggaggggagtaccaagcagagtacccaaggggtcagtactgggtctggtcttgtatagcaccttcattaacaatcaggacgatggagtataatgaactctcagtaaattaatagactgtacatagctatggggagtagatgattcactgtaaagccgtgtccccatccagagggacckaggcaggctgggagggtgagcttggcaagtcaatgagacttgagttcaacaaatgcaaactcctgcaatgggggagggacagcccatgcaccagtaygtgttgagggccacccaattggaaagcagctctgcagaaaaggacctggggatcctggtgaccaccaagttgaatgagagccactaagtcactgttagccactaagaaggtaacaatatttgtgtcagcattaggccaagcagtgtcaacaggtcaagagaagtgatccttctggatccttttgctctgcttagcattggt

SEQ ID NO: 18167 - DNA, 501 bp, Chicken  19866894226854_2
gtagtcagtggtgcaatgtctggttggaggggagtaccaagcagagtacccaaggggtcagtactgggtctggtcttgtatagcaccttcattaacaatcaggacgatggagtataatgaactctcagtaaattaatagactgtacatagctatggggagtagatgattcactgtaaagccgtgtccccatccagagggacckaggcaggctgggagggtgagcttggcaagtcaatgagacttgagttcaacaaatgcaaactcctgcaatgggggagggacagcccatgcaccagtaygtgttgagggccacccaattggaaagcagctctgcagaaaaggacctggggatcctggtgaccaccaagttgaatgagagccactaagtcactgttagccactaagaaggtaacaatatttgtgtcagcattaggccaagcagtgtcaacaggtcaagagaagtgatccttctggatccttttgctctgcttagcattggt

SEQ ID NO: 18168 - DNA, 600 bp, Chicken  19866894226857_1
atctcaggaggtaacttccagtgaattgaagcaagcggctcagccacaccaggatgcagtgacaaaggttgtacaggagactgtggttatcgaggagagacgtgggatgaatgtgcatgcaagtggggatcccgcttcagtggctggacttgcggatgcccaggctcaggcagcatctgctagcgcaaaagggaaggagggctctgctgtgactaagggggctaaagaggaaaaaagggaggctcacaaagctgtaaccaaacaggaaggcattgctgctgctacttctcatgagcaagmggaggagcacagtacaacagtccacgtttcagactctttggaaagaaaacctcgttttgaggtaacttgttattaaatgagttcttgtgctgagttgtaaatgtatgtgrtagtggactaagtcagttcctctcatggaaagcaaagagtacaagacttgtatgattgcatctttacagcaggcagtttgtttctcctcttatttcctccttgcatggcacctgcaaggcttgttgctggtttccatccttggctaaatgccatgcatattttacctaaaagcgcttttcatgctgcaga

SEQ ID NO: 18169 - DNA, 600 bp, Chicken  19866894226857_2
atgtgcatgcaagtggggatcccgcttcagtggctggacttgcggatgcccaggctcaggcagcatctgctagcgcaaaagggaaggagggctctgctgtgactaagggggctaaagaggaaaaaagggaggctcacaaagctgtaaccaaacaggaaggcattgctgctgctacttctcatgagcaagmggaggagcacagtacaacagtccacgtttcagactctttggaaagaaaacctcgttttgaggtaacttgttattaaatgagttcttgtgctgagttgtaaatgtatgtgrtagtggactaagtcagttcctctcatggaaagcaaagagtacaagacttgtatgattgcatctttacagcaggcagtttgtttctcctcttatttcctccttgcatggcacctgcaaggcttgttgctggtttccatccttggctaaatgccatgcatattttacctaaaagcgcttttcatgctgcagagaaatgcctcatttgctggctttttatgcagtgggcaacaaggactcagctggcattttctttgggaaaatccatcaggattggcaaagtttgcatgtccttaaagacag

SEQ ID NO: 18170 - DNA, 600 bp, Chicken  19866894226857_3
gttcctctcatggaaagcaaagagtacaagacttgtatgattgcatctttacagcaggcagtttgtttctcctcttatttcctccttgcatggcacctgcaaggcttgttgctggtttccatccttggctaaatgccatgcatattttacctaaaagcgcttttcatgctgcagagaaatgcctcatttgctggctttttatgcagtgggcaacaaggactcagctggcattttctttgggaaaatccatcaggattggcaaagtttgcatgtccttaaagacagaaaataatttttttycgtgcttgatacaattgtaggttattgtactctgtcttaagcaatctgtgcttcttatgttagaagaatttcaagaagcattttgcagaarggtagagagaccttgttttgctcctttttttctgaaagctgaatggaaaagtaagcctgaataggaattgttctcttgttattctgagaacacgtgtaatgtttacatctttcctgaggcttgttctcgtgtaatccagaatagtgtcaaactgccagcactatgtgtacgtgtatgtaccgttacaacaaagggattttttttctctt

SEQ ID NO: 18171 - DNA, 568 bp, Chicken  19866894226857_4
ggcacctgcaaggcttgttgctggtttccatccttggctaaatgccatgcatattttacctaaaagcgcttttcatgctgcagagaaatgcctcatttgctggctttttatgcagtgggcaacaaggactcagctggcattttctttgggaaaatccatcaggattggcaaagtttgcatgtccttaaagacagaaaataatttttttycgtgcttgatacaattgtaggttattgtactctgtcttaagcaatctgtgcttcttatgttagaagaatttcaagaagcattttgcagaarggtagagagaccttgttttgctcctttttttctgaaagctgaatggaaaagtaagcctgaataggaattgttctcttgttattctgagaacacgtgtaatgtttacatctttcctgaggcttgttctcgtgtaatccagaatagtgtcaaactgccagcactatgtgtacgtgtatgtaccgttacaacaaagggattttttttctcttttgtttcttaaaatgcagagcactttttatagttaccccttcttttcccataaaaaaat

SEQ ID NO: 18172 - DNA, 600 bp, Chicken  19866894226876_1
agacaatacttagtgcacacatagcctgctgtgcagtactgagagacatcaaagtgaaaatgagccttttctctaagtatagcatgaaaaaactaagaaacacagtgctagttcttgctgtgtgtgtcctgtagctgaagatcagtacatgatctccactgagagctcagcagtgatcagttataagtagtgctgccaaattaacactgtccatgcagtgttaaacacaaggccaaacacaggggcaccacctctaattgcaaaagtacattcaaactatttttcagtggccgcacagtraagtacattttgcagctgttagggaaagctactctaaattaacagtatttttatgcccctcatattgtgctcatgtcagtactactgcgaatggagatagcaggctatatgcaattacttcagttcgaagtctaaattcaaacatttctggaaaaaataaatttgagtcagcttttaaaaatctgaggcatatttgaggataatttcattcttagaatgagaagcagacaggatcttcagcacatggactacattaactgcacctgatgagtgtgtgctcagtaagcattttcagctgct

SEQ ID NO: 18173 - DNA, 600 bp, Chicken  19866894226881_1
gtgaggaaagagcgatccagctctgcagttttcatccgggacccaggccaaactgcgggatgtgctgtgagatgagcagatgcttccagctgttacaggattgggatgcctccgtgtgtactttgaacttgggttgctttccctctggatcagtaaatcccacttggaaggctgcgtatctgggtgctttgcggcagggctcttggaaggatttctggtcccttttggttgccaggtgtgtggcatggccaaagggacaaagagagtgttttcttgcgtccttcgttgtcttggcctgcycttggagctcctggtgctggaagccagagccactctarcacagcatctcttggaaatgcagggttggacccatccagctgtgccggtgactcacatagggataatctttttcccaggcatggggcaagtttttctctttactttaactagagtgggacacattgtggttttaaaagactaacatgatgggtgcccaaaggctttccagatgttgagcttgctcagaccagacccgccatgctcggagctccttgcctgcatcaaaccatttccatctggcctggcgggggagagggcttt

SEQ ID NO: 18174 - DNA, 600 bp, Chicken  19866894226881_2
ggacccaggccaaactgcgggatgtgctgtgagatgagcagatgcttccagctgttacaggattgggatgcctccgtgtgtactttgaacttgggttgctttccctctggatcagtaaatcccacttggaaggctgcgtatctgggtgctttgcggcagggctcttggaaggatttctggtcccttttggttgccaggtgtgtggcatggccaaagggacaaagagagtgttttcttgcgtccttcgttgtcttggcctgcycttggagctcctggtgctggaagccagagccactctarcacagcatctcttggaaatgcagggttggacccatccagctgtgccggtgactcacatagggataatctttttcccaggcatggggcaagtttttctctttactttaactagagtgggacacattgtggttttaaaagactaacatgatgggtgcccaaaggctttccagatgttgagcttgctcagaccagacccgccatgctcggagctccttgcctgcatcaaaccatttccatctggcctggcgggggagagggctttattgcaactcgacccatttgagaggctttctcaactgg

SEQ ID NO: 18175 - DNA, 544 bp, Chicken  19866894226884_1
gcgaagcgatacgtggcaggcgaggcaaggcagggcggggtaaggggaagcgaggtggggtgaggcaaggtggggcgaggcggggcgaggcaaggcagggcaagacagggcaaggttggatgaggtggggcgaggctaggcgaggcggggcgatgcgtggcgaggcggggcgaggctaggcggggtggggcgaggcaggacgaggtggggcaagtcagaacaaggcggggcgaggcggggcaaaacagggcaaggagaggcgtggcagggaatggcggggcgaggcaaggcgaggcgagscaatgcaaggcggatctaggcagagcgaggcgaggcgaggcagggtggggcgagacgaggcagggcgaggtggggcgaggcgaggcgtggcaggcaaggcggggcagggcggggcagggcgggggggtggaacgggcgaagctaggtgtggcggggtgaggcggagctcggcgaggcgaggcgtggcaagtgaagcggggcggagtggactaggcggggtggggtgaagcaaggcgaggcgagt

SEQ ID NO: 18176 - DNA, 600 bp, Chicken  19866894226889_1
ctctgtttccctggctaagctgaggtcttaaatcagccctgtctagtccaaaaataaaaataaaaagagagagagagagagagagacatagaaataccactggcctagctcagtgaaggtagttgataccatcctgaacatcaagataaaatgcagggaatagcactgcagaaggctgaggtctagctgtgtgccaggtttacaggcccactttcagtttttctgtgtccagaggtacatctcttgtcaggaccttctttgtgttgcatcagccacccgtagcaatggggatttacaacrtacagtctgccggaatgatcctgggtgatgtagataacccctcacatttcttctgtgatctgccgtcctttagatcatttgatctttacagttagcacacgagtattatagttctgctttcctttgatgtttccttgtatttaaatccaagaataaatccagtatatcagtatctatttcaccttctattccctcgtcctgtctctttaactgacctgcagtgctgtgtgattcgcagtggcaactggtgagcagtgctgcttttcccatatgtttgttattcccagccctcccccatga

SEQ ID NO: 18177 - DNA, 600 bp, Chicken  19866894226889_2
gaaaattcctttcctgcttctcttgtattttcttgtctgtatctatatttcataagctcctactgccgttacctatgaagttaatttttgttatagtaactgatgcctggatgcttttgtgctgttacaaatccctgtggcagaagaacatttgaaaaaatgaactgttagatcatgggagggtacttgagaaaagacagacgtctctcttttgagtgatttgttctctaaatgttcgagggactgttacaaatgaaacttaagagttagttctgagacacagaggcaagttttacttgrcrgaaatacttctgtgtttatttaaatcacagttgttgcctttggcagatgctgtcttgtcatttacttcccttgcagtttgcttaccaaggtgtgattgtaagggtctgattctgaattcttctaggcctgcaacsctcggtgtgcaaacattccttttagaaagcccttagccagtctctcaaaccaggcagatgggcaaaacagggcaatttctatgtgcaggcagcttgtgtgaatcggtgcttatgggcagagttacttgtggcttatttacgtcatgaatttcgcaaacagctt

SEQ ID NO: 18178 - DNA, 600 bp, Chicken  19866894226889_3
aaattcctttcctgcttctcttgtattttcttgtctgtatctatatttcataagctcctactgccgttacctatgaagttaatttttgttatagtaactgatgcctggatgcttttgtgctgttacaaatccctgtggcagaagaacatttgaaaaaatgaactgttagatcatgggagggtacttgagaaaagacagacgtctctcttttgagtgatttgttctctaaatgttcgagggactgttacaaatgaaacttaagagttagttctgagacacagaggcaagttttacttgrcrgaaatacttctgtgtttatttaaatcacagttgttgcctttggcagatgctgtcttgtcatttacttcccttgcagtttgcttaccaaggtgtgattgtaagggtctgattctgaattcttctaggcctgcaacsctcggtgtgcaaacattccttttagaaagcccttagccagtctctcaaaccaggcagatgggcaaaacagggcaatttctatgtgcaggcagcttgtgtgaatcggtgcttatgggcagagttacttgtggcttatttacgtcatgaatttcgcaaacagctttt

SEQ ID NO: 18179 - DNA, 600 bp, Chicken  19866894226889_4
tggcagaagaacatttgaaaaaatgaactgttagatcatgggagggtacttgagaaaagacagacgtctctcttttgagtgatttgttctctaaatgttcgagggactgttacaaatgaaacttaagagttagttctgagacacagaggcaagttttacttgrcrgaaatacttctgtgtttatttaaatcacagttgttgcctttggcagatgctgtcttgtcatttacttcccttgcagtttgcttaccaaggtgtgattgtaagggtctgattctgaattcttctaggcctgcaacsctcggtgtgcaaacattccttttagaaagcccttagccagtctctcaaaccaggcagatgggcaaaacagggcaatttctatgtgcaggcagcttgtgtgaatcggtgcttatgggcagagttacttgtggcttatttacgtcatgaatttcgcaaacagctttttcttgtacttattaatatgctattagctgaataatatttttctttagacaaattaggcaaacaaagtctttaagactttgtttctatctgagcctttgactttcaactttagaaagaatttgctaattttttgag

SEQ ID NO: 18180 - DNA, 600 bp, Chicken  19866894226897_1
tcatgaaagcaggtcgcaggtgcaagaatgctctgatcccttttaatgatattgctatgggacccatgattaagacaaacgattgcacatttttttcactgacctatagtgcaattacaatttatacactgagatgttaaaagcacaaataaatctgttaatgttaagacaagacaatgatttcagctctacctctcatgtacttgaaaagaccatcaatctgttaaaatatagacacaattatgctgcatttagacacgatgtttcttataaaaacaccatagctgcaggtagcagtaygttggtrtctgtgacaaagctttttgacattctgttcatctcattttcagcttctatagttttctcatttgttaattcattcatttcttgaacaaatagttgcagyggstacaactccaggcttcctgacactgaaaatttcaaccaaatttttgctaaagaacacagatgcagtgaagttacagtgtgtcttcctctgaaaattccacacttcacrtttgaaatttagtatggaagaaatgcactcagtgacataccccttactgtagccataaatatagcaacttgtaagccttttca

SEQ ID NO: 18181 - DNA, 600 bp, Chicken  19866894226897_2
agcaggtcgcaggtgcaagaatgctctgatcccttttaatgatattgctatgggacccatgattaagacaaacgattgcacatttttttcactgacctatagtgcaattacaatttatacactgagatgttaaaagcacaaataaatctgttaatgttaagacaagacaatgatttcagctctacctctcatgtacttgaaaagaccatcaatctgttaaaatatagacacaattatgctgcatttagacacgatgtttcttataaaaacaccatagctgcaggtagcagtaygttggtrtctgtgacaaagctttttgacattctgttcatctcattttcagcttctatagttttctcatttgttaattcattcatttcttgaacaaatagttgcagyggstacaactccaggcttcctgacactgaaaatttcaaccaaatttttgctaaagaacacagatgcagtgaagttacagtgtgtcttcctctgaaaattccacacttcacrtttgaaatttagtatggaagaaatgcactcagtgacataccccttactgtagccataaatatagcaacttgtaagccttttcaagaaaat

SEQ ID NO: 18182 - DNA, 600 bp, Chicken  19866894226897_3
tagtgcaattacaatttatacactgagatgttaaaagcacaaataaatctgttaatgttaagacaagacaatgatttcagctctacctctcatgtacttgaaaagaccatcaatctgttaaaatatagacacaattatgctgcatttagacacgatgtttcttataaaaacaccatagctgcaggtagcagtaygttggtrtctgtgacaaagctttttgacattctgttcatctcattttcagcttctatagttttctcatttgttaattcattcatttcttgaacaaatagttgcagyggstacaactccaggcttcctgacactgaaaatttcaaccaaatttttgctaaagaacacagatgcagtgaagttacagtgtgtcttcctctgaaaattccacacttcacrtttgaaatttagtatggaagaaatgcactcagtgacataccccttactgtagccataaatatagcaacttgtaagccttttcaagaaaatgtaaatcctcaaaagaaactcacagtagctaaattcaccagattccaatcagcatagagctgagtaacacccycccccccttacatgtacaaagtggta

SEQ ID NO: 18183 - DNA, 600 bp, Chicken  19866894226897_4
tgcaattacaatttatacactgagatgttaaaagcacaaataaatctgttaatgttaagacaagacaatgatttcagctctacctctcatgtacttgaaaagaccatcaatctgttaaaatatagacacaattatgctgcatttagacacgatgtttcttataaaaacaccatagctgcaggtagcagtaygttggtrtctgtgacaaagctttttgacattctgttcatctcattttcagcttctatagttttctcatttgttaattcattcatttcttgaacaaatagttgcagyggstacaactccaggcttcctgacactgaaaatttcaaccaaatttttgctaaagaacacagatgcagtgaagttacagtgtgtcttcctctgaaaattccacacttcacrtttgaaatttagtatggaagaaatgcactcagtgacataccccttactgtagccataaatatagcaacttgtaagccttttcaagaaaatgtaaatcctcaaaagaaactcacagtagctaaattcaccagattccaatcagcatagagctgagtaacacccycccccccttacatgtacaaagtggtaaac

SEQ ID NO: 18184 - DNA, 600 bp, Chicken  19866894226897_5
aatctgttaaaatatagacacaattatgctgcatttagacacgatgtttcttataaaaacaccatagctgcaggtagcagtaygttggtrtctgtgacaaagctttttgacattctgttcatctcattttcagcttctatagttttctcatttgttaattcattcatttcttgaacaaatagttgcagyggstacaactccaggcttcctgacactgaaaatttcaaccaaatttttgctaaagaacacagatgcagtgaagttacagtgtgtcttcctctgaaaattccacacttcacrtttgaaatttagtatggaagaaatgcactcagtgacataccccttactgtagccataaatatagcaacttgtaagccttttcaagaaaatgtaaatcctcaaaagaaactcacagtagctaaattcaccagattccaatcagcatagagctgagtaacacccycccccccttacatgtacaaagtggtaaacatctagattaaaacaaaggagagaaatgtcagacttgtgactcagtgcactgggaaaaccttactgtgcatatgaatcaggattacatggcagaggaagccattggat

SEQ ID NO: 18185 - DNA, 585 bp, Chicken  19866894226897_6
tcatttcttgaacaaatagttgcagyggstacaactccaggcttcctgacactgaaaatttcaaccaaatttttgctaaagaacacagatgcagtgaagttacagtgtgtcttcctctgaaaattccacacttcacrtttgaaatttagtatggaagaaatgcactcagtgacataccccttactgtagccataaatatagcaacttgtaagccttttcaagaaaatgtaaatcctcaaaagaaactcacagtagctaaattcaccagattccaatcagcatagagctgagtaacacccycccccccttacatgtacaaagtggtaaacatctagattaaaacaaaggagagaaatgtcagacttgtgactcagtgcactgggaaaaccttactgtgcatatgaatcaggattacatggcagaggaagccattggatacgaggcttgttccatgtgttgtggaagttggaaaagtagtatagtgaagaagggaactgcaagagctgtaaaggagattccatcattaaggcagaagagtttagcactgtgagagctgtgatctgtccctggctgctgtgcatttct

SEQ ID NO: 18186 - DNA, 600 bp, Chicken  19866894226902_1
tttcacacaaaaatttcttaatagctcatctttcttgcccctctgtgtttccaacaggggaaaatcattgtctactgttctgttctcagtgttgtccattgtgcccactatcttcagctctcactgagcacctttcaaagagctaaccaaaacaactaagatgtatttccaaaatagcaatacctcatttatgaatgtgtggcagagtaagaattatcagaattgtgcttcctgtgcttccttttcatctatcagcattgaattttatctcacattttatttccattcaatcagaatcasaagattcgcttacacttgcgttgttagttgtagtttgtcaccttgacgaattctgtagtatcagcaaactcagtcacctcattatccacctactattccaaataatttataaatgtgatgaactgtacaaatcctaacaagaatccctctttgtactgtcaacctctttgtaagtgaaaactgcgaaagctgtccctgcactttcctacccatcttttcacctaccatgatgttttccttgataacttcagttgatcttggtcacaaatgacaagaattgcattcagaattctagactca

SEQ ID NO: 18187 - DNA, 418 bp, Chicken  19866894226902_2
accatgatgttttccttgataacttcagttgatcttggtcacaaatgacaagaattgcattcagaattctagactcattttcagaattttagctttatagaacagttatttttccttttccttgtccaaacttgattgttagctattgtttctccttttattttctacaagaaaatacttagcttaataaccgaagtaaattgtctcgaagttggatgaaataatcaaaaatcagaaggaaaataccatacataatgaaaccccgatgtttagaaaatcagcccttgtcgtatgatatcratttgaaattaaaaggagtattttaacaagttggatcatggcatgttgatgcctactcctgcctttccttactgctaccccatttcagcaattcacattttcactaagcatactgagg

SEQ ID NO: 18188 - DNA, 600 bp, Chicken  19866894226909_1
ctgttatttcagtaacagctctcatgttaagggaaggacccacattctcccactcatctcattccatttgtatttataaaactgtcttctggaaatgttctctgaaatgctctgttccttatattttggagtgaggaaaagaaattttacccagttttatgaaacagtccactcttgcagtctgaaatattcctaaagtttgtttgtttgtttgtttttaaagcaaatgtattcatgatattaagtgagatttagtaggataataaatgttatcatctttacattgtaataataacttgmattttatccctttcctctttaaacaacagatgaacaaaacagagaattgttaataaaaatcatgttagattcttcttttttccttccggttttcctgcctcagcatcacatacataaaactctgatgaagccctgtttaaaatatgtgaaaatttcatgccttaatttttccacttattgagcagttaagtattgtaacgacaatcctacttgctttcagatttgcagtagcttatcatcacttctctgttcaggatcctgaaggttctttagaaaacaagtatttagtccagtagccat

SEQ ID NO: 18189 - DNA, 599 bp, Chicken  19866894226920_1
  misc_feature (1)..(22): n is any nucleotide
nnnnnnnnnnnnnnnnnnnnnnctgccaagaagcccagtgacttgaaaaacatgacgcaccactctctttatttctctgtgaagaattcttgcttgaagaaaagctaataaaaacaaaacaaaaaaacccaccagcattactgctttagcactcactctgtcccagtactcttcattctggagcactacacagatgatggcaatgcagtaccccacacctgatttccacactgcactgcagaccattacatcattaagacgtaggcaaacatggagctgaaaactgggacgtgcaccttygaaaatgcaccttaacactgkctccacagccttctgcargggatccctactggagattctggaaragacttgttcatcagtgtagtaacttcaggaatccaagtgaactcaatgaagctgctcctgaaatcaaggatgtgcctgggtgccttgccaaataaaagcctgaaaaaaacttcagatactttttaaaataccatgaagtcttgttttccagtggttggttttcctctcctctcatgggactcctctggacactaaatactgaggratcctgtrcattgcagaagcccaaacca

SEQ ID NO: 18190 - DNA, 599 bp, Chicken  19866894226920_2
  misc_feature (1)..(1): n is any nucleotide
nctgccaagaagcccagtgacttgaaaaacatgacgcaccactctctttatttctctgtgaagaattcttgcttgaagaaaagctaataaaaacaaaacaaaaaaacccaccagcattactgctttagcactcactctgtcccagtactcttcattctggagcactacacagatgatggcaatgcagtaccccacacctgatttccacactgcactgcagaccattacatcattaagacgtaggcaaacatggagctgaaaactgggacgtgcaccttygaaaatgcaccttaacactgkctccacagccttctgcargggatccctactggagattctggaaragacttgttcatcagtgtagtaacttcaggaatccaagtgaactcaatgaagctgctcctgaaatcaaggatgtgcctgggtgccttgccaaataaaagcctgaaaaaaacttcagatactttttaaaataccatgaagtcttgttttccagtggttggttttcctctcctctcatgggactcctctggacactaaatactgaggratcctgtrcattgcagaagcccaaaccarcagcagaagacagtactttc

SEQ ID NO: 18191 - DNA, 600 bp, Chicken  19866894226920_3
gacttgaaaaacatgacgcaccactctctttatttctctgtgaagaattcttgcttgaagaaaagctaataaaaacaaaacaaaaaaacccaccagcattactgctttagcactcactctgtcccagtactcttcattctggagcactacacagatgatggcaatgcagtaccccacacctgatttccacactgcactgcagaccattacatcattaagacgtaggcaaacatggagctgaaaactgggacgtgcaccttygaaaatgcaccttaacactgkctccacagccttctgcargggatccctactggagattctggaaragacttgttcatcagtgtagtaacttcaggaatccaagtgaactcaatgaagctgctcctgaaatcaaggatgtgcctgggtgccttgccaaataaaagcctgaaaaaaacttcagatactttttaaaataccatgaagtcttgttttccagtggttggttttcctctcctctcatgggactcctctggacactaaatactgaggratcctgtrcattgcagaagcccaaaccarcagcagaagacagtactttctgcttcagccaaaggcctg

SEQ ID NO: 18192 - DNA, 600 bp, Chicken  19866894226920_4
tctttatttctctgtgaagaattcttgcttgaagaaaagctaataaaaacaaaacaaaaaaacccaccagcattactgctttagcactcactctgtcccagtactcttcattctggagcactacacagatgatggcaatgcagtaccccacacctgatttccacactgcactgcagaccattacatcattaagacgtaggcaaacatggagctgaaaactgggacgtgcaccttygaaaatgcaccttaacactgkctccacagccttctgcargggatccctactggagattctggaaragacttgttcatcagtgtagtaacttcaggaatccaagtgaactcaatgaagctgctcctgaaatcaaggatgtgcctgggtgccttgccaaataaaagcctgaaaaaaacttcagatactttttaaaataccatgaagtcttgttttccagtggttggttttcctctcctctcatgggactcctctggacactaaatactgaggratcctgtrcattgcagaagcccaaaccarcagcagaagacagtactttctgcttcagccaaaggcctgataagataatcacagaatcatagaat

SEQ ID NO: 18193 - DNA, 600 bp, Chicken  19866894226920_5
tggagctgaaaactgggacgtgcaccttygaaaatgcaccttaacactgkctccacagccttctgcargggatccctactggagattctggaaragacttgttcatcagtgtagtaacttcaggaatccaagtgaactcaatgaagctgctcctgaaatcaaggatgtgcctgggtgccttgccaaataaaagcctgaaaaaaacttcagatactttttaaaataccatgaagtcttgttttccagtggttggttttcctctcctctcatgggactcctctggacactaaatactgaggratcctgtrcattgcagaagcccaaaccarcagcagaagacagtactttctgcttcagccaaaggcctgataagataatcacagaatcatagaatcaccaaggttggaaaagacctccaagatcctccagtccaactgtccaatatttccccactaaagcatgtcctttagtataacacctaactttttcttgaatatctcattgggcctatattataaaaccgaaatggagtaaagaaatagatctcagtagaacagcatgaagcagcagcaggatgtggccaaccagttatgctatttg

SEQ ID NO: 18194 - DNA, 600 bp, Chicken  19866894226920_6
aaaactgggacgtgcaccttygaaaatgcaccttaacactgkctccacagccttctgcargggatccctactggagattctggaaragacttgttcatcagtgtagtaacttcaggaatccaagtgaactcaatgaagctgctcctgaaatcaaggatgtgcctgggtgccttgccaaataaaagcctgaaaaaaacttcagatactttttaaaataccatgaagtcttgttttccagtggttggttttcctctcctctcatgggactcctctggacactaaatactgaggratcctgtrcattgcagaagcccaaaccarcagcagaagacagtactttctgcttcagccaaaggcctgataagataatcacagaatcatagaatcaccaaggttggaaaagacctccaagatcctccagtccaactgtccaatatttccccactaaagcatgtcctttagtataacacctaactttttcttgaatatctcattgggcctatattataaaaccgaaatggagtaaagaaatagatctcagtagaacagcatgaagcagcagcaggatgtggccaaccagttatgctatttgtttatttt

SEQ ID NO: 18195 - DNA, 600 bp, Chicken  19866894226920_7
gaaaatgcaccttaacactgkctccacagccttctgcargggatccctactggagattctggaaragacttgttcatcagtgtagtaacttcaggaatccaagtgaactcaatgaagctgctcctgaaatcaaggatgtgcctgggtgccttgccaaataaaagcctgaaaaaaacttcagatactttttaaaataccatgaagtcttgttttccagtggttggttttcctctcctctcatgggactcctctggacactaaatactgaggratcctgtrcattgcagaagcccaaaccarcagcagaagacagtactttctgcttcagccaaaggcctgataagataatcacagaatcatagaatcaccaaggttggaaaagacctccaagatcctccagtccaactgtccaatatttccccactaaagcatgtcctttagtataacacctaactttttcttgaatatctcattgggcctatattataaaaccgaaatggagtaaagaaatagatctcagtagaacagcatgaagcagcagcaggatgtggccaaccagttatgctatttgtttatttttaaacaaatggatgaccataa

SEQ ID NO: 18196 - DNA, 476 bp, Chicken  19866894226920_8
ctccctttgcagaattagggagctataattaaggctgtgccgccatttccattttgaagtcctacattttaaggttccataatttgtaccaaagacatccatgccaagagacagtttggcatacagagataaaaactttgaataaagtcagcacttgaataaattcagtaaaaaggtctcactatttcaaccacacagaatgaggccgagcattagttacctatctaaggtagtttagcatctgtgttagggctaaaatggtaatttttaccagtgtaatttctacttattttctgagcrcctgaatgatatcccgatgttgccaggggagcagctttatggcctggctaatgaggctttcatacctaaaccacagccatgcctgcttactgcaagggaagaggtattgctttgactgaaactcaaggtgtgcctttgatgtaccagcatctcccagggccaaggtctacaaaaca

SEQ ID NO: 18197 - DNA, 600 bp, Chicken  19866894226924_1
cactccagtgttaatgtactgcaactccagtgacttcaaaggggttgctgcagatataaagcagtgtagccagaagcactggctggtagcctgcataaacaagcaaaaaagattttcattttttaagaagccataaaaaatagttcaagctaattacgtgacaggggcctgggtgtgaaatagcaactgcaaagccccggggatcaagacaggaacctttgatttgctctcttcagcttataaagtcttctgaatacttttgctctaacagcttttcttcttcccattgcaagctgcacrcattactctgatgctgctctccagaggcccccaccattgctctgtactaaatctcaatcctttgtcttacaatctgaggctgatttcaggttgcagagctaaaccagcagctgtctccaagcagaaagcccatttcgtgttcaccttatggagcagcagcgttagagcagctgaaatcacaaccaccccatgagcaaagtttcaaacctctctgaaactccctgaagttgaaatattaatctggaaagcactgaatgtgtgtttctgaagctcagtttggaatgagaaacaaaagttctg

SEQ ID NO: 18198 - DNA, 599 bp, Chicken  19866894226927_1
  misc_feature (1)..(115): n is any nucleotide
nnnnnnnnnnnnnnnnnnnnnnnnnnnnnnnnnnnnnnnnnnnnnnnnnnnnnnnnnnnnnnnnnnnnnnnnnnnnnnnnnnnnnnnnnnnnnnnnnnnnnnnnnnnnnnnnnnnatggcaatgccaacgccaacacatcccccagcccggaggtgggacaccactgagctgctgctcacaacccccggcctggcggctgctgtgccggcacgtcgccacggatccaattaaaataaccaggggaaagcaatgctaattgtgcttccagcctcatcagtcagacggaggggtcctgggcrctggtgggatgmgagcagcacttcatcgcacgcctgctggagtgcaagcactgttggccatgcagctccagcaccgagcgtgcaccagctgcagccctggagctgcatttccagttggaaccaacagccccgtgccctcccgctggttcccaagcccttggggaagggaaaaaaagtgggacagaaaccacgttgctgttcggttgctttacccaaagccttgaaattattcacctgccatctgtgatgacagaggaaaactttgccgtggacacagcagggttttatttgccaggttt

SEQ ID NO: 18199 - DNA, 599 bp, Chicken  19866894226927_2
  misc_feature (1)..(103): n is any nucleotide
nnnnnnnnnnnnnnnnnnnnnnnnnnnnnnnnnnnnnnnnnnnnnnnnnnnnnnnnnnnnnnnnnnnnnnnnnnnnnnnnnnnnnnnnnnnnnnnnnnnnnnnatggcaatgccaacgccaacacatcccccagcccggaggtgggacaccactgagctgctgctcacaacccccggcctggcggctgctgtgccggcacgtcgccacggatccaattaaaataaccaggggaaagcaatgctaattgtgcttccagcctcatcagtcagacggaggggtcctgggcrctggtgggatgmgagcagcacttcatcgcacgcctgctggagtgcaagcactgttggccatgcagctccagcaccgagcgtgcaccagctgcagccctggagctgcatttccagttggaaccaacagccccgtgccctcccgctggttcccaagcccttggggaagggaaaaaaagtgggacagaaaccacgttgctgttcggttgctttacccaaagccttgaaattattcacctgccatctgtgatgacagaggaaaactttgccgtggacacagcagggttttatttgccaggtttccaagtctgcct

SEQ ID NO: 18200 - DNA, 600 bp, Chicken  19866894226927_3
ctgctgctcacaacccccggcctggcggctgctgtgccggcacgtcgccacggatccaattaaaataaccaggggaaagcaatgctaattgtgcttccagcctcatcagtcagacggaggggtcctgggcrctggtgggatgmgagcagcacttcatcgcacgcctgctggagtgcaagcactgttggccatgcagctccagcaccgagcgtgcaccagctgcagccctggagctgcatttccagttggaaccaacagccccgtgccctcccgctggttcccaagcccttggggaagggmaaaaaagtgggacagaaaccacgttgctgttcggttgctttacccaaagccttgaaattattcacctgccatctgtgatgacagaggaaaactttgccgtggacacagcagggttttatttgccaggtttccaagtctgcctgcttggaggaaagctcgtaattgggtctcttaggtaaactgcaccagatcaaacactgctgcagctgcagcgagctgatggaccaccgaggagacattagcatgtgaaatgatgaccattaacttgattaaagaaaggacacaacacgcattttgctc

SEQ ID NO: 18201 - DNA, 599 bp, Chicken  19866894226929_1
  misc_feature (1)..(69): n is any nucleotide
nnnnnnnnnnnnnnnnnnnnnnnnnnnnnnnnnnnnnnnnnnnnnnnnnnnnnnnnnnnnnnnnnnnnnataaacacccaactcagagcgcatattgcctcctattcttctataacaacgatctgttttttctgtccaataatatttgattttttcctaaatgttcatgggccagtgaaattctacacctgcatgacttagaggccttgaacaacattcattttcaaagaatattagatagaggtgagagttctgaagcaggtgtgagttctgtgctgagatcctgctatacaagctctrttgctctgcttgttgtttttcacgcagaagaaatgagcccaaataaacaaatcttccttatgttagcttcaaaaccaaaacacccacctgcctcaaaacaaacgttctgaacaactcaagtattttcacctacaaataaaaggccctcaaagtcttcctaatgagacgctgttgtaattcagagcttttttctaagaggaaaaaaagatgggctgccgtaatttcttgaaaatacgctatttgtattacaagaactagtcctagttaacagcacaaataaaattagtattggagttctt

SEQ ID NO: 18202 - DNA, 600 bp, Chicken  19866894226929_2
cttatttctacatattccatgtaagttccttgcataactttgtcaagagagagtaaagtagcaagataagaaacttacactgttagcttgttaaacaggtaattttagtacagtaatatctgatgataaagttaagagaacaaaacaggaatacttggaggaacattttcacatgtgtaatttgcatgcatgaagtatttctgtgtatttttaaatctaagtgtgaggttggatcctttaatgactgtggaatgttctttatgaagtctatgccctctataaatcaatttgtttttctaygcttttgaaagctgtgctragggaactaaattaaagagtttaaggaatggttttaccatgaccaattctaataatgtggacgatcttctgagttcttgatatggtttcctcatagctcaaaagaagtcacttcaaagagactgctgcagtgaagcggcatgactgaatggcgtctgaatgtgtatttcttccagagaaaatatgattcttttgtaggtgaagtgaggatgtctagatctggaggatcttccttccctcttcttctgcagtgatagttttacacgtaagctatttgactca

SEQ ID NO: 18203 - DNA, 600 bp, Chicken  19866894226929_3
tgtaagttccttgcataactttgtcaagagagagtaaagtagcaagataagaaacttacactgttagcttgttaaacaggtaattttagtacagtaatatctgatgataaagttaagagaacaaaacaggaatacttggaggaacattttcacatgtgtaatttgcatgcatgaagtatttctgtgtatttttaaatctaagtgtgaggttggatcctttaatgactgtggaatgttctttatgaagtctatgccctctataaatcaatttgtttttctaygcttttgaaagctgtgctragggaactaaattaaagagtttaaggaatggttttaccatgaccaattctaataatgtggacgatcttctgagttcttgatatggtttcctcatagctcaaaagaagtcacttcaaagagactgctgcagtgaagcggcatgactgaatggcgtctgaatgtgtatttcttccagagaaaatatgattcttttgtaggtgaagtgaggatgtctagatctggaggatcttccttccctcttcttctgcagtgatagttttacacgtaagctatttgactcaagctcatttgatttcattt

SEQ ID NO: 18204 - DNA, 600 bp, Chicken  19866894226933_1
aaactggcagggtacatgcagatttaaataaccatgtctgtacctttcacttacctcaaagagaaggcattcaccagaatgttcagtattcctccatggcaacaaaatgggacagttatagtccagcctacccattattcagatggctctggaaacctgtggtaagtatctgggaagactgttgagtgcaaggatggggaacacatggtctgagagaagctgaggtgacctacaacttgagttgttatgacttgtggccactttcattttatctaataataaaatgaagaatatgataarccstgtgtggtttgtggccctccaaaggtgtttgaaaggcctatttgaaaaaaagatagccaagagagtacagaattactttgtattatttcctgcacagacatggagcatgagtcagtatacatcccttgtttgcaatcttttgaatggtgccctctgtttcatacattataattataaagcagcttcaaaaagaaaagatctaattatggaactagataatagagctgaaaagaacaatcacataatttggccttaaaatagtttattaggaagcagtttagtactgtatactaagac

SEQ ID NO: 18205 - DNA, 600 bp, Chicken  19866894226933_2
ctggcagggtacatgcagatttaaataaccatgtctgtacctttcacttacctcaaagagaaggcattcaccagaatgttcagtattcctccatggcaacaaaatgggacagttatagtccagcctacccattattcagatggctctggaaacctgtggtaagtatctgggaagactgttgagtgcaaggatggggaacacatggtctgagagaagctgaggtgacctacaacttgagttgttatgacttgtggccactttcattttatctaataataaaatgaagaatatgataarccstgtgtggtttgtggccctccaaaggtgtttgaaaggcctatttgaaaaaaagatagccaagagagtacagaattactttgtattatttcctgcacagacatggagcatgagtcagtatacatcccttgtttgcaatcttttgaatggtgccctctgtttcatacattataattataaagcagcttcaaaaagaaaagatctaattatggaactagataatagagctgaaaagaacaatcacataatttggccttaaaatagtttattaggaagcagtttagtactgtatactaagacatt

SEQ ID NO: 18206 - DNA, 599 bp, Chicken  19866894226949_1
  misc_feature (1)..(168): n is any nucleotide
nnnnnnnnnnnnnnnnnnnnnnnnnnnnnnnnnnnnnnnnnnnnnnnnnnnnnnnnnnnnnnnnnnnnnnnnnnnnnnnnnnnnnnnnnnnnnnnnnnnnnnnnnnnnnnnnnnnnnnnnnnnnnnnnnnnnnnnnnnnnnnnnnnnnnnnnnnnnnnnnnnnnnnnncagcacacggggcatagaggttgtagatgttgagtccagactccttctacaatctcaatcatctctgccatctgcaatcagccacaagcagggctcaggactcagcagagtgcttgaagggaccatggcacrcacccaacaccaagcacagtgctgctgctcayaggaattggagcagggcttggggattccagctccctcaccttaagtgtgcagttcaggttggagttgtcatggaagttgcatttcccttcggagcagcagaaagtctgcaagtccttccacagcctgcrggcagagaccaagagttggagtgatccaccagagcccagcctgccctgtgccacagggaccggcagtgctccccccccccagcmgtgctcccccgctctcactgggtgcccagcaggccgtggtaataggcaaagtac

SEQ ID NO: 18207 - DNA, 599 bp, Chicken  19866894226949_2
  misc_feature (1)..(136): n is any nucleotide
nnnnnnnnnnnnnnnnnnnnnnnnnnnnnnnnnnnnnnnnnnnnnnnnnnnnnnnnnnnnnnnnnnnnnnnnnnnnnnnnnnnnnnnnnnnnnnnnnnnnnnnnnnnnnnnnnnnnnnnnnnnnnnnnnnnnnnnncagcacacggggcatagaggttgtagatgttgagtccagactccttctacaatctcaatcatctctgccatctgcaatcagccacaagcagggctcaggactcagcagagtgcttgaagggaccatggcacrcacccaacaccaagcacagtgctgctgctcayaggaattggagcagggcttggggattccagctccctcaccttaagtgtgcagttcaggttggagttgtcatggaagttgcatttcccttcggagcagcagaaagtctgcaagtccttccacagcctgcrggcagagaccaagagttggagtgatccaccagagcccagcctgccctgtgccacagggaccggcagtgctccccccccccagcmgtgctcccccgctctcactgggtgcccagcaggccgtggtaataggcaaagtacaccaaggagttgtcgttgatctcataggagga

SEQ ID NO: 18208 - DNA, 599 bp, Chicken  19866894226949_3
  misc_feature (1)..(7): n is any nucleotide
nnnnnnncagcacacggggcatagaggttgtagatgttgagtccagactccttctacaatctcaatcatctctgccatctgcaatcagccacaagcagggctcaggactcagcagagtgcttgaagggaccatggcacrcacccaacaccaagcacagtgctgctgctcayaggaattggagcagggcttggggattccagctccctcaccttaagtgtgcagttcaggttggagttgtcatggaagttgcatttcccttcggagcagcagaaagtctgcaagtccttccacagcctgcrggcagagaccaagagttggagtgatccaccagagcccagcctgccctgtgccacagggaccggcagtgctccccccccccagcmgtgctcccccgctctcactgggtgcccagcaggccgtggtaataggcaaagtacaccaaggagttgtcgttgatctcataggaggagaggccgtttcccacagcgattccctgcggggcaataagaaaacaactctgtggtgtggcagcccctcacagggcagccacagagcatcggcgtcaggcaggaagcagatgtggccctgtttacttcac

SEQ ID NO: 18209 - DNA, 600 bp, Chicken  19866894226949_4
tcagccacaagcagggctcaggactcagcagagtgcttgaagggaccatggcacrcacccaacaccaagcacagtgctgctgctcayaggaattggagcagggcttggggattccagctccctcaccttaagtgtgcagttcaggttggagttgtcatggaagttgcatttcccttcggagcagcagaaagtctgcaagtccttccacagcctgcrggcagagaccaagagttggagtgatccaccagagcccagcctgccctgtgccacagggaccggcagtgctccccccccccagcmgtgctcccccgctctcactgggtgcccagcaggccgtggtaataggcaaagtacaccaaggagttgtcgttgatctcataggaggagaggccgtttcccacagcgattccctgcggggcaataagaaaacaactctgtggtgtggcagcccctcacagggcagccacagagcatcggcgtcaggcaggaagcagatgtggccctgtttacttcacagggggaagaggaaaggccatggacgcctgggagcactcctcagtctcacgcagcagaacacgttcaccgccggcacccagggag

SEQ ID NO: 18210 - DNA, 600 bp, Chicken  19866894226958_1
gctgcagggtcttctcccagcacgggactgggatctgttgcaatgtccagatctgagagccaaggagtttctgtaggtcctacagcagaagactggaggttgtgttgctgcagaacttgggtcatgtttgtgttcctgcccccaccccagtaccctgccgctgcttttggtgcctgcgtgagcaggagtcagcaattctgagagtcaccctgggcctctgggcgtgggaggagaggctgtaatgttcccgcagcccctgagcagcattgcattgctatgtgtgggcagggaagcatttgygtctcttacagcctgtcttgactggtgagaaggcagagtgttactttactccttaattttttcacttatctccacctcagctctgtaccccctagatgacatctgtatggtggcactctgggagataagagacccaaggatggagcaggacaacaggttcagagctgcccrttgtgtggcctggtctgtgacagcagcactgtatgtggcctcacactggggcggctgggacgtatcaacttggtcctgtctgaatcacaggcagcagcctgaagtgcttagctgtgggttttgtcctcc

SEQ ID NO: 18211 - DNA, 600 bp, Chicken  19866894226958_2
gcctgcgtgagcaggagtcagcaattctgagagtcaccctgggcctctgggcgtgggaggagaggctgtaatgttcccgcagcccctgagcagcattgcattgctatgtgtgggcagggaagcatttgygtctcttacagcctgtcttgactggtgagaaggcagagtgttactttactccttaattttttcacttatctccacctcagctctgtaccccctagatgacatctgtatggtggcactctgggagataagagacccaaggatggagcaggacaacaggttcagagctgcccrttgtgtggcctggtctgtgacagcagcactgtatgtggcctcacactggggcggctgggacgtatcaacttggtcctgtctgaatcacaggcagcagcctgaagtgcttagctgtgggttttgtcctcccatatccagggagagataatattttgcatgtacaaaccctccatgtgtaggaggatcttaaaccaccagctgtggtaataaataaaatgtagcaaatgatcccaaagagaagagaaaagggaagtcaaaaggccaaaggtgttctggccctgagcagacactgcagggcct

SEQ ID NO: 18212 - DNA, 600 bp, Chicken  19866894226960_1
ggtaggttcatacagatcatccacaagaactgttgtacattgtcatgtttcctaggaggagctcagagggccccgtttgagaagctcagtgttgagacaagtgttgtacaggtggcagtcccagcaggaaggacagtcaggatttgaggaaggggagcatgctgtccatgtcccactgacagtaccgtctcactgcagtagaggtgggacatgacacacagcctgtaggaccattcccaccgcccttggccaggagaggtccctcagggtgtgagggaacaggccttagctcatcagttytgcaaggaacggagctaagttgtgctcttgccatgtgatatggctggcacggtggtctacaaactcttcctgcatttcattaaactctgtatatgaatttgatcctcttaacagctggatgaggtctcttgcatagtaatagtattgttgtaaagcatctgccagatgtaggggcttattgcccccggacaccagtctgtacagctgctaatatcaactttctgctctctttctgtccatgtcactattttcctcttgcttctaaagatgttttccacctctgcagactcagctctctaa

SEQ ID NO: 18213 - DNA, 599 bp, Chicken  19866894226973_1
  misc_feature (1)..(76): n is any nucleotide
nnnnnnnnnnnnnnnnnnnnnnnnnnnnnnnnnnnnnnnnnnnnnnnnnnnnnnnnnnnnnnnnnnnnnnnnnnnnttgctgcttgcagaaggctcttctccagcctcccaaaggtgactgcaactttgatcactggagtgaagcaggctgctgaggatgatgctcacgtgccacttaggtttattgtgtaggggggcagtaagctcttttattaaccagccattaatcctgaggtggagcagtgatttatagtgtttttagccatcaacagagctgactgcagtttgctcaacttaacyctgtgcaacaccattttctgttgagctaagcttgtctgtctctggtttcaaggacaggtttaagctattaaatacacctgagtttttcagtatcaatagtataagatttatttttgggaacctgatagagctcttcagcagaaggacaagagtaagaccgtattctacagttaatgtattkcttacttctttttttacattgtatacattcagcttggaactactgaaacgtaatgttagaattgtaaactaaagaagttatttgctttttaactcttgacaggatttgaaaaatattt

SEQ ID NO: 18214 - DNA, 600 bp, Chicken  19866894226973_2
ttattgtgtaggggggcagtaagctcttttattaaccagccattaatcctgaggtggagcagtgatttatagtgtttttagccatcaacagagctgactgcagtttgctcaacttaacyctgtgcaacaccattttctgttgagctaagcttgtctgtctctggtttcaaggacaggtttaagctattaaatacacctgagtttttcagtatcaatagtataagatttatttttgggaacctgatagagctcttcagcagaaggacaagagtaagaccgtattctacagttaatgtattkcttacttctttttttacattgtatacattcagcttggaactactgaaacgtaatgttagaattgtaaactaaagaagttatttgctttttaactcttgacaggatttgaaaaatattttcccaatgggaagaaacctaatggaactaaaggttcagctggagaaacaaaaggtacagacagctgcatgatttcagttctcttttttagggtgtgtgttcattacaatagattcttaaccttggggtttgggctttttttttgtgcatttttcagggaatgtatttctctaccagattagt

SEQ ID NO: 18215 - DNA, 600 bp, Chicken  19866894226977_1
ttatttatccagtgagtagtatgaaaacaattattctgcatcctgtataaaaatattattttctcatttacctcttactttctataaaaataattttatttaaagcagtttcaataacccaaggtagaaagagatgtagagcacaggtgacgagaattgcacacattgcagtgcaaaagctaaaagtatggaatttgactagcagaatcttgtctgaaagccaaaaaaggcaacagaagttagacaaaacgctacagtaaaattaacccgtgacaccatataacctttcaaaatctacartaagtaactaaagaattactgtgataaaaccatttcctgaaaagccttcaaacactgtcaatctctgtcaacaccatgtccagaaatgcctactggagtgctctctccctcctccctcgcagtgccactgggctaaagaactgtttccctcccactgccttgaccacacatatgttgaaagatgccaaagattctcttaactcatctacttagtaatacctacagcaataagttgtagagagtcaccattcctattcagtagctgccatcaacctggaccaactcttactgcacttaccc

SEQ ID NO: 18216 - DNA, 600 bp, Chicken  19866894226978_1
ctctaaaatgctgcagaaaaaaataaaataataaaataataaaaataaataaaaggccttccattctgatcttctgaagcagcagcaaggcacataattgcattttcagcctagtgaactctactcaactgcaattaaacaaagctgctagttataaaatcaaggattctgatttattggattcttgtcattgttggtagtgctagtttcccttctgcatatggtatataccatatatgctattattaagattaaccagtaataaaaacggtgtagatcattaaacatttttagcatcawgttttaaagtactatttccatttactttggcaaactaataatgaggaataatttcattttagagttaataggatcattaagcttggaaaccttggtataactgaattaaataattgttttattgtcattataaaggatggagaaagaaaaaaatactaatggaaaaaataactggctgaatatcttttcctttgaaatcatggctttcccttttagcttctcagccattttctctttagaaggtaggagagctaatgatatgaggctgtgactggaactgttaggagaaaaaaaaaaaga

SEQ ID NO: 18217 - DNA, 599 bp, Chicken  19866894226984_1
  misc_feature (1)..(74): n is any nucleotide
nnnnnnnnnnnnnnnnnnnnnnnnnnnnnnnnnnnnnnnnnnnnnnnnnnnnnnnnnnnnnnnnnnnnnnnnnnctgaagaaaggagagattaatcacactcctgatatcattctcaaagagtacatgggcaaaataagcctaagatgaaaaatgaatctataataagcataaaaatcaaaacggagtgtctcataaaaatgcaaaaacaaggaccttcttgcgaaaataacagggatctgtgcatttgaaatgtcatagagtgtttgatctccatgtcaggacagactcaatcacttayagaagcttaagaatacacagggaatattttgagaatacgctgacaaagtaatatgcttcttctgaatatgagtaagcatcaatttgcaaaagcttataattcagtgcaataaggacagacattcatgggcatagcaaaagcacatcttataagccattgaagcttcactcttaaatttcacgtctttgctcaaaagcaaaggaaagagttgttagacctttttttagagcccatttttttttctcattctcagaaacgatacacccatctcacagaagcttttgcgaagatcctcagcc

SEQ ID NO: 18218 - DNA, 600 bp, Chicken  19866894226985_1
gcgtcgtcttttggtcattgctactttgctagtaaccatccccctacctgcgatatcaatagctactgcaatgtcatctccttgcacccaacgagcattagaagagagaggcagatgaagaacaagaaccaaaaatgaaattctgaagctaaagacaaactcctaccattgcagtacattcatgccatgtcctaagccaagtgaaaaggtctaggcttccccagtgcaaacactttctttgccagcagtatgcctctcagagaaagaggagagagtaaagaaaactaaagccactgatgrccagaagaaaatgactagaaaaacagcttcctgtctcactaaacctcgatatttgatgggtgtttgattcttcagagtgggcagtgagaggtaagagctctccattaccttcaaaggtgcttagggctttgtagattcaaccttgaacctcctgacagatgttctgatttattttgctgaactgcataagacaggcaggtaggtctctcctgaacgctctctgtcttgaactctgtatgtttcaattttgtgggcattctgaaaaagccgctatcatgctacatctaagccagtacactt

SEQ ID NO: 18219 - DNA, 600 bp, Chicken  19866894226996_1
cctcctatttgttttctgttgtttgtccccacagtggatctgaagtctagattttcagcaaacgtagcatacatgttgggaaatccaaatgcagcttttgagggcatgtcttctctgcccaccctgagacagacagaaagcactgtgacaaggctgttaccttaattatgatgcacagtggtgaaggtaatttcaaaggatgagtttgttacctcccctgtgctttcagtagggacttgctgactaagcacgtactgattgcatcagccagagcccgaagtgatacagcatttatcttcygtggaaatgagttttgttacagtgaggaatgtttacacttgtagacctgctggcatacatttctcactctcttcccttctagcattttgtagatttcattttctcataggaatgggtaaaatacttacgatgcatacacgtcctaatgcattaacttttctttgtaaccctagaacggcacccttcctccatctgatrttcagattgtaccaaccccataactcctaaagagaaggagtaargaaaagctttcttttactaaaaaaaagacaaaaacaaaaacaaaacaaacacacaaaa

SEQ ID NO: 18220 - DNA, 479 bp, Chicken  19866894226996_2
gatgagtttgttacctcccctgtgctttcagtagggacttgctgactaagcacgtactgattgcatcagccagagcccgaagtgatacagcatttatcttcygtggaaatgagttttgttacagtgaggaatgtttacacttgtagacctgctggcatacatttctcactctcttcccttctagcattttgtagatttcattttctcataggaatgggtaaaatacttacgatgcatacacgtcctaatgcattaacttttctttgtaaccctagaacggcacccttcctccatctgatrttcagattgtaccaaccccataactcctaaagagaaggagtaargaaaagctttcttttactaaaaaaaagacaaaaacaaaaacaaaacaaacacacaaaaaaaaacctgatttcatggtcattaacaactcacttttctgttttgtttttgacgaataattttgctgctaaaaacta

SEQ ID NO: 18221 - DNA, 435 bp, Chicken  19866894226996_3
actaagcacgtactgattgcatcagccagagcccgaagtgatacagcatttatcttcygtggaaatgagttttgttacagtgaggaatgtttacacttgtagacctgctggcatacatttctcactctcttcccttctagcattttgtagatttcattttctcataggaatgggtaaaatacttacgatgcatacacgtcctaatgcattaacttttctttgtaaccctagaacggcacccttcctccatctgatrttcagattgtaccaaccccataactcctaaagagaaggagtaargaaaagctttcttttactaaaaaaaagacaaaaacaaaaacaaaacaaacacacaaaaaaaaacctgatttcatggtcattaacaactcacttttctgttttgtttttgacgaataattttgctgctaaaaacta

SEQ ID NO: 18222 - DNA, 599 bp, Chicken  19866894227000_1
  misc_feature (1)..(40): n is any nucleotide
nnnnnnnnnnnnnnnnnnnnnnnnnnnnnnnnnnnnnnnnattccaatcgatactttttggaaatgttttcttatgacaaataaaattataagaaagacagtaagtttaatcttccatggagttaagatgatggttcaactactttattccttttagtattttgacaaatctagataggggttgttttttcttctttatacaaatgattttttgattatttgtatattgttctaatagacatattagtaacttttctattatttttttctagttgaaataaaacgacaactttttccccyttgtttccttggtttcattttcatgagcttgtataaccacctgcagaatgatacatttactgttttgtatatgcagttgttagcctttgatattttccgcatatgttattytwaagctaattttcacataarcaaatgtatgcaaaaattgcaaacatggctatttgtctattctgatagaaaaacaaaccaaaaaattatagagtgaatggagggcgcagcacattkcagaattttaagtgcacgtgagtataattgcaaatttaattgcctttgacaaggcaatgaggacagatatt

SEQ ID NO: 18223 - DNA, 600 bp, Chicken  19866894227000_2
cttccatggagttaagatgatggttcaactactttattccttttagtattttgacaaatctagataggggttgttttttcttctttatacaaatgattttttgattatttgtatattgttctaatagacatattagtaacttttctattatttttttctagttgaaataaaacgacaactttttccccyttgtttccttggtttcattttcatgagcttgtataaccacctgcagaatgatacatttactgttttgtatatgcagttgttagcctttgatattttccgcatatgttattytwaagctaattttcacataarcaaatgtatgcaaaaattgcaaacatggctatttgtctattctgatagaaaaacaaaccaaaaaattatagagtgaatggagggcgcagcacattkcagaattttaagtgcacgtgagtataattgcaaatttaattgcctttgacaaggcaatgaggacagatattgcagctatgtaaggacatggctaaaccttgcagaagtgtactggttggaatggtggaaaggttaaattatgaattgtgtgtaaaagatgtttgagggattcatatactgcca

SEQ ID NO: 18224 - DNA, 600 bp, Chicken  19866894227000_3
tccatggagttaagatgatggttcaactactttattccttttagtattttgacaaatctagataggggttgttttttcttctttatacaaatgattttttgattatttgtatattgttctaatagacatattagtaacttttctattatttttttctagttgaaataaaacgacaactttttccccyttgtttccttggtttcattttcatgagcttgtataaccacctgcagaatgatacatttactgttttgtatatgcagttgttagcctttgatattttccgcatatgttattytwaagctaattttcacataarcaaatgtatgcaaaaattgcaaacatggctatttgtctattctgatagaaaaacaaaccaaaaaattatagagtgaatggagggcgcagcacattkcagaattttaagtgcacgtgagtataattgcaaatttaattgcctttgacaaggcaatgaggacagatattgcagctatgtaaggacatggctaaaccttgcagaagtgtactggttggaatggtggaaaggttaaattatgaattgtgtgtaaaagatgtttgagggattcatatactgccaca

SEQ ID NO: 18225 - DNA, 600 bp, Chicken  19866894227000_4
ggttcaactactttattccttttagtattttgacaaatctagataggggttgttttttcttctttatacaaatgattttttgattatttgtatattgttctaatagacatattagtaacttttctattatttttttctagttgaaataaaacgacaactttttccccyttgtttccttggtttcattttcatgagcttgtataaccacctgcagaatgatacatttactgttttgtatatgcagttgttagcctttgatattttccgcatatgttattytwaagctaattttcacataarcaaatgtatgcaaaaattgcaaacatggctatttgtctattctgatagaaaaacaaaccaaaaaattatagagtgaatggagggcgcagcacattkcagaattttaagtgcacgtgagtataattgcaaatttaattgcctttgacaaggcaatgaggacagatattgcagctatgtaaggacatggctaaaccttgcagaagtgtactggttggaatggtggaaaggttaaattatgaattgtgtgtaaaagatgtttgagggattcatatactgccacaatatgaagatctccagtca

SEQ ID NO: 18226 - DNA, 600 bp, Chicken  19866894227000_5
gttctaatagacatattagtaacttttctattatttttttctagttgaaataaaacgacaactttttccccyttgtttccttggtttcattttcatgagcttgtataaccacctgcagaatgatacatttactgttttgtatatgcagttgttagcctttgatattttccgcatatgttattytwaagctaattttcacataarcaaatgtatgcaaaaattgcaaacatggctatttgtctattctgatagaaaaacaaaccaaaaaattatagagtgaatggagggcgcagcacattkcagaattttaagtgcacgtgagtataattgcaaatttaattgcctttgacaaggcaatgaggacagatattgcagctatgtaaggacatggctaaaccttgcagaagtgtactggttggaatggtggaaaggttaaattatgaattgtgtgtaaaagatgtttgagggattcatatactgccacaatatgaagatctccagtcatagctgccaagttcctaagagaatagtgatattctttgtagatactaggaaaccactgaacagaaagagaagtaagaatccttattttcagccatt

SEQ ID NO: 18227 - DNA, 600 bp, Chicken  19866894227000_6
gtgaggcttcggtgtgagatttaagttagcagggtttagtgagtgtcatttgcactgtggcaactgtggacatggggatgaataggctcttagctggcagccaagacctggtgatgtgacttgttctgacaggagagaaggctaagctaacttgcttatagcaaatgcaaagtaatacatgctgacaatttctgcagatcagctgatgtattacaagttgttaatatgaggtaacttcatggtacttctgagatcacaagacactttagtgtgccacacttctctctgcttagactctgytctaacaataatggtctttctgtaggctgctatggatttccgatctctrtgcatgcaaatatattgcattacacacacaataccttgatactgcaaattakacaaggattcatactggttggagtagtcctatgtcaaaatagctatagtatatgtaatggagcagaatcaatagtgaaatgacagtaattgtgacaaaggtagttcgttccaaacagagacttgcaccaataaaatagagaggagaagcttgaagtcattctgtgtggcaacaagatgttcccatctgagccttagtaa

SEQ ID NO: 18228 - DNA, 600 bp, Chicken  19866894227000_7
ttgcactgtggcaactgtggacatggggatgaataggctcttagctggcagccaagacctggtgatgtgacttgttctgacaggagagaaggctaagctaacttgcttatagcaaatgcaaagtaatacatgctgacaatttctgcagatcagctgatgtattacaagttgttaatatgaggtaacttcatggtacttctgagatcacaagacactttagtgtgccacacttctctctgcttagactctgytctaacaataatggtctttctgtaggctgctatggatttccgatctctrtgcatgcaaatatattgcattacacacacaataccttgatactgcaaattakacaaggattcatactggttggagtagtcctatgtcaaaatagctatagtatatgtaatggagcagaatcaatagtgaaatgacagtaattgtgacaaaggtagttcgttccaaacagagacttgcaccaataaaatagagaggagaagcttgaagtcattctgtgtggcaacaagatgttcccatctgagccttagtaagacagggtggaaggaaacaatgctttaaggaagctgcactgcagcagcc

SEQ ID NO: 18229 - DNA, 600 bp, Chicken  19866894227000_8
caagacctggtgatgtgacttgttctgacaggagagaaggctaagctaacttgcttatagcaaatgcaaagtaatacatgctgacaatttctgcagatcagctgatgtattacaagttgttaatatgaggtaacttcatggtacttctgagatcacaagacactttagtgtgccacacttctctctgcttagactctgytctaacaataatggtctttctgtaggctgctatggatttccgatctctrtgcatgcaaatatattgcattacacacacaataccttgatactgcaaattakacaaggattcatactggttggagtagtcctatgtcaaaatagctatagtatatgtaatggagcagaatcaatagtgaaatgacagtaattgtgacaaaggtagttcgttccaaacagagacttgcaccaataaaatagagaggagaagcttgaagtcattctgtgtggcaacaagatgttcccatctgagccttagtaagacagggtggaaggaaacaatgctttaaggaagctgcactgcagcagcctttgacaggatttcacactgcttactcaaaagggaaatgttaaaggtgaaaa

SEQ ID NO: 18230 - DNA, 599 bp, Chicken  19866894227002_1
  misc_feature (1)..(32): n is any nucleotide
nnnnnnnnnnnnnnnnnnnnnnnnnnnnnnnncgcagctctcaaagtcaatatcagttctctgtgctcatttgatactcatcacaactagcttgtttttctgtgaatccactcagatgctttcacttagaggtaactgacagctgacaaattgtgatctctcctcttccttttcaacctcttcttctcagcctgaaggatatcccaagtaaatcactactccttccagcctgctgaatggcagcagaacatggactctgagtaagaaatagagggtcacagaatcacagagtcacagaaycgtaaaggttgaaaggaaactcaggtggtcatcaagtacaacctccctgctaatgcaggttgcctagtgtagaatgcacagcaragtgtccaggtggtttttgaatatttccagagaaggaaattccacaaggtctctgggcagaattttccagtgctctgtcaccctcaaagtaaagaagttcttttccatgttcagatggaacttcctgtgttccagtttgtgcccactgccccttgttatgtcactgggcactgctagaaagagcccggctccatcctcttgacrcccatccttta

SEQ ID NO: 18231 - DNA, 600 bp, Chicken  19866894227002_2
aactagcttgtttttctgtgaatccactcagatgctttcacttagaggtaactgacagctgacaaattgtgatctctcctcttccttttcaacctcttcttctcagcctgaaggatatcccaagtaaatcactactccttccagcctgctgaatggcagcagaacatggactctgagtaagaaatagagggtcacagaatcacagagtcacagaaycgtaaaggttgaaaggaaactcaggtggtcatcaagtacaacctccctgctaatgcaggttgcctagtgtagaatgcacagcaragtgtccaggtggtttttgaatatttccagagaaggaaattccacaaggtctctgggcagaattttccagtgctctgtcaccctcaaagtaaagaagttcttttccatgttcagatggaacttcctgtgttccagtttgtgcccactgccccttgttatgtcactgggcactgctagaaagagcccggctccatcctcttgacrcccatcctttacatttttataagcattgataagatccccctcagtcttctccagactgaacaatgtgaggtgtctcagcctttcaycataaacaaa

SEQ ID NO: 18232 - DNA, 477 bp, Chicken  19866894227002_3
gagtcacagaaycgtaaaggttgaaaggaaactcaggtggtcatcaagtacaacctccctgctaatgcaggttgcctagtgtagaatgcacagcaragtgtccaggtggtttttgaatatttccagagaaggaaattccacaaggtctctgggcagaattttccagtgctctgtcaccctcaaagtaaagaagttcttttccatgttcagatggaacttcctgtgttccagtttgtgcccactgccccttgttatgtcactgggcactgctagaaagagcccggctccatcctcttgacrcccatcctttacatttttataagcattgataagatccccctcagtcttctccagactgaacaatgtgaggtgtctcagcctttcaycataaacaaaatgttccargcccctatccatctttttggccctccgctggactatctctagatgtttcccatctttcttgaactgaggaga

SEQ ID NO: 18233 - DNA, 391 bp, Chicken  19866894227002_4
tgcacagcaragtgtccaggtggtttttgaatatttccagagaaggaaattccacaaggtctctgggcagaattttccagtgctctgtcaccctcaaagtaaagaagttcttttccatgttcagatggaacttcctgtgttccagtttgtgcccactgccccttgttatgtcactgggcactgctagaaagagcccggctccatcctcttgacrcccatcctttacatttttataagcattgataagatccccctcagtcttctccagactgaacaatgtgaggtgtctcagcctttcaycataaacaaaatgttccargcccctatccatctttttggccctccgctggactatctctagatgtttcccatctttcttgaactgaggaga

SEQ ID NO: 18234 - DNA, 372 bp, Chicken  19866894227002_5
gtggtttttgaatatttccagagaaggaaattccacaaggtctctgggcagaattttccagtgctctgtcaccctcaaagtaaagaagttcttttccatgttcagatggaacttcctgtgttccagtttgtgcccactgccccttgttatgtcactgggcactgctagaaagagcccggctccatcctcttgacrcccatcctttacatttttataagcattgataagatccccctcagtcttctccagactgaacaatgtgaggtgtctcagcctttcaycataaacaaaatgttccargcccctatccatctttttggccctccgctggactatctctagatgtttcccatctttcttgaactgaggaga

SEQ ID NO: 18235 - DNA, 600 bp, Chicken  19866894227008_1
cagtaactgtcattgctctccccacaaaaagcactcaaacaaatagcaatattagctgcagtaagtttcagatgcatacataataagaacgtagaagatgaatgttgtttacataagtatagtaaagaattcatcaatgcaaattgcatgtagatcattttactaatacagccaaactgtaatatttaccagtgcaaatagctccacaacagccaggtggatctgcagggcagctgcttcacagaaatcatacctgcagtttgtgaggccttctcagtttagcatataaattcatacagkgtgaatatggcaagttccagtggttactttaatctgcatgtgcaaggtttctcccttaactttgatctattcatggacataagtagacaagctgaactagtttaacagcagctggaggagaatcatacccacctaatagcatatacatacaagttttgtgtttttaagtacaaatgcactcttcatttaggctttgcactgctgaaggggacacatataatatttccttcagtttctgtgtacatgtgtaaatacaaaaaggtgtggcacaacgtgtgcccatctcacagctgatgctga

SEQ ID NO: 18236 - DNA, 600 bp, Chicken  19866894227008_2
atcacagcttattgccagcactgccagcatgtcagggacaaagagtatttctttgttcaaaattatataccttgaatacagatagaaataatgtctttcggtttatttatatttgccacatggcttgaacttgagggcccatctcatttgctgcctgtaagagaagcagtactcttggtattgcagtggtgcaaatgaaaccactggcatgacacctgaagtggcttccatcctgccagcttgagtttgctcgcatctcacccataaggtttaggtcaacatctctgtaagagaggccarggaaatggcactgaaggaagatgcactggaaccgacttgctttctggcttcctcaaaggccacgaacgagtgattctggaaaacccatgaactctcccagtgcaggacacaaagtgcaccagggttggaaggagttcttcagtgagtttgaaaagagttctgtaggggacctgctgggttctgctctttctccttacgatggaaatgagctcatcacttgctacacaaagagaaaaacagcatttttcactttctcagatactgtagtgaataaatagaacagtgtaaataaatgattaa

SEQ ID NO: 18237 - DNA, 600 bp, Chicken  19866894227008_3
aagatgcactggaaccgacttgctttctggcttcctcaaaggccacgaacgagtgattctggaaaacccatgaactctcccagtgcaggacacaaagtgcaccagggttggaaggagttcttcagtgagtttgaaaagagttctgtaggggacctgctgggttctgctctttctccttacgatggaaatgagctcatcacttgctacacaaagagaaaaacagcatttttcactttctcagatactgtagtgaataaatagaacagtgtaaataaatgattaaacatttactgtgccttyttctgagtctctgcctttacaacatggtggctatatctgcctaattgcttaagcactggggttcctatagatgaagcatttgagcgtctcccaaacatcagygtttctctggaactacccgtttgggtttcttttttctttttctttctttattggcttcagaaagtgcttagattgacagcacagactagtaactgtcttactacagacagatgcgctgcacatatcttttccaatacacttcacatcagatgctccaggcatgaatttcttaaatagaaaaaggcaactgtgatgatc

SEQ ID NO: 18238 - DNA, 592 bp, Chicken  19866894227008_4
cagggttggaaggagttcttcagtgagtttgaaaagagttctgtaggggacctgctgggttctgctctttctccttacgatggaaatgagctcatcacttgctacacaaagagaaaaacagcatttttcactttctcagatactgtagtgaataaatagaacagtgtaaataaatgattaaacatttactgtgccttyttctgagtctctgcctttacaacatggtggctatatctgcctaattgcttaagcactggggttcctatagatgaagcatttgagcgtctcccaaacatcagygtttctctggaactacccgtttgggtttcttttttctttttctttctttattggcttcagaaagtgcttagattgacagcacagactagtaactgtcttactacagacagatgcgctgcacatatcttttccaatacacttcacatcagatgctccaggcatgaatttcttaaatagaaaaaggcaactgtgatgatctgtcgacaaaattttaggtaatgttgtgataaacaactgcccactggagactaactgccaagctggcaatcttaattttaaaactaaccgtaca

SEQ ID NO: 18239 - DNA, 599 bp, Chicken  19866894227010_1
  misc_feature (1)..(21): n is any nucleotide
nnnnnnnnnnnnnnnnnnnnntgggtggatggagaacctctccctagcactgacccacggcggtccctgcagaggctgagctctgagctccccaaactcggcggttcggagctggctgtgcactctgcgcgctgccatacagatccggaaccattggctgtgagaaggcagagttcaggatccttaggagctcccaaacccggatttggggagagcagactgcggcctcctcgtggatctacctggacctgtgtgttaatggccgggaggaaggaggggcccaaaggagcaggttggtgmtcgaggagctgctcagagctcaaaaacccaacggaattggtcaaaaatggccacgattggggacaaggagctcctggccaagccccagcacagaaaggaagcgcaccgaggccccgcggggacagggaagatggggagcacatggagactgtgtcagacgtgcagagataacgtcagcagagccagagctcagctggaattgaacctgggcgggggtagcaaagacttctgtttgtacatagggggcaaaagaagggctgagggaaacatggatgtcktgctgacatgggacacgaaag

SEQ ID NO: 18240 - DNA, 600 bp, Chicken  19866894227010_2
gcccaaaggagcaggttggtgmtcgaggagctgctcagagctcaaaaacccaacggaattggtcaaaaatggccacgattggggacaaggagctcctggccaagccccagcacagaaaggaagcgcaccgaggccccgcggggacagggaagatggggagcacatggagactgtgtcagacgtgcagagataacgtcagcagagccagagctcagctggaattgaacctgggcgggggtagcaaagacttctgtttgtacatagggggcaaaagaagggctgagggaaacatggatgtcktgctgacatgggacacgaaagaggctgaggtaccaaacgccttcatcagctcggtggtaagcagcaaggctgcccttcgggaatcataggatcatagaatcccagagcctgggagagctggaggagaagggaagggtgcagcaaaggatgtgctcccatggctgaacagcactgggtcacgcagagggccctgaggagatgcagccgtggatgctgggagctggcaccctcacagcgaggccttcatcatccctgagcggtgttactgggagacggtcctggaagctgcaaacgtcaccc

SEQ ID NO: 18241 - DNA, 600 bp, Chicken  19866894227010_3
acagaaaggaagcgcaccgaggccccgcggggacagggaagatggggagcacatggagactgtgtcagacgtgcagagataacgtcagcagagccagagctcagctggaattgaacctgggcgggggtagcaaagacttctgtttgtacatagggggcaaaagaagggctgagggaaacatggatgtcktgctgacatgggacacgaaagaggctgaggtaccaaacgccttcatcagctcggtggtaagcagcaaggctgcccttcgggaatcataggatcatagaatcccagagcctkggagagctggaggagaagggaagggtgcagcaaaggatgtgctcccatggctgaacagcactgggtcacgcagagggccctgaggagatgcagccgtggatgctgggagctggcaccctcacagcgaggccttcatcatccctgagcggtgttactgggagacggtcctggaagctgcaaacgtcaccccgagctccacgaagggcccmgggagcaaagggcttcaccgtggggcctgccaaggcactggagcagctcatcccaggcaccattctcaggcacatgaagggggaggaaacc

SEQ ID NO: 18242 - DNA, 460 bp, Chicken  19866894227010_4
gaggctgaggtaccaaacgccttcatcagctcggtggtaagcagcaaggctgcccttcgggaatcataggatcatagaatcccagagcctgggagagctggaggagaagggaagggtgcagcaaaggatgtgctcccatggctgaacagcactgggtcacgcagagggccctgaggagatgcagccgtggatgctgggagctggcaccctcacagcgaggccttcatcatccctgagcggtgttactgggagacggtcctggaagctgcaaacgtcaccccgagctccacgaagggcccmgggagcaaagggcttcaccgtggggcctgccaaggcactggagcagctcatcccaggcaccattctcaggcacatgaagggggaggaaaccatcagcacagattcagcgaggacaggcgatgtctgacttggggaacccttctgacaatgcacgcggcag

SEQ ID NO: 18243 - DNA, 599 bp, Chicken  19866894227017_1
  misc_feature (1)..(146): n is any nucleotide
nnnnnnnnnnnnnnnnnnnnnnnnnnnnnnnnnnnnnnnnnnnnnnnnnnnnnnnnnnnnnnnnnnnnnnnnnnnnnnnnnnnnnnnnnnnnnnnnnnnnnnnnnnnnnnnnnnnnnnnnnnnnnnnnnnnnnnnnnnnnnnnnnntggggatgtggccccacgtgacaccatctcttctcacccccacaggaattgaaccttccatctgagtgctgtgctgcagtagccagccttgcatgcacgtgtttggagtctgtgggtgtgtgtatctccgtttgctcgactcctgcatctcctygggctgacgcagtgtgtgctcctctgctccactctgtgcgttatttcctgggratgacccattgaaatgtccacctcgtgagcagaggtggacctctgggcagagcgctgtgcatcgttttggrgaagataccattgcagacacacwgggaggagagcgccgggttccgggctcaggggacgggcagaggctctggaagaggccgagcagaaaagagtgttccaaacagtccgtagaagtgcaaaagagacccgaacagtaatgggatgcggagtgggtgaagcaggtggatttgtgaa

SEQ ID NO: 18244 - DNA, 599 bp, Chicken  19866894227017_2
  misc_feature (1)..(93): n is any nucleotide
nnnnnnnnnnnnnnnnnnnnnnnnnnnnnnnnnnnnnnnnnnnnnnnnnnnnnnnnnnnnnnnnnnnnnnnnnnnnnnnnnnnnnnnnnnnnntggggatgtggccccacgtgacaccatctcttctcacccccacaggaattgaaccttccatctgagtgctgtgctgcagtagccagccttgcatgcacgtgtttggagtctgtgggtgtgtgtatctccgtttgctcgactcctgcatctcctygggctgacgcagtgtgtgctcctctgctccactctgtgcgttatttcctgggratgacccattgaaatgtccacctcgtgagcagaggtggacctctgggcagagcgctgtgcatcgttttggrgaagataccattgcagacacacwgggaggagagcgccgggttccgggctcaggggacgggcagaggctctggaagaggccgagcagaaaagagtgttccaaacagtccgtagaagtgcaaaagagacccgaacagtaatgggatgcggagtgggtgaagcaggtggatttgtgaaggtgaggcagccatttccttcagtcctgagacgccgacctgagaccccaggct

SEQ ID NO: 18245 - DNA, 599 bp, Chicken  19866894227017_3
  misc_feature (1)..(22): n is any nucleotide
nnnnnnnnnnnnnnnnnnnnnntggggatgtggccccacgtgacaccatctcttctcacccccacaggaattgaaccttccatctgagtgctgtgctgcagtagccagccttgcatgcacgtgtttggagtctgtgggtgtgtgtatctccgtttgctcgactcctgcatctcctygggctgacgcagtgtgtgctcctctgctccactctgtgcgttatttcctgggratgacccattgaaatgtccacctcgtgagcagaggtggacctctgggcagagcgctgtgcatcgttttggrgaagataccattgcagacacacwgggaggagagcgccgggttccgggctcaggggacgggcagaggctctggaagaggccgagcagaaaagagtgttccaaacagtccgtagaagtgcaaaagagacccgaacagtaatgggatgcggagtgggtgaagcaggtggatttgtgaaggtgaggcagccatttccttcagtcctgagacgccgacctgagaccccaggctgattgctgggacgttcagaacaaggactcagctccaccacatgtggcagctgaggaacacaggaaagcaaa

SEQ ID NO: 18246 - DNA, 600 bp, Chicken  19866894227017_4
ggggatgtggccccacgtgacaccatctcttctcacccccacaggaattgaaccttccatctgagtgctgtgctgcagtagccagccttgcatgcacgtgtttggagtctgtgggtgtgtgtatctccgtttgctcgactcctgcatctcctygggctgacgcagtgtgtgctcctctgctccactctgtgcgttatttcctgggratgacccattgaaatgtccacctcgtgagcagaggtggacctctgggcagagcgctgtgcatcgttttggrgaagataccattgcagacacacwgggaggagagcgccgggttccgggctcaggggacgggcagaggctctggaagaggccgagcagaaaagagtgttccaaacagtccgtagaagtgcaaaagagacccgaacagtaatgggatgcggagtgggtgaagcaggtggatttgtgaaggtgaggcagccatttccttcagtcctgagacgccgacctgagaccccaggctgattgctgggacgttcagaacaaggactcagctccaccacatgtggcagctgaggaacacaggaaagcaaaggtgcataggaacataggaggcgc

SEQ ID NO: 18247 - DNA, 600 bp, Chicken  19866894227025_1
ttattctcctgagctaatttctgtttaaaaaaaaaaaaaaaaaaagctactatctaaataatcttctcaactttgtcagctccccacacttgtacaaactgctacagagtagtaggttttgccttctctgtactctgtcctgattctcttctaggtcctcatccatctttggggaggtgtcaagatcagattaacttcttcagtgtttttatggtatttaggtaaactggaccatgcctttttccacctgtcttagttaatacttacgtgatgtgctgtgttgtagtgctggagtttgckctatgatatgctgagatgttgtctttgtagctaagtctgatggcagtgtgtcgctgtttgggttgagttgtgggtttgttggtttttttttgttttgttttgtttttttcatgaaagcctcctgattttaatgtcagtaaggggtcgagtaagaagaattaaaatgccctgaactgtgcctgtttgtcttataccttcaatactgctaacaaataagtgttcatgctgtgcaggtttctgcccaggtgagaacagtggggattctccatgtgccaatggcagtcttacaattgaagaagc

SEQ ID NO: 18248 - DNA, 599 bp, Chicken  19866894227027_1
  misc_feature (1)..(131): n is any nucleotide
nnnnnnnnnnnnnnnnnnnnnnnnnnnnnnnnnnnnnnnnnnnnnnnnnnnnnnnnnnnnnnnnnnnnnnnnnnnnnnnnnnnnnnnnnnnnnnnnnnnnnnnnnnnnnnnnnnnnnnnnnnnnnnnnnnntatttcgcttttttttttttttgagggggagcatagaaaagccctgagaagtgtaacaaaaatactcacactgcttcagtcacagctgaaccaaaagcatctgcaagtgcccttccctttaagtgcattttcgaacattcaggagtacctaagggaaagctgcgtgacrtgactgagaagctgagcctcctgacagttcattaactggtgtctgaggaacctaagtgcaatttctttgtgctaatcttttatgtgtacctcaatgaggcttccctgacaaccatcatccctccctggcagaaacatcttggcttttctaagcaccaccrctccacatgcataggccttggaacaagggtttgatctgactttgtgtgctgctttctggctgtgtatggctctgcccacgtcacccactgagataatgatgtaggacaactagcatgcacagagcaaggatttaatggt

SEQ ID NO: 18249 - DNA, 600 bp, Chicken  19866894227027_2
agcatagaaaagccctgagaagtgtaacaaaaatactcacactgcttcagtcacagctgaaccaaaagcatctgcaagtgcccttccctttaagtgcattttcgaacattcaggagtacctaagggaaagctgcgtgacrtgactgagaagctgagcctcctgacagttcattaactggtgtctgaggaacctaagtgcaatttctttgtgctaatcttttatgtgtacctcaatgaggcttccctgacaaccatcatccctccctggcagaaacatcttggcttttctaagcaccaccrctccacatgcataggccttggaacaagggtttgatctgactttgtgtgctgctttctggctgtgtatggctctgcccacgtcacccactgagataatgatgtaggacaactagcatgcacagagcaaggatttaatggtgctctattgttcgctgagctgtgattgccagggagaggccaagccaccagggactgcctcatccgctcattgttgcatgctgagagcctgcagagttttgctgggactgtgaatgagacctggcaaacygcagagaaattccctttgatttgactcatgaa

SEQ ID NO: 18250 - DNA, 581 bp, Chicken  19866894227027_3
cagaaacatcttggcttttctaagcaccaccrctccacatgcataggccttggaacaagggtttgatctgactttgtgtgctgctttctggctgtgtatggctctgcccacgtcacccactgagataatgatgtaggacaactagcatgcacagagcaaggatttaatggtgctctattgttcgctgagctgtgattgccagggagaggccaagccaccagggactgcctcatccgctcattgttgcatgctgagagcctgcagagttttgctgggactgtgaatgagacctggcaaacygcagagaaattccctttgatttgactcatgaaacatgaaagtcatcctcttccaagagggaagaggatagaaaatctacagcttaacttgctacctattagtcagcttctgtcttgacaacgtgagtctgctgtatcctaactctaattcagtgtaaatcttggtactgatgtaatggctccatccatcaagatttcaactatattccactaatttaaaaaatgggaacaaaagggaggggtttgaatccagaactttctaacttttaacatcattaaagg

SEQ ID NO: 18251 - DNA, 600 bp, Chicken  19866894227035_1
acttaaaagcaaaaaatctaaataagcaacagtaagcaaaatcgcaaaagaaattcagaaagatgaaactaattgagaagtcagagcattatttggtggttcttttaatgatttctgtgctaatttaatttgttgtgactctcacctctggaaatattctatgatctacgggagttacaaatggtagaggcaatcttccatttgttttaatttgatagctacaataatgaaatagcaagcataatattattaaaatataggtcagcacacagcatgttttctttgtttatgtgcctacayctttaatttaacattatttagaagttcatataacaatctatcagtamcagactgcatgcaaaggtttgcttttttttttttttacatttattatgtgaagaatataaatttctgtctaataaaaataatattgtattatatataaaaaacactccaaaagtaacgtctcccacttatttctgttgaaagtacaacaggtagaaagagtgcaataacagtacctgagagagcaaactcgcagatagaaaacactatttttcaagacagtcacaccatttgctctgcatttttgccagcaac

SEQ ID NO: 18252 - DNA, 600 bp, Chicken  19866894227035_2
aagaaattcagaaagatgaaactaattgagaagtcagagcattatttggtggttcttttaatgatttctgtgctaatttaatttgttgtgactctcacctctggaaatattctatgatctacgggagttacaaatggtagaggcaatcttccatttgttttaatttgatagctacaataatgaaatagcaagcataatattattaaaatataggtcagcacacagcatgttttctttgtttatgtgcctacayctttaatttaacattatttagaagttcatataacaatctatcagtamcagactgcatgcaaaggtttgcttttttttttttttacatttattatgtgaagaatataaatttctgtctaataaaaataatattgtattatatataaaaaacactccaaaagtaacgtctcccacttatttctgttgaaagtacaacaggtagaaagagtgcaataacagtacctgagagagcaaactcgcagatagaaaacactatttttcaagacagtcacaccatttgctctgcatttttgccagcaacaaacaagagcctgcatgctgcactcataaaaatcggcatggccatcc

SEQ ID NO: 18253 - DNA, 599 bp, Chicken  19866894227041_1
  misc_feature (1)..(27): n is any nucleotide
nnnnnnnnnnnnnnnnnnnnnnnnnnnctcttgtaaaggacagtcttcttgatctgtgtgtgtgcttgaatacatcataacccctcactcagagaaagaagacaatacatgggtagagtttgagtacagtctggtaggtgaagtctactataattgaggagaatgctgtcaacagtcaagcatattcaatttcatgacattattacagtagcttttctgtaaaaaattatttggtgttactaaatattaaaaaaaaatcataaatttctgtgaaatgtaaaatcagaggaatttcagatkatttcaatattgctaatatccatttattctacttttatttatttgaaatgattgccctgcactcaaagaagaaaaggtaagacaaaatagtttctccttccatkgttgtaagttgctattttcccccagcaaacccattttttctgctctgggacactagaatacaattctgttttagaaattatatcagtaatttaaatatatgtttcaattgtcaaactaaattaatatgatcatttaatatatcgtggcactgatgagctaaatgaattgctttctgtttggaagatatttattga

SEQ ID NO: 18254 - DNA, 600 bp, Chicken  19866894227041_2
atacatgggtagagtttgagtacagtctggtaggtgaagtctactataattgaggagaatgctgtcaacagtcaagcatattcaatttcatgacattattacagtagcttttctgtaaaaaattatttggtgttactaaatattaaaaaaaaatcataaatttctgtgaaatgtaaaatcagaggaatttcagatkatttcaatattgctaatatccatttattctacttttatttatttgaaatgattgccctgcactcaaagaagaaaaggtaagacaaaatagtttctccttccatkgttgtaagttgctattttcccccagcaaacccattttttctgctctgggacactagaatacaattctgttttagaaattatatcagtaatttaaatatatgtttcaattgtcaaactaaattaatatgatcatttaatatatcgtggcactgatgagctaaatgaattgctttctgtttggaagatatttattgatcatatgaataaaacaacagcagaaattacatcctgccatatgtagaatgcagcttgttgaacaagttgtaagaaatcaatgtcccagtttcttgttagtccata

SEQ ID NO: 18255 - DNA, 600 bp, Chicken  19866894227041_3
caacagcagaaattacatcctgccatatgtagaatgcagcttgttgaacaagttgtaagaaatcaatgtcccagtttcttgttagtccatattttgtttttcactttgactctttgctcccttctcctttatttgagctgttcttatatcttaggaattagttggatgtaatagtcaaactactttttacacaaaactgtttatgaggttggttgtagttgaacatctaatgttataaagaagtcaaatatgtaacatcttgattacaaactgaaaattactacatattcatgacaaaayaggaaaattatatcatacatacatcattttattaatgtgtcttattgacctcagatatttttccagaacctttcagttacaatgaagatattctcttctgccatacaaacagtcttattcattggttttatttcaatggatccaayggtctacaagaccattatgtgaataagacattattgctagtagggtcaactgaaaaataaactctttctaaattgttgagttcaaactrcatggaattttgcaatatttttcaatattctctttctctggtacaatgcttacttgttatgtaat

SEQ ID NO: 18256 - DNA, 600 bp, Chicken  19866894227041_4
tatcttaggaattagttggatgtaatagtcaaactactttttacacaaaactgtttatgaggttggttgtagttgaacatctaatgttataaagaagtcaaatatgtaacatcttgattacaaactgaaaattactacatattcatgacaaaayaggaaaattatatcatacatacatcattttattaatgtgtcttattgacctcagatatttttccagaacctttcagttacaatgaagatattctcttctgccatacaaacagtcttattcattggttttatttcaatggatccaayggtctacaagaccattatgtgaataagacattattgctagtagggtcaactgaaaaataaactctttctaaattgttgagttcaaactrcatggaattttgcaatatttttcaatattctctttctctggtacaatgcttacttgttatgtaataatgtaaattgtcaactttgtggaaggaggaatatatattaatatatttatgtcttgcactgtcctgaatttagttatgctgaaggaaacggtgactcagtcacccatttctgacaaatcctttttattttctgcatttaagagct

SEQ ID NO: 18257 - DNA, 600 bp, Chicken  19866894227041_5
taaagaagtcaaatatgtaacatcttgattacaaactgaaaattactacatattcatgacaaaayaggaaaattatatcatacatacatcattttattaatgtgtcttattgacctcagatatttttccagaacctttcagttacaatgaagatattctcttctgccatacaaacagtcttattcattggttttatttcaatggatccaayggtctacaagaccattatgtgaataagacattattgctagtagggtcaactgaaaaataaactctttctaaattgttgagttcaaactrcatggaattttgcaatatttttcaatattctctttctctggtacaatgcttacttgttatgtaataatgtaaattgtcaactttgtggaaggaggaatatatattaatatatttatgtcttgcactgtcctgaatttagttatgctgaaggaaacggtgactcagtcacccatttctgacaaatcctttttattttctgcatttaagagctagagagacagattttttcttaaaggttagacaccaaaaaatgggtgtccacttccactgtcaaagttgttagtgctgtcagctcttctc

SEQ ID NO: 18258 - DNA, 600 bp, Chicken  19866894227046_1
tcaaatgggtgtttcagtgccttacagaaaactcaccttgagaaatggggtcataagcattaatccctgactgcctgtagcttcattctacctgaaagatgagatcaagctgcatttttaaaatattgaagaattacactgcaggctcaaacccctgtagcacagtcaatgtgtctctgtgggcacatcagggaaatggttagaattctccaactacactgttttctgaacaatttaatcaaaccgacctaatactctggaaagaactgaaccattttttccattacacaacatgcaagyccaaacttccttgtaaatctctccagtgcatcagttagctggatacaaasatttcaaacatccaaatgagttccaaactttaaatcccaccatctcaatgtttttgcttgtcagctgtcaaaaaagcttagtattctcacaaaacagacctatgttctgagaacgtaaaacatttattttgtgataatatgcatgtacttgttattcctctagaagcaacctaatggcatttttcatacctttcccaaaataataagaagtgattacaattacagggcatgtctatagggacaatgttta

SEQ ID NO: 18259 - DNA, 600 bp, Chicken  19866894227046_2
tcataagcattaatccctgactgcctgtagcttcattctacctgaaagatgagatcaagctgcatttttaaaatattgaagaattacactgcaggctcaaacccctgtagcacagtcaatgtgtctctgtgggcacatcagggaaatggttagaattctccaactacactgttttctgaacaatttaatcaaaccgacctaatactctggaaagaactgaaccattttttccattacacaacatgcaagyccaaacttccttgtaaatctctccagtgcatcagttagctggatacaaasatttcaaacatccaaatgagttccaaactttaaatcccaccatctcaatgtttttgcttgtcagctgtcaaaaaagcttagtattctcacaaaacagacctatgttctgagaacgtaaaacatttattttgtgataatatgcatgtacttgttattcctctagaagcaacctaatggcatttttcatacctttcccaaaataataagaagtgattacaattacagggcatgtctatagggacaatgtttaagagttacagagttgtgcgaagaacttctgttgcctttcagaatcctgaa

SEQ ID NO: 18260 - DNA, 599 bp, Chicken  19866894227049_1
  misc_feature (1)..(27): n is any nucleotide
nnnnnnnnnnnnnnnnnnnnnnnnnnncgttctggtgttcccaagctggggagctctgcctggtggggctggcctcatgccagcagaaaggaggagcagtaatacctgacacctcgcttgtccttgcaggtttgaggccctattcacagagctggagctgaagcgggaggagctgggcatcgccagctatggggcctcagtcaccaccatggaggaagtcttcctgaggtgaggggctggcagggctggatggcagcagggacctgggctgtggtccggctggtgggaggagcagtgtgsgtgtggggaggagctgggtcctccatctcagggtcagtccttggaagcagtgctcagaatgccttcagggctggcagcacaacctgtgtgctttaatcatcttctgctagagctgtcctgaggggtctgggcctgggaccagggcagtgtgtgggctggggtctgtgggtggtgtcgggaccttccatcagctgtcctgtggcacagtccctgcatacatcactgtcagcagygtccaacacagctccccaagcacaaagtccaaatgtcagtgtgaagtcccactgagctgctcttct

SEQ ID NO: 18261 - DNA, 436 bp, Chicken  19866894227049_2
gggctggcagggctggatggcagcagggacctgggctgtggtccggctggtgggaggagcagtgtgsgtgtggggaggagctgggtcctccatctcagggtcagtccttggaagcagtgctcagaatgccttcagggctggcagcacaacctgtgtgctttaatcatcttctgctagagctgtcctgaggggtctgggcctgggaccagggcagtgtgtgggctggggtctgtgggtggtgtcgggaccttccatcagctgtcctgtggcacagtccctgcatacatcactgtcagcagygtccaacacagctccccaagcacaaagtccaaatgtcagtgtgaagtcccactgagctgctcttctgctttttccctgcaaaaataaacatgagttttgattatattaaaagaagaacaaaaaccaaaccacagtt

SEQ ID NO: 18262 - DNA, 600 bp, Chicken  19866894227052_1
ggacttctttgattaacagaccccttgcaacatgaagactttaaataactacaacaaaatttgctaggaggaagatgttttgtactaaggaattcctttatcagaataaataaagaattcagaccaagaaaacatcagcaactccctagacatttctcctaaaccacaacgtagttttgcagcagagatgcaagtacttggcctctcaaaatgatgcacacaattaaatatccagagaaagaattgatgattccctccatatagcataatttcaaacactaaacataaagcacttccaartgatattgcaggcttagcattctgatgactgaatgtataggtcacaggaaatctgtcataagactgttctgagttgcactgtcatgaacaagttcccacagtacacatcagtctatacttcctacttgcttggaagtgatgctctcaagatgttatagttgttaaacatgtaatatctgatccctaagcatctaagatattttcaagcgtaacagaaacacaaaaactgtttaacttaaaaaaggcaattttttaaatgaaattccaagcagttgcctaggatatatttaaaatagcttt

SEQ ID NO: 18263 - DNA, 599 bp, Chicken  19866894227056_1
  misc_feature (1)..(8): n is any nucleotide
nnnnnnnncccatattcattggttcgtccaactgacagagtgcagtggtactgtcaaactaccactagttctggatcactgatggaccaggagtgcaagaattggtaacctagggagaggtctatacacaaagatgatcatacttgaatctttcatgagaggtagaaccactgtactagcatttatcactctcctacaacctgctgaaaatcaacagtttcataaatcaacaattccaggagtcattaagtgttctctttatttatatggacatttttcttatagatcttgatttataasgcagtgctgtagagcgcgtctacaaaatgagaccagatactgaaatcactgaagtggatatatgcatagaaatacatttgtagttgtttgcacagatggaatttttgtatgccaattaattctccctttttctgcagcatgcataaattgtatttatgcaaatctgcagtctggtcatgttgctagtatacaatgtagctcctgcaaacttttgacatagcatagagggagaaatggtgtgatcactcttctttttctgaaattgttaaattcattttatacctgaaggacaaaagcct

SEQ ID NO: 18264 - DNA, 600 bp, Chicken  19866894227062_1
caaaggctcattgtgctgtcacagatgtggagtacagaatattcaataggatcaggaattctggtggaaggaaaaagatcatcagaattagctttctgctcatttccttccagcaatccaagggctaccatgcaatttagagaggaaaaaaaagttttataggccagccaatttcttgatgaatcaggcggtaagatgcagggacaacagcgatgtggtttattatgtttagagacagagtactttcacacaagcaaagggcacaggaataagcaggtacgctcaaatccttgcagagarctgaaacaaacaatgtgaagtctttcctctaaatgaaggggttcaacaatgaatacactaactcttagcacctctactccytgtactataagaataaatcattcttggccacttacacagctggatttaaaacctctctgtcagaaaacaaaacccaccaaaatctgtgctaacattatgaatcatacgtgaattttcttaactgaaagcccgtatgtaacttatgtctgctttggacatgtgcacagtgaactagacgacgtgatccatttaactggaataaaaacttcctacagacat

SEQ ID NO: 18265 - DNA, 600 bp, Chicken  19866894227062_2
tcagaattagctttctgctcatttccttccagcaatccaagggctaccatgcaatttagagaggaaaaaaaagttttataggccagccaatttcttgatgaatcaggcggtaagatgcagggacaacagcgatgtggtttattatgtttagagacagagtactttcacacaagcaaagggcacaggaataagcaggtacgctcaaatccttgcagagarctgaaacaaacaatgtgaagtctttcctctaaatgaaggggttcaacaatgaatacactaactcttagcacctctactccytgtactataagaataaatcattcttggccacttacacagctggatttaaaacctctctgtcagaaaacaaaacccaccaaaatctgtgctaacattatgaatcatacgtgaattttcttaactgaaagcccgtatgtaacttatgtctgctttggacatgtgcacagtgaactagacgacgtgatccatttaactggaataaaaacttcctacagacataacgtaatcttcactgcagctctgaacattccgaggtactgtcctgcagtcggtgtgtctgcaggagtatgagatgggagc

SEQ ID NO: 18266 - DNA, 600 bp, Chicken  19866894227062_3
tgtcagaaaacaaaacccaccaaaatctgtgctaacattatgaatcatacgtgaattttcttaactgaaagcccgtatgtaacttatgtctgctttggacatgtgcacagtgaactagacgacgtgatccatttaactggaataaaaacttcctacagacataacgtaatcttcactgcagctctgaacattccgaggtactgtcctgcagtcggtgtgtctgcaggagtatgagatgggagcaatcaagtctgatgtttggcttctcattatattctcttaaaaaataataaaaaaaasgcaacaaaaacccccaacttatcatttataacatattctgaatctgttcagaaaagacagaggggagaagggaaagcgaatcgtgatgttttccatttctcctaccagagcttgatgtaataaaatagagtacgctgcattctttctaaaagataaagctgaacaggagcagataatggcatgtttttcctgcctagtctattattcatcagtgaatttttaactacagttaggcaggtacagagatgtattttgaatgtcataacctagtattttacagagtctaagagggtgctgggt

SEQ ID NO: 18267 - DNA, 596 bp, Chicken  19866894227062_4
agagtacgctgcattctttctaaaagataaagctgaacaggagcagataatggcatgtttttcctgcctagtctattattcatcagtgaatttttaactacagttaggcaggtacagagatgtattttgaatgtcataacctagtattttacagagtctaagagggtgctgggtaaattgcaaaacaaagagtcagacaaggtctctgccctaaaataattatgacttgataatgaagacaatgctgggctgagaaaacgaaaggagttgaaacaacaggaagagcagagatcatatgarcaaaataacaattcaactcaatttacatgttcacatgccttagaagcatgataaatttccatttagtctttttcttttagcattaagcattaattattgcttcattattgtctacaaacaacacagcgggtgcatctatgctatgaataaaggtgaggctgaggaatttcctagcccttgccacctgtcaccccatgtcctgcccccagcgctgggcaggtctcacaacagccccataggaagagcagagcagcactagcaggactggcatgtgcttaaatgcacggctggatggg

SEQ ID NO: 18268 - DNA, 600 bp, Chicken  19866894227067_1
ttgccttcctcccgttctcgtggggcgggttctggtccagcatttgaaaagcatctcctaacgctgtgacaaagaagggacgcctgaaggataaatggaggtttattctaaagagtagacaagcgtatgaagcgtgctgcaggcagattttttgtctttaattctcaaaaaacctctcttccatcttgcagagatgacatgctctttggtaacggcactttaaagccattaggcaaaagaagggttgccccatgtctgcagcacagccgagcagagccccatctctgcacactggattcyaaatttcacgcttaaaactttctggtcagatggtctgcagcagaatatagagctggaatgtgctggcttccaatggccgacttgttttcrttcgcagagtgatgtttagccttacaagctgtgttggcgggtggtttttcttgagaacccaagataagggaaatgaaccgccgtgttgttgtctcctgactgatcctcagctgttgttctacactcgtccttcactttctttgtccagatttgatgctcactgcttgactgttgttttctttaatacaaggtcatttttgcagataacct

SEQ ID NO: 18269 - DNA, 600 bp, Chicken  19866894227067_2
ataaatggaggtttattctaaagagtagacaagcgtatgaagcgtgctgcaggcagattttttgtctttaattctcaaaaaacctctcttccatcttgcagagatgacatgctctttggtaacggcactttaaagccattaggcaaaagaagggttgccccatgtctgcagcacagccgagcagagccccatctctgcacactggattcyaaatttcacgcttaaaactttctggtcagatggtctgcagcagaatatagagctggaatgtgctggcttccaatggccgacttgttttcrttcgcagagtgatgtttagccttacaagctgtgttggcgggtggtttttcttgagaacccaagataagggaaatgaaccgccgtgttgttgtctcctgactgatcctcagctgttgttctacactcgtccttcactttctttgtccagatttgatgctcactgcttgactgttgttttctttaatacaaggtcatttttgcagataacctctttcagtgtttttaaatgtattttactgaatttcacccctttgctcgtaattgttccattgtggctgctaggtgaccagcaacagggtg

SEQ ID NO: 18270 - DNA, 600 bp, Chicken  19866894227069_1
gccacgcagtgctgggtaccaagtctcacaccgaataaacttctacaagctgtgggaattccaggtaggtgacaggagtgtttaaacttacaccaacccgcaacctgtgtgctggtttctgtgttctgatttctacaatgtgctgtttttatacatacatgtatagccgccgtgcttttctgtgtcgcctgaaccacaaaatggttggccagttgctttgcacccaggtggtagcattttcagttgatctgtaggaggccattgaatcacaggccgtggttcgctgtggttttgcttgcrctgttgygttaaatagatagggatcgttttgatgatggtgtacactggtcactacaaattccagttgtgtttgtagctgaagaaatacagtacrggctgtcatgttggaatgccaaattgtagcagcatcctacaaatcaaatcccctttgattacttcactgtggaaaaattcaactgctatctttaaatagatagctgcttagagagtgaaaacttccgtagtagtgaaagcacaaaaacagctggccaacttgctgttcttagaacagagatggtagcagtcatctttcttccatgc

SEQ ID NO: 18271 - DNA, 600 bp, Chicken  19866894227069_2
agtgctgggtaccaagtctcacaccgaataaacttctacaagctgtgggaattccaggtaggtgacaggagtgtttaaacttacaccaacccgcaacctgtgtgctggtttctgtgttctgatttctacaatgtgctgtttttatacatacatgtatagccgccgtgcttttctgtgtcgcctgaaccacaaaatggttggccagttgctttgcacccaggtggtagcattttcagttgatctgtaggaggccattgaatcacaggccgtggttcgctgtggttttgcttgcrctgttgygttaaatagatagggatcgttttgatgatggtgtacactggtcactacaaattccagttgtgtttgtagctgaagaaatacagtacrggctgtcatgttggaatgccaaattgtagcagcatcctacaaatcaaatcccctttgattacttcactgtggaaaaattcaactgctatctttaaatagatagctgcttagagagtgaaaacttccgtagtagtgaaagcacaaaaacagctggccaacttgctgttcttagaacagagatggtagcagtcatctttcttccatgcgagtrta

SEQ ID NO: 18272 - DNA, 600 bp, Chicken  19866894227069_3
aacccgcaacctgtgtgctggtttctgtgttctgatttctacaatgtgctgtttttatacatacatgtatagccgccgtgcttttctgtgtcgcctgaaccacaaaatggttggccagttgctttgcacccaggtggtagcattttcagttgatctgtaggaggccattgaatcacaggccgtggttcgctgtggttttgcttgcrctgttgygttaaatagatagggatcgttttgatgatggtgtacactggtcactacaaattccagttgtgtttgtagctgaagaaatacagtacrggctgtcatgttggaatgccaaattgtagcagcatcctacaaatcaaatcccctttgattacttcactgtggaaaaattcaactgctatctttaaatagatagctgcttagagagtgaaaacttccgtagtagtgaaagcacaaaaacagctggccaacttgctgttcttagaacagagatggtagcagtcatctttcttccatgcgagtrtagggaacagaggcaaaacagagctgatgttggagctgccttcttctgcggcaatatgttaactattttctttggttgyatttaggctg

SEQ ID NO: 18273 - DNA, 600 bp, Chicken  19866894227069_4
gygttaaatagatagggatcgttttgatgatggtgtacactggtcactacaaattccagttgtgtttgtagctgaagaaatacagtacrggctgtcatgttggaatgccaaattgtagcagcatcctacaaatcaaatcccctttgattacttcactgtggaaaaattcaactgctatctttaaatagatagctgcttagagagtgaaaacttccgtagtagtgaaagcacaaaaacagctggccaacttgctgttcttagaacagagatggtagcagtcatctttcttccatgcgagtrtagggaacagaggcaaaacagagctgatgttggagctgccttcttctgcggcaatatgttaactattttctttggttgyatttaggctgaatgccatctggggcagtggctgtccatcaaattattgcgggctcagtgatgcttgtctgagcggcctccgttcttagctcgagtcaagcaatctgacccagctcctttcagtctggcctttggcccacgactgaatgctgagctttaaccaaacaattgtatatagcactcgtatttcaaggcatgagagcacggccgggcagagcacaa

SEQ ID NO: 18274 - DNA, 600 bp, Chicken  19866894227069_5
atacagtacrggctgtcatgttggaatgccaaattgtagcagcatcctacaaatcaaatcccctttgattacttcactgtggaaaaattcaactgctatctttaaatagatagctgcttagagagtgaaaacttccgtagtagtgaaagcacaaaaacagctggccaacttgctgttcttagaacagagatggtagcagtcatctttcttccatgcgagtrtagggaacagaggcaaaacagagctgatgttggagctgccttcttctgcggcaatatgttaactattttctttggttgyatttaggctgaatgccatctggggcagtggctgtccatcaaattattgcgggctcagtgatgcttgtctgagcggcctccgttcttagctcgagtcaagcaatctgacccagctcctttcagtctggcctttggcccacgactgaatgctgagctttaaccaaacaattgtatatagcactcgtatttcaaggcatgagagcacggccgggcagagcacaaagtagggatttcagctagctaaaaacagtagttcactttcttagctctaatgtaaacttctcctgcagatttgttataa

SEQ ID NO: 18275 - DNA, 600 bp, Chicken  19866894227070_1
taatgatttgtacggttagtggttagcatcattattagaaactactctattgcttctgctctttggtttgactaaaccagctctactacggaggaaaatttcattacctgttcacagttccatgcatttagctttgcagacattaactaaatgttagattttatcagtggtcataaaacacttccatgtgtcaggtgaaagtacacttgggaaattcacctgcaagattgactgcagagctaaaaatgagcagtgtatgaacaaattcactctgcgctgactttctgctggtattatctyggttcaagcctacccatagttcttactgtccagatgttgttactctgaaaactacatcacatttcatttggtacctgctgtgccgaatggtatcttcattgcatcaaaatttggtycctgtgttgacarcctcggcagatgcccggagcctgaacaaggtcagagcaattcttcctgctaccraaggctgtggcgcttcatggcagcagtgatagatccagtaacattcttgtgttggttgttcatgacattacctttccatcarcacatctttcctacttgttgaggacgggaggttag

SEQ ID NO: 18276 - DNA, 600 bp, Chicken  19866894227070_2
gttccatgcatttagctttgcagacattaactaaatgttagattttatcagtggtcataaaacacttccatgtgtcaggtgaaagtacacttgggaaattcacctgcaagattgactgcagagctaaaaatgagcagtgtatgaacaaattcactctgcgctgactttctgctggtattatctyggttcaagcctacccatagttcttactgtccagatgttgttactctgaaaactacatcacatttcatttggtacctgctgtgccgaatggtatcttcattgcatcaaaatttggtycctgtgttgacarcctcggcagatgcccggagcctgaacaaggtcagagcaattcttcctgctaccraaggctgtggcgcttcatggcagcagtgatagatccagtaacattcttgtgttggttgttcatgacattacctttccatcarcacatctttcctacttgttgaggacgggaggttagatagctgatgttaagcattaatgtagcagagtgatagggaataaaaatggtcgtagccaggttaaacaccattccccagaatgtgaactcccctctgaatgccccgtgcatctgtc

SEQ ID NO: 18277 - DNA, 600 bp, Chicken  19866894227070_3
agctttgcagacattaactaaatgttagattttatcagtggtcataaaacacttccatgtgtcaggtgaaagtacacttgggaaattcacctgcaagattgactgcagagctaaaaatgagcagtgtatgaacaaattcactctgcgctgactttctgctggtattatctyggttcaagcctacccatagttcttactgtccagatgttgttactctgaaaactacatcacatttcatttggtacctgctgtgccgaatggtatcttcattgcatcaaaatttggtycctgtgttgacarcctcggcagatgcccggagcctgaacaaggtcagagcaattcttcctgctaccraaggctgtggcgcttcatggcagcagtgatagatccagtaacattcttgtgttggttgttcatgacattacctttccatcarcacatctttcctacttgttgaggacgggaggttagatagctgatgttaagcattaatgtagcagagtgatagggaataaaaatggtcgtagccaggttaaacaccattccccagaatgtgaactcccctctgaatgccccgtgcatctgtctgattgtcagatg

SEQ ID NO: 18278 - DNA, 600 bp, Chicken  19866894227070_4
ccatgtgtcaggtgaaagtacacttgggaaattcacctgcaagattgactgcagagctaaaaatgagcagtgtatgaacaaattcactctgcgctgactttctgctggtattatctyggttcaagcctacccatagttcttactgtccagatgttgttactctgaaaactacatcacatttcatttggtacctgctgtgccgaatggtatcttcattgcatcaaaatttggtycctgtgttgacarcctcggcagatgcccggagcctgaacaaggtcagagcaattcttcctgctaccraaggctgtggcgcttcatggcagcagtgatagatccagtaacattcttgtgttggttgttcatgacattacctttccatcarcacatctttcctacttgttgaggacgggaggttagatagctgatgttaagcattaatgtagcagagtgatagggaataaaaatggtcgtagccaggttaaacaccattccccagaatgtgaactcccctctgaatgccccgtgcatctgtctgattgtcagatgtctctccttttggcaggccgttttgttttattgttgggtttctcaggacctgga

SEQ ID NO: 18279 - DNA, 600 bp, Chicken  19866894227070_5
ttcactctgcgctgactttctgctggtattatctyggttcaagcctacccatagttcttactgtccagatgttgttactctgaaaactacatcacatttcatttggtacctgctgtgccgaatggtatcttcattgcatcaaaatttggtycctgtgttgacarcctcggcagatgcccggagcctgaacaaggtcagagcaattcttcctgctaccraaggctgtggcgcttcatggcagcagtgatagatccagtaacattcttgtgttggttgttcatgacattacctttccatcarcacatctttcctacttgttgaggacgggaggttagatagctgatgttaagcattaatgtagcagagtgatagggaataaaaatggtcgtagccaggttaaacaccattccccagaatgtgaactcccctctgaatgccccgtgcatctgtctgattgtcagatgtctctccttttggcaggccgttttgttttattgttgggtttctcaggacctggaacccggatgctcgctgatcagggaatttacttcctcaaggtctttattttgggtccagtcacatcatcctggtttgtccgcc

SEQ ID NO: 18280 - DNA, 600 bp, Chicken  19866894227075_1
gtattgattaaaacagtaatgcagacagcccagggaaaaggaaaaggggggctgaacaatcacagtcaatctcatcaccccgacgacacgctgtgagtgtaattaatcctacatttacttagagaacttcacaccctacacataaagcagcaactccctgctggcttcagactaggtaattatgttgtaacaaggactaggtttccattataacagagatgaaaagaagaacggagctatgaagctagcctaccttttagggtaggtatcacctgcaaatcaaaagaagcaggcttaacrtgtttaggaatacttgagttagcttttatttagttaattcaaataacatatcagcttctagagagactgcagaaataccaccaggaatcayrgttcttaactctaaagcaaacagtccatgtttgaaatggcatttgtacccacattacccaaaycagcaggattatgcttgtttcaggtgcaagtatatgtactctgcaacgtgaagttgtgacagagcatgtataccctaatgcagcctccatacagctataaaaaaaagtagcaaaaaaaaagtagcaggcaaagttccatgggata

SEQ ID NO: 18281 - DNA, 600 bp, Chicken  19866894227075_2
tgtgagtgtaattaatcctacatttacttagagaacttcacaccctacacataaagcagcaactccctgctggcttcagactaggtaattatgttgtaacaaggactaggtttccattataacagagatgaaaagaagaacggagctatgaagctagcctaccttttagggtaggtatcacctgcaaatcaaaagaagcaggcttaacrtgtttaggaatacttgagttagcttttatttagttaattcaaataacatatcagcttctagagagactgcagaaataccaccaggaatcayrgttcttaactctaaagcaaacagtccatgtttgaaatggcatttgtacccacattacccaaaycagcaggattatgcttgtttcaggtgcaagtatatgtactctgcaacgtgaagttgtgacagagcatgtataccctaatgcagcctccatacagctataaaaaaaagtagcaaaaaaaaagtagcaggcaaagttccatgggatatgctgaaatamtttagcagctcatctctgttgccataatagatctcctttgctgtatgagtcataactacaacacaaactatgactttcta

SEQ ID NO: 18282 - DNA, 600 bp, Chicken  19866894227075_3
gtgagtgtaattaatcctacatttacttagagaacttcacaccctacacataaagcagcaactccctgctggcttcagactaggtaattatgttgtaacaaggactaggtttccattataacagagatgaaaagaagaacggagctatgaagctagcctaccttttagggtaggtatcacctgcaaatcaaaagaagcaggcttaacrtgtttaggaatacttgagttagcttttatttagttaattcaaataacatatcagcttctagagagactgcagaaataccaccaggaatcayrgttcttaactctaaagcaaacagtccatgtttgaaatggcatttgtacccacattacccaaaycagcaggattatgcttgtttcaggtgcaagtatatgtactctgcaacgtgaagttgtgacagagcatgtataccctaatgcagcctccatacagctataaaaaaaagtagcaaaaaaaaagtagcaggcaaagttccatgggatatgctgaaatamtttagcagctcatctctgttgccataatagatctcctttgctgtatgagtcataactacaacacaaactatgactttctaa

SEQ ID NO: 18283 - DNA, 600 bp, Chicken  19866894227075_4
ccctgctggcttcagactaggtaattatgttgtaacaaggactaggtttccattataacagagatgaaaagaagaacggagctatgaagctagcctaccttttagggtaggtatcacctgcaaatcaaaagaagcaggcttaacrtgtttaggaatacttgagttagcttttatttagttaattcaaataacatatcagcttctagagagactgcagaaataccaccaggaatcayrgttcttaactctaaagcaaacagtccatgtttgaaatggcatttgtacccacattacccaaaycagcaggattatgcttgtttcaggtgcaagtatatgtactctgcaacgtgaagttgtgacagagcatgtataccctaatgcagcctccatacagctataaaaaaaagtagcaaaaaaaaagtagcaggcaaagttccatgggatatgctgaaatamtttagcagctcatctctgttgccataatagatctcctttgctgtatgagtcataactacaacacaaactatgactttctaatattttgcaataagataagatgacaagttaaagaaaaacaatgctaacaaaggatatacaaat

SEQ ID NO: 18284 - DNA, 600 bp, Chicken  19866894227075_5
atcacctgcaaatcaaaagaagcaggcttaacrtgtttaggaatacttgagttagcttttatttagttaattcaaataacatatcagcttctagagagactgcagaaataccaccaggaatcayrgttcttaactctaaagcaaacagtccatgtttgaaatggcatttgtacccacattacccaaaycagcaggattatgcttgtttcaggtgcaagtatatgtactctgcaacgtgaagttgtgacagagcatgtataccctaatgcagcctccatacagctataaaaaaaagtagcyaaaaaaaagtagcaggcaaagttccatgggatatgctgaaatamtttagcagctcatctctgttgccataatagatctcctttgctgtatgagtcataactacaacacaaactatgactttctaatattttgcaataagataagatgacaagttaaagaaaaacaatgctaacaaaggatatacaaattgagaccaaataccttattcttcwgctttccttgtacccattaaatctagggatccattaactccagaactgtgcacaaattgatgtagtaatccctggaaaatttccaggg

SEQ ID NO: 18285 - DNA, 600 bp, Chicken  19866894227075_6
acttgagttagcttttatttagttaattcaaataacatatcagcttctagagagactgcagaaataccaccaggaatcayrgttcttaactctaaagcaaacagtccatgtttgaaatggcatttgtacccacattacccaaaycagcaggattatgcttgtttcaggtgcaagtatatgtactctgcaacgtgaagttgtgacagagcatgtataccctaatgcagcctccatacagctataaaaaaaagtagcaaaaaaaaagtagcaggcaaagttccatgggatatgctgaaatamtttagcagctcatctctgttgccataatagatctcctttgctgtatgagtcataactacaacacaaactatgactttctaatattttgcaataagataagatgacaagttaaagaaaaacaatgctaacaaaggatatacaaattgagaccaaataccttattcttcwgctttccttgtacccattaaatctagggatccattaactccagaactgtgcacaaattgatgtagtaatccctggaaaatttccaggggccccagcagtttcaccctccagttgagcacaggaaacacagtt

SEQ ID NO: 18286 - DNA, 501 bp, Chicken  19866894227075_7
tgcaagtatatgtactctgcaacgtgaagttgtgacagagcatgtataccctaatgcagcctccatacagctataaaaaaaagtagcaaaaaaaaagtagcaggcaaagttccatgggatatgctgaaatamtttagcagctcatctctgttgccataatagatctcctttgctgtatgagtcataactacaacacaaactatgactttctaatattttgcaataagataagatgacaagttaaagaaaaacaatgctaacaaaggatatacaaattgagaccaaataccttattcttcwgctttccttgtacccattaaatctagggatccattaactccagaactgtgcacaaattgatgtagtaatccctggaaaatttccaggggccccagcagtttcaccctccagttgagcacaggaaacacagttaccagtaatggaagtggtacatgcctaacactaagcttggatttaaataaaggtacttttaaactagca

SEQ ID NO: 18287 - DNA, 600 bp, Chicken  19866894227079_1
gtactcctcattccctcttattgtgctgcagtactcatatacaaagacaggggccaaaaggacagagcagtggcagcactttctgctctcacacagataggttctaccacagaagtcagcacaagatccaaagcagccttcagagcccaaacagccttaaaccagagagcagtaatactcacttttggagccctttccacctctgacacagcctggggaactttagctgcctctttcttggacgactccctaaaagagaagagacctcgggctgagtgggactgctgctgccttccacargtacaaagccccttctcacaagggctacctaacccacgccaggcattgggtaggggggttcagtgtgggaatgacctgcagcctgcaccagtgccacctggacaggacgacagcaaagcctcccctctttcatttagcagactgactccctctagagccacagacacaggctacagagggataaccgtctgctcagggcctttcactccagcccggcacaccaccagcatgttccctgtgactttgaggagcacagctaaacaccaagggtccagacagcaaattcaccctggggcaggt

SEQ ID NO: 18288 - DNA, 599 bp, Chicken  19866894227085_1
  misc_feature (1)..(65): n is any nucleotide
nnnnnnnnnnnnnnnnnnnnnnnnnnnnnnnnnnnnnnnnnnnnnnnnnnnnnnnnnnnnnnnnntcccccttgtcctatcactatccaccctcataaataatcgttaaagctgttaacagtccttaaagctgatgttggatgttgaacagggtgaagctgatgttgatttggcagctctgcaacaacaccactcaggccttactaacccactgctgagcacagctcttctttttgactgcctggcccctggctcacacagccgagctctcagtgagctcagcccactctccagcacccygctggcctgcagcagcataacagcacccggctctgcgatgtgaccgacaactgaagcacaaatgaagtcactatcaggacaaaagctaaccttcagtgtgtyggactagaatgaatgctcaaaaaggcatttggccaaggatttttcagctgctatctgctaccaaactccaagcagtcagctcattggagctgcacgtggcctactgtgtgcactgctgctcatgacaggagtggatgataaactccattccctccaggaatgttccagcggaggacagaaaggaggactcagacagg

SEQ ID NO: 18289 - DNA, 600 bp, Chicken  19866894227085_2
tcgttaaagctgttaacagtccttaaagctgatgttggatgttgaacagggtgaagctgatgttgatttggcagctctgcaacaacaccactcaggccttactaacccactgctgagcacagctcttctttttgactgcctggcccctggctcacacagccgagctctcagtgagctcagcccactctccagcacccygctggcctgcagcagcataacagcacccggctctgcgatgtgaccgacaactgaagcacaaatgaagtcactatcaggacaaaagctaaccttcagtgtgtyggactagaatgaatgctcaaaaaggcatttggccaaggatttttcagctgctatctgctaccaaactccaagcagtcagctcattggagctgcacgtggcctactgtgtgcactgctgctcatgacaggagtggatgataaactccattccctccaggaatgttccagcggaggacagaaaggaggactcagacaggacagagttcagggcagctgcagaggggtcttctctacagttctctatagatctctgcaggaaacagggacagcacagttgcttatctctgaaaagagttaaga

SEQ ID NO: 18290 - DNA, 600 bp, Chicken  19866894227085_3
agcacccygctggcctgcagcagcataacagcacccggctctgcgatgtgaccgacaactgaagcacaaatgaagtcactatcaggacaaaagctaaccttcagtgtgtyggactagaatgaatgctcaaaaaggcatttggccaaggatttttcagctgctatctgctaccaaactccaagcagtcagctcattggagctgcacgtggcctactgtgtgcactgctgctcatgacaggagtggatgataaactccattccctccaggaatgttccagcggaggacagaaaggaggactyagacaggacagagttcagggcagctgcagaggggtcttctctacagttctctatagatctctgcaggaaacagggacagcacagttgcttatctctgaaaagagttaagacccgtagacaaaatgccacctgagaggaaaactggtgcaagtgggggcaaatagcactctgaagagaaagcccatcctctattccatcccccatcagttcctgatacagaagaataaagggaaacagaccttcaccaaagacaagctaagagttaacagcacttgctatgattcctgctgttactccrcc

SEQ ID NO: 18291 - DNA, 600 bp, Chicken  19866894227085_4
gcacccygctggcctgcagcagcataacagcacccggctctgcgatgtgaccgacaactgaagcacaaatgaagtcactatcaggacaaaagctaaccttcagtgtgtyggactagaatgaatgctcaaaaaggcatttggccaaggatttttcagctgctatctgctaccaaactccaagcagtcagctcattggagctgcacgtggcctactgtgtgcactgctgctcatgacaggagtggatgataaactccattccctccaggaatgttccagcggaggacagaaaggaggactcygacaggacagagttcagggcagctgcagaggggtcttctctacagttctctatagatctctgcaggaaacagggacagcacagttgcttatctctgaaaagagttaagacccgtagacaaaatgccacctgagaggaaaactggtgcaagtgggggcaaatagcactctgaagagaaagcccatcctctattccatcccccatcagttcctgatacagaagaataaagggaaacagaccttcaccaaagacaagctaagagttaacagcacttgctatgattcctgctgttactccrcct

SEQ ID NO: 18292 - DNA, 600 bp, Chicken  19866894227085_5
cacccygctggcctgcagcagcataacagcacccggctctgcgatgtgaccgacaactgaagcacaaatgaagtcactatcaggacaaaagctaaccttcagtgtgtyggactagaatgaatgctcaaaaaggcatttggccaaggatttttcagctgctatctgctaccaaactccaagcagtcagctcattggagctgcacgtggcctactgtgtgcactgctgctcatgacaggagtggatgataaactccattccctccaggaatgttccagcggaggacagaaaggaggactcayacaggacagagttcagggcagctgcagaggggtcttctctacagttctctatagatctctgcaggaaacagggacagcacagttgcttatctctgaaaagagttaagacccgtagacaaaatgccacctgagaggaaaactggtgcaagtgggggcaaatagcactctgaagagaaagcccatcctctattccatcccccatcagttcctgatacagaagaataaagggaaacagaccttcaccaaagacaagctaagagttaacagcacttgctatgattcctgctgttactccrcctg

SEQ ID NO: 18293 - DNA, 600 bp, Chicken  19866894227085_6
acccygctggcctgcagcagcataacagcacccggctctgcgatgtgaccgacaactgaagcacaaatgaagtcactatcaggacaaaagctaaccttcagtgtgtyggactagaatgaatgctcaaaaaggcatttggccaaggatttttcagctgctatctgctaccaaactccaagcagtcagctcattggagctgcacgtggcctactgtgtgcactgctgctcatgacaggagtggatgataaactccattccctccaggaatgttccagcggaggacagaaaggaggactcagycaggacagagttcagggcagctgcagaggggtcttctctacagttctctatagatctctgcaggaaacagggacagcacagttgcttatctctgaaaagagttaagacccgtagacaaaatgccacctgagaggaaaactggtgcaagtgggggcaaatagcactctgaagagaaagcccatcctctattccatcccccatcagttcctgatacagaagaataaagggaaacagaccttcaccaaagacaagctaagagttaacagcacttgctatgattcctgctgttactccrcctgc

SEQ ID NO: 18294 - DNA, 600 bp, Chicken  19866894227085_7
tcagacaggacagagttcagggcagctgcagaggggtcttctctacagttctctatagatctctgcaggaaacagggacagcacagttgcttatctctgaaaagagttaagacccgtagacaaaatgccacctgagaggaaaactggtgcaagtgggggcaaatagcactctgaagagaaagcccatcctctattccatcccccatcagttcctgatacagaagaataaagggaaacagaccttcaccaaagacaagctaagagttaacagcacttgctatgattcctgctgttactccrcctgcaatggacgggcttggsccagagacaaatagatcctttccctggttatttatcctgcaccaagtccattcacctcacctgtcccaagacttccacgcaccttgcatactctgaagagagctgcttcagatactcagagctcagctggcacacagcacctatttaaatactcatgcagaggaaatgggacccatcagcgaagcaaggggcttcagccactgcaatgcttcaggcagataaaagcaaagacctcacaacccataattcaaaggatatagcactaaaatcccatttgga

SEQ ID NO: 18295 - DNA, 600 bp, Chicken  19866894227085_8
gcagctgcagaggggtcttctctacagttctctatagatctctgcaggaaacagggacagcacagttgcttatctctgaaaagagttaagacccgtagacaaaatgccacctgagaggaaaactggtgcaagtgggggcaaatagcactctgaagagaaagcccatcctctattccatcccccatcagttcctgatacagaagaataaagggaaacagaccttcaccaaagacaagctaagagttaacagcacttgctatgattcctgctgttactccrcctgcaatggacgggcttggsccagagacaaatagatcctttccctggttatttatcctgcaccaagtccattcacctcacctgtcccaagacttccacgcaccttgcatactctgaagagagctgcttcagatactcagagctcagctggcacacagcacctatttaaatactcatgcagaggaaatgggacccatcagcgaagcaaggggcttcagccactgcaatgcttcaggcagataaaagcaaagacctcacaacccataattcaaaggatatagcactaaaatcccatttggaaacaagcaacagtccatcttc

SEQ ID NO: 18296 - DNA, 599 bp, Chicken  19866894227086_1
  misc_feature (1)..(162): n is any nucleotide
nnnnnnnnnnnnnnnnnnnnnnnnnnnnnnnnnnnnnnnnnnnnnnnnnnnnnnnnnnnnnnnnnnnnnnnnnnnnnnnnnnnnnnnnnnnnnnnnnnnnnnnnnnnnnnnnnnnnnnnnnnnnnnnnnnnnnnnnnnnnnnnnnnnnnnnnnnnnnnnnnnctttgggatgggtttagcccttctctcgtttgcctttctgttttgacagtggaggaatcagtgggactgcacaataaacagagtgtttacggaaagcaagtttttatcagcatctgatgggtgtttgtttggagaagsgttagctctaacccatgggggatgctgacttctgcagtttgctgcccccattaaggacttactgatggggaatggttgggaggtctgggtcgtgtccttttgtctcagcacacagaagatggcagtcgatgctcgttgggatgctgggacccagggctggggctgccacagccactaactgcaatggtgctcccatcacaggctcttcctgcattttcaagtccttaacccgttttatttcttgggaaagcatctggctgtcagctccgggtctgtccagtctgtcatttcacagaaat

SEQ ID NO: 18297 - DNA, 600 bp, Chicken  19866894227086_2
ggaaagcatctggctgtcagctccgggtctgtccagtctgtcatttcacagaaatacacaaacatccctctttgggtgatggattggggctgcactttggcttggatcacacagcccagagtggcagagaggctttgaagtactgcaaatttcccattcccttagtgccagcagaacagcccacgggagagaaatccatgctgggaaacagcccttggctcatttacggtggtccagcatcaccccatataacacgacgcaccccactaatgcaccctcagctccctgcactgcagagcrcttccaaagccgtgcaatgccagcttcgtgcatgcacaaagggcttccacagcagaargccctcttgcactgctttcccagcgcctccatcctgcacaccgtggggatttgacagcagattgcagggtccaggacacagcagcctgcrgtcggtgtcccatagtgagcgctgggtcccaggaccttttgccttgcatgtgagagagccccacttggaaaaatatgagcaagcactccgatgattttatgctgatttactggctgaagctctaaatcagcacttgtcagaggcttgagtta

SEQ ID NO: 18298 - DNA, 600 bp, Chicken  19866894227086_3
caaacatccctctttgggtgatggattggggctgcactttggcttggatcacacagcccagagtggcagagaggctttgaagtactgcaaatttcccattcccttagtgccagcagaacagcccacgggagagaaatccatgctgggaaacagcccttggctcatttacggtggtccagcatcaccccatataacacgacgcaccccactaatgcaccctcagctccctgcactgcagagcrcttccaaagccgtgcaatgccagcttcgtgcatgcacaaagggcttccacagcagaargccctcttgcactgctttcccagcgcctccatcctgcacaccgtggggatttgacagcagattgcagggtccaggacacagcagcctgcrgtcggtgtcccatagtgagcgctgggtcccaggaccttttgccttgcatgtgagagagccccacttggaaaaatatgagcaagcactccgatgattttatgctgatttactggctgaagctctaaatcagcacttgtcagaggcttgagttacatgtctgtgccggagattgatggggccagctgccagcacgcattaccaaggagcaaa

SEQ ID NO: 18299 - DNA, 600 bp, Chicken  19866894227086_4
atttcccattcccttagtgccagcagaacagcccacgggagagaaatccatgctgggaaacagcccttggctcatttacggtggtccagcatcaccccatataacacgacgcaccccactaatgcaccctcagctccctgcactgcagagcrcttccaaagccgtgcaatgccagcttcgtgcatgcacaaagggcttccacagcagaargccctcttgcactgctttcccagcgcctccatcctgcacaccgtggggatttgacagcagattgcagggtccaggacacagcagcctgcrgtcggtgtcccatagtgagcgctgggtcccaggaccttttgccttgcatgtgagagagccccacttggaaaaatatgagcaagcactccgatgattttatgctgatttactggctgaagctctaaatcagcacttgtcagaggcttgagttacatgtctgtgccggagattgatggggccagctgccagcacgcattaccaaggagcaaacctgagctgaaagcattgttttaggcctcggggtgagctaaaagcatttcaggtgatttatccaggaggaaacggctttatggtcctgtt

SEQ ID NO: 18300 - DNA, 600 bp, Chicken  19866894227087_1
gctctgttttgcaaatccttcaatactttttaaaaacaaaacaaaacaaaaacaacaaaataccaacaatataaactcagcaacaacaaaaacctttgttatattttgattgcaatctctttaaagccacttttgagttgttactttgtacaatgcaaagcttaatggaattctaattcgtggctgagactcctaaccatgacactaatacaaataataaatgtttcacagatgctcattccccatgaatggatacagagtgttatgctccgtgaaagttcaagataagtgagataatgygcaggagtggaggcttgccacaactttttctgtaaaatttcattattttcctttccaggaggtattttttaaagtaagattggtcaaatatggctttttggagggtgtcatgagagattttcctgtggcacggtatttttgtattttgacatatgcatgttttctgatggagttaatgattgtatcttcatacatctgttggaaggtaagaagtagttcttaatcagacacagcagtattttacttaccaaaatagtgtaattagtttgagctgcaattgcgtccttaaatctctgcatc

SEQ ID NO: 18301 - DNA, 600 bp, Chicken  19866894227092_1
tggcattacagtcctctgtctgacagcagcttctcaataacccaaagctttcatgaagactgcctgcaagagacaggcttgagaagacaggcccatagcctataaaactcactaaattactattattagtttcttatcttattgattactttaactggcaagaaactcaagcatttataaggtccatctcgttatgcaggaaataagtagctatgacaaaaagtgctataacatttctcatcattttttaggatttatttcagtattaaccatcttcaccttcagatatttaagtatatktatatataaaatggttaccagtctgaaaattacaaatttaaatatgagttaattttatagcaatacacgtaaaagattgaaccaactgcttgccctaacctccaaacgtatttgggctacaaagacaatggctagatttaaatcttctgcattttctattttctttatcagtagtaaaaaggcctggacacattctggggtagtctgtaaatccaaattcaagctcaaaatgatgagcatgaacaaaaatattttagatggtgaaggctcaatgaggtgcagtgtatttgctcttcaaat

SEQ ID NO: 18302 - DNA, 600 bp, Chicken  19866894227092_2
gtaaaaaggcctggacacattctggggtagtctgtaaatccaaattcaagctcaaaatgatgagcatgaacaaaaatattttagatggtgaaggctcaatgaggtgcagtgtatttgctcttcaaatctctgcagtaatttaggaaggaaagatggtgaaaaatatgatttcctgactgttttacctactaatgttgaagaaacactgctacccctgtatttacacacagtttttcaacatttgttcttattaacaaccagcctatctgaagcccagtcctgtcagtctatataccttcrcttaaagtaacatatgaactgggcattattcacacgtacttacaaattcagtcccacaatcatactttgatactttgaacgtctaatgaattggagatgcttatgaataagattaggtgaatctaatttttggcctcttgggtcacaacacattaggtggggaatcctaagcaataccgagagatgcaaaactatgaatttctttagtttcaatactggttttgcagcagtaatattgaaatgattttaaattaatagtgaccaattaaagaaaattgatttcattgcaactggttgatt

SEQ ID NO: 18303 - DNA, 600 bp, Chicken  19866894227092_3
ttttaacagctttgctttaatttcagagtttttgcttataatgcttgttttataattgactttagtacttatctatctttaaattgcaggtaatgcatacaaatgtgaaaagcaacgaagaaatatatgaattagttacatatggtgagagcaacattatgagaacatgtttcaaagttatacatcatataaaccatttgttttatgaaatcaactgtaaagcttttactaccacatatgaagactctacattagctcccccgttactcagaagtcttgtcatgtgtactcattattatwttcctattttttgtctctgtaaatggaacatgcgaatgtgcgtagcttctgcaaaattcaactggcattagtaatggaaaagctttaaatctacagctgtatctgttaaaccatacagattgttatctttgcacacattattcacagagttattaagcattttctcacagccacagccaaccccatttgcatcccagtccccttataaatctccytttatacacgaacagtcctccctgggctcacagtactcatttacatgagattatgaatttagtcccccaggtcagaatgtaatac

SEQ ID NO: 18304 - DNA, 600 bp, Chicken  19866894227092_4
tgtaaagcttttactaccacatatgaagactctacattagctcccccgttactcagaagtcttgtcatgtgtactcattattatwttcctattttttgtctctgtaaatggaacatgcgaatgtgcgtagcttctgcaaaattcaactggcattagtaatggaaaagctttaaatctacagctgtatctgttaaaccatacagattgttatctttgcacacattattcacagagttattaagcattttctcacagccacagccaaccccatttgcatcccagtccccttataaatctccytttatacacgaacagtcctccctgggctcacagtactcatttacatgagattatgaatttagtcccccaggtcagaatgtaatacccagtactctttttttttttttttttctccaggcattcaaacttaacattatttgtatgctaagaaagatgacgtcatacctcaaattcttcagaaaaaccattacttgcatgtaaatctgcaacatgttttggaaaatgctttattggaattgctccaacatcatcttaggagtgggaaaagacaaaaaatagatttatgaagaataaaaagcc

SEQ ID NO: 18305 - DNA, 600 bp, Chicken  19866894227093_1
aatgtgagaagtttccatctgggaaacatcttcaatttttctttcatgtatattagaaaatatgtttcctattttctgaagctaattaactgaggaaaaaaattcttcatgtaggtgaaacaagtgaacaggctgtgagataagatcagctcatctatcagtgccagaaatactaccaaaattttgacttctattgaaattccctcttgtcccctttttcctgaatctgtgtaccaggctgtgtgcagggaagtggaacatcctgtttaaatgttacttagaattaattcacaaaatctrgtgacacactggaacaggttgcccarggaggctgtggatgccccatccctggaggcattcaaggccaggctggatgtggctctgggcagcctggtctggtggttggtgaccctgcacacagcagggggggttgaaactacatgatcttttgaggtccttttcaacccaggmcattctatgattctatgaaaatctaacactgagaaaggatatttcatagaattataggaaaaagggcttgtttcttcctgtttttccagttacttgaaatccaatccagtaaatagagtacagacaact

SEQ ID NO: 18306 - DNA, 600 bp, Chicken  19866894227093_2
catcttcaatttttctttcatgtatattagaaaatatgtttcctattttctgaagctaattaactgaggaaaaaaattcttcatgtaggtgaaacaagtgaacaggctgtgagataagatcagctcatctatcagtgccagaaatactaccaaaattttgacttctattgaaattccctcttgtcccctttttcctgaatctgtgtaccaggctgtgtgcagggaagtggaacatcctgtttaaatgttacttagaattaattcacaaaatctrgtgacacactggaacaggttgcccarggaggctgtggatgccccatccctggaggcattcaaggccaggctggatgtggctctgggcagcctggtctggtggttggtgaccctgcacacagcagggggggttgaaactacatgatcttttgaggtccttttcaacccaggmcattctatgattctatgaaaatctaacactgagaaaggatatttcatagaattataggaaaaagggcttgtttcttcctgtttttccagttacttgaaatccaatccagtaaatagagtacagacaactattttttgttttgttttgtctttgtt

SEQ ID NO: 18307 - DNA, 600 bp, Chicken  19866894227093_3
actaccaaaattttgacttctattgaaattccctcttgtcccctttttcctgaatctgtgtaccaggctgtgtgcagggaagtggaacatcctgtttaaatgttacttagaattaattcacaaaatctrgtgacacactggaacaggttgcccarggaggctgtggatgccccatccctggaggcattcaaggccaggctggatgtggctctgggcagcctggtctggtggttggtgaccctgcacacagcagggggggttgaaactacatgatcttttgaggtccttttcaacccaggmcattctatgattctatgaaaatctaacactgagaaaggatatttcatagaattataggaaaaagggcttgtttcttcctgtttttccagttacttgaaatccaatccagtaaatagagtacagacaactattttttgttttgttttgtctttgtttttccaaatctaggttaccttttgttatccttcactttgaaaccaagaaagacataaatacaaaatataaagcaaccctttctgaactccaaaatatcaacttgccatttattatatttttatataataaatggttataaaacag

SEQ ID NO: 18308 - DNA, 600 bp, Chicken  19866894227098_1
tgcccctggaccgtgacgtgcagctgagcaaacgcagcacctggcagcaagaaggctgtgtccaagcactccttctcagcatcagtcagcagctgcagcctttctgctgcccaaatgaatgaggctgtgacacacgtgctggtgtccggccctgcggagctgacagcggctgcacagcaactcatccaaaactcacagcagagatctcagcagcagcgagcacctccggagcagggcacgttcctgctgctcccctccaccagggaggcagaggaggagccttcaagttgtgctgaaagygaagcaaagtattattagttgtactacatctcatttgaataaaattcaagacaaactgctaagtatgtggctacacgagccacgcaggtcatgcaaaagaggcaaaggcgctccagccccgagctgccaaccacagactgctgccacaccgagcattccccacagccctcggagaggacaggggaggtggaaaatccaccctgacacggctgagcccccaggctggggcctgctgcaaagctgcaccttcactgcaggaatgaagcagaaaaatcagaaacaactcatctggaaaaaaga

SEQ ID NO: 18309 - DNA, 600 bp, Chicken  19866894227105_1
gttttagtggaattagtatgcagagaataggaaaggagaacagctaatctcttgtttgcaacatgtccaaagaagaatgctttttatcagaagcaaaacactatcattacagtataggtttcactttacaaataacacagagttttatacatctgcagcgattatgctgcagaagaggaaaaataaagtaaaataatataaaaaaggcaggaagatttaaagcagcatatgatgactgttactgagcctggcaaaatctgcaacacagcaggtctgtgtctgctatgccatactctgtcraaagcagcacccaaatgtggtgaaggaaacattaacatttctaatcctggaaacacgcaatggtgccatctcagcttcatcaaaaacctgtaataaagagcacccagaacactatctcacgagagctcagtgaaacacggatgttgcagttccatattttcccagagatcatcaatgattccattcacagagagccaggtcttcccatcaccccatcactgcctctaacagcagcccgacatttccatcagcattttactctgcagaatcactggcgttgtgcttttctgcacattaaac

SEQ ID NO: 18310 - DNA, 600 bp, Chicken  19866894227112_1
tgtcacagtatggatttttttctgtctgtgcaggaaacctacagttgttacaaagtatgttggatcagatgatgaacaagtcttagatgagactgtaaatgaagataattcaaatgaaaactcagaaaatgatgttgatatgaaaagcttgcctaaaggtagttcatgtccttctttgtttctgaattcaacaaatagaaaagattatgatgcagcataagtaattaactagaatgcacatgtattagtaaaatacctctcctagatcctgttgactttatatataaatatatataaacrttcatgtgtatcccattccccttgcaaacacttgtaagaggaaatcctgtttccaagcacttttaagtttgaaccaacccatcgtacttaaagatgtcatgtacaaggatgtgctgatggctcaatttcaaatgattatggacctttgtgtaaaaccatcatgtaacagagaaaatatttctattcttagaaatctcaaactctctaatttgccaattgtgtttgtttttatttattttactcttctgcctttggatttattgagaaataagcaaaagtgagactaaatgtggggggatg

SEQ ID NO: 18311 - DNA, 600 bp, Chicken  19866894227117_1
atctgctgcttgtagtcatttagactgactgggttgtggctgcttatcataagctcctgaggtaatgttcctattgtttgttagcctctgctttggacagaagccatctacacctgagttgaggtttacagtggtttatgacactatttcaaatgcactaagcagagcggcccttgcctcttgagcaagatacatggatatgatatgatatgtgatggtagtggctgttgtggcaaactttaagttacgtttgttctcaggctgaaataaataagttacccttttgatggtagaaagggygattcatacattagctgtcaytgamaagtgaaaaatgctgtagttcaaagaagaagcattccatggccacagtttggtaaaggcaacaaatacaatgcatgaccaaatcacatggagaacgtaaagtaggctttcttcctgttttataatcctgactcgggagctcaaggatgagcattcttttaacacagtcagaaccaacaaccaatctctgaataactttgatctacatggtcagagaaatgaatgcctatcttgtatttattccctccaaggaatttcacaaggtgcagaagttga

SEQ ID NO: 18312 - DNA, 600 bp, Chicken  19866894227117_2
agactgactgggttgtggctgcttatcataagctcctgaggtaatgttcctattgtttgttagcctctgctttggacagaagccatctacacctgagttgaggtttacagtggtttatgacactatttcaaatgcactaagcagagcggcccttgcctcttgagcaagatacatggatatgatatgatatgtgatggtagtggctgttgtggcaaactttaagttacgtttgttctcaggctgaaataaataagttacccttttgatggtagaaagggygattcatacattagctgtcaytgamaagtgaaaaatgctgtagttcaaagaagaagcattccatggccacagtttggtaaaggcaacaaatacaatgcatgaccaaatcacatggagaacgtaaagtaggctttcttcctgttttataatcctgactcgggagctcaaggatgagcattcttttaacacagtcagaaccaacaaccaatctctgaataactttgatctacatggtcagagaaatgaatgcctatcttgtatttattccctccaaggaatttcacaaggtgcagaagttgatctcgattagctgtgaggcag

SEQ ID NO: 18313 - DNA, 600 bp, Chicken  19866894227117_3
tgactgggttgtggctgcttatcataagctcctgaggtaatgttcctattgtttgttagcctctgctttggacagaagccatctacacctgagttgaggtttacagtggtttatgacactatttcaaatgcactaagcagagcggcccttgcctcttgagcaagatacatggatatgatatgatatgtgatggtagtggctgttgtggcaaactttaagttacgtttgttctcaggctgaaataaataagttacccttttgatggtagaaagggygattcatacattagctgtcaytgamaagtgaaaaatgctgtagttcaaagaagaagcattccatggccacagtttggtaaaggcaacaaatacaatgcatgaccaaatcacatggagaacgtaaagtaggctttcttcctgttttataatcctgactcgggagctcaaggatgagcattcttttaacacagtcagaaccaacaaccaatctctgaataactttgatctacatggtcagagaaatgaatgcctatcttgtatttattccctccaaggaatttcacaaggtgcagaagttgatctcgattagctgtgaggcagttag

SEQ ID NO: 18314 - DNA, 600 bp, Chicken  19866894227132_1
cagtggtaccctgagactctggggagcacgacatgatcttcactatctgcttcttcagcagtctcctcacctgcagaaagcagatctgggtcaaacaacgtgcttatgtacacagcagaccgacagacaacccaggaatggtcaactctgtacacagaggaatacagcactccaggggtctctgcacaatactctggtgtggtgaaatgtgcaaactagcaagagtcacgccagcgataacattacagccatttcatcactgctctacttagaagcaaacaccagcagcagactagcccrttgcaagtcagctttgctctttcaagctattttaagcaagctctgaactttcttgttttggaaggtcacaacaggttgcacaagttaatctatgcaacagacgcagctgcgcagggaggtcaccatccacgctgctgatatcctgttattctaggaacaccactgctctacagccaacgtgtaaagtcacagcatgactcatttggcctaggaagcagacactcctcagtatcactgcagcaaggactgaactgaatagtttggctccaggagaagcgtgaggataggtgcatgtttttg

SEQ ID NO: 18315 - DNA, 600 bp, Chicken  19866894227138_1
ctgagttcttgctttcattcctcttgttgtgttgataaccagctgacactgtgtccatcttcccttcatgtcctttgcagtggtggtcagaggctgtggaagccctagtcatctgggacagggaagttggatgagtaacctaaaggtttgtggggttgggcttgtttgctgtcttgtggattttggagatgaggtgttgcgttaagaggggtttggacatggctgtttgctgcacttattttccccacctctcactgccatgtgacattttgcccttccttcagtaacattttgcccctyttttttcccttaataaactattactacrtcacagatratgctctgtgatgggatcactgtggagctgtccggaccaagtcctgtctggctcccagcagccttgaccaacatctgggtgcagacacgccattcaccacacaagtgtatcaattttgtttgaaattttatctctgccctctcctgtagcttcttgtaccatctgtgccattgagtatgctggggcgcagaagtgtggctgcaggtgctatggtgtgtcataagggaaatggtctgtgatgaaacagctgtttctgtagcagg

SEQ ID NO: 18316 - DNA, 600 bp, Chicken  19866894227138_2
gtgttgataaccagctgacactgtgtccatcttcccttcatgtcctttgcagtggtggtcagaggctgtggaagccctagtcatctgggacagggaagttggatgagtaacctaaaggtttgtggggttgggcttgtttgctgtcttgtggattttggagatgaggtgttgcgttaagaggggtttggacatggctgtttgctgcacttattttccccacctctcactgccatgtgacattttgcccttccttcagtaacattttgcccctyttttttcccttaataaactattactacrtcacagatratgctctgtgatgggatcactgtggagctgtccggaccaagtcctgtctggctcccagcagccttgaccaacatctgggtgcagacacgccattcaccacacaagtgtatcaattttgtttgaaattttatctctgccctctcctgtagcttcttgtaccatctgtgccattgagtatgctggggcgcagaagtgtggctgcaggtgctatggtgtgtcataagggaaatggtctgtgatgaaacagctgtttctgtagcaggagagaggtaggaagttgcctgcagcatg

SEQ ID NO: 18317 - DNA, 600 bp, Chicken  19866894227138_3
accagctgacactgtgtccatcttcccttcatgtcctttgcagtggtggtcagaggctgtggaagccctagtcatctgggacagggaagttggatgagtaacctaaaggtttgtggggttgggcttgtttgctgtcttgtggattttggagatgaggtgttgcgttaagaggggtttggacatggctgtttgctgcacttattttccccacctctcactgccatgtgacattttgcccttccttcagtaacattttgcccctyttttttcccttaataaactattactacrtcacagatratgctctgtgatgggatcactgtggagctgtccggaccaagtcctgtctggctcccagcagccttgaccaacatctgggtgcagacacgccattcaccacacaagtgtatcaattttgtttgaaattttatctctgccctctcctgtagcttcttgtaccatctgtgccattgagtatgctggggcgcagaagtgtggctgcaggtgctatggtgtgtcataagggaaatggtctgtgatgaaacagctgtttctgtagcaggagagaggtaggaagttgcctgcagcatggctggartg

SEQ ID NO: 18318 - DNA, 600 bp, Chicken  19866894227138_4
tratgctctgtgatgggatcactgtggagctgtccggaccaagtcctgtctggctcccagcagccttgaccaacatctgggtgcagacacgccattcaccacacaagtgtatcaattttgtttgaaattttatctctgccctctcctgtagcttcttgtaccatctgtgccattgagtatgctggggcgcagaagtgtggctgcaggtgctatggtgtgtcataagggaaatggtctgtgatgaaacagctgtttctgtagcaggagagaggtaggaagttgcctgcagcatggctggartggtgttaaaatgagaggcaagccaagagggttcatggcactacaaagaggagctgggrtttaattattatgctcccataaatttgagaaaatgaatattgcctctccactttcacaaactgaagggaaagtatttaagcatggcttttgccttaacttaataactacagctataataaagtgaattaaactatgtgtttgattcataattgggtatttctgttaccacgagtacagccattctcctctcaaatacattaagctgtaggaaactgctttttattggctgaagtttcataa

SEQ ID NO: 18319 - DNA, 600 bp, Chicken  19866894227138_5
gcagccttgaccaacatctgggtgcagacacgccattcaccacacaagtgtatcaattttgtttgaaattttatctctgccctctcctgtagcttcttgtaccatctgtgccattgagtatgctggggcgcagaagtgtggctgcaggtgctatggtgtgtcataagggaaatggtctgtgatgaaacagctgtttctgtagcaggagagaggtaggaagttgcctgcagcatggctggartggtgttaaaatgagaggcaagccaagagggttcatggcactacaaagaggagctgggrtttaattattatgctcccataaatttgagaaaatgaatattgcctctccactttcacaaactgaagggaaagtatttaagcatggcttttgccttaacttaataactacagctataataaagtgaattaaactatgtgtttgattcataattgggtatttctgttaccacgagtacagccattctcctctcaaatacattaagctgtaggaaactgctttttattggctgaagtttcataatacatttatgtgttattggaaacataattcacatgtagagcgttattaaaacctcactg

SEQ ID NO: 18320 - DNA, 600 bp, Chicken  19866894227138_6
ctataataaagtgaattaaactatgtgtttgattcataattgggtatttctgttaccacgagtacagccattctcctctcaaatacattaagctgtaggaaactgctttttattggctgaagtttcataatacatttatgtgttattggaaacataattcacatgtagagcgttattaaaacctcactggcttccagtttaaatctttgtgcagtgatttaactccttcctcatttttacgtgacattttcataataattaaacgtgaatgtgtccttgcagtctgtacccagacgttcygtggtgagcagcaaagggagcgatattcttcctggtctcagatgctgtaatattattgagtctatgaattacttccccctatccagaattgctccgaatagatcaaacaaatgctactcttaagtaatggaaatacggtacattatagggtatgctatgaatgctaataatgtcatttttctcagatattaaaagtttctcattttctattatactgcttgatgacatgcaattgtcttctgctgctaaatctaagcaattgtattattagtatgagaaaagacccatattactaaagat

SEQ ID NO: 18321 - DNA, 600 bp, Chicken  19866894227139_1
tacactttagagatgtcccctgtgcaactaggaattcagtagaataaagatgctgacagttagaacggcctgctgaaacaaatacctaatgccttccatcaggtactctgaatctttctggactggtgagaagtacagaatgcatagaagtttccagtgttctcagtagaatgtttttaaagaaaaatattttcatttatgcaaaaaacagacattgtctctatataaaaatctcaatttcatagaatctttatatattccttatggactctcctggaaaatacatttttctagagctgwaaatgctagagttattagaataaatacttaaaatctttggtttgctcatatgctgagggaaaaaaaaaagctttaaaggaaatgactatctagttacctgaggctcatcttccatttcttcaaaaatgaaattttagactagctgcttagtagctgagaagagaaattctctacaaaggaaagaatgagacacaacacttaaattaagtccatattaaatacgaaagtttgctttagtgaaattaacttaaggatagttaaaaaaaaaaaaaagaagaactagtaaccctatttctatca

SEQ ID NO: 18322 - DNA, 599 bp, Chicken  19866894227143_1
  misc_feature (1)..(171): n is any nucleotide
nnnnnnnnnnnnnnnnnnnnnnnnnnnnnnnnnnnnnnnnnnnnnnnnnnnnnnnnnnnnnnnnnnnnnnnnnnnnnnnnnnnnnnnnnnnnnnnnnnnnnnnnnnnnnnnnnnnnnnnnnnnnnnnnnnnnnnnnnnnnnnnnnnnnnnnnnnnnnnnnnnnnnnnnnnnagtttaagtttgtattgagagagctgtcagtgatcgactaaattcaaagaatttgtaggtgcttttcaacctctgcctgcagatctcaacccagtctgcaggatgaatgtacttggaggtccaaaactyccagagtattctgtagaatttttctttgactaaatatatcaagtctttgtaaacagaaaaaaaaagtaaggcaagaaatgagtagatgagctacatcactattgtgatgagataaaaattcatgctgaattagtttcattttggaagaatgctccaatgttccttacaaattcaaatctgactttttgggtttacattcttattgcttccaatcttgaaaagatctgttttgaggatgtttaggtagtcttttaacagaacagtagcaatgtattgctcttgcaagatactgactgtta

SEQ ID NO: 18323 - DNA, 599 bp, Chicken  19866894227145_1
  misc_feature (1)..(129): n is any nucleotide
nnnnnnnnnnnnnnnnnnnnnnnnnnnnnnnnnnnnnnnnnnnnnnnnnnnnnnnnnnnnnnnnnnnnnnnnnnnnnnnnnnnnnnnnnnnnnnnnnnnnnnnnnnnnnnnnnnnnnnnnnnnnnnnnntaggaatgcctgaggactaacgtgaactctcccctgctgcttcaggcctccacataattcacagcctggatgaagtcaacttcatccagaacctcgtcttctacatcgaagcggcctataagacagcggtgggtagcttgaggcctttgccagggaaaagaatcatgcccrgagggcggaggtggtgggcagaacccctcagaagcttactgggagcactgccaaagggtgagattcttcgagttttttgggcatgacacaaactgctgcctccctgcaggactttgggatatgggaacgtggggacaagacgaaccgggggatcactgagttgaatgccagctctgtcggcatggccaaggtgagctgcggagatgagatgtggtcattctttggctatgggtgctctgcagcccttgcagaatgcaggggtgtgtttgcatctcttccttgtttaaaactggtcaggg

SEQ ID NO: 18324 - DNA, 424 bp, Chicken  19866894227145_2
gatcactgagttgaatgccagctctgtcggcatggccaaggtgagctgcggagatgagatgtggtcattctttggctatgggtgctctgcagcccttgcagaatgcaggggtgtgtttgcatctcttccttgtttaaaactggtcaggggggttggcatggtgtgagagttcttacagggtggcagtacacagttgaggacacactgctctgggtctcgccctgcttgcaggctgccctggaggccctagatgagctggatctctttggagcaaagggaggcccacagtctgtgattcgkgtgctgtcagatgaggtgcagcactgccaggtgagggctgtgcrtgcagtctgacagggttgcagcgtgaacagtggcaaccaaacctctttcctccccctttactcagtccatcctccactcg

SEQ ID NO: 18325 - DNA, 380 bp, Chicken  19866894227145_3
gctgcggagatgagatgtggtcattctttggctatgggtgctctgcagcccttgcagaatgcaggggtgtgtttgcatctcttccttgtttaaaactggtcaggggggttggcatggtgtgagagttcttacagggtggcagtacacagttgaggacacactgctctgggtctcgccctgcttgcaggctgccctggaggccctagatgagctggatctctttggagcaaagggaggcccacagtctgtgattcgkgtgctgtcagatgaggtgcagcactgccaggtgagggctgtgcrtgcagtctgacagggttgcagcgtgaacagtggcaaccaaacctctttcctccccctttactcagtccatcctccactcg

SEQ ID NO: 18326 - DNA, 600 bp, Chicken  19866894227146_1
ataagaaggcaaaaattagaccaacagggatactagctttgcctgtcaacagtctccaaaggtttccatattgtagtgcatttgcaaaagccctgcatttcagaacagggctgtgaatcaacatggaagtttagtatgcacggtgcaggcttactgagctggattttgtacagcgaggatacagagaaaaagacaggcagttgtaacacaggagtcctacatgaagtagaatacaggaatctgagggggaaaaaagcttgtaaggtagaaatgagtcagaaaaccagtgaaaagtgaccwcattgacagagtatacacacagacaacaaaaggaagtaaaactgaatatggaagcattcagggaaaggaaaaactgggtatgtttcttaacagtcttttaaaaataaagctatacaaaaagaacatggcttttgctccagtatggacagccccagtaagaaatgcaagaatagatgtggaaagcccacctgggagaaataaccatatttcccagaagacttagttaacctagaacaagcaaaactacaccaaaaagtcaccttccagctcacatttgcatctctaggacccttcttctac

SEQ ID NO: 18327 - DNA, 599 bp, Chicken  19866894227148_1
  misc_feature (1)..(227): n is any nucleotide
nnnnnnnnnnnnnnnnnnnnnnnnnnnnnnnnnnnnnnnnnnnnnnnnnnnnnnnnnnnnnnnnnnnnnnnnnnnnnnnnnnnnnnnnnnnnnnnnnnnnnnnnnnnnnnnnnnnnnnnnnnnnnnnnnnnnnnnnnnnnnnnnnnnnnnnnnnnnnnnnnnnnnnnnnnnnnnnnnnnnnnnnnnnnnnnnnnnnnnnnnnnnnnnnnnnnnnnnnnnnnnnnnnngtctgattgcactcctctgggacattctgagaaataaaatgtggaactctactactagcttaaaaagtgttgyatgttctcttaccttttgtaaagctcaccttattagaatagcagaaatctgtwctaatagccagcacatacacaccttttggggatgattgraacacaataatttgtactgttctatcactctagckgaacagccttgtgctgctgttatttctatgcagtcacatctgacttaaattgcctagctagcagtcagacacctggrtctggattgttaagggttttggtgatttatttaagtttttcttcttcaacccaggaaaggtttactggtcagacagcacactgcgaaaaataagc

SEQ ID NO: 18328 - DNA, 599 bp, Chicken  19866894227148_2
  misc_feature (1)..(174): n is any nucleotide
nnnnnnnnnnnnnnnnnnnnnnnnnnnnnnnnnnnnnnnnnnnnnnnnnnnnnnnnnnnnnnnnnnnnnnnnnnnnnnnnnnnnnnnnnnnnnnnnnnnnnnnnnnnnnnnnnnnnnnnnnnnnnnnnnnnnnnnnnnnnnnnnnnnnnnnnnnnnnnnnnnnnnnnnnnnnnngtctgattgcactcctctgggacattctgagaaataaaatgtggaactctactactagcttaaaaagtgttgyatgttctcttaccttttgtaaagctcaccttattagaatagcagaaatctgtwctaatagccagcacatacacaccttttggggatgattgraacacaataatttgtactgttctatcactctagckgaacagccttgtgctgctgttatttctatgcagtcacatctgacttaaattgcctagctagcagtcagacacctggrtctggattgttaagggttttggtgatttatttaagtttttcttcttcaacccaggaaaggtttactggtcagacagcacactgcgaaaaataagccgggctgcccttgatggctccaaatttgaggacatcatcactacaggtaagag

SEQ ID NO: 18329 - DNA, 599 bp, Chicken  19866894227148_3
  misc_feature (1)..(135): n is any nucleotide
nnnnnnnnnnnnnnnnnnnnnnnnnnnnnnnnnnnnnnnnnnnnnnnnnnnnnnnnnnnnnnnnnnnnnnnnnnnnnnnnnnnnnnnnnnnnnnnnnnnnnnnnnnnnnnnnnnnnnnnnnnnnnnnnnnnnnnngtctgattgcactcctctgggacattctgagaaataaaatgtggaactctactactagcttaaaaagtgttgyatgttctcttaccttttgtaaagctcaccttattagaatagcagaaatctgtwctaatagccagcacatacacaccttttggggatgattgraacacaataatttgtactgttctatcactctagckgaacagccttgtgctgctgttatttctatgcagtcacatctgacttaaattgcctagctagcagtcagacacctggrtctggattgttaagggttttggtgatttatttaagtttttcttcttcaacccaggaaaggtttactggtcagacagcacactgcgaaaaataagccgggctgcccttgatggctccaaatttgaggacatcatcactacaggtaagagtgattttttgtcctcctgccttcgtgcagtgtgaaaaga

SEQ ID NO: 18330 - DNA, 599 bp, Chicken  19866894227148_4
  misc_feature (1)..(100): n is any nucleotide
nnnnnnnnnnnnnnnnnnnnnnnnnnnnnnnnnnnnnnnnnnnnnnnnnnnnnnnnnnnnnnnnnnnnnnnnnnnnnnnnnnnnnnnnnnnnnnnnnnnngtctgattgcactcctctgggacattctgagaaataaaatgtggaactctactactagcttaaaaagtgttgyatgttctcttaccttttgtaaagctcaccttattagaatagcagaaatctgtwctaatagccagcacatacacaccttttggggatgattgraacacaataatttgtactgttctatcactctagckgaacagccttgtgctgctgttatttctatgcagtcacatctgacttaaattgcctagctagcagtcagacacctggrtctggattgttaagggttttggtgatttatttaagtttttcttcttcaacccaggaaaggtttactggtcagacagcacactgcgaaaaataagccgggctgcccttgatggctccaaatttgaggacatcatcactacaggtaagagtgattttttgtcctcctgccttcgtgcagtgtgaaaagagagatgagattctctggtcttctggtggtataatc

SEQ ID NO: 18331 - DNA, 599 bp, Chicken  19866894227148_5
  misc_feature (1)..(23): n is any nucleotide
nnnnnnnnnnnnnnnnnnnnnnngtctgattgcactcctctgggacattctgagaaataaaatgtggaactctactactagcttaaaaagtgttgyatgttctcttaccttttgtaaagctcaccttattagaatagcagaaatctgtwctaatagccagcacatacacaccttttggggatgattgraacacaataatttgtactgttctatcactctagckgaacagccttgtgctgctgttatttctatgcagtcacatctgacttaaattgcctagctagcagtcagacacctggrtctggattgttaagggttttggtgatttatttaagtttttcttcttcaacccaggaaaggtttactggtcagacagcacactgcgaaaaataagccgggctgcccttgatggctccaaatttgaggacatcatcactacaggtaagagtgattttttgtcctcctgccttcgtgcagtgtgaaaagagagatgagattctctggtcttctggtggtataatctctttaagtttttggtggaatggggggcaaagcctaaagcatcttgatgagttggacaaaggcaatatcggaagttc

SEQ ID NO: 18332 - DNA, 600 bp, Chicken  19866894227150_1
ggccagattcagcaatagtatgaagtcaggcagagcgtatcatgatacaggaaagcctatgctgtggaggaaataatgaatgttttgcgattcactctgtacttaagattttgctaagaactctcttggggacagtgaggcattctgcacactagtgagactattctgctcacgttcattgctattctaattctcagttttctttcatttttaatggctagcaaaacaatttggtccatcttctgtgtattgctggcgtgatcctcaatgatttacagaattattccagctcaagtcaaygtaaatgtatagacttcaacagttatcatctgaaaatgtatggcaattaattcagctgccaccaactggtattacttgatggaaccaattcaggagcgtgtgcacatattattttcataaatgcttggatttttcagaccttacctttccttattttctaatattaacattacgtatcagataaatgtactactacctcaatcctttattgtacctaaatctcattgtgtgttacttcagtgcttattaaaacagaagcatgaatttcactcttggtagcagaagtgttgtaaagtgtct

SEQ ID NO: 18333 - DNA, 599 bp, Chicken  19866894227160_1
  misc_feature (1)..(55): n is any nucleotide
nnnnnnnnnnnnnnnnnnnnnnnnnnnnnnnnnnnnnnnnnnnnnnnnnnnnnnnagctgacatagctttctaacatcaatgaacattcatttgagcctcgaaagataataatgatcaggatctggaaggatagtcacagctcaaagtggaactaataacagaattggatgtcagagtatgaatttttcattagcatttctaggaggcaacatgtatgaaaccagatgaagtcttcacagaagaaaatataatgttctggagaggaagagaaaaataaataaataaactttcatgggtcytacrgcaattattccattaatatcattcttggaaccataaccacatcttcagacrtttgagctacatctctattgctaaaaaaagaagaaagaatgagctggtattaggctgtgattaytcatggtgtctgtctaatagctagcacactattggcacgataataacctgggccaattagcactttctgaaagatggctgggcacgggttggggaattttatgcaccagagaccgtttccaaaatcaatatacatgagtctgaataaggttttgcttccttccctccctcccagaacagg

SEQ ID NO: 18334 - DNA, 599 bp, Chicken  19866894227160_2
  misc_feature (1)..(51): n is any nucleotide
nnnnnnnnnnnnnnnnnnnnnnnnnnnnnnnnnnnnnnnnnnnnnnnnnnnagctgacatagctttctaacatcaatgaacattcatttgagcctcgaaagataataatgatcaggatctggaaggatagtcacagctcaaagtggaactaataacagaattggatgtcagagtatgaatttttcattagcatttctaggaggcaacatgtatgaaaccagatgaagtcttcacagaagaaaatataatgttctggagaggaagagaaaaataaataaataaactttcatgggtcytacrgcaattattccattaatatcattcttggaaccataaccacatcttcagacrtttgagctacatctctattgctaaaaaaagaagaaagaatgagctggtattaggctgtgattaytcatggtgtctgtctaatagctagcacactattggcacgataataacctgggccaattagcactttctgaaagatggctgggcacgggttggggaattttatgcaccagagaccgtttccaaaatcaatatacatgagtctgaataaggttttgcttccttccctccctcccagaacaggtctc

SEQ ID NO: 18335 - DNA, 600 bp, Chicken  19866894227160_3
agctgacatagctttctaacatcaatgaacattcatttgagcctcgaaagataataatgatcaggatctggaaggatagtcacagctcaaagtggaactaataacagaattggatgtcagagtatgaatttttcattagcatttctaggaggcaacatgtatgaaaccagatgaagtcttcacagaagaaaatataatgttctggagaggaagagaaaaataaataaataaactttcatgggtcytacrgcaattattccattaatatcattcttggaaccataaccacatcttcagacrtttgagctacatctctattgctaaaaaaagaagaaagaatgagctggtattaggctgtgattaytcatggtgtctgtctaatagctagcacactattggcacgataataacctgggccaattagcactttctgaaagatggctgggcacgggttggggaattttatgcaccagagaccgtttccaaaatcaatatacatgagtctgaataaggttttgcttccttccctccctcccagaacaggtctccaaaatggttccaggaatttcttaaacacctctctgttctcttaacccataa

SEQ ID NO: 18336 - DNA, 600 bp, Chicken  19866894227160_4
gatctggaaggatagtcacagctcaaagtggaactaataacagaattggatgtcagagtatgaatttttcattagcatttctaggaggcaacatgtatgaaaccagatgaagtcttcacagaagaaaatataatgttctggagaggaagagaaaaataaataaataaactttcatgggtcytacrgcaattattccattaatatcattcttggaaccataaccacatcttcagacrtttgagctacatctctattgctaaaaaaagaagaaagaatgagctggtattaggctgtgattaytcatggtgtctgtctaatagctagcacactattggcacgataataacctgggccaattagcactttctgaaagatggctgggcacgggttggggaattttatgcaccagagaccgtttccaaaatcaatatacatgagtctgaataaggttttgcttccttccctccctcccagaacaggtctccaaaatggttccaggaatttcttaaacacctctctgttctcttaacccataatttagtagagtgaaaacttacagcacactaaaaccaagaaccatcagtttcacactgttaaaac

SEQ ID NO: 18337 - DNA, 599 bp, Chicken  19866894227162_1
  misc_feature (1)..(93): n is any nucleotide
nnnnnnnnnnnnnnnnnnnnnnnnnnnnnnnnnnnnnnnnnnnnnnnnnnnnnnnnnnnnnnnnnnnnnnnnnnnnnnnnnnnnnnnnnnnnngattggagttagctttgctttgtggatttaggatatactaaaggagaaatcatgatgaattaaggatctttgagtaatctcttttacatttctcacataaggggtacattttgataggaccaagggtactacttttcttttagcagatataacctctcccagaagaatatatgccttctttcaggcatctctaagaaacacactgcraatgaaaaacagctcccttctgtgttcctaactgtatgatacaaatccaccatgaggaaatggaggtttgagtacctaaattgtattctcaacaatcatatatttcaggtataaattctgcctgcagagccgtctgtcttctctaaattaagcagtttttcaggcttctagagcactccttcacaactaccacagattttatgcgtgttagtttttgtttactcgctgtaaatgacagattagcatttaaatgcttttgtcgcagttatatctgttttggatgtcaaaccaaacaagcc

SEQ ID NO: 18338 - DNA, 600 bp, Chicken  19866894227168_1
gcttcactcctcccatcagatgcagcaagaaagcaagacagcccacaaaaccccctaataaaataagctgtgtgccatctctgcccatttttccgcctctccacggtgcatccaacccccttttaaggaggagaccagtgagaggggaagagggtggaagcacagccatcactttatggcacacccgtgggtctcggtgctggcgctgcctgggctgtgccacctaaacctgctgtgggtgtgctttgctgggaggctgtgggccatccctcaggcttttgccagatgaagccatccttygaccagcagtgagtccaaggcttgattaaaagctgcctgacacttctgggccaagctgctaaagtgaaaacattcccctcygctctgcagagtttatcagggcttagagaaacctttgtttggatcgccgggctccgtgacacagctgttacttaacagccttacagccctatagataactcctggagggtttatctgagggtgtaaatacgctgctggaagagaggagcctgccagctcggggagggcagccatcagtcaccctgggatccacggggctgtgctgcagagggggctgaa

SEQ ID NO: 18339 - DNA, 600 bp, Chicken  19866894227168_2
tgcccatttttccgcctctccacggtgcatccaacccccttttaaggaggagaccagtgagaggggaagagggtggaagcacagccatcactttatggcacacccgtgggtctcggtgctggcgctgcctgggctgtgccacctaaacctgctgtgggtgtgctttgctgggaggctgtgggccatccctcaggcttttgccagatgaagccatccttygaccagcagtgagtccaaggcttgattaaaagctgcctgacacttctgggccaagctgctaaagtgaaaacattcccctcygctctgcagagtttatcagggcttagagaaacctttgtttggatcgccgggctccgtgacacagctgttacttaacagccttacagccctatagataactcctggagggtttatctgagggtgtaaatacgctgctggaagagaggagcctgccagctcggggagggcagccatcagtcaccctgggatccacggggctgtgctgcagagggggctgaaagcatcrgggctggggctgcgatggggcagagcaggcacagagctgcagccgtgcatgcaaccgagcagaacgtttgcacg

SEQ ID NO: 18340 - DNA, 600 bp, Chicken  19866894227168_3
agtgagtccaaggcttgattaaaagctgcctgacacttctgggccaagctgctaaagtgaaaacattcccctcygctctgcagagtttatcagggcttagagaaacctttgtttggatcgccgggctccgtgacacagctgttacttaacagccttacagccctatagataactcctggagggtttatctgagggtgtaaatacgctgctggaagagaggagcctgccagctcggggagggcagccatcagtcaccctgggatccacggggctgtgctgcagagggggctgaaagcatcrgggctggggctgcgatggggcagagcaggcacagagctgcagccgtgcatgcaaccgagcagaacgtttgcacggagcgagtgctggggatttgcccacggccctgaaaagcacccacggaaccctacgatcccataagagagcctgggcagctcctctacctgtgcacgagctgcaggttctcctgcttgaggcggctgtgctgctcgccgttggcagccgtgtccttctccagctctgtcacccgcttctccagaaagaccacctgggtgggggagaggcacagctcagcacagcccc

SEQ ID NO: 18341 - DNA, 600 bp, Chicken  19866894227168_4
cagcacctcggtttcccacgtgtcccaagttagaaacactgggccaaacacctccctgcttcctttcctcataacgtgatgctgcagcagtgcccagagcgaaggaccccggctgggtctcatccacacccatgcacaaacaaagcagccagcagcacggcggcagagcccgaaccaccgtgctgctgtgctggggaagcgggcaaatgacactgcaaacagccacacgcatgtttccctttcccacgctgctccacgcagctttctgttcctggctgcagagctgcaaaagccattccraaagtgtttcattgctgcagcaaggcagggctcgcccatctttcactttccatctttcccctcgctattcttaaccagtggtgctccaccaacggccttctggtcctcctcgccctcccatcccacgaggaccagcacaggaggaagccgctgtcaccctgcaagcaggtggcacgctgtcccccacagccagggctctttgcatggggacagagggctctcaggtgatgccttcttcactccaagcagcaagaggagcttcagcccggccctggcccagccatcccaaagccctgcatg

SEQ ID NO: 18342 - DNA, 600 bp, Chicken  19866894227168_5
tctttcccctcgctattcttaaccagtggtgctccaccaacggccttctggtcctcctcgccctcccatcccacgaggaccagcacaggaggaagccgctgtcaccctgcaagcaggtggcacgctgtcccccacagccagggctctttgcatggggacagagggctctcaggtgatgccttcttcactccaagcagcaagaggagcttcagcccggccctggcccagccatcccaaagccctgcatgccaccgatgcacacacagccctgctcttaccttgtccgtgatgtcctcttcygtgcactccaacgtgtcccggtaggactcctccattgctcctccagacagcgtgctggtctggtgcagctgtctgtaacacagcaaagcaacccccacccacagcagggcgaccatcagggccaccatagccagacagggcgacttcagctgacagcacccacgcagtggggtccctctccctcctccccagctgccacctccttccccggtgccggcagagcactgctcctcacggggcagcctcttaccagagccccagcagcagcgtgcagacgtggacccatgctgcagggacttc

SEQ ID NO: 18343 - DNA, 600 bp, Chicken  19866894227168_6
ctccatcgctgcacggcacgagcagagctggctgtggtggtagccctgcagacccaggatgctgcctggagcaaagcaccgccgttcccggtgcaacgtggggtcagagcctgcagcgtggtacccgcagggctcctcctggagcagcacacacacacacagggtctgccagcagcggggtcagcccgggttaagtgacaggtgcccatggtttgggcagtccccctccctctccaaaaagggcgtagggtgtttcccagccctaccacccccatcccgtggatctctgctgtcccaccrtgacccaagcagccccgctgtgcagcaggcaggctgagcaggctttgaaaccagcgctgcctcaagcaggaccagagcgagaggtctcttccaacctcaactatccaatgatgatgccatcatgaggctccgaaactcaccctgctacacaatatgctcatgcaaatactcatgaagcgtggctggcatttactgaagagaccacagctgagtaccaggcttgttttgcctcctcgccctgagtrcatatttagattgtgaagtcttgggcacatttgtcatttaaatcatgccaagcac

SEQ ID NO: 18344 - DNA, 600 bp, Chicken  19866894227168_7
tagggtgtttcccagccctaccacccccatcccgtggatctctgctgtcccaccrtgacccaagcagccccgctgtgcagcaggcaggctgagcaggctttgaaaccagcgctgcctcaagcaggaccagagcgagaggtctcttccaacctcaactatccaatgatgatgccatcatgaggctccgaaactcaccctgctacacaatatgctcatgcaaatactcatgaagcgtggctggcatttactgaagagaccacagctgagtaccaggcttgttttgcctcctcgccctgagtrcatatttagattgtgaagtcttgggcacatttgtcatttaaatcatgccaagcacaacagggccccagcagctgagatttctggctcttctctgtgctcaccatgcagtgctgtcccctggggagggggcacctctgctcccatggggttaaytcaaatcctgccctctgctctgccgggcaggggacagaaggtgatcctgatacaggaagcacgggacagcctgctccctgctgcccgtgttgttaacaaagctctccaaagtgagatgagtggaaggaggaaatttaatatcaaagc

SEQ ID NO: 18345 - DNA, 600 bp, Chicken  19866894227168_8
aactatccaatgatgatgccatcatgaggctccgaaactcaccctgctacacaatatgctcatgcaaatactcatgaagcgtggctggcatttactgaagagaccacagctgagtaccaggcttgttttgcctcctcgccctgagtrcatatttagattgtgaagtcttgggcacatttgtcatttaaatcatgccaagcacaacagggccccagcagctgagatttctggctcttctctgtgctcaccatgcagtgctgtcccctggggagggggcacctctgctcccatggggttaaytcaaatcctgccctctgctctgccgggcaggggacagaaggtgatcctgatacaggaagcacgggacagcctgctccctgctgcccgtgttgttaacaaagctctccaaagtgagatgagtggaaggaggaaatttaatatcaaagcctcgcttcctttccaggaggacagacttgctgagcacaggaaaaactgggaagggcagggtgagatgatgaggtttagggcagctcctgaacgctcggatcgctgcacaccacgcattggagcacggggctgctgaggtctgtgcttccagag

SEQ ID NO: 18346 - DNA, 600 bp, Chicken  19866894227170_1
acacagatacagaactgcttgaaaacaccagaatggagtaaaagtaagacatgtacgaggaaatgattccaaggactgagttaaaaaccttgtaagagaaaggttaggtcattgctggaactgggggaaaaaaagtcctctgccgcaactgatagctatggatatccaaaatgatactgagtgtgttctgaccgctgagaatgaaagattagaataaacacctcttaatggggaaaaaaaatgcaaagctttccatgcctggaaaaggaacagtatttcacaagcaaagccagctaaacraatgcatctactgcaggaatctgatttatactttctcttctctctcttccttggcacgacatacatgcaatccaaacagcaccccccacaaacactttgcatgttcaccaaacatatggcaatactgttcaaaagaaagaacactcactttttgcatctataagcctttctcgtggtgcagtgtcagaagaagatagctgctccttcactttggcaatgtctttcggatgaaggtagtcaaataaactttgaccgattaaatcattctgtagggattgaacattcagtccaaaattaaaa

SEQ ID NO: 18347 - DNA, 600 bp, Chicken  19866894227170_2
cagttataaagaattggtctaaccaatgaacatcaaacatctcagatccaggattaaatggaaggtattagttttcaccacagttatggctacatttcatagtaagtacttccactattttcagtaggagttttacagaaacagcatgctcaatccaccaacaacagatattctggtttcttttcagcttccttttgtgctacacgtttcaagtcagaattgcaaatgttcttttttaatacttacacaattagttgctatttagtaaatacccatctaaaggatgcctgatgaaaactwttgaagctaacacagtttttcaagctggaaaggagggcaggcgacagaaagaacgaagacttatttatacaatgtatgttctacgttatgcctcacgttaagcatatatcaaaatcctggctttgttacaattgcttcccagtttccatcagtaagaatgcttagcaaaaacagaacagaaatcgaaccaagttgaagaattcatgtaatgctactggaaaaacctcaggccgatttttcaatatttgcatacaagccaaattagtgaacacttctgcaagcctgatggtgaaaacccaa

SEQ ID NO: 18348 - DNA, 600 bp, Chicken  19866894227170_3
ccacactaggagaactctcttaacgtttagagataactgagtcaacagacaagatatgaaattacgtttttggggttttatttttcatccgctaacatttctggcatcattctgggaactgtgcccagaatctgcaatcacttttattagaagaatgcatccatatttcatccagaaatattacgattatgtttaataatgtctatttttttaaacagtattttaaatgcatttattccatagttcctattttggaacccaaaataatctgggtatttatttgcgtgtccacaggcaagytgtccccattctgaaagtcttatttttcagccacaaacaagcatgcagcattaggccctacctttatagctctaaagccacagtgctgcagaaatgcaattccaaacgtgctgcatctgaacactgcagtgcttgacaacttacacttgcaatatgtgctctccgtgctataaatgcatacagcacggatccaaacatactatgtcacgtgacatcagtgacctcaaaacaaggcactcctataacatcagatgctaaaaaccttgtccaggtcgcatatggcagaaagcctgtcagaat

SEQ ID NO: 18349 - DNA, 588 bp, Chicken  19866894227173_1
taccctctaaaccattccaaaattcttagactggtacatgatgaggttctgctactggctcatctggaaaaaataaagtaaatgaaatatactttcatatcagtgctatatgtcttccccagctgttttccagagtgctccttctgtgaaagatctgtgcaggagcaatttctatgcactgttttttgcagttactgacagatgtgtgtagtatattctcaaaaacatctttttaagaacaatacaaatttttttttcaactgtaggtcactgttgcttctcagatgcagtggatgagamagttcctttgcttgtagatgtttattcagggttgcaagtgttctctttgtaaataacttcatctgcaataatgctcacatctgaaaatcatcttctcaaagtatattgaggtaaactctcacatagaatgagacagaaaacatataaatgctttcaaccgaggtaaatctgtctaaaagcttttaatattgtgtaatactgaatattttcatgggaatatgaaaatgagagtggtaactgtccttttaatgagggaaaaaaaaagtttattttccagctttttctaga

SEQ ID NO: 18350 - DNA, 600 bp, Chicken  19866894227178_1
ggacctttgcaaaaatttgcccagtgaatcactcagtcttttgctttttgttcagtttagagttagattgttattgaaggagaattttcaaaaccagacagaatagggttttttgtgaaacctcatgtagcactcctctggattttcattgtatttatgtgtagatagcttatttaaaaacaaaaaaataaaaaaagtataaacatggggtgtcaaatggggtgttttatacttcttgttatttatatccctttgaattgtacaagatgatacagagaaaaggattattatcacctattkctacctattgctacctggccaatttagtggtcaagatctccagttagcaacttattaccagttctttctctttagtcaatgtggcttctctttagtcagtgtggaaaagaataaacactacttttattaaaatgaacaagaaattaaatccagtccttaagatctatctagctaacaaaagctcttctcttcccactgaatcttacaatgtacctgatacatttttccttaacacaataaaagcacaacatgatgtagtttattctgtaatggtgtacattaatcattataagctgtctc

SEQ ID NO: 18351 - DNA, 600 bp, Chicken  19866894227185_1
ctagttgttggctcatggcagccttttataatttctagcactcaaaataccattcattcttggttctgcctatcatttcaatatggattaaaatgtttttaccatgagtgagtagagacagaaatgtttttgagagcaaatatgatgtagtatatttaaaaatgaagtaatttgtcaacagaatattggtgctttgtttcctgcaggtcttatcacccgtctccgacatccagtcagatcaatcaccagttcttcaccagcaacagcaggatttagttacggtaaattctttatcttgtwttggtggaaacctaggtgtatgtctaggcaagagttgaggttgcattcatacagctaataattgtctgttgaatttcccagtcataattaacacataaccagcttcataatcaccagactcagacacctcaggtgtcaaatccaaatgaaagacctgacttaattcctttagtttagtgagtgttgtgcttctttcacaaccactaatgcctttctggactttcataagcagacctgtggaactgatttaaagttaaaaacatcatagatgacagtgccaaaaaaaaaaatatcttagag

SEQ ID NO: 18352 - DNA, 600 bp, Chicken  19866894227195_1
tgggccttaggagacagaatactgagtatgaaacatgtaaaagatacatgaaatatgcagccattagcaatgtaataagctcttgtcagattagagttacagggtgcttgctcttgggacaaggacactctcgtatgcaagtagatatgtcataagagtgaaattcagagaaaataaatggcatgaataagaaaatacagtaaattagtaatccaataaggaaataaccaataaggacaggagagaaaatgaccctgtcatatattttgttcttcaaggtttcatggaaacagagtgcarcttaaactaataattcttgtgtctatgctatagaaatagcctaataaaataaccaaattaaaacaaacggaaaaaaaaaaaaagtcaaaatgagatagagggatagatcacctttaggacaaggacctacacaaagaggtatagattgagaataaatataattggtatgacaaatagagggaagtaacaaggtaattccattttccattctgccagaaaggggtacaacctgtaataatgaactcaaaaagagatacttagataagatgaaaaaagaaggtggcaaagggcaatcagaga

SEQ ID NO: 18353 - DNA, 600 bp, Chicken  19866894227195_2
gtaataagctcttgtcagattagagttacagggtgcttgctcttgggacaaggacactctcgtatgcaagtagatatgtcataagagtgaaattcagagaaaataaatggcatgaataagaaaatacagtaaattagtaatccaataaggaaataaccaataaggacaggagagaaaatgaccctgtcatatattttgttcttcaaggtttcatggaaacagagtgcarcttaaactaataattcttgtgtctatgctatagaaatagcctaataaaataaccaaattaaaacaaacggraaaaaaaaaaaagtcaaaatgagatagagggatagatcacctttaggacaaggacctacacaaagaggtatagattgagaataaatataattggtatgacaaatagagggaagtaacaaggtaattccattttccattctgccagaaaggggtacaacctgtaataatgaactcaaaaagagatacttagataagatgaaaaaagaaggtggcaaagggcaatcagagagctctcttctttcacttctcattattgatgatgataatgggtaattaaaggtccagttgtgttttcaaggt

SEQ ID NO: 18354 - DNA, 600 bp, Chicken  19866894227195_3
taataagctcttgtcagattagagttacagggtgcttgctcttgggacaaggacactctcgtatgcaagtagatatgtcataagagtgaaattcagagaaaataaatggcatgaataagaaaatacagtaaattagtaatccaataaggaaataaccaataaggacaggagagaaaatgaccctgtcatatattttgttcttcaaggtttcatggaaacagagtgcarcttaaactaataattcttgtgtctatgctatagaaatagcctaataaaataaccaaattaaaacaaacggaraaaaaaaaaaagtcaaaatgagatagagggatagatcacctttaggacaaggacctacacaaagaggtatagattgagaataaatataattggtatgacaaatagagggaagtaacaaggtaattccattttccattctgccagaaaggggtacaacctgtaataatgaactcaaaaagagatacttagataagatgaaaaaagaaggtggcaaagggcaatcagagagctctcttctttcacttctcattattgatgatgataatgggtaattaaaggtccagttgtgttttcaaggtg

SEQ ID NO: 18355 - DNA, 600 bp, Chicken  19866894227198_1
gtggttttttttgtttgtttttctccttcatttctttatctgcagctgctgcatttcagcttgtcctcatttgctgcagccaaagactttgccaccctgctattatcgcagtattatcatagactcatacaatggcctacgttgaaaaggatcacaatgaccattgagtttcaacccccctgctatgtgcagagtcaccaaccaccagaccagctgcccagagattttccatcatactgtagcattacagtgacctaaaaaactcattctcttgagagaggacagaagaacaaaccactrgatgtttgttgacatggtctctcttctacaactccttcctttctcttacaccatgtgagactcaacttctggtcccagtgcttaaaaatcactggacagactacaacacttaaaaaagcatgactgaaatgagagcctttttatgaattcgaactacactgactttttaggatcttctgcagaatgtagaagtatgagactacccagatttctgggaggtaatctattgcttttttttatagttctcctgatttcttgacggtccccacaactatgatagcagggtcccaagccttgatt

SEQ ID NO: 18356 - DNA, 600 bp, Chicken  19866894227199_1
tgcttttatgagatagtagtagtccttctcagtgaagcctcagaatgtctcatgtttagtaccagtttcaccaacccagctttatgatctccattgtttcccttcccatctagttctagctcaccctgagacagtgacagatacccaaatcccatcccagtgctctgttttctaggattcctttttatgaagcctcctccagcgtaaggaaactgccagtatctatctgacattaaaaactgtgcacatcaagagtgaatgagatgcattctaccctacaactgtccttaataaattgcrttttttttttttttaccaagaaaacatgttgggttttttaagtactttatatcctccaaatccaaaagtctttctgtttgcatcacttgccagtgttgttttgtactgcttgtgctgtccaccccaagaacaaaaggttcgcattgtattctggcctacaagggagttcctgcagaagagcatactatagtcagttgtacagtaagttcagctacagaggatctctatcctggctcaaggactctaccacaataactggcaggtaaatattgctgaaaaagttacctgttgtgggtaagg

SEQ ID NO: 18357 - DNA, 600 bp, Chicken  19866894227199_2
tacctgttgtgggtaaggcgttgttctgagttttgctttcatcttattacttttgggttttactattttccttgtttcctgcgaggtagatactgagtttctgcatgaaaactgtgacttagaaatggtaacctggtccagtgacagctgaagttccttatactcaatatctctgcaaaagaacagtccaataaattatatattcagacataaccacaaatccaaaatagctcctttgaaaatacatattagctttcacaatgttttcattcttcaaagattttcactgagtctgctcgrctggggatgctagcaagcagtgaattttacggtctgaccctgttttcatgggagtctatcacaaacattccactgggaacagagttaacatctttgcactaagtgtccctgctctctgaacttatttctcagccatctgtggcactctctattttggaatcatagccatgtcagctgataggaagacatggattaattaatctgtctcctcagtcaagagctggtctcttcggtgcctctcacagcttgctctgaggagaggcaaaggagcaatgttcctctcccaccgtacccttgtaa

SEQ ID NO: 18358 - DNA, 600 bp, Chicken  19866894227200_1
ttttttatttaactccattggacaaaaaaatccccacaaccgaaaacctacagaaaggtacattatcctgtaatggaaaattagattcctcctacacaatactataatgcaacttaaatataatatataggaatataacacattattaagtggcattgtatctttctagaaagacctacagcataagattctaaaaattactccaaaaacctatgaggtttccatctagtccagctggcttcctttctactgcattctgcaagactcttctgaaaggctgaggttttaattgcatctccraacagtgccaccatctgagagtgcctccaaacacctccggcctcagcaaacccaagtggggaaccccwcagtggccttgggatggatggacagacaggggatggatggacagacaggggatggacggacccagggatggttgtgacacggctcagtcctgcactcaaagaggtaccactgatgcgcaggggcagagctgccccatccctcagcttcacagagcccgcacattttgcactgtgctgtgaccaatgccaccccctcctgctcaccaccccacagactgggggggtccaagca

SEQ ID NO: 18359 - DNA, 600 bp, Chicken  19866894227200_2
tgtaatggaaaattagattcctcctacacaatactataatgcaacttaaatataatatataggaatataacacattattaagtggcattgtatctttctagaaagacctacagcataagattctaaaaattactccaaaaacctatgaggtttccatctagtccagctggcttcctttctactgcattctgcaagactcttctgaaaggctgaggttttaattgcatctccraacagtgccaccatctgagagtgcctccaaacacctccggcctcagcaaacccaagtggggaaccccwcagtggccttgggatggatggacagacaggggatggatggacagacaggggatggacggacccagggatggttgtgacacggctcagtcctgcactcaaagaggtaccactgatgcgcaggggcagagctgccccatccctcagcttcacagagcccgcacattttgcactgtgctgtgaccaatgccaccccctcctgctcaccaccccacagactgggggggtccaagcagctgtcagtatgtgctcacgtgtgcacccatccctctgcaaagtggaatgggttaggcataaaagttg

SEQ ID NO: 18360 - DNA, 600 bp, Chicken  19866894227202_1
ttatcgcttcacttgaagggaaactactttttcccctccagatatttacatattcagtatgagcacgcatttatctaccatagcttaacagaaacctgctaagtctcatctgacgttttcctaacacattctagcacacactaactcctggggggtgtttcacacgtgtgcaaagcacttatacagctaaaagggaacagcagcacatcactacaccacttttttttccctcctatttcactgtgacaaaaccagatgcacacacatatgcacacacggtgcattcttgcttgctatgcmtaatcaaacatccaaaaaacgtcatggcgaaattcaagtaagaccactcattgaggcctggtatgaaatcaccagaccaaagccaaaagtcattttctaaacatacaaccacaaatttatacacagaaactaggaagaaaagatttattacaagtgatccaagttcctcagcacctgtaattcaaagtttcagcatgctatgagtacacaaaggtttgggaagcgtttctggctttaacagccttctgagaaaggagctcatgcagctgtcatgctgtgctcctccaccaatgctctgct

SEQ ID NO: 18361 - DNA, 600 bp, Chicken  19866894227206_1
catacctcacaaacatcagctgaggaaatggctctattgagccagaattaaatgcactttggggagtaaccaatgacttccccacagctaggcttttagttaacgttagcttctcatcagctcagactcactcttttgtcctctgcggcaaacctcgctgttcttcagcatcatcaggacctgaaatgcgttatgttgctgctttatgcttctctatgcgccatagatttcacagaggcttcgtaaccacagcagttacaatccctgtttttacaattccaacagcattaacgtttgggwattctttttttctctttcaagctcgttgctttaacctttaaatcaacattgcagtgctttaaaatgaaatgctaaaatgatcacctaatgtttcgacagccttatcattgattctgattttatattttgcctaaatggagaactcttgattacccaaggtaatgcatgggagagctgggaggacaaatgagagaatgcttagataaggtaaaaacagagcgatacacggcatctgtaggttaggattatcagcaactgtaatggggaaagggaaggtcagtggcacaggtttcatctcca

SEQ ID NO: 18362 - DNA, 600 bp, Chicken  19866894227211_1
atgcacaaatggagcactctctgtgttcagaagcataggtacatttgcagattcttgagcaccagcatggcctctctgtctgttcagcattcccacctggaccccttggcacaccctcagggaccaccttcccacttgataccagctgtcagtgctgggcctgatatactagccctgagtatggttggcccttttggctgcttgggaacactgctgattcatgttcagcttgacatcacagagaatacccaggtccctttctgcagggcttctctctggtatctcatccattagtctgtrtacatatatccaagtttaacctgtcccaggtgcagcatctggcactctacctttaaccttcttgtgattagtgatcacccccctctttaatttctcaagatctctctcactacagtaggtggcatcgagaaccctcacttgcatcggaagctctgcagggcctaaaaccttggcctgtttccagtatttggcaccatttcactcactgatacactggtcccagtagctggcatgtagtccttgcagcatacacatgcagaattcctcccggtccagggaccctctcagttcacaatgtta

SEQ ID NO: 18363 - DNA, 600 bp, Chicken  19866894227219_1
ttcctgcaaaacatctgtgaaggtggaagctgcataaatattacactgaccaaaaatgcacaaacgcagaaataatctcaaataaaacactcatgatacataagctatccttcttcactactagctagatagtgctgactagcttcttactggcaccttgttataagacacagccaaatatcaagccaatgacaagtgactgaaaagtaaccatcaacatcctttggaatctctacaccatcagtgcttaacaaatattcttacatatacatatccagtaatatgaagattacatttaaktatatttttatatatatctatttttatatatatcgagtccagagagtggtggtcaaygacttcatgtctggatggagatcagtgacaagtggtgtaccccaggggtcattgctgggaccaatactctttaaaatcttcattcatgacattgacagtggggttgagttcaccctcagcaagtttgttgaagacaccaagctgtgggggtgtggttgacacaccagagggatgggatgccatccagagggacctagacaggcttgagcagtgggttcacgtgaacctcatgaggttcaacaa

SEQ ID NO: 18364 - DNA, 600 bp, Chicken  19866894227219_2
gcacaaacgcagaaataatctcaaataaaacactcatgatacataagctatccttcttcactactagctagatagtgctgactagcttcttactggcaccttgttataagacacagccaaatatcaagccaatgacaagtgactgaaaagtaaccatcaacatcctttggaatctctacaccatcagtgcttaacaaatattcttacatatacatatccagtaatatgaagattacatttaaktatatttttatatatatctatttttatatatatcgagtccagagagtggtggtcaaygacttcatgtctggatggagatcagtgacaagtggtgtaccccaggggtcattgctgggaccaatactctttaaaatcttcattcatgacattgacagtggggttgagttcaccctcagcaagtttgttgaagacaccaagctgtgggggtgtggttgacacaccagagggatgggatgccatccagagggacctagacaggcttgagcagtgggttcacgtgaacctcatgaggttcaacaaatccaaatgcaagatcttgcactgggtcaaggcaaccctcactaccaataccagctg

SEQ ID NO: 18365 - DNA, 600 bp, Chicken  19866894227219_3
ttgacagtggggttgagttcaccctcagcaagtttgttgaagacaccaagctgtgggggtgtggttgacacaccagagggatgggatgccatccagagggacctagacaggcttgagcagtgggttcacgtgaacctcatgaggttcaacaaatccaaatgcaagatcttgcactgggtcaaggcaaccctcactaccaataccagctgagagatgaaaggattgagtgcagccctgctgaaaatgtcctgcgagtactggtggatgggaagctggacatcagccagcaatgtgccctcrcagcccagaaagccagccgtatcctgggctgtatcaacagaagtgtgaccagcaagatgaggaaggtgatcctgcccctcwactctgctctggtgacacctttacctggagtactgcatccagatgtgaagtcctcagtatgggagggacgtagacctgttggagcgtgtccagaggaggactacaaaaatgatccaagggatggaagacctattctatgaggacaggctaagggagctggggctgttcagcctggagaagagaaggttgtgaggtgacctgatagcagcctttcagtat

SEQ ID NO: 18366 - DNA, 600 bp, Chicken  19866894227219_4
tgggatgccatccagagggacctagacaggcttgagcagtgggttcacgtgaacctcatgaggttcaacaaatccaaatgcaagatcttgcactgggtcaaggcaaccctcactaccaataccagctgagagatgaaaggattgagtgcagccctgctgaaaatgtcctgcgagtactggtggatgggaagctggacatcagccagcaatgtgccctcrcagcccagaaagccagccgtatcctgggctgtatcaacagaagtgtgaccagcaagatgaggaaggtgatcctgcccctcwactctgctctggtgacacctttacctggagtactgcatccagatgtgaagtcctcagtatgggagggacgtagacctgttggagcgtgtccagaggaggactacaaaaatgatccaagggatggaagacctattctatgaggacaggctaagggagctggggctgttcagcctggagaagagaaggttgtgaggtgacctgatagcagcctttcagtatctaaagaggagctacaggaaagaaggggaaagactttagcagtgtctatggtgacagaacaaggggatatggcttcaagcc

SEQ ID NO: 18367 - DNA, 600 bp, Chicken  19866894227224_1
tccccaggcaaccagcccaacgcttcgctgccctgcccttgcacagcctcaccttgcgcctgatccgcacccacctgcaagcaatgtaagcctgttcttgctccgtgtcatctgatgattaacacgatcccatttagcaacccacggctgtaagcctgactgcaaacaaaaggtcactcaggcattcctaacgtgagatggagccaacgataacagtgaccgctttggagttccttccccatccctgccccatgtcagccagccatcaatgggaaggcgctgtggaggggctgaggaatkgtgcctggggcagaattgcaccggcgcagccggtacgtgggctggtggctgcaaaaagccttatttcctgctaccttcagaacacgcaactccattaagtcctcagaactggacttaattatgagagcaataaatttggcctagagaaaacagaatatgtgggaactgtcagtggcccgcacacggatgttataattctgtgtcaatatacccatataacaagataaatcctcattattacacacttactcttcggctggaaggagggaggcacagccaaagcattcatctgcagttggc

SEQ ID NO: 18368 - DNA, 599 bp, Chicken  19866894227225_1
  misc_feature (1)..(247): n is any nucleotide
nnnnnnnnnnnnnnnnnnnnnnnnnnnnnnnnnnnnnnnnnnnnnnnnnnnnnnnnnnnnnnnnnnnnnnnnnnnnnnnnnnnnnnnnnnnnnnnnnnnnnnnnnnnnnnnnnnnnnnnnnnnnnnnnnnnnnnnnnnnnnnnnnnnnnnnnnnnnnnnnnnnnnnnnnnnnnnnnnnnnnnnnnnnnnnnnnnnnnnnnnnnnnnnnnnnnnnnnnnnnnnnnnnnnnnnnnnnnnnnnnnnnnnntacagctggaggggctgaggctggtggtcctgcttcttgcctccaccttcagwgctcggtccgtccccagggctcctgatgttcgaggcayttctgtaagcccaggaattcctttctgtcaaataaaaacatcccatttcttycacagcatyccccatgcacatggccatcactgcatctgtttccctttgagcatccctcaggtcctttactcccagggatgtgacatctgctgtcagcgtctcatttactcctgagagcaacatcagcatgtagacccactgtatgagcaccccagcatcagccacctgccaaaaccagggctgtttgcctcgaggacatgcatggctga

SEQ ID NO: 18369 - DNA, 599 bp, Chicken  19866894227225_2
  misc_feature (1)..(209): n is any nucleotide
nnnnnnnnnnnnnnnnnnnnnnnnnnnnnnnnnnnnnnnnnnnnnnnnnnnnnnnnnnnnnnnnnnnnnnnnnnnnnnnnnnnnnnnnnnnnnnnnnnnnnnnnnnnnnnnnnnnnnnnnnnnnnnnnnnnnnnnnnnnnnnnnnnnnnnnnnnnnnnnnnnnnnnnnnnnnnnnnnnnnnnnnnnnnnnnnnnnnnnnnnnnnnnnnntacagctggaggggctgaggctggtggtcctgcttcttgcctccaccttcagwgctcggtccgtccccagggctcctgatgttcgaggcayttctgtaagcccaggaattcctttctgtcaaataaaaacatcccatttcttycacagcatyccccatgcacatggccatcactgcatctgtttccctttgagcatccctcaggtcctttactcccagggatgtgacatctgctgtcagcgtctcatttactcctgagagcaacatcagcatgtagacccactgtatgagcaccccagcatcagccacctgccaaaaccagggctgtttgcctcgaggacatgcatggctgaaactctctaatccatctcttctccaccaccagatccta

SEQ ID NO: 18370 - DNA, 599 bp, Chicken  19866894227225_3
  misc_feature (1)..(157): n is any nucleotide
nnnnnnnnnnnnnnnnnnnnnnnnnnnnnnnnnnnnnnnnnnnnnnnnnnnnnnnnnnnnnnnnnnnnnnnnnnnnnnnnnnnnnnnnnnnnnnnnnnnnnnnnnnnnnnnnnnnnnnnnnnnnnnnnnnnnnnnnnnnnnnnnnnnnnnnnnnnnntacagctggaggggctgaggctggtggtcctgcttcttgcctccaccttcagwgctcggtccgtccccagggctcctgatgttcgaggcayttctgtaagcccaggaattcctttctgtcaaataaaaacatcccatttcttycacagcatyccccatgcacatggccatcactgcatctgtttccctttgagcatccctcaggtcctttactcccagggatgtgacatctgctgtcagcgtctcatttactcctgagagcaacatcagcatgtagacccactgtatgagcaccccagcatcagccacctgccaaaaccagggctgtttgcctcgaggacatgcatggctgaaactctctaatccatctcttctccaccaccagatcctatcgcctacagcacggcatcagcttaactatgctaattaagaattaagatgtc

SEQ ID NO: 18371 - DNA, 599 bp, Chicken  19866894227225_4
  misc_feature (1)..(148): n is any nucleotide
nnnnnnnnnnnnnnnnnnnnnnnnnnnnnnnnnnnnnnnnnnnnnnnnnnnnnnnnnnnnnnnnnnnnnnnnnnnnnnnnnnnnnnnnnnnnnnnnnnnnnnnnnnnnnnnnnnnnnnnnnnnnnnnnnnnnnnnnnnnnnnnnnnnntacagctggaggggctgaggctggtggtcctgcttcttgcctccaccttcagwgctcggtccgtccccagggctcctgatgttcgaggcayttctgtaagcccaggaattcctttctgtcaaataaaaacatcccatttcttycacagcatyccccatgcacatggccatcactgcatctgtttccctttgagcatccctcaggtcctttactcccagggatgtgacatctgctgtcagcgtctcatttactcctgagagcaacatcagcatgtagacccactgtatgagcaccccagcatcagccacctgccaaaaccagggctgtttgcctcgaggacatgcatggctgaaactctctaatccatctcttctccaccaccagatcctatcgcctacagcacggcatcagcttaactatgctaattaagaattaagatgtcatttgtagc

SEQ ID NO: 18372 - DNA, 600 bp, Chicken  19866894227225_5
ggatgtgacatctgctgtcagcgtctcatttactcctgagagcaacatcagcatgtagacccactgtatgagcaccccagcatcagccacctgccaaaaccagggctgtttgcctcgaggacatgcatggctgaaactctctaatccatctcttctccaccaccagatcctatcgcctacagcacggcatcagcttaactatgctaattaagaattaagatgtcatttgtagctagcatgtggctaatatttcagattaatgaatgcctcttttcaactgcagaatgttgcctctgagtraagaggcttcaggcaatatatatatacagagagagagagagagrggaagtatttcacattacaaagtgaaatttttggagtttttcactcccgcagggatctggagtacacattgcagtcaaacacatacagcaaaatcagccatggtgcttcagagtgtttccctcttagatcaaatattttgcagttgggttttgatttcggggataggaaacgcagcaatcctgtttccaggtgagacagcagaacagccggctgctgggagcacggggggtgtgccctgtcctggaggtgtctgtg

SEQ ID NO: 18373 - DNA, 600 bp, Chicken  19866894227225_6
acatcagcatgtagacccactgtatgagcaccccagcatcagccacctgccaaaaccagggctgtttgcctcgaggacatgcatggctgaaactctctaatccatctcttctccaccaccagatcctatcgcctacagcacggcatcagcttaactatgctaattaagaattaagatgtcatttgtagctagcatgtggctaatatttcagattaatgaatgcctcttttcaactgcagaatgttgcctctgagtraagaggcttcaggcaatatatatatacagagagagagagagagrggaagtatttcacattacaaagtgaaatttttggagtttttcactcccgcagggatctggagtacacattgcagtcaaacacatacagcaaaatcagccatggtgcttcagagtgtttccctcttagatcaaatattttgcagttgggttttgatttcggggataggaaacgcagcaatcctgtttccaggtgagacagcagaacagccggctgctgggagcacggggggtgtgccctgtcctggaggtgtctgtgtggctctgggtgggtgtgcacatgcatgcacaaagaggaaagtc

SEQ ID NO: 18374 - DNA, 600 bp, Chicken  19866894227227_1
aaggtaaaaatgcttacagctgttgtttccagaaacaattcctgctcaggtctaagcctttcttgttttgaaaatattcaagaaaaaaaatattctagaaacatcaaaaaataagtatttcacaaaatgttcatgacaagttttatttgatagcctggaggcattttagtaaggaagtaaggaagtcattttaagctaggaagtcattggactaactttcctgaagtcacatctgtggaacttttgttcctttaagtcaccctttttccaaatagagatgtccgagctacctgtataagytttgaaaggaccctcmaaaacttttggaaatcccctagcaaacagatttgctatcctagggaatagctttgcttccagtgagagatagtcagaccacaagaagcctttacctttgtttggcctgtccctggagtcgtagccagttgtttttcatctcctgttgcttcatagtcagcttgtcatttatggatggattccttgtggaaaggcggaaagattccaattccaatggctgcaaagagatttatagtggggtgaatttatgccaaaaaaagcttatgttcattcctgaatttgcct

SEQ ID NO: 18375 - DNA, 600 bp, Chicken  19866894227227_2
cagctgttgtttccagaaacaattcctgctcaggtctaagcctttcttgttttgaaaatattcaagaaaaaaaatattctagaaacatcaaaaaataagtatttcacaaaatgttcatgacaagttttatttgatagcctggaggcattttagtaaggaagtaaggaagtcattttaagctaggaagtcattggactaactttcctgaagtcacatctgtggaacttttgttcctttaagtcaccctttttccaaatagagatgtccgagctacctgtataagytttgaaaggaccctcmaaaacttttggaaatcccctagcaaacagatttgctatcctagggaatagctttgcttccagtgagagatagtcagaccacaagaagcctttacctttgtttggcctgtccctggagtcgtagccagttgtttttcatctcctgttgcttcatagtcagcttgtcatttatggatggattccttgtggaaaggcggaaagattccaattccaatggctgcaaagagatttatagtggggtgaatttatgccaaaaaaagcttatgttcattcctgaatttgcctttcagagctagttcgt

SEQ ID NO: 18376 - DNA, 600 bp, Chicken  19866894227227_3
tggattccttgtggaaaggcggaaagattccaattccaatggctgcaaagagatttatagtggggtgaatttatgccaaaaaaagcttatgttcattcctgaatttgcctttcagagctagttcgttttaagattctagttttcaaaactgggtacttagattatactattaaaatttatacgttatatatgcacaaaaagtacatatggatttctgagcaatcatctaagtggagaaagatacatttgttttgtttcacacacacaaatgccagtttacaattaagaaagcaattttgsagaacagggacaaaccaagaggaaaacaaaggggtagtcataacctctattatcctaatctgactgtgataggtaacaggagccatggaggtatgacagttaacaaagcaaccagatttgcctttgtatcagaggactccaaagtcctttgtatcttgttcaacaaatagcagcatcaaaacactacttttagtgcgggcttttggttgacactgttttcattaacagcctgaacagttgtgaatactcaccaatccgggtttatatttgttatctttcttctacagctacatcaacttg

SEQ ID NO: 18377 - DNA, 579 bp, Chicken  19866894227238_1
cttcccatttgggaatagtttatttttaatgctgttctttaagtttttaattcttcatggagcctaggttagttttgaattataacatacatatttaatagcaatgatatccagggaaaaaatttctgtgttggagataatagatacaaataattagtaatatatattaaatatacgtataacaggacatacactacatatttatcatttaatattaaatagacagtaaggcattatccaaggtgatgctttccttctatgtgttttcatagctgaataggaacaaggactgaaatgctrcttcctgtaagctcctatttctttaaattttaaatatttcaattattcacaagtcagacatttcagtggtatttgctgaaaaaaggaagcttatgtggtattagctaggtattttttgaaaactgtccatgagcacatcatacagcattcataatagtaaggactgaagagacatttagcctaactgtatttctaagggctgttctgtgctctgcttctgccacattcagaccatgtgcatactgaccatatgcatacagagaatggaaatgccttttt

SEQ ID NO: 18378 - DNA, 600 bp, Chicken  19866894227240_1
ctctacaaaccggtgagacgtcaaaagatacgattagcgtggattacgcactttggtattttccaccactgtcccacaggcacaacgaaggcagcacagaaggtgactgtcacatcgcatacggagcgacggttcagcgctgcgccttccccaccacggtcctgaggcagctggagaagcaccgtttgggacaaggtttgtaaaaataattatgataaatggtgactcgaagggagaagtacggtcaagtcactgatttctccctgctgctcgccttccctctgacgaacgccgctttasaaaagcacaaaaatctataggacatacgcccgtttccccagggaagcacgcttaatcatacaggtagtgtaaatatcagatgctgctgcaggtgctaggcgtctatttgtttgtgtttactaaaaggcataacaaatagtcacactaaagcagaacatttggcaatggaatgacagacaccagagcagccataaatcacgctctctcgctcattcccgaaccattgcacaacaccaagcagtcggttccccgttctgggagggcccatgtgctgcactttgtccctcttaggggcagcca

SEQ ID NO: 18379 - DNA, 600 bp, Chicken  19866894227240_2
aaatatcagatgctgctgcaggtgctaggcgtctatttgtttgtgtttactaaaaggcataacaaatagtcacactaaagcagaacatttggcaatggaatgacagacaccagagcagccataaatcacgctctctcgctcattcccgaaccattgcacaacaccaagcagtcggttccccgttctgggagggcccatgtgctgcactttgtccctcttaggggcagccaccagcagcatccgccccgagcacagcacagccaggaaacatgtgcccccaaatgaaaaagtaataagaaraagaggtaagacacacagccagctaacatcgtttacagctttgcaacttctgagttaattcatggtataaacaaggacgaaaatgtttcttccgagcaagacttcctgtaaactgttcattaragcggggctgggagcagggctggtgcacctgctgattaaccatgcgctccaagaataaacacaaactgcagccagcaagattgttctggaattcgctcagagctgattttttttcccccacgttataaattggatcctaccataaaacaaacagcagaacataggttgccgagagtt

SEQ ID NO: 18380 - DNA, 600 bp, Chicken  19866894227240_3
aatcacgctctctcgctcattcccgaaccattgcacaacaccaagcagtcggttccccgttctgggagggcccatgtgctgcactttgtccctcttaggggcagccaccagcagcatccgccccgagcacagcacagccaggaaacatgtgcccccaaatgaaaaagtaataagaaraagaggtaagacacacagccagctaacatcgtttacagctttgcaacttctgagttaattcatggtataaacaaggacgaaaatgtttcttccgagcaagacttcctgtaaactgttcattaragcggggctgggagcagggctggtgcacctgctgattaaccatgcgctccaagaataaacacaaactgcagccagcaagattgttctggaattcgctcagagctgattttttttcccccacgttataaattggatcctaccataaaacaaacagcagaacataggttgccgagagttaaaatctactttttacactacattgaccacagcacccacaggcacagctacaatgtctttctatgaatgggacagattgccatatggatgcagacactgaacaagctgtacaactcctggcga

SEQ ID NO: 18381 - DNA, 600 bp, Chicken  19866894227240_4
tgggggactgtcctatattagcaccacctgtgctgtggaaattgtgctctgtgtatgaaatggtatttaagggcccatcacgatgttatttttgagtacacacaaaaaggaaaaatcacagttaaaagaattctctggccggcggatctgttgctcagctcccgagaccgtttcccaaaggaacagttatctcctgtattcacacagcccaaaaccgcgagctgcgatacgtattagcagctcccctgcccgggctcataccactgctttaatgagaggaatacaccgtgcagtcagcayacgccttccttgagcacaaggaagaaagcagagccccctacacctcaccggcaccggcagcatggagaagtacctgatggtgctatacaaatgaaagcaaygcaatgccatttccctccaagcgcagcaggaagagctgcacatccccagcaccaaatttcaatgcatcctcgctgtgctggaaatacgagtctgtctgagggtcaaaaatagagctctggattagcacgggatctccagggaggagggaaaggggtctgagcagtgcccagatgctcggcagggagatctcccctctcc

SEQ ID NO: 18382 - DNA, 600 bp, Chicken  19866894227240_5
acaaaaaggaaaaatcacagttaaaagaattctctggccggcggatctgttgctcagctcccgagaccgtttcccaaaggaacagttatctcctgtattcacacagcccaaaaccgcgagctgcgatacgtattagcagctcccctgcccgggctcataccactgctttaatgagaggaatacaccgtgcagtcagcayacgccttccttgagcacaaggaagaaagcagagccccctacacctcaccggcaccggcagcatggagaagtacctgatggtgctatacaaatgaaagcaaygcaatgccatttccctccaagcgcagcaggaagagctgcacatccccagcaccaaatttcaatgcatcctcgctgtgctggaaatacgagtctgtctgagggtcaaaaatagagctctggattagcacgggatctccagggaggagggaaaggggtctgagcagtgcccagatgctcggcagggagatctcccctctccaaactgtaagaaaaaaagggatgccaagaaaaagaaaagtaaaataaattgaattaaagaaaaacagttgtaaagtgaacattacaacctggggaaaatga

SEQ ID NO: 18383 - DNA, 599 bp, Chicken  19866894227246_1
  misc_feature (1)..(143): n is any nucleotide
nnnnnnnnnnnnnnnnnnnnnnnnnnnnnnnnnnnnnnnnnnnnnnnnnnnnnnnnnnnnnnnnnnnnnnnnnnnnnnnnnnnnnnnnnnnnnnnnnnnnnnnnnnnnnnnnnnnnnnnnnnnnnnnnnnnnnnnnnnnnnnntgtgtttttctgtctaaattcctgtaccgtgtattaatatctgcatcttttcttgaccttgtagatctggcagtgtggaggaaaactgctgtttgtcccttgttctcgtgttggacatatctaccgtctccagggctggcaaggaaatccgcccccygtgtatgttgggtcttctcctacactgaaggtactggtttgctgcaaccctgaaggtcttctgatgcaagatagcaacagattcgaataagtgtatttaaattatcagtagcaatttaaagagcacttcattcaaaggtgtttattgtctgaagctgagatgttcatctacatgggtgggaaatctttgtggcaaccccactgtttgtaagaacagacactcctggaacccagcttctttcttcacccttccccagcacggaggtacaaattatatttcctaccactttctctctaccc

SEQ ID NO: 18384 - DNA, 600 bp, Chicken  19866894227247_1
ggacttcaacctcctactgatgttgttagctctcctgtcctcctttgcttccagaggacagcagcgcaccctcagtgtacaatctcctctttcctacagcagcctctagtgcaagcaccagactacaaaagggacatatgtgaaacacactttctttgcttcacctcctgaaagtgaggtcaggaccctgacagagcaaacatccacctccttgcttctccctaatgctcctgaaggctctgcaatgttcttgatggtctcagtactgccaggcctgagaaaacccagatccctcccacrgagtgtagccacaggaaaaccaccacaggccactgcagtcttctttaagaaagaagggaatacagtagagaagaggagcatttgatatacgtaggtagagatagtaatgctgtcaactgcacttaaagttgttgctctccagagctgtgcaagaaagaataggctgctcagctgaagccttaacttaaacaaagcagaggagttggattagcatacacaaacagcccactgtttgaaacaacatcaaaatacagtcttggactgacagcacaggcagcagggtctaaagtctgtttatgt

SEQ ID NO: 18385 - DNA, 600 bp, Chicken  19866894227249_1
acagcaattcagcgactatgcttataaggataaattatcagaatgttttgtgtaattacttcttcaagtcagaatcactgaattgttaaggctgaaaaagtcctttctatgatcatgaaggtccaaccccaacccaccccaccatgtccactgcccacacccctcagtgccacatctccatggttctggagcactgtgccactgcagcactcctcttaatgagaagaaatgtttcctaacaccaacctgtgtcagcatgtgtagctggagcaggaggggcctggccctgtgactggctgragtcggacctgtggcccaatgaggactggaacttctcctgcactgtcggcatagcctagccgtgctctgtgtgctgacagccacggtctgctgagtgaagaggctgctcctgccccacgtgctcactctgtgaatggtttacaggcctgttcagctcggttccatggctaatggggcggggggargcatggacctcacacctcgggaaagggaaagggtagggagatgggagatggacctaaaaacaaaacagcagcaacaatctgagaaggaaagctaatgtactaaataagatatcgg

SEQ ID NO: 18386 - DNA, 442 bp, Chicken  19866894227249_2
ctggagcactgtgccactgcagcactcctcttaatgagaagaaatgtttcctaacaccaacctgtgtcagcatgtgtagctggagcaggaggggcctggccctgtgactggctgragtcggacctgtggcccaatgaggactggaacttctcctgcactgtcggcatagcctagccgtgctctgtgtgctgacagccacggtctgctgagtgaagaggctgctcctgccccacgtgctcactctgtgaatggtttacaggcctgttcagctcggttccatggctaatggggcggggggargcatggacctcacacctcgggaaagggaaagggtagggagatgggagatggacctaaaaacaaaacagcagcaacaatctgagaaggaaagctaatgtactaaataagatatcggaatgcaagataacataataccatatga

SEQ ID NO: 18387 - DNA, 470 bp, Chicken  19866894227257_1
taatactaatgtggtggctatactgataaaaataatgttcaagttattgtaagagtcaggataagaggttaacatccagaaagagttatgagaaaagagctatgattagaccagacagattggtcaggaaaagcatgtgacttagagcactgtaacgagcacccttagcaaagaagtcacacttctccatattaacacaggttttctgctatcagtcccaagcttttctgtgtcattcttcagggaacacagaaatgctaaaatctcaagtctgttcatgtagtgaaaactcaatagcayaattyccaagagagattataccacaaggatcagtataggttagtataactgaatacacttgcrgcrctgttccttcacaatcagtccctctgatttcatgtagcaaaattagcattatcttataatatccagagtttaccgaaggcaaaggaagctgttttctacaatgt

SEQ ID NO: 18388 - DNA, 465 bp, Chicken  19866894227257_2
ctaatgtggtggctatactgataaaaataatgttcaagttattgtaagagtcaggataagaggttaacatccagaaagagttatgagaaaagagctatgattagaccagacagattggtcaggaaaagcatgtgacttagagcactgtaacgagcacccttagcaaagaagtcacacttctccatattaacacaggttttctgctatcagtcccaagcttttctgtgtcattcttcagggaacacagaaatgctaaaatctcaagtctgttcatgtagtgaaaactcaatagcayaattyccaagagagattataccacaaggatcagtataggttagtataactgaatacacttgcrgcrctgttccttcacaatcagtccctctgatttcatgtagcaaaattagcattatcttataatatccagagtttaccgaaggcaaaggaagctgttttctacaatgt

SEQ ID NO: 18389 - DNA, 407 bp, Chicken  19866894227257_3
agaggttaacatccagaaagagttatgagaaaagagctatgattagaccagacagattggtcaggaaaagcatgtgacttagagcactgtaacgagcacccttagcaaagaagtcacacttctccatattaacacaggttttctgctatcagtcccaagcttttctgtgtcattcttcagggaacacagaaatgctaaaatctcaagtctgttcatgtagtgaaaactcaatagcayaattyccaagagagattataccacaaggatcagtataggttagtataactgaatacacttgcrgcrctgttccttcacaatcagtccctctgatttcatgtagcaaaattagcattatcttataatatccagagtttaccgaaggcaaaggaagctgttttctacaatgt

SEQ ID NO: 18390 - DNA, 404 bp, Chicken  19866894227257_4
ggttaacatccagaaagagttatgagaaaagagctatgattagaccagacagattggtcaggaaaagcatgtgacttagagcactgtaacgagcacccttagcaaagaagtcacacttctccatattaacacaggttttctgctatcagtcccaagcttttctgtgtcattcttcagggaacacagaaatgctaaaatctcaagtctgttcatgtagtgaaaactcaatagcayaattyccaagagagattataccacaaggatcagtataggttagtataactgaatacacttgcrgcrctgttccttcacaatcagtccctctgatttcatgtagcaaaattagcattatcttataatatccagagtttaccgaaggcaaaggaagctgttttctacaatgt

SEQ ID NO: 18391 - DNA, 599 bp, Chicken  19866894227258_1
  misc_feature (1)..(146): n is any nucleotide
nnnnnnnnnnnnnnnnnnnnnnnnnnnnnnnnnnnnnnnnnnnnnnnnnnnnnnnnnnnnnnnnnnnnnnnnnnnnnnnnnnnnnnnnnnnnnnnnnnnnnnnnnnnnnnnnnnnnnnnnnnnnnnnnnnnnnnnnnnnnnnnnnntcctcatagacctacggcgggcagcgggtcggggtggcactgggggcggaggggtgcttcacccatttggggacacgggggtctgcacgggtcctctccgtccccgccgcgccccagctgccccctccccacactcaccttcgcatcaggcccygcactcaggggacattgcccatcaatggtggcggggggcttctccctgggggctgtcttcagggcggtgagcgcggagctccaggcatcctcctcctcctcctgcccccccttggctttcttgcccccgtcagcgggctgggatgcggggggtgctcggcgtttgggggccatggggcagctgttgcccccgtagggcttcagcctccgagcagcaggctgtgggagaccgagatgccgggtygcccttccgggaaggtccggctgggctgtgccttggctgccttacgcctacagcca

SEQ ID NO: 18392 - DNA, 600 bp, Chicken  19866894227258_2
ccgtccccgccgcgccccagctgccccctccccacactcaccttcgcatcaggcccygcactcaggggacattgcccatcaatggtggcggggggcttctccctgggggctgtcttcagggcggtgagcgcggagctccaggcatcctcctcctcctcctgcccccccttggctttcttgcccccgtcagcgggctgggatgcggggggtgctcggcgtttgggggccatggggcagctgttgcccccgtagggcttcagcctccgagcagcaggctgtgggagaccgagatgccgggtygcccttccgggaaggtccggctgggctgtgccttggctgccttacgcctacagccaggaaccgggagggagggagggagcatggggatctgtcgtggggggagctgagcagggcaaggcttggggctggggggcagcatgaggaacgaggagaggggagcggtacagctggcagccattgccaaagttcctccccgagcaaaagcacgcagcggccggggacaggaaattgcaagcgggcacacacccccgggcagcagctccctcactgccgtacagaaaacagccttcaaagagctca

SEQ ID NO: 18393 - DNA, 599 bp, Chicken  19866894227259_1
  misc_feature (1)..(111): n is any nucleotide
nnnnnnnnnnnnnnnnnnnnnnnnnnnnnnnnnnnnnnnnnnnnnnnnnnnnnnnnnnnnnnnnnnnnnnnnnnnnnnnnnnnnnnnnnnnnnnnnnnnnnnnnnnnnnnnagagaacagcctgctggagccagagcctgctggcttcttgctgcatggaactggggtgctggtggccctgagtgccacaagtgctacagacagggccccaactcctctgcctggggacagcaagctgggcttctggccccatctcccacgtggggctccacagtgctccactcattgctttcccctcargtccctcaagccagcacaaaatgttggcctcagggctgcagtgactaagaacaagtaagtaattatgcatggtgaaagaggggatgctcacttagaaaagcgattatatttccatatggctttatggaaactctggtggtgatggtgattaagaccccagcttgcacgaacagtcaaatgcaaacagactgtgagatatttccaggacattttcccatttgaagagcgtaagtctcttcttgtgtctctgctgtagtgccccatccacaaggcttcaggatttgggctgagcaagtggg

SEQ ID NO: 18394 - DNA, 600 bp, Chicken  19866894227263_1
actaagtagtatcgtgaacatcttttctctctctcattgagaggcacactactctcccaatttaggcactttttgttaactagcttcaaagtattatgtgcaaaatctctactcacactttgatgccttcttgctgtcttactaggtagccaactttattccagaatggaaaagacttctatgttgcattgtctgaacatgaatacagacaaatccatgcaatgcaaagtgagaacacagtgtggatttaatttcagtttttaaacatttagcttctagactgcagaatatcattctgcmgaaagaattcctgatgactggacattatctactggctcctcgtcaccagtgatcctagtggggatggtgcctttgcctccagagacctgcagtcccacaccattgtgttgcagcttccagacacagattccattcaaaagaaggtgaaggcagggaacaccatctaacatatgtaccttgtgtgatttgtcatagtcagaaagaaatcattttcttgtgataactcaggcagattctcttgaaattgcacttctgacaatacttgaaagctgtgtaawctttagggactctgtggggttt

SEQ ID NO: 18395 - DNA, 600 bp, Chicken  19866894227263_2
gactgcagaatatcattctgcmgaaagaattcctgatgactggacattatctactggctcctcgtcaccagtgatcctagtggggatggtgcctttgcctccagagacctgcagtcccacaccattgtgttgcagcttccagacacagattccattcaaaagaaggtgaaggcagggaacaccatctaacatatgtaccttgtgtgatttgtcatagtcagaaagaaatcattttcttgtgataactcaggcagattctcttgaaattgcacttctgacaatacttgaaagctgtgtaawctttagggactctgtggggtttagctttctttagtaatgttgtctggctgaatgcatagcaaagtcaaagggaactgtaaaaggaatggctgcagaacttaacgggaaaggtgaaacaatggccttagagaagagctgcaggttcccaacttcaaagaggttcagataacaatggctaggccattaagtgatgggaagcatttgcatgtctggctccatctcacttgggatcaaaagacagaaaaacctcaaagacccttgaaaagggaggggacttggttgaatcgggagagtgcccag

SEQ ID NO: 18396 - DNA, 570 bp, Chicken  19866894227263_3
tttagtaatgttgtctggctgaatgcatagcaaagtcaaagggaactgtaaaaggaatggctgcagaacttaacgggaaaggtgaaacaatggccttagagaagagctgcaggttcccaacttcaaagaggttcagataacaatggctaggccattaagtgatgggaagcatttgcatgtctggctccatctcacttgggatcaaaagacagaaaaacctcaaagacccttgaaaagggaggggacttggttgaatcgggagagtgcccagactgtgtcagtgaaaaaatgctgggtggrttccctcctcccacattaaaggagggaacaggccatgtcttttgacacagaaattgggaataaaacaggccttcctttagacagaatagagaaaacttgttaaattaatgtgggtagcataatttgaaaaataattttcctagtgctgcattccttctggcgaaaacaaacaaacaaataaaaaaccaaaaacaaaacaagtgcttctctttccattacaaatattttccttatcactgtagaagatattcacactccaggaagagggct

SEQ ID NO: 18397 - DNA, 600 bp, Chicken  19866894227264_1
ggctgaatgctgaataaatacattggaagtatgtctaatatattggcctgagtaggtgataggattcaactggtcaagtatataacaaatatttaatgttagtgggtgctttgttaattttctcaaattcgagttctctttggtatttctggaactactaataccactcagattgtttgtttgattgagttttgtcccttgcaccaacatgttgtgactaaaattcaagcttgtttttctatttttttttttttttttttttggccacagtatctctaccctttctcagtctatttactkgaggctgttccaagctyratgtttatggccataaaagctgcattatcttagcrcaaggtattcataatactgatcagaagaaataggcaaatagcattaaaactacagacagactcatgtaagtatctgtactgtcaaagattttttttccaatcttttrgatttttcaaatattcatttacgtattgtttataaaagagtatcagctattattgctagcatgcgtttcactttttataaactgaagatatgatttaaagaagaaagcagtgcttgtgtggaaactatgccataaactgt

SEQ ID NO: 18398 - DNA, 600 bp, Chicken  19866894227264_2
atacattggaagtatgtctaatatattggcctgagtaggtgataggattcaactggtcaagtatataacaaatatttaatgttagtgggtgctttgttaattttctcaaattcgagttctctttggtatttctggaactactaataccactcagattgtttgtttgattgagttttgtcccttgcaccaacatgttgtgactaaaattcaagcttgtttttctatttttttttttttttttttttggccacagtatctctaccctttctcagtctatttactkgaggctgttccaagctyratgtttatggccataaaagctgcattatcttagcrcaaggtattcataatactgatcagaagaaataggcaaatagcattaaaactacagacagactcatgtaagtatctgtactgtcaaagattttttttccaatcttttrgatttttcaaatattcatttacgtattgtttataaaagagtatcagctattattgctagcatgcgtttcactttttataaactgaagatatgatttaaagaagaaagcagtgcttgtgtggaaactatgccataaactgtttttcaatatggagagt

SEQ ID NO: 18399 - DNA, 600 bp, Chicken  19866894227264_3
tacattggaagtatgtctaatatattggcctgagtaggtgataggattcaactggtcaagtatataacaaatatttaatgttagtgggtgctttgttaattttctcaaattcgagttctctttggtatttctggaactactaataccactcagattgtttgtttgattgagttttgtcccttgcaccaacatgttgtgactaaaattcaagcttgtttttctatttttttttttttttttttttggccacagtatctctaccctttctcagtctatttactkgaggctgttccaagctyratgtttatggccataaaagctgcattatcttagcrcaaggtattcataatactgatcagaagaaataggcaaatagcattaaaactacagacagactcatgtaagtatctgtactgtcaaagattttttttccaatcttttrgatttttcaaatattcatttacgtattgtttataaaagagtatcagctattattgctagcatgcgtttcactttttataaactgaagatatgatttaaagaagaaagcagtgcttgtgtggaaactatgccataaactgtttttcaatatggagagtg

SEQ ID NO: 18400 - DNA, 600 bp, Chicken  19866894227264_4
aggtgataggattcaactggtcaagtatataacaaatatttaatgttagtgggtgctttgttaattttctcaaattcgagttctctttggtatttctggaactactaataccactcagattgtttgtttgattgagttttgtcccttgcaccaacatgttgtgactaaaattcaagcttgtttttctatttttttttttttttttttttggccacagtatctctaccctttctcagtctatttactkgaggctgttccaagctyratgtttatggccataaaagctgcattatcttagcrcaaggtattcataatactgatcagaagaaataggcaaatagcattaaaactacagacagactcatgtaagtatctgtactgtcaaagattttttttccaatcttttrgatttttcaaatattcatttacgtattgtttataaaagagtatcagctattattgctagcatgcgtttcactttttataaactgaagatatgatttaaagaagaaagcagtgcttgtgtggaaactatgccataaactgtttttcaatatggagagtgtgaacaggaaatatccagattgttgtggaacatag

SEQ ID NO: 18401 - DNA, 600 bp, Chicken  19866894227264_5
ataccactcagattgtttgtttgattgagttttgtcccttgcaccaacatgttgtgactaaaattcaagcttgtttttctatttttttttttttttttttttggccacagtatctctaccctttctcagtctatttactkgaggctgttccaagctyratgtttatggccataaaagctgcattatcttagcrcaaggtattcataatactgatcagaagaaataggcaaatagcattaaaactacagacagactcatgtaagtatctgtactgtcaaagattttttttccaatcttttrgatttttcaaatattcatttacgtattgtttataaaagagtatcagctattattgctagcatgcgtttcactttttataaactgaagatatgatttaaagaagaaagcagtgcttgtgtggaaactatgccataaactgtttttcaatatggagagtgtgaacaggaaatatccagattgttgtggaacatagcaatttttgaagcctagaaaaattaggaccaaaatctgaggctcttaactactaactgttgaactcagctagcaaatcaagccagagtggagatggatactcataac

SEQ ID NO: 18402 - DNA, 600 bp, Chicken  19866894227269_1
aatgtttagctttgttcccttaacttgaagtagaatacaggtattttaaaaatgctttctgattctgtgttttgtggaaacgagtgcccttgacttactgaagaaagatgctgagaatgtgctgtactttaagtgctcagctgtttgttcaaccaagacctgctgcttgaagaggcatgtgaaagtatgaaaccaagtgtcatactgcctaaagcaaggtggaattggaggcagtaactgttatgactagaatgataattgagctagattcccattgttagtaaagtgcatacatgtgcygtcggtacaaggaaaaagaaactggagaacttatcccaggtgtcttgggttagactgagaataaaatatcactaggaaatgatttttcatgaagacaagcagcttgaccaattgtctgttctattctacaggcttctcccacagaccttgtttgcattaaaacatcaccgcttgttctatactgtatgttgagagccctatcctcacaaacagctgagagcgctgcctctgtggaactgcactgcgtcttctactcatacccacttcttgcaattacttaagggtttctgatagtcatgt

SEQ ID NO: 18403 - DNA, 600 bp, Chicken  19866894227270_1
tttccagaagaaagcacagtccagaaacaacagggtttgctattcataatcactgtgtttgttttcaaagacagagctttttctcatgataaacaataggagtacaggtatggcatacctgcctgcctacacatcatccccacttgctaagtcatctgctacctgatgggttagagctgcactcgtgttccaaatgagcaaactgactgctggtagaagagtgatcaggcaggagtgaacaatttgctttttgttacctgtgattccaaaggcaatgtttgcatgttcaaagtctgtatygggcagaataatgctgcgctgtggcaggttcaggatagctgcagtcacctccactgcatgcacagtgctgcgcagagaattcttcccatgtgacgtagagccaaagtgataaaacttctcaagtgaatctctacgatcataattaagaggatgttgtattttaactttctaatgacttttgctatgaatatcttaaactcttgaaattaacggtaaaatatgttcatttaaaaaccagaattattaataaccttactgtttgcaaagatgttgcttaatatacagtatatttatgaagag

SEQ ID NO: 18404 - DNA, 600 bp, Chicken  19866894227270_2
cgcagagaattcttcccatgtgacgtagagccaaagtgataaaacttctcaagtgaatctctacgatcataattaagaggatgttgtattttaactttctaatgacttttgctatgaatatcttaaactcttgaaattaacggtaaaatatgttcatttaaaaaccagaattattaataaccttactgtttgcaaagatgttgcttaatatacagtatatttatgaagagcaagttcccaagagccttgtgttgctgttgtaacacttttctttacaattgcatactctacacaataagyctgggcttaaagaacttccgccttctacggcaccccagactcatgccactgtgtcatgtgaagccatggacatttagccttggctgcctgcctgagaattgctctcagaatgccaccagtatttcttctgctgacaccatcagtgaaggaaggcacagcagaagagtgcatattcagtaacattaaattccaaggacaaacagatctgtatgtgacttgggctggattttgcctgagcaggaaaatgtgcctctcaaaggtgtaacagacaatttctcatgtgagttgctcttacgtatg

SEQ ID NO: 18405 - DNA, 600 bp, Chicken  19866894227270_3
gtaggatttgacagtaaggaaaacatcagtagagttaaactcaatcaggagctggtctgcatcgtgactcctaggtcatgaaagaaatgcgcttcaagttgtttcagaagaattctaaacattagaaaactttactgaaagcagaattattccctagcacacagactggcttggagaggaccatgatgaaggcaaccaggcagcaatacagacagccatatagcaactttaacaaatgctacagcaactctcatagttttgttttgtttgttttgttttgtttttctttctttttttttktctggatttgttgytatatcatagagaaacaatctttaaaggtctatgaagatcaggtctttaaaggtctatgaaattcatttagggctgagctctttgacatgccaactcaaatgccagtcacttggagtttcttttgtcatggacatcaaaatgtgagatcactgcaagaaagacagtgatggcctggagcgtgtccagagaagggcggcggagctgtgaggggtctggagcacagtgtgatggggagcggctgaggaaccggggatgttcagtctggagaagaggaggctcagggga

SEQ ID NO: 18406 - DNA, 600 bp, Chicken  19866894227270_4
taaggaaaacatcagtagagttaaactcaatcaggagctggtctgcatcgtgactcctaggtcatgaaagaaatgcgcttcaagttgtttcagaagaattctaaacattagaaaactttactgaaagcagaattattccctagcacacagactggcttggagaggaccatgatgaaggcaaccaggcagcaatacagacagccatatagcaactttaacaaatgctacagcaactctcatagttttgttttgtttgttttgttttgtttttctttctttttttttktctggatttgttgytatatcatagagaaacaatctttaaaggtctatgaagatcaggtctttaaaggtctatgaaattcatttagggctgagctctttgacatgccaactcaaatgccagtcacttggagtttcttttgtcatggacatcaaaatgtgagatcactgcaagaaagacagtgatggcctggagcgtgtccagagaagggcggcggagctgtgaggggtctggagcacagtgtgatggggagcggctgaggaaccggggatgttcagtctggagaagaggaggctcaggggagacttcaccattct

SEQ ID NO: 18407 - DNA, 600 bp, Chicken  19866894227270_5
tctatgaaattcatttagggctgagctctttgacatgccaactcaaatgccagtcacttggagtttcttttgtcatggacatcaaaatgtgagatcactgcaagaaagacagtgatggcctggagcgtgtccagagaagggcggcggagctgtgaggggtctggagcacagtgtgatggggagcggctgaggaaccggggatgttcagtctggagaagaggaggctcaggggagacttcaccattctctgcaactatctgaaaggaggttgtagcaaggtggggatcaatctcttctccwaagttactagacataggatgagaagtaatggtctcacgttgtgccaggggaggttcaggttggatattaggaacaatttcttctcagatagaggcactggcacaggcttcccagggaggtggtagagtcactgtccccggaggtgttcaggaaacaaggagatgtttctgagggatgtggtttagtgggcatagtggagatggtttggtggttggaattggtgatcctagtggtcttctccaacttaaatgtttgtatgaatagttttcaccagaggtcatctttttaatactgactttc

SEQ ID NO: 18408 - DNA, 600 bp, Chicken  19866894227275_1
cacctatttaaattttaattcctaaggagacacaaacagacttaaacttgtttttgttaagtctgggaacacagcctgaccttaattttatatctggaatgggacctagactatatttcatagagctttgcaaaaaagattctgtgaaaaatataaactccttgataggaacatggcaagtggcctctaataacaacctgaacaccaacattatttcattggatccctgctccccttcataattattggtagatttgcttttctgcacagaagtcatattcttcaagttgcataataagwaaaaaaaatattcagtgaagacttgcacaattaattawttattttttctttaattgctgtggagtcactgatcaaattttacagtcacaaaggaccataaggctatgttgcaaacaagactcattcmaaaatgaaagaagtagcaaaattgaaaaggtatttttctatgcctctatcgtatttgaaccctcacttccaaaaggccttagtagagcctcagtcaacttttacctgtccatttgtactagatgstaaatggggccaggtgctacactagtagcattctactctgtgtatata

SEQ ID NO: 18409 - DNA, 600 bp, Chicken  19866894227275_2
gacttaaacttgtttttgttaagtctgggaacacagcctgaccttaattttatatctggaatgggacctagactatatttcatagagctttgcaaaaaagattctgtgaaaaatataaactccttgataggaacatggcaagtggcctctaataacaacctgaacaccaacattatttcattggatccctgctccccttcataattattggtagatttgcttttctgcacagaagtcatattcttcaagttgcataataagaaaaaaaaatattcagtgaagacttgcacaattaattawttattttttctttaattgctgtggagtcactgatcaaattttacagtcacaaaggaccataaggctatgttgcaaacaagactcattcmaaaatgaaagaagtagcaaaattgaaaaggtatttttctatgcctctatcgtatttgaaccctcacttccaaaaggccttagtagagcctcagtcaacttttacctgtccatttgtactagatgstaaatggggccaggtgctacactagtagcattctactctgtgtatatactgctgtgcactcaaattcttaagctacagragctggt

SEQ ID NO: 18410 - DNA, 600 bp, Chicken  19866894227275_3
ttgcaaaaaagattctgtgaaaaatataaactccttgataggaacatggcaagtggcctctaataacaacctgaacaccaacattatttcattggatccctgctccccttcataattattggtagatttgcttttctgcacagaagtcatattcttcaagttgcataataagaaaaaaaaatattcagtgaagacttgcacaattaattawttattttttctttaattgctgtggagtcactgatcaaattttacagtcacaaaggaccataaggctatgttgcaaacaagactcattcmaaaatgaaagaagtagcaaaattgaaaaggtatttttctatgcctctatcgtatttgaaccctcacttccaaaaggccttagtagagcctcagtcaacttttacctgtccatttgtactagatgstaaatggggccaggtgctacactagtagcattctactctgtgtatatactgctgtgcactcaaattcttaagctacagragctggtgcactgtaatcaccttagtctaataatgaagagacttaaatctaatctctgacaatatctaatatttgaatttttactttggatacaga

SEQ ID NO: 18411 - DNA, 600 bp, Chicken  19866894227275_4
atttgcttttctgcacagaagtcatattcttcaagttgcataataagaaaaaaaaatattcagtgaagacttgcacaattaattawttattttttctttaattgctgtggagtcactgatcaaattttacagtcacaaaggaccataaggctatgttgcaaacaagactcattcmaaaatgaaagaagtagcaaaattgaaaaggtatttttctatgcctctatcgtatttgaaccctcacttccaaaaggccttagtagagcctcagtcaacttttacctgtccatttgtactagatgstaaatggggccaggtgctacactagtagcattctactctgtgtatatactgctgtgcactcaaattcttaagctacagragctggtgcactgtaatcaccttagtctaataatgaagagacttaaatctaatctctgacaatatctaatatttgaatttttactttggatacagagcttttatcttctaggggctccttgttcttaactgttcataagatctgcactctgttctgataggggagatcactcatgactttctcaacagtacaataaagcaaagaacaagttttgatgaata

SEQ ID NO: 18412 - DNA, 600 bp, Chicken  19866894227275_5
taattawttattttttctttaattgctgtggagtcactgatcaaattttacagtcacaaaggaccataaggctatgttgcaaacaagactcattcmaaaatgaaagaagtagcaaaattgaaaaggtatttttctatgcctctatcgtatttgaaccctcacttccaaaaggccttagtagagcctcagtcaacttttacctgtccatttgtactagatgstaaatggggccaggtgctacactagtagcattctactctgtgtatatactgctgtgcactcaaattcttaagctacagragctggtgcactgtaatcaccttagtctaataatgaagagacttaaatctaatctctgacaatatctaatatttgaatttttactttggatacagagcttttatcttctaggggctccttgttcttaactgttcataagatctgcactctgttctgataggggagatcactcatgactttctcaacagtacaataaagcaaagaacaagttttgatgaataagcttcagactgccgcactgccttacactgctataattatagagttataaagggaaatagagtctctctagatttgctc

SEQ ID NO: 18413 - DNA, 600 bp, Chicken  19866894227277_1
aggcattggtcttttttattactgttgatgaaagtgggtggtttgctgccaattacaatatgtttcgtttacaaaacctcatattcagactattgattagtcacacgtaccaagatactctgatatttgaaggcttctgtatgtccatcccttgtcctggaagccaactgaaaactcccagtggttggtccattaccagcaatgctgaatttcaaactatgctctgttgttctttgaagctgtatcttcctttgactgctatagtatctaaaatgaaaactgggagaatgatacttactktgatacccaaccaatctatagcttcaaagattaaagattaagtagattttcctttgaaaattagcctatgaatgatgcctatattattgaaaataacatccttctcgctttcttccaggactagtctttttcctcctatctcagaaaaggtttccaaacatcaagaattctacattccaagttccattgaaataatttatggaactagtttgaatgcttgttttctgaacattcctcattttccctgccttgtaaggatgttaccatgtcccttattctttcaggataatccaaagagct

SEQ ID NO: 18414 - DNA, 600 bp, Chicken  19866894227278_1
aaaaatatttttagttctttagttcttatgcactgcttgaggattatttcacagttttcttgtggaactgttgaactttgtgaggaatcccagaattaataaactatgtagaaatatgtagaaaccgtactgtagatccactatttgtgtgttggaatgtgactgtttaccttgcacttctgcctaagttagactcttgccactgctgtcaataaatgtttcacatctcctttccatcatttataaagaaccattcaggtgaaaggtgatgtatgtacactggtgtcacagtggttactkctagattgtgcttaattgtaaactgtataatcaccgaatcccagaaagccaacagaatatctctgamtgagctacagaagcacatgagctaytatgatatgcagaccctcagcctgcagaatgcagaaagcagcagagctatgactgcctgtctatgcagttgtggaagtagatgtttgtatcagtgctgatatcactgtttcctgagctgattggtmtccttgctgtaggagctgaaaggatccagtctgttctcagcgagaattgtcaagaattcagatgtgttagggtctatatatt

SEQ ID NO: 18415 - DNA, 600 bp, Chicken  19866894227278_2
ctgttgaactttgtgaggaatcccagaattaataaactatgtagaaatatgtagaaaccgtactgtagatccactatttgtgtgttggaatgtgactgtttaccttgcacttctgcctaagttagactcttgccactgctgtcaataaatgtttcacatctcctttccatcatttataaagaaccattcaggtgaaaggtgatgtatgtacactggtgtcacagtggttactkctagattgtgcttaattgtaaactgtataatcaccgaatcccagaaagccaacagaatatctctgamtgagctacagaagcacatgagctaytatgatatgcagaccctcagcctgcagaatgcagaaagcagcagagctatgactgcctgtctatgcagttgtggaagtagatgtttgtatcagtgctgatatcactgtttcctgagctgattggtmtccttgctgtaggagctgaaaggatccagtctgttctcagcgagaattgtcaagaattcagatgtgttagggtctatatatttcataggtggatgcttgatagtaatgcaaaaccatcttattttattaatgatagagtatggaggagt

SEQ ID NO: 18416 - DNA, 600 bp, Chicken  19866894227278_3
gaattaataaactatgtagaaatatgtagaaaccgtactgtagatccactatttgtgtgttggaatgtgactgtttaccttgcacttctgcctaagttagactcttgccactgctgtcaataaatgtttcacatctcctttccatcatttataaagaaccattcaggtgaaaggtgatgtatgtacactggtgtcacagtggttactkctagattgtgcttaattgtaaactgtataatcaccgaatcccagaaagccaacagaatatctctgamtgagctacagaagcacatgagctaytatgatatgcagaccctcagcctgcagaatgcagaaagcagcagagctatgactgcctgtctatgcagttgtggaagtagatgtttgtatcagtgctgatatcactgtttcctgagctgattggtmtccttgctgtaggagctgaaaggatccagtctgttctcagcgagaattgtcaagaattcagatgtgttagggtctatatatttcataggtggatgcttgatagtaatgcaaaaccatcttattttattaatgatagagtatggaggagtgggtaacctcataacataaacaaat

SEQ ID NO: 18417 - DNA, 588 bp, Chicken  19866894227278_4
tttcacatctcctttccatcatttataaagaaccattcaggtgaaaggtgatgtatgtacactggtgtcacagtggttactkctagattgtgcttaattgtaaactgtataatcaccgaatcccagaaagccaacagaatatctctgamtgagctacagaagcacatgagctaytatgatatgcagaccctcagcctgcagaatgcagaaagcagcagagctatgactgcctgtctatgcagttgtggaagtagatgtttgtatcagtgctgatatcactgtttcctgagctgattggtmtccttgctgtaggagctgaaaggatccagtctgttctcagcgagaattgtcaagaattcagatgtgttagggtctatatatttcataggtggatgcttgatagtaatgcaaaaccatcttattttattaatgatagagtatggaggagtgggtaacctcataacataaacaaatacagagaatgacaggagaaacagacatagaatgcaaataacaattgaacagaattgttggataaaaagaattatttctcccacagaatttcaactaaaatgtacaatttcaatt

SEQ ID NO: 18418 - DNA, 600 bp, Chicken  19866894227280_1
aggcggctcccttggctgagctgtcggagtgagggctgccgggctctggctgcgtgggaagggctgctgcgttgcctttttcagtgacaggagcttacagtgaatatccgcacatgcttgtgagatggaattgcagctgccttcgggcttagaaatgcacgtggggcatttttgttttatacacaaactgctttggagcaaagggagggctggtgctgctgccgcttcccctccgcagcgggcaggctgagcaggcagcaaggaagtccctggctttcttgcatggaggaagtcattacraacaggatgtttgtcccaggctgctcactgtaggacactgggcagggggctgcacacccagcgcagatactttgaaggagctgcttttagaacgcctgcatcgggctgcrgtgtgattcacagatacaygggactatgtttgggctgcataaggctgccggggctcagcagcaagccctgtccacagcctcacccatcagctgagggcagctgagcacagagcaggcatyggcttggcacagagtggagaggcaaagggcagctcaagatcagcgctgctgatagcgaggtcatggattc

SEQ ID NO: 18419 - DNA, 600 bp, Chicken  19866894227280_2
cacatgcttgtgagatggaattgcagctgccttcgggcttagaaatgcacgtggggcatttttgttttatacacaaactgctttggagcaaagggagggctggtgctgctgccgcttcccctccgcagcgggcaggctgagcaggcagcaaggaagtccctggctttcttgcatggaggaagtcattacraacaggatgtttgtcccaggctgctcactgtaggacactgggcagggggctgcacacccagcgcagatactttgaaggagctgcttttagaacgcctgcatcgggctgcrgtgtgattcacagatacaygggactatgtttgggctgcataaggctgccggggctcagcagcaagccctgtccacagcctcacccatcagctgagggcagctgagcacagagcaggcatyggcttggcacagagtggagaggcaaagggcagctcaagatcagcgctgctgatagcgaggtcatggattcagccctgcctcggagacacatagacaaaggtgttgtctgcctgtgaatcaagggatgtaacagcagtcccaagcaaagcattaacccctaagtcacagccctcgggtaca

SEQ ID NO: 18420 - DNA, 600 bp, Chicken  19866894227280_3
attgcagctgccttcgggcttagaaatgcacgtggggcatttttgttttatacacaaactgctttggagcaaagggagggctggtgctgctgccgcttcccctccgcagcgggcaggctgagcaggcagcaaggaagtccctggctttcttgcatggaggaagtcattacraacaggatgtttgtcccaggctgctcactgtaggacactgggcagggggctgcacacccagcgcagatactttgaaggagctgcttttagaacgcctgcatcgggctgcrgtgtgattcacagatacaygggactatgtttgggctgcataaggctgccggggctcagcagcaagccctgtccacagcctcacccatcagctgagggcagctgagcacagagcaggcatyggcttggcacagagtggagaggcaaagggcagctcaagatcagcgctgctgatagcgaggtcatggattcagccctgcctcggagacacatagacaaaggtgttgtctgcctgtgaatcaagggatgtaacagcagtcccaagcaaagcattaacccctaagtcacagccctcgggtacatctccttgttgtatgggct

SEQ ID NO: 18421 - DNA, 578 bp, Chicken  19866894227280_4
ctccgcagcgggcaggctgagcaggcagcaaggaagtccctggctttcttgcatggaggaagtcattacraacaggatgtttgtcccaggctgctcactgtaggacactgggcagggggctgcacacccagcgcagatactttgaaggagctgcttttagaacgcctgcatcgggctgcrgtgtgattcacagatacaygggactatgtttgggctgcataaggctgccggggctcagcagcaagccctgtccacagcctcacccatcagctgagggcagctgagcacagagcaggcatyggcttggcacagagtggagaggcaaagggcagctcaagatcagcgctgctgatagcgaggtcatggattcagccctgcctcggagacacatagacaaaggtgttgtctgcctgtgaatcaagggatgtaacagcagtcccaagcaaagcattaacccctaagtcacagccctcgggtacatctccttgttgtatgggctctttgccaacagcacttttggtttttttttgcactcctccaagctcctcctttgcagccagagcagtgaggtgcccatg

SEQ ID NO: 18422 - DNA, 600 bp, Chicken  19866894227282_1
gtctaccctctgatccgaacctctttccagataaactggagaataataattttgattgcaaaccacaagaatacttcatcagtacttgcatctgtttaacgtagtatgattgttcactgattgcctgaaatacttccttggctgagagacaagctaccagctttcaagctgttaactctgtcaccaatggctttgttgttcagagaggtgtaacttccagtgtttttctttctgcatagtttctgtccatctctagaacttaatgagtctggggattatgcacatacatagaaaattgcrtcattttaaatacatatgcgcatgcttgtccagttttccttctcccttcctccctcagcatagagttaatagttatataatgagtagggatttttttttcctaacttttaatcagtatttttcgttgcttgtggggtaggcatggattttcaaatgttgccttgggaagcagcttgatggcaaattatttgactagcaaaggtcaagccactcctgccagctgcctctgcctcattgtgcccttatcaaattgttgaaattatcaataacttgtcaacaattcagcctgttttaatggga

SEQ ID NO: 18423 - DNA, 600 bp, Chicken  19866894227284_1
gaacttctgttacttgcctaacagggataaccagagcccatatctgtatgccgtaggagagatctatactcacagaagtacagcaagttagaaaaagattgagatcaccactaactacatggtatgtcaattcctgggatgtaaatgaaaatgcctgagagtaaattaacaagataagtgctcagaatgggatacaagaggtgtaaagaggtcaactggaagggcaataattattcacagtgggcatatgagctgtgtctcatccaccaactgaaatgattcacatgcattttttccatscaggatcaccagaacttgaactaagacacacagcaggcaaaattgcattactagaagccactaagctaagtacaataattgttactacttttcagtggagtctacataaccctctactttctcaacattgtattgtaataatgcggytgctatttgtgtgctaataaaagtccatgtgatgcacawacattatagtgcgtaagcaaaaccctacatttttataaaagtaatagaagtaaattggaagattgcactattcttttttttatccagtgcacacaactaaagggaacgctcgca

SEQ ID NO: 18424 - DNA, 600 bp, Chicken  19866894227284_2
aaaatgcctgagagtaaattaacaagataagtgctcagaatgggatacaagaggtgtaaagaggtcaactggaagggcaataattattcacagtgggcatatgagctgtgtctcatccaccaactgaaatgattcacatgcattttttccatscaggatcaccagaacttgaactaagacacacagcaggcaaaattgcattactagaagccactaagctaagtacaataattgttactacttttcagtggagtctacataaccctctactttctcaacattgtattgtaataatgcggytgctatttgtgtgctaataaaagtccatgtgatgcacawacattatagtgcgtaagcaaaaccctacatttttataaaagtaatagaagtaaattggaagattgcactattcttttttttatccagtgcacacaactaaagggaacgctcgcactctggtacttgaaggaacatccaagactgcagaaatttagaccaaatgttaagactgcctggtgaatacatactcgtttcccacttaaacgtcagggctcacaccacatcatctgaaacacgtaggctgtaggtatggtcactcat

SEQ ID NO: 18425 - DNA, 600 bp, Chicken  19866894227284_3
atgggatacaagaggtgtaaagaggtcaactggaagggcaataattattcacagtgggcatatgagctgtgtctcatccaccaactgaaatgattcacatgcattttttccatscaggatcaccagaacttgaactaagacacacagcaggcaaaattgcattactagaagccactaagctaagtacaataattgttactacttttcagtggagtctacataaccctctactttctcaacattgtattgtaataatgcggytgctatttgtgtgctaataaaagtccatgtgatgcacawacattatagtgcgtaagcaaaaccctacatttttataaaagtaatagaagtaaattggaagattgcactattcttttttttatccagtgcacacaactaaagggaacgctcgcactctggtacttgaaggaacatccaagactgcagaaatttagaccaaatgttaagactgcctggtgaatacatactcgtttcccacttaaacgtcagggctcacaccacatcatctgaaacacgtaggctgtaggtatggtcactcatcttgccgctaaaccacatactaactaggctgttattttc

SEQ ID NO: 18426 - DNA, 600 bp, Chicken  19866894227285_1
gaatcacaagttaggtaatagaaattgggaaacctgaggagacatgcaaaacgttgatcttctggttagaaagcatccactaaaataatataaaaagctaccagctgtgtcaactttgaaagctgtgttgtgcaaataactctctgaggtcaaagtattttgcaaaatcatccactgccctcctcacagtgatcatggttacggtgcaaatgcccgcctcagacaagcgtcattgcatgttctgacagtatgatgtgggactgaaagcatgttttaattttcacacagctgaagccttcrggagaagcttcagaaggtacaaaggcacctttagatgagaggatgtgcatgctgaggttttcctgtctatcaggaagcaggaggcattgcagaagatgtagccgagagatccattgcaaggtaggaggtcctcatcctttattttccagttgcttcctgataatgacatcataaagtggcctgtcctgtattgctcttccgtggaatggctcttgtgagcacatatgccctaccctggcctgagatatagatttttcctwctgccattctgctttccaaagtgaaactgtgatgagcgag

SEQ ID NO: 18427 - DNA, 600 bp, Chicken  19866894227285_2
ctgaaagcatgttttaattttcacacagctgaagccttcrggagaagcttcagaaggtacaaaggcacctttagatgagaggatgtgcatgctgaggttttcctgtctatcaggaagcaggaggcattgcagaagatgtagccgagagatccattgcaaggtaggaggtcctcatcctttattttccagttgcttcctgataatgacatcataaagtggcctgtcctgtattgctcttccgtggaatggctcttgtgagcacatatgccctaccctggcctgagatatagatttttcctwctgccattctgctttccaaagtgaaactgtgatgagcgagcaacagatgagaattcaccagccyataaggggtaggtatggcatgatacaccaaagagatgtcacaaaatgtcacattcctggtctttaccccctgcttgctccatggctctgtcaggcacatggatacatctggtcagaarctccaaatgtctgaagaacagcctctggcttgtgagaaccaaaagaggtgccatggtgctatgccataggaatgcattagatacccgtggctcccaggggccagttgtgtgagtcctg

SEQ ID NO: 18428 - DNA, 600 bp, Chicken  19866894227285_3
gcacctttagatgagaggatgtgcatgctgaggttttcctgtctatcaggaagcaggaggcattgcagaagatgtagccgagagatccattgcaaggtaggaggtcctcatcctttattttccagttgcttcctgataatgacatcataaagtggcctgtcctgtattgctcttccgtggaatggctcttgtgagcacatatgccctaccctggcctgagatatagatttttcctwctgccattctgctttccaaagtgaaactgtgatgagcgagcaacagatgagaattcaccagccyataaggggtaggtatggcatgatacaccaaagagatgtcacaaaatgtcacattcctggtctttaccccctgcttgctccatggctctgtcaggcacatggatacatctggtcagaarctccaaatgtctgaagaacagcctctggcttgtgagaaccaaaagaggtgccatggtgctatgccataggaatgcattagatacccgtggctcccaggggccagttgtgtgagtcctgtttaaagcccagcatggggcagaaaccacctactccacagacctgtgttgacagctcagaaggc

SEQ ID NO: 18429 - DNA, 600 bp, Chicken  19866894227285_4
tttccagttgcttcctgataatgacatcataaagtggcctgtcctgtattgctcttccgtggaatggctcttgtgagcacatatgccctaccctggcctgagatatagatttttcctwctgccattctgctttccaaagtgaaactgtgatgagcgagcaacagatgagaattcaccagccyataaggggtaggtatggcatgatacaccaaagagatgtcacaaaatgtcacattcctggtctttaccccctgcttgctccatggctctgtcaggcacatggatacatctggtcagaarctccaaatgtctgaagaacagcctctggcttgtgagaaccaaaagaggtgccatggtgctatgccataggaatgcattagatacccgtggctcccaggggccagttgtgtgagtcctgtttaaagcccagcatggggcagaaaccacctactccacagacctgtgttgacagctcagaaggccaaattggcttctcttgggtgagctgygagcttctgctcccttgtctcctrggggctgccaggaagggaataggcacagtctggtgtgtgctctgcaatgcaagagatgctccctgac

SEQ ID NO: 18430 - DNA, 600 bp, Chicken  19866894227285_5
caaagagatgtcacaaaatgtcacattcctggtctttaccccctgcttgctccatggctctgtcaggcacatggatacatctggtcagaarctccaaatgtctgaagaacagcctctggcttgtgagaaccaaaagaggtgccatggtgctatgccataggaatgcattagatacccgtggctcccaggggccagttgtgtgagtcctgtttaaagcccagcatggggcagaaaccacctactccacagacctgtgttgacagctcagaaggccaaattggcttctcttgggtgagctgygagcttctgctcccttgtctcctrggggctgccaggaagggaataggcacagtctggtgtgtgctctgcaatgcaagagatgctccctgactcctgttgatgtacatccttattttctgcattggggtaagcctgctctcacgaactgcacgcatggagcagcttacttcaagcaaagtgttgctctccctttcatcagggcagaatttggaaaaggaaaatctgttgaataagttrttatccagatgccagaaaggacagaagaaatgagcaccaccagcaccaaaacacagacagcca

SEQ ID NO: 18431 - DNA, 600 bp, Chicken  19866894227285_6
attcctggtctttaccccctgcttgctccatggctctgtcaggcacatggatacatctggtcagaarctccaaatgtctgaagaacagcctctggcttgtgagaaccaaaagaggtgccatggtgctatgccataggaatgcattagatacccgtggctcccaggggccagttgtgtgagtcctgtttaaagcccagcatggggcagaaaccacctactccacagacctgtgttgacagctcagaaggccaaattggcttctcttgggtgagctgygagcttctgctcccttgtctcctrggggctgccaggaagggaataggcacagtctggtgtgtgctctgcaatgcaagagatgctccctgactcctgttgatgtacatccttattttctgcattggggtaagcctgctctcacgaactgcacgcatggagcagcttacttcaagcaaagtgttgctctccctttcatcagggcagaatttggaaaaggaaaatctgttgaataagttrttatccagatgccagaaaggacagaagaaatgagcaccaccagcaccaaaacacagacagccaggggacgtctcttacacaaacctt

SEQ ID NO: 18432 - DNA, 453 bp, Chicken  19866894227285_7
cctactccacagacctgtgttgacagctcagaaggccaaattggcttctcttgggtgagctgygagcttctgctcccttgtctcctrggggctgccaggaagggaataggcacagtctggtgtgtgctctgcaatgcaagagatgctccctgactcctgttgatgtacatccttattttctgcattggggtaagcctgctctcacgaactgcacgcatggagcagcttacttcaagcaaagtgttgctctccctttcatcagggcagaatttggaaaaggaaaatctgttgaataagttrttatccagatgccagaaaggacagaagaaatgagcaccaccagcaccaaaacacagacagccaggggacgtctcttacacaaacctttccatgacaaaccctttcctatacaattgctggatagtgtctatattccagccttgggaaataaat

SEQ ID NO: 18433 - DNA, 600 bp, Chicken  19866894227293_1
ctcaactcaaaatttttctcacttttaccattgcaattctttttgacatccccataagtgagtgactgcgtggtgctcagaatgtgttgtgagtaacccatgacagatgttaggagacatttgtgctgcatgtatcacttctcataccttaaatgataaacaagaattgtttcatcctcgtaaactaggggtaatttttcccaaactctgcgtatattctaggtgcattatgattttggtttgcggaatatattgtcagtgctacgcacattaggagcggcaaaaagagcaaagcctacrgatactgagtctaccatagttatgcgtgtgctgagagacatgaacctctctaaactggtaagctctgaggacctggtaaattaactaacccgtacttcagagccatttatttttgggaaacacagtttaaatctgttcagatgttcactggaatattgcctatgatactctgatgctatcttggaaatattgcattccctgtatgacttggcctgttcagattttttgtgataaacgtatttccactgctacctayggaaataaattaccaaataggagtatataagagcctctgtggaa

SEQ ID NO: 18434 - DNA, 506 bp, Chicken  19866894227293_2
cagtgctacgcacattaggagcggcaaaaagagcaaagcctacrgatactgagtctaccatagttatgcgtgtgctgagagacatgaacctctctaaactggtaagctctgaggacctggtaaattaactaacccgtacttcagagccatttatttttgggaaacacagtttaaatctgttcagatgttcactggaatattgcctatgatactctgatgctatcttggaaatattgcattccctgtatgacttggcctgttcagattttttgtgataaacgtatttccactgctacctayggaaataaattaccaaataggagtatataagagcctctgtggaagctttggcctaatgttttctgcttcttgtatttaatcattcttttaacataatattatttgtactaatgagtaccatttcatctgacttacactgttaatggaatctctttccaatatcttttgattattggaagcgtcatgatctcattcttttgtgttca

SEQ ID NO: 18435 - DNA, 555 bp, Chicken  19866894227295_1
tcccaaccacattactccaaggtgaaaatctctgaaaggataagaaacgacatcactctaatttaggaaggcagaaactaacactgccctgctaggaatggtgcagtgcatcatgccaccaagacacagattggagttcaggatagtcttttagatttgagccttgggggagataaggtacagttctagatgacgcgtttcagaatctgagaggggaaagctggtgtagtagcactccatctggcaggccgactttgctctgaagttataaagaaaaagagaacgactttgtgctcaggrccgagggctgggaaaacaggagatttggcctccccaggaaataaatttaagattatgctgatgcactacccaaatccttcctaagcaggcaatagaaaatttaaaagttaaatcgagtggtccatgacatgctcaacaccatttaatggaaaactcctgctgatattattcatgagacacacatttcttaccaatagaactaaaataaataccaatatatatatatatatattttatttaaaaaaaaaaaaaacc

SEQ ID NO: 18436 - DNA, 600 bp, Chicken  19866894227303_1
gaggcacgtcccagtacttcttagttatgagctacagtcacttctgaagaccagaggaggcactgctgagagaaatctgacctcacagtgtgacaattgtaaggagtcctgagagactctcttccagctttatttgcaagaaatcacttaaataagcagcaacagagaatttgcgtgggaatttggggctagcatcttttgcttacaacgagactgcatttaaaataagagaaaggcaacaaagtcttgtttacgtggcacgcataccaataaacacacgttttgacatgaattttcatyrggattacatgattgtaatggctgcaaatgcatttcttactggcattgttgtcattactgataggaattccataaatgaaacatcttgaacagcatgaagttttagattggcctttagagtacttcaaagaatggattaaagtgccaggtctatttttttctccaccatgacctctcactctgttacaaaaagttcttttctctctgtttaaggattcgagaaaataaaccctaaaactaaatttcgcaattaaaaatgaatagaggatgcctaaaaatgaaactataaagctgaattaa

SEQ ID NO: 18437 - DNA, 600 bp, Chicken  19866894227303_2
aggcacgtcccagtacttcttagttatgagctacagtcacttctgaagaccagaggaggcactgctgagagaaatctgacctcacagtgtgacaattgtaaggagtcctgagagactctcttccagctttatttgcaagaaatcacttaaataagcagcaacagagaatttgcgtgggaatttggggctagcatcttttgcttacaacgagactgcatttaaaataagagaaaggcaacaaagtcttgtttacgtggcacgcataccaataaacacacgttttgacatgaattttcatyrggattacatgattgtaatggctgcaaatgcatttcttactggcattgttgtcattactgataggaattccataaatgaaacatcttgaacagcatgaagttttagattggcctttagagtacttcaaagaatggattaaagtgccaggtctatttttttctccaccatgacctctcactctgttacaaaaagttcttttctctctgtttaaggattcgagaaaataaaccctaaaactaaatttcgcaattaaaaatgaatagaggatgcctaaaaatgaaactataaagctgaattaaa

SEQ ID NO: 18438 - DNA, 600 bp, Chicken  19866894227304_1
ctaatgtcttcagagctgcttccttaattactgagtctccagacaaggtatcatttcagagtgtcagtggtcccaatgctcctttttgccagccagtgaaaaggctgagagttgagaatctattccagaaatattgtgagtctttcttttatctattctgtcctaagctagagaaaaaagtaaaagttctgaaattcactgcgaagaaaggtgctctgacatcttaaaattcagtgtggaaaatggttgaatttttacattactgcttaaagtataggctctgatgcttgggatgtctcrgttctgtctctggactagctatacgtgatatacgtagttggattctgctgaatacttaagcactttctgtgagttttcttgcatgcagtataaatataaagtatctggcttaattccctagcatagtgcaagtcattgttctagagcataatgagaacctcaagcaaatggtgagttttatttcttactcatacattgcatgaagggactgggaatgcatgcagaatcaaggccattatttctgaatcagagaatcattaagactggaaacgaccactaagatccaactgtcagccgtct

SEQ ID NO: 18439 - DNA, 600 bp, Chicken  19866894227307_1
ggcctgacatgtgctcctgccccacactgctgggacacacccagaccgcgggggacagcgctgaccctaagaagccgggcagctccgtgccaccggggaaaagagctgtgcgctgtgctggacagctgaaccttcaacaagatgaccaataaaccaaccatgtcaatactcagatctgatctcccaaactctctctctattttgcaatatctgtcctgttaaatgggtgtgtatggcaaacaggaacaggaccagagcgattatcccatgacaaaggagaaatgaaataaagatcttacycatgccctggggtctaggaaggtctccacccctttctgtcactcaggtgaaattgtgttcacctgtgcccctgcagctgactcagcactcacctcaggtggtcaatcagagcttcaggccacagttcaacagttcccatacactccaccccttcaaggcatgaaccaatgattgaatcaactaaagggtaaatacttcccattacagagatccaatgcatcgcaatgcttgtacaatttcccgtcacaatgtaggatgacaattttaaaacaagtgatgatcggcaaaagttcatgttct

SEQ ID NO: 18440 - DNA, 600 bp, Chicken  19866894227310_1
ataagactattacacacagctggcagcaagggctggggctctttagcatctcagtgacagactcacaaagcccatttgtcctcccccccttctctcccaccagtggatgtgactctggacccggagacggcgaaccttgagctcatcctgtctgaggaccgcaagagcgtgcggcgtgggagcaggaagctgttcctgttgttatttgacagccccaagaggttcaactgtgctccagtcgtgctggggctgcaggccttcttctcgggccgcagctactgggaggtgcaggtgggagayaagccggagtggggcctggggctgtgcaaggaggctgcckgccggagaggcaacatcgtcttctccccccaaaatggctactgggtgctgcggctgcagaacggtggctacgaggcccttacctgccccgtgtcctgtctgaccctgcgcgtcaggccccggtgcattggcatcttcctggactatgaggcaggagaaatctccttttacaacgtgtccgaccgctcccacctttacaccttcaccgacaagttctcggggaaactccggcctttcttctacctgggctcccttatgggg

SEQ ID NO: 18441 - DNA, 600 bp, Chicken  19866894227310_2
ctttagcatctcagtgacagactcacaaagcccatttgtcctcccccccttctctcccaccagtggatgtgactctggacccggagacggcgaaccttgagctcatcctgtctgaggaccgcaagagcgtgcggcgtgggagcaggaagctgttcctgttgttatttgacagccccaagaggttcaactgtgctccagtcgtgctggggctgcaggccttcttctcgggccgcagctactgggaggtgcaggtgggagayaagccggagtggggcctggggctgtgcaaggaggctgcckgccggagaggcaacatcgtcttctccccccaaaatggctactgggtgctgcggctgcagaacggtggctacgaggcccttacctgccccgtgtcctgtctgaccctgcgcgtcaggccccggtgcattggcatcttcctggactatgaggcaggagaaatctccttttacaacgtgtccgaccgctcccacctttacaccttcaccgacaagttctcggggaaactccggcctttcttctacctgggctcccttatggggggcaaaaatgcagagcccttggtgatctcctggatgaggg

SEQ ID NO: 18442 - DNA, 600 bp, Chicken  19866894227310_3
gggtgctgcggctgcagaacggtggctacgaggcccttacctgccccgtgtcctgtctgaccctgcgcgtcaggccccggtgcattggcatcttcctggactatgaggcaggagaaatctccttttacaacgtgtccgaccgctcccacctttacaccttcaccgacaagttctcggggaaactccggcctttcttctacctgggctcccttatggggggcaaaaatgcagagcccttggtgatctcctggatgagggacacgcaggggaccagctgtgtcgtcctgtgacagggacagrcagagctgtgggggcacaatgaactgctcaggtgagcaggaggtgatggatggctgttgttatgtgcatagcatggagtggggacccagccagaaccatgctggattgtagcacctgttgtccaccggtgctctactgctcatccccaggcttctggtggtgggggctcacagcctgctgtgtcgtgatgctttgggtatgaattgtactgacataaggcaataaagagatgatctgaggagctctgagcagttagcagtgcttttttgtggttcatccatccttggtggttaaccccaa

SEQ ID NO: 18443 - DNA, 600 bp, Chicken  19866894227312_1
catccactacttttatcatggttgtccattgtgtggattgttcattctagctgttcattttgtgttgcaatacactattctcgttgcaagtaccaaagtggaggaagcaatcatcctgttttgccttcttttgcttgacttggctttctaatggtttcacatattctttttgctcctggcagaccagcgaatccagagtaaacttcgtggtcctgaggcagccaggtgtgcagctgttagacccaggggaagatggcagcacatcaaacagcagcagcagcagtggaggaggaagccctktgcatcaccggagaagactagaccagagtcactacagacggaagtccaactaccagaaggtaagcttggaaataacagctaaagcactggttactgctggtctaatagagccattatgttagctccgtgacagttatttattatataagactaagtagtatcttcatttcttcagctattgacaagcagcgtgtttgtggctgttggcactagaaaacttcgcatttgtcatctacttgaaaaaacatattaaaatttcctcacttgtctctrgtgttgaggcaaaaccagtgtttaatc

SEQ ID NO: 18444 - DNA, 600 bp, Chicken  19866894227312_2
gcagcagcagtggaggaggaagccctktgcatcaccggagaagactagaccagagtcactacagacggaagtccaactaccagaaggtaagcttggaaataacagctaaagcactggttactgctggtctaatagagccattatgttagctccgtgacagttatttattatataagactaagtagtatcttcatttcttcagctattgacaagcagcgtgtttgtggctgttggcactagaaaacttcgcatttgtcatctacttgaaaaaacatattaaaatttcctcacttgtctctrgtgttgaggcaaaaccagtgtttaatctctccttgtttggaaagggccgtgagaaatttacagtccatgagacactaacagggccagcgctggacctcttgacattcataaagcacaacgtgttcagagtattgcgcagtggtattaagttatgcttctggtttggaggtaaacagctctgtgacacagaagtagaaactacacaaatcacgctgtagtgctgctgtgacttaagtgttgtatctgccatcagtttgcatgttacaggaatatcctgcaagaggagaaattgccaatctg

SEQ ID NO: 18445 - DNA, 600 bp, Chicken  19866894227323_1
gaagtctaattgattaattggaagctcttgtcttcctttcctggggccagcatgtttcaatcacagtaggaatagacgcctctccatcagaaatctgtaatcctttactgatggcttgcttggcaggctctaatgggtactctgggacatcatccaagaaagacccacagaaattaattgtctcctatccttttctgaaatataggtcagcctttcatggctgtgctaaagcaaagacaaacttaatcacttagaacagccagtaaaacctggaaaatgtgaaggttttcgggatctccyactgaagatcttccaagaaaaaataacattctgactggcctggagatggctttaactaaaaagaaagaaaaaaagaaggaaaacaactgtcttggagtctgctcataaactcacggatttgtgtggattctctttcctcagcttcttctactctttcagcctttcctcttatctgcctctcaattcccagagtatgaagccaattaaaaactaaaaaacaaaaacagaaccaatggagaaatgttaagcaatctcagagaaaatctaacgcagaattcagaaagtccagacttcccctcc

SEQ ID NO: 18446 - DNA, 600 bp, Chicken  19866894227323_2
ggttggcaatagtccagaggtattatttaataccagcttttccaccctggccagtcacttgtgtgaaaatgaatccacatctgcttggcttatctgtagagaattctgtagtcaatttgcttcttaaagcatatttttcatcacattggggaaacagtaaattattatttccccttcccccactaagagatttagtcggtttctatctccgtgatgcaaatttacaatactgggatcagaaaacatgatcatcagcactcatttcctggacaacttcagaaatatcaagacaaactgcayttacttaaggcacatttcttaatgctctcaagctttcccactgtcttaacatcatcagccacttaaccactctataagctttcagtatttttcctaacttggtgtaactaaatattgatcatgactaagatagtaattgagttcatttgtgataacagatggcccattggctgcatccattaaagactctttaaaataatgaaaaaaaaaacaactttaattgcctggagagacatgggcctgatgttgcagcgatcggaacctattaataatagtaaattcaatcacaagcctaccttg

SEQ ID NO: 18447 - DNA, 600 bp, Chicken  19866894227333_1
gcagctttttttatttacttaaatctatgaaccagaatccaagatgtacagaagcttctagtcaacagaaacgcttactttgcccatctttccacaaatgaaggcatgcatttctgtcccaaaactgaatgttgctttcatttcagttgctcagtagccaactggacactcagactacacacaagttcatttgcacttatgcaaagacatggttgtatttaagagaaaactctttaaaccctaattaagatggcagccatgtctctgtacagattccagtatggtggaattaacttgaarctctgataattaaccctgaaaaaaaacccaactttatttttaaacagaatagytttattccaagtttgtgtctacaagggcaagtaagtgtcacgagctggaatagaacttctcatcttaaggcaggctgcttgaacagtctaaagcacagaccaagtacctacaaccattccaacagagatatattcatgcactatgcaagaagaaagcaagaattacagacccagtggacggtgcactgaaatggcagatgtgtggagctgactcaccaggaagcgaagctgtgtcaggctgaaccct

SEQ ID NO: 18448 - DNA, 600 bp, Chicken  19866894227333_2
gcttctagtcaacagaaacgcttactttgcccatctttccacaaatgaaggcatgcatttctgtcccaaaactgaatgttgctttcatttcagttgctcagtagccaactggacactcagactacacacaagttcatttgcacttatgcaaagacatggttgtatttaagagaaaactctttaaaccctaattaagatggcagccatgtctctgtacagattccagtatggtggaattaacttgaarctctgataattaaccctgaaaaaaaacccaactttatttttaaacagaatagytttattccaagtttgtgtctacaagggcaagtaagtgtcacgagctggaatagaacttctcatcttaaggcaggctgcttgaacagtctaaagcacagaccaagtacctacaaccattccaacagagatatattcatgcactatgcaagaagaaagcaagaattacagacccagtggacggtgcactgaaatggcagatgtgtggagctgactcaccaggaagcgaagctgtgtcaggctgaaccctggggtcttgctaatgtgatcagccagccgccctggcgtagccacaataatatc

SEQ ID NO: 18449 - DNA, 600 bp, Chicken  19866894227338_1
ccgaatggcctgatgatgccaccgaggtgaggtatgcctatacacaagctgtgagaattacctgaactctggcttcagtgaggttgactctgcgtgcaaggtcttcccgtacaaaggcatcggggtagtgtgtcctctcaaagaccctctctagtgcctggagctggctgctgttgaaggtagtcctgttccttctctgcttccttttcttcttctcttctgaattcagctgatcatctaggagagacaattggagatatgaaaggctagaagtttcagagtccatagcagtgttgtgaygtgaatgttaagaagtaccagggtggacaaaagttccactatgccaccatcctcactgttttgccatctccaaaatgtcctttgatttgccagctaggcatgctcagaggttgaccttgggggtcagctgctcaaggaaggtttgacatcatttcccgtctactttggagaaagattcccctcctccactcccttgccctcatctgacttgtatgcatctctcacatatgcacagacttcacatgctggtcttcaccccagcttccctgagagcactgtttgcagaagacgcttctcgta

SEQ ID NO: 18450 - DNA, 600 bp, Chicken  19866894227340_1
ctgttttttggatgctgcataaaatgaagttaactttcctgcctctcccagttgatcctaccaaccactagctcaggtcctctgcagtattactcactagaggaaaatctgtgactcttcagccagcctctgttcagtcagattatttttccttcaacatataaactactgtaaatggtttatttttcaaatatttgagctgttattattccccatagctctttgctctcacacctgctgccagagtctagctctgccagagataaagactgccagtatgggtgtgatttaatgaatctrggttgtgttacttgttatggctaatggaacactccatctgcatctcataattctggagcatagggacaacaaccacagaaatccagaacagtaagattggagatcatctagtctgacatcctgctcaaagcaggatcacataaagcatgctgctcagcagtgtttccacactgtatttaaatgtctgcgaggatggagcagtcttccaaagttctctgggaaaactgtttgacctggttttattagtattccatgttatgacatcatgtgtcaagctgttcagtgctggaatacagtact

SEQ ID NO: 18451 - DNA, 600 bp, Chicken  19866894227345_1
taattcctgtacaggttccaccatcacgttctttaaaacattttgttcttgaaacactccaggatatgaattctgggcagattttctctttccatcccttcacctcagcaaaccctgcttaaaaaagccctttcctgttggtgttttgtgtacccgttcagtgccatcactactccgaagatgaactgtgccagatggaaagagaaaactggctttctgatttcggtatttaagatctttttaggtttttttccttttaaaataagcaagtttgggtgtcttacaagctgtgaaacaccrtgggcgccttcagtacaaccctttgcctttgctttttattattttttattattttttttatctcatcttctcccattagcttttctcctggtaccccctccctctggaggtcgtgcagcctggcttcagcatctctggatgagaccaaactctgcaaacctggtccctgtttttgagacacgtttgtttcagagatgcattcggttcttcaaaacattgcattacttacatttggtatcttccataaagaaaaaaaaaaaacacaaccaaagcaccctttaacatgggtaggaggagaga

SEQ ID NO: 18452 - DNA, 599 bp, Chicken  19866894227346_1
  misc_feature (1)..(63): n is any nucleotide
nnnnnnnnnnnnnnnnnnnnnnnnnnnnnnnnnnnnnnnnnnnnnnnnnnnnnnnnnnnnnnnaagcaagatgtggtaatcatgtattgtagcacatcagtactctgctggttctagcactaaagagcatgttgacatttctatgaaagctgttttttgctgtttgatgatgatgggagattgtatcttttttaacctgtccacccaagagtggcttaaatgtcaggctggtgttcttaatttactcatcagctaggccatgctgccagtatgccaaagtgaccttatattctgagcttyagtagwagaaatcagcacggggcttttcttcttcagtatatactcctgtattggataacagcctactaaccatgttatcaaatcatgaaaattataccaaggtaaaagtcatccacagtagccctttgtgtatgctgctatagtttgcattttcattttgctgatgaattgcatctaaaaaaatgctcttacactggtaacttttaaactctcctacttctcatttatatatacttagttttggcactacgtaggctatggyagtggtatctaaggtactcaatttctgaagaattcag

SEQ ID NO: 18453 - DNA, 599 bp, Chicken  19866894227346_2
  misc_feature (1)..(57): n is any nucleotide
nnnnnnnnnnnnnnnnnnnnnnnnnnnnnnnnnnnnnnnnnnnnnnnnnnnnnnnnnaagcaagatgtggtaatcatgtattgtagcacatcagtactctgctggttctagcactaaagagcatgttgacatttctatgaaagctgttttttgctgtttgatgatgatgggagattgtatcttttttaacctgtccacccaagagtggcttaaatgtcaggctggtgttcttaatttactcatcagctaggccatgctgccagtatgccaaagtgaccttatattctgagcttyagtagwagaaatcagcacggggcttttcttcttcagtatatactcctgtattggataacagcctactaaccatgttatcaaatcatgaaaattataccaaggtaaaagtcatccacagtagccctttgtgtatgctgctatagtttgcattttcattttgctgatgaattgcatctaaaaaaatgctcttacactggtaacttttaaactctcctacttctcatttatatatacttagttttggcactacgtaggctatggyagtggtatctaaggtactcaatttctgaagaattcagcttrct

SEQ ID NO: 18454 - DNA, 569 bp, Chicken  19866894227346_3
ctgccagtatgccaaagtgaccttatattctgagcttyagtagwagaaatcagcacggggcttttcttcttcagtatatactcctgtattggataacagcctactaaccatgttatcaaatcatgaaaattataccaaggtaaaagtcatccacagtagccctttgtgtatgctgctatagtttgcattttcattttgctgatgaattgcatctaaaaaaatgctcttacactggtaacttttaaactctcctacttctcatttatatatacttagttttggcactacgtaggctatggyagtggtatctaaggtactcaatttctgaagaattcagcttrctgaaataccctggagaaataagggcctaatgcatttattgaaagtttgcagaactcatgaaatatagaagagtatgtcatacatcatgttgaagaagtttatatagatgcttatatgtttttccccaaacacccatgctgaaaaatagcagagaggaagcatgttgaagaaaaggcagcatcctatacaaagagaacaatctgggagagaagagatatttaatctta

SEQ ID NO: 18455 - DNA, 528 bp, Chicken  19866894227346_4
agwagaaatcagcacggggcttttcttcttcagtatatactcctgtattggataacagcctactaaccatgttatcaaatcatgaaaattataccaaggtaaaagtcatccacagtagccctttgtgtatgctgctatagtttgcattttcattttgctgatgaattgcatctaaaaaaatgctcttacactggtaacttttaaactctcctacttctcatttatatatacttagttttggcactacgtaggctatggyagtggtatctaaggtactcaatttctgaagaattcagcttrctgaaataccctggagaaataagggcctaatgcatttattgaaagtttgcagaactcatgaaatatagaagagtatgtcatacatcatgttgaagaagtttatatagatgcttatatgtttttccccaaacacccatgctgaaaaatagcagagaggaagcatgttgaagaaaaggcagcatcctatacaaagagaacaatctgggagagaagagatatttaatctta

SEQ ID NO: 18456 - DNA, 600 bp, Chicken  19866894227348_1
tggaaggacagctaatacagacatcagtctgttgaggaattgatcatgttaagccacaggagtgaggtctgcttgaaaaactgctgatggcgtgagggacttctgtgttgaacatgctgaaaacacctgaatctgtgattgcttgccagagcacatgtggtccaggtggtttatgagcagttccatttcctttgccagtaccgtatcctgtcagcagcgtgagacttcagcaggttgctgcagtgttccttgcacacccaccagttttgtgttcctcatcctttctgaggtcccactggratgtgtggccatcacctccagtaagctatgctaaagcatcctgtttcctggttctctgaagcacatagcttacgatcagctgtgtgaagactttggcatggggctagcaggacaatgggaagttggctgtggttgttcygaagtgcatttatatgaaagacagtgtcttttttttccacttcaggggctttggatcagaggatgaaaggagttgagcagcagaggtctctccttccagatgtagtgactgctgtagcaagctgaggtgtgttgctgtatagcacacagaaaaccggtgct

SEQ ID NO: 18457 - DNA, 600 bp, Chicken  19866894227348_2
tgcttgccagagcacatgtggtccaggtggtttatgagcagttccatttcctttgccagtaccgtatcctgtcagcagcgtgagacttcagcaggttgctgcagtgttccttgcacacccaccagttttgtgttcctcatcctttctgaggtcccactggratgtgtggccatcacctccagtaagctatgctaaagcatcctgtttcctggttctctgaagcacatagcttacgatcagctgtgtgaagactttggcatggggctagcaggacaatgggaagttggctgtggttgttcygaagtgcatttatatgaaagacagtgtcttttttttccacttcaggggctttggatcagaggatgaaaggagttgagcagcagaggtctctccttccagatgtagtgactgctgtagcaagctgaggtgtgttgctgtatagcacacagaaaaccggtgctgcggtcatgtgcgtcccaggcwccatgggtaaacagcattagcccatggacctaaatacttggcataccacgcagctcttgaaaataagagatttatggtaactctaatctttagtaagaaatgtttcaaaatacgtgc

SEQ ID NO: 18458 - DNA, 600 bp, Chicken  19866894227348_3
aagctatgctaaagcatcctgtttcctggttctctgaagcacatagcttacgatcagctgtgtgaagactttggcatggggctagcaggacaatgggaagttggctgtggttgttcygaagtgcatttatatgaaagacagtgtcttttttttccacttcaggggctttggatcagaggatgaaaggagttgagcagcagaggtctctccttccagatgtagtgactgctgtagcaagctgaggtgtgttgctgtatagcacacagaaaaccggtgctgcggtcatgtgcgtcccaggcwccatgggtaaacagcattagcccatggacctaaatacttggcataccacgcagctcttgaaaataagagatttatggtaactctaatctttagtaagaaatgtttcaaaatacgtgcctcacagaaatagaacattctttagtaaagagttgcacagcaggaatgttaagcggagtcaaatgttgccaattaaactgttttgttcaagctgtcattcatttggtggtgtatattggaagaggaggggatggtactgtaactaaatacttggtgctctgttaaattaagtcaattaaggca

SEQ ID NO: 18459 - DNA, 600 bp, Chicken  19866894227361_1
aacacaagttaaaacaagagctcttaaatgatgtggtgatttctttcatcctgtttagtaagcaaccttggtagtgctatttcatataaagcagtacgaaacgcacaagatcagaaaatgcaataattccagcaatgacacaaagaatgatctgctttgtcgtctcactggctatcaatgtggtgaatatgccattctgcagtatctagttcattattttctgttgtttttttgagcatgtttttaactaacattaagcaaaatgtacattgtggaacaaaccatccatacaggctatgycataattactgtttagcaatttcacactagcaaaagtttattaaaacttcacgactcattaatagtaagtgatcataatcgcttaatagaaaaggaaactgagctaatgatagaagtgctgattaatgtttttgaccttaagacatgaagtcaagtgaaattaatgtcactgggtgttgaaagtttattttcaagtgtcgatggtctgtaatccaccagagaacccctctgactacacaaattttatgttcctcagcagaaaaatattctataccaagtggcatttttaataatcttact

SEQ ID NO: 18460 - DNA, 522 bp, Chicken  19866894227362_1
gcagcgttctgtgtgctgaaagatgaaaccatctcctggagccacactggagagatccggtgattttttttttttttttttttcctttaatttattttctttcattttttgggggaacccggagcagtctgcacagcgcttttaactcttgttttagtctgatgggatttcttcatctcattatgcagcagataaaatgctgtccttgaggaaaggaatcactgctctgtacaaaggcttaagataccgagctttttcttctctatgaagcctgcttatttaaagtgagattgggctgtrgtgagaggcactggaatgatggaaccaacccgtccaaggtgacatcctttcccctgtgctgtttgggtcgtatacattaaactaatcagttccctggaaagctttgcttttcaaagccatgatagcattacatttctaaagacctacattaacccaacagcagcatttaataggacaaaacaagcagcatttaacatctttactctaatcctgctctgtgta

SEQ ID NO: 18461 - DNA, 600 bp, Chicken  19866894227367_1
tgtgtaacaaagcatttctatcacatatattgtaaatatatctgggatcctgtccctttgctttagaaattttagacttacctcattctgactttaaaaagaaagatttctgtccatttccctgaatacgggggaatcatacagcttagagcttcagcatgaccctttcaaaagcagctgttttctcacagtctactgtgccttccatcatgcccaaatgtagctgtaaagcagtaagtttcaaagaattaccttaggatcgtgtgcctttcttccactgagttttgcctcataccctcmcacttttggtcagcagtgccttattatttccataatagttcttcataatgttatttaatgatgcttacttttacacctagaggaagggagcttgtcagccatcagctgtaactgatgagaaatacctcacagcagctgtgaaaatgcagagcttgctctgcctgcgctcattagggcagctatgctacacacctggcctgtgaaccagggtatagaggtaggtatgatgtgacatgcataaagcatttccatgtcacttccaatacacacgcgtgttccagtttacactgaaacagtaca

SEQ ID NO: 18462 - DNA, 600 bp, Chicken  19866894227368_1
taccttacctaaatgccacccacacgctccataaggcaacacaccatactgatgcctcatctgtaaaatcctgttacagacagtcaatgggcaatggctggaattcaaggtatccctcaaggatgctggctacattcttccccaagtctccccaagctcctctgaccagggcaccaaaccttcatccctgtcatgagatgtggtttgtggttgccctggatctggagaggctccaacactgtgccataatgtgtccaaggagacatctgggagcctcagctgctgttcctcagggagcayctctcttgttatcacatggaggccaacatccagtgaaccacattagctttggagagtttcctggaaaggccagcccacactgaggaatattttaaggactggctatcacaccagaaggtgaaaagcaaaggaggacacttatatatggctcagctgctagtacgaccaacacccattagcaaaaatgaagtaagaatgtgtaaggaaaggccaggtctgtgctaacagcctctcttttcaatgtactcttacaccacccaccttcttactggactgaaagattatgaggggtgttgccgc

SEQ ID NO: 18463 - DNA, 600 bp, Chicken  19866894227370_1
ctgccatctgcctttctaatcttggatgccaaaacgacaaatgcatcttacagaccctctgttattcacagccctaaggatgtctagaaacccaggtacaaagtgcatttccaagaggtgataatactgatctctgccaatggcatatctttagctatgttcaatctttttctatctttttgcattatagcatgcactaaacatgaaatgagtgactggacttacagtgccagggacacattcaacagcatagcatgaatgcatcccagtgatgagagtattcttatctgctgttaaaargctgctttaaggactttatggatccaataacgtgggctgctccaaaagtaatgcctcctattttataatgttggacctacaacatcagggacagatgttggtggtatagtaggagatactgattcttcttccagtattccattacattttactggtgtgtgtcagatggcagcagaggggcagactgacacaatgggatctataaaatgccatgcaaagcagaaacgtgtaattgaattcctccatgtggataaaattgcacccactgaaattcatcaatgcttgctgaatgtttatgga

SEQ ID NO: 18464 - DNA, 600 bp, Chicken  19866894227372_1
atctttgttggcaataggacttgagagctgtcagcaccaaacagcagagcagcctgtattaacaaaggcaagagtgaatagaatcacataatcaccagggttggaaaagacctccaaaatcatccaatccactcatccacccatcaccaacgtttcccactaaacccacatccctcagtacaacacataaacatttcttgaacagctctaggagcagtgactccactacctccctgggcaaaatagcagcagacagacattttattccagccctgtacatttttttttggagttaaaagrgaaaatctttgtccctgggaccaaataaaaagacaagtctttggtctgtaggttgttatgcattttgtctattattagaagcttcctttttgctgttctcaaaattattccagttcttaatatcctcttcacatcactctgcaggctgctgagagctattaatttcatgtagctctgttcatttatacagtgtaattttactgggtttcctgtggctaatcacagagcagaatctagaaaattattcattctaaggcagagttccattatagagaaaaaaaggctgaaaatcagaattgc

SEQ ID NO: 18465 - DNA, 599 bp, Chicken  19866894227373_1
  misc_feature (1)..(5): n is any nucleotide
nnnnnctaatggtagccttttatttacagatatgttgagaagtatgtggggtaacgatggtatttttcttctttctcacaggaggggaataagattagaggcacttttttttttctttttcttttttttttccccctcccaccagctccaaaggagtttggtttcctgtcgtctttagaagaaactcctttacacttgcctagccaggacagtttccaacatgcatcttctgttatgctcagacaccctgatgacttggctgacaccgatgtcagtgtttctcttaccgcatgcccaccrcgtgggctgatgcctgtcagctgcccggagcgctgctgctraagcacctcccaacagtgggctttgtgccacgcagagagggctcagcaggggctccaggcttctggcatattcccagtcttgatctgaacttaactgatacaacttgaatctttggagaaaatgctacagggaagaacagatgaccagtgaggtarcaaagtgcaaatatgatgtaacattttcctctggcattcttcaactagagaggtttgatttttcttttgcagcttggttacttcagcttgcagccttacaag

SEQ ID NO: 18466 - DNA, 600 bp, Chicken  19866894227373_2
gtatgtggggtaacgatggtatttttcttctttctcacaggaggggaataagattagaggcacttttttttttctttttcttttttttttccccctcccaccagctccaaaggagtttggtttcctgtcgtctttagaagaaactcctttacacttgcctagccaggacagtttccaacatgcatcttctgttatgctcagacaccctgatgacttggctgacaccgatgtcagtgtttctcttaccgcatgcccaccrcgtgggctgatgcctgtcagctgcccggagcgctgctgctraagcacctcccaacagtgggctttgtgccacgcagagagggctcagcaggggctccaggcttctggcatattcccagtcttgatctgaacttaactgatacaacttgaatctttggagaaaatgctacagggaagaacagatgaccagtgaggtarcaaagtgcaaatatgatgtaacattttcctctggcattcttcaactagagaggtttgatttttcttttgcagcttggttacttcagcttgcagccttacaagctcccatttacagcttttgagactggctattgtctcaagaac

SEQ ID NO: 18467 - DNA, 600 bp, Chicken  19866894227373_3
gcctagccaggacagtttccaacatgcatcttctgttatgctcagacaccctgatgacttggctgacaccgatgtcagtgtttctcttaccgcatgcccaccrcgtgggctgatgcctgtcagctgcccggagcgctgctgctraagcacctcccaacagtgggctttgtgccacgcagagagggctcagcaggggctccaggcttctggcatattcccagtcttgatctgaacttaactgatacaacttgaatctttggagaaaatgctacagggaagaacagatgaccagtgaggtarcaaagtgcaaatatgatgtaacattttcctctggcattcttcaactagagaggtttgatttttcttttgcagcttggttacttcagcttgcagccttacaagctcccatttacagcttttgagactggctattgtctcaagaactctgtgggtttctttagctatgagaagttcagcactgatgtgatgctgagaggttctttgtgttgcagccgtaaggactggcaaaacagtgttgtcaaaattgtgataaacacctgcacgggtacagggttttggagaaggagcaaaaggaaggca

SEQ ID NO: 18468 - DNA, 600 bp, Chicken  19866894227379_1
tgagctgttaacagtaggactggggctggaaatgaaacacagtgagctggccataagccagcagctgtatccaaatgtaatgagcattaaagccctgggactgcaggaaacggagaaaggtttgaaatggtcaccatagtaatagaatgtacttaggctttaattgaaataaaagatgtattaaactaagggagatttatcagtctcttatactaatatttaactagagaaatgaatttgttcagaaatgtgtgtaaattcagatccctctgacaaccctctgcttctctttcaaagctktttcaaaggcttcaaagactgtrgttaatataatgtttttccagtaaatctcactctgatttttgctttgaaattagagaacattcccaagatcatccaattttgagtaaaacaaatattcgttcctggcttgtgaatatttcacctggaaatgcatggagtcgtagaatgggtactcatagaatggatagcttgggaagaatttccttccagctgactgttctgaggatgctgacccctgtgcataagagtaaatatgactggaagtggatatatatatatatgtatgtgtgtgtgtat

SEQ ID NO: 18469 - DNA, 600 bp, Chicken  19866894227379_2
ggctggaaatgaaacacagtgagctggccataagccagcagctgtatccaaatgtaatgagcattaaagccctgggactgcaggaaacggagaaaggtttgaaatggtcaccatagtaatagaatgtacttaggctttaattgaaataaaagatgtattaaactaagggagatttatcagtctcttatactaatatttaactagagaaatgaatttgttcagaaatgtgtgtaaattcagatccctctgacaaccctctgcttctctttcaaagctktttcaaaggcttcaaagactgtrgttaatataatgtttttccagtaaatctcactctgatttttgctttgaaattagagaacattcccaagatcatccaattttgagtaaaacaaatattcgttcctggcttgtgaatatttcacctggaaatgcatggagtcgtagaatgggtactcatagaatggatagcttgggaagaatttccttccagctgactgttctgaggatgctgacccctgtgcataagagtaaatatgactggaagtggatatatatatatatgtatgtgtgtgtgtatgtggcccttcctggaatgtcagt

SEQ ID NO: 18470 - DNA, 600 bp, Chicken  19866894227379_3
ttgtagaaaaaatactctccactggcttgacaagaatggaattataattttatttccttagactttctatgtgctatgctattggtgtaaaactaacagctatttggtttacattcacaacgctcacagtgcctattgacttctgggattgttttactggagcatgttattatttagatctgttccaatctgtttctgattctactgtcagtctttgaatggagtatatttgaactaaaaaagatagaaggaggaagaggggagaaggaagaaaataattccagcagaggatataatgcrgaactccagcaaaacccaaactccgcacgttccagtatttccattatctcagaagatcactctccagtggtagctgtcagattgttaagactatagtgatattctatatctaattttgtcacctcatcacaatttgctgcttatttcctcaatattttacttctacttgcaagackttggaacaattttctcttaaataatagctgaattgtctacratgtggtgcatgtcaaacgaaagctgtaggaaaggttttgatctcaagagctagcttcactcactaggggtgcctcctggcat

SEQ ID NO: 18471 - DNA, 600 bp, Chicken  19866894227379_4
gatctgttccaatctgtttctgattctactgtcagtctttgaatggagtatatttgaactaaaaaagatagaaggaggaagaggggagaaggaagaaaataattccagcagaggatataatgcrgaactccagcaaaacccaaactccgcacgttccagtatttccattatctcagaagatcactctccagtggtagctgtcagattgttaagactatagtgatattctatatctaattttgtcacctcatcacaatttgctgcttatttcctcaatattttacttctacttgcaagackttggaacaattttctcttaaataatagctgaattgtctacratgtggtgcatgtcaaacgaaagctgtaggaaaggttttgatctcaagagctagcttcactcactaggggtgcctcctggcatgtactacttgtacggagacaattcctaatatatcccaagagcctttcaggtaagcagttttctgaagataagagggatcggaggacatctagaagagatgctttgctttgaatacacagtgctcagattcagttttattaatttatcgtgttacttattaatgtgatcttccattg

SEQ ID NO: 18472 - DNA, 600 bp, Chicken  19866894227379_5
aatggagtatatttgaactaaaaaagatagaaggaggaagaggggagaaggaagaaaataattccagcagaggatataatgcrgaactccagcaaaacccaaactccgcacgttccagtatttccattatctcagaagatcactctccagtggtagctgtcagattgttaagactatagtgatattctatatctaattttgtcacctcatcacaatttgctgcttatttcctcaatattttacttctacttgcaagackttggaacaattttctcttaaataatagctgaattgtctacratgtggtgcatgtcaaacgaaagctgtaggaaaggttttgatctcaagagctagcttcactcactaggggtgcctcctggcatgtactacttgtacggagacaattcctaatatatcccaagagcctttcaggtaagcagttttctgaagataagagggatcggaggacatctagaagagatgctttgctttgaatacacagtgctcagattcagttttattaatttatcgtgttacttattaatgtgatcttccattggagggatgctgatttttgtggtggaggatcacaaatcttcc

SEQ ID NO: 18473 - DNA, 600 bp, Chicken  19866894227390_1
acacttactgctatattctgcactagctgtgctaaaggaactgtgtgcacatgcacagagatgtgtgaacagataaaacctatgaaaaccatctaacgcgtcagaaaacaaaatcctgtagtcaggacgctcacatgaccaaagctgctggaaaaatatgcctactgcacaagaagcccatggaggaccttcacattgttggcacactgggaaaactacagcatgtcaacacatttctgtcaactgcacacccagaagcaacccagagaaaccaagtaagattgttacaactgagcaacragagaattaagacctcaaagayttaaggtgtcaggatctgaacgtgacacttccagcaaagaaagctccaggtagagagttctccttcaaatacagaacaaaaacaaaaccaaacctgaagggtgctttgtggtaattgcacgggacaaagatgaccttaaaacacagggtggagygcagcaagaatcaagcccaccgcactagcactactctacctaaccacattctttttgtcacctacttcataagggacttggagctccccagatgcctcgccgggctcattaatcttgcagaaaa

SEQ ID NO: 18474 - DNA, 600 bp, Chicken  19866894227390_2
ctagctgtgctaaaggaactgtgtgcacatgcacagagatgtgtgaacagataaaacctatgaaaaccatctaacgcgtcagaaaacaaaatcctgtagtcaggacgctcacatgaccaaagctgctggaaaaatatgcctactgcacaagaagcccatggaggaccttcacattgttggcacactgggaaaactacagcatgtcaacacatttctgtcaactgcacacccagaagcaacccagagaaaccaagtaagattgttacaactgagcaacragagaattaagacctcaaagayttaaggtgtcaggatctgaacgtgacacttccagcaaagaaagctccaggtagagagttctccttcaaatacagaacaaaaacaaaaccaaacctgaagggtgctttgtggtaattgcacgggacaaagatgaccttaaaacacagggtggagygcagcaagaatcaagcccaccgcactagcactactctacctaaccacattctttttgtcacctacttcataagggacttggagctccccagatgcctcgccgggctcattaatcttgcagaaaacaaacccagcaaaagtratgct

SEQ ID NO: 18475 - DNA, 600 bp, Chicken  19866894227390_3
cccatggaggaccttcacattgttggcacactgggaaaactacagcatgtcaacacatttctgtcaactgcacacccagaagcaacccagagaaaccaagtaagattgttacaactgagcaacragagaattaagacctcaaagayttaaggtgtcaggatctgaacgtgacacttccagcaaagaaagctccaggtagagagttctccttcaaatacagaacaaaaacaaaaccaaacctgaagggtgctttgtggtaattgcacgggacaaagatgaccttaaaacacagggtggagygcagcaagaatcaagcccaccgcactagcactactctacctaaccacattctttttgtcacctacttcataagggacttggagctccccagatgcctcgccgggctcattaatcttgcagaaaacaaacccagcaaaagtratgctaattttcttcagcattagcggatcgatttcagaagggtgcgcgtggcgctcacgtggcacggcacggatctggctgagcgcaggggctgaggcacacaaaatggccacgcgtgcccctctgggtggcagggcacggtctgacctaccgcagcca

SEQ ID NO: 18476 - DNA, 600 bp, Chicken  19866894227390_4
aagayttaaggtgtcaggatctgaacgtgacacttccagcaaagaaagctccaggtagagagttctccttcaaatacagaacaaaaacaaaaccaaacctgaagggtgctttgtggtaattgcacgggacaaagatgaccttaaaacacagggtggagygcagcaagaatcaagcccaccgcactagcactactctacctaaccacattctttttgtcacctacttcataagggacttggagctccccagatgcctcgccgggctcattaatcttgcagaaaacaaacccagcaaaagtratgctaattttcttcagcattagcggatcgatttcagaagggtgcgcgtggcgctcacgtggcacggcacggatctggctgagcgcaggggctgaggcacacaaaatggccacgcgtgcccctctgggtggcagggcacggtctgacctaccgcagccacagggagcagccttagtcacccgggagcaccgttctgacacggccattctactgtacgttgctcttcagaagcaggttgttcatattgaaacgtgctacacaaattgaaaaagcggctctgagaaaaacctgtagcttcta

SEQ ID NO: 18477 - DNA, 600 bp, Chicken  19866894227392_1
ctttgggcactgaaagaagtatttgttcttctaagtttcagatcaagggagatttctcccactatacttgcacgacatgtactatgagaatttctacatgagagttaccagttttctttaaagtcttgtacctaggaggcaagcaagtttgttagtgaacaatacatacttaccaattaaaactctgctgcataatgaggttgctaggaggtttttcttactgaaagaagggggatatcagcagtaatatcctcactgttgtgttgtgaggcctctcagacagcataggtagtagtaaarctgctggtaaacctactgcaaagttggaaatacttctcaagtgcagtcactttgtgtttagttggcrttttctgaccacttcacttcagataacaggattgtttttgagggtagatgtaggatagcagtatgccttgtttccttccctctctagygcaagttacttactaatawtgcttgaaaagcactgtaaaatcaacatgaaataaaatgtgactatggcttgaagaagttggtagtgtgtaggtagggatctggaaaacctgtgtgcttgtggcctcagcctttgaactggtattg

SEQ ID NO: 18478 - DNA, 600 bp, Chicken  19866894227392_2
ttgcacgacatgtactatgagaatttctacatgagagttaccagttttctttaaagtcttgtacctaggaggcaagcaagtttgttagtgaacaatacatacttaccaattaaaactctgctgcataatgaggttgctaggaggtttttcttactgaaagaagggggatatcagcagtaatatcctcactgttgtgttgtgaggcctctcagacagcataggtagtagtaaarctgctggtaaacctactgcaaagttggaaatacttctcaagtgcagtcactttgtgtttagttggcrttttctgaccacttcacttcagataacaggattgtttttgagggtagatgtaggatagcagtatgccttgtttccttccctctctagygcaagttacttactaatawtgcttgaaaagcactgtaaaatcaacatgaaataaaatgtgactatggcttgaagaagttggtagtgtgtaggtagggatctggaaaacctgtgtgcttgtggcctcagcctttgaactggtattgtaaatttactcctaaaatcttaataggtcaaaccttctctatagttttatgtaatgtggatttaaat

SEQ ID NO: 18479 - DNA, 600 bp, Chicken  19866894227392_3
tgaacaatacatacttaccaattaaaactctgctgcataatgaggttgctaggaggtttttcttactgaaagaagggggatatcagcagtaatatcctcactgttgtgttgtgaggcctctcagacagcataggtagtagtaaarctgctggtaaacctactgcaaagttggaaatacttctcaagtgcagtcactttgtgtttagttggcrttttctgaccacttcacttcagataacaggattgtttttgagggtagatgtaggatagcagtatgccttgtttccttccctctctagygcaagttacttactaatawtgcttgaaaagcactgtaaaatcaacatgaaataaaatgtgactatggcttgaagaagttggtagtgtgtaggtagggatctggaaaacctgtgtgcttgtggcctcagcctttgaactggtattgtaaatttactcctaaaatcttaataggtcaaaccttctctatagttttatgtaatgtggatttaaattggagtctttagcatcatctgagctagttttcagaaagaatttcagtattcttttagtttgactggaatactatttgctagtgataat

SEQ ID NO: 18480 - DNA, 600 bp, Chicken  19866894227392_4
aattaaaactctgctgcataatgaggttgctaggaggtttttcttactgaaagaagggggatatcagcagtaatatcctcactgttgtgttgtgaggcctctcagacagcataggtagtagtaaarctgctggtaaacctactgcaaagttggaaatacttctcaagtgcagtcactttgtgtttagttggcrttttctgaccacttcacttcagataacaggattgtttttgagggtagatgtaggatagcagtatgccttgtttccttccctctctagygcaagttacttactaatawtgcttgaaaagcactgtaaaatcaacatgaaataaaatgtgactatggcttgaagaagttggtagtgtgtaggtagggatctggaaaacctgtgtgcttgtggcctcagcctttgaactggtattgtaaatttactcctaaaatcttaataggtcaaaccttctctatagttttatgtaatgtggatttaaattggagtctttagcatcatctgagctagttttcagaaagaatttcagtattcttttagtttgactggaatactatttgctagtgataataaatagttgtgactgatct

SEQ ID NO: 18481 - DNA, 600 bp, Chicken  19866894227395_1
tcccttctgcccttattcccttcctctgcctttgaagcctatgttgattaagaaagagatatctgtaacacgatatgtttgcactgatcctacagattgctgttaacaagcagtccatcacagatgtggcttctattaagttttattactttcaggatgttaattttggtacaggcttattttactgaatttgtgcacaaatgctatccatcatggtaaaaaaaaaacaacaaacaaacaggggtgggaaggagaaaataaaagtgagttaaaacaaccctgacagaacagtactgattwaggtatctacacatccagcattaatctatcytgttcttgacaattatttatacagggtctaattgaagcagactyggtgcacaagccttgtcaagacactaatccatgtcactctactcatattatgcaggtatgcagaaatagaaacaatattgtgtacgactatagaaatttatattctgaatgcaatgtgctacgtgagaaataagtaaaacttygtaatcagaaagaatacccagtatataacatgtaaagaaaaatgtagcgccaccagtctacagcagtgttagagcactttat

SEQ ID NO: 18482 - DNA, 600 bp, Chicken  19866894227395_2
ttgaagcctatgttgattaagaaagagatatctgtaacacgatatgtttgcactgatcctacagattgctgttaacaagcagtccatcacagatgtggcttctattaagttttattactttcaggatgttaattttggtacaggcttattttactgaatttgtgcacaaatgctatccatcatggtaaaaaaaaaacaacaaacaaacaggggtgggaaggagaaaataaaagtgagttaaaacaaccctgacagaacagtactgattwaggtatctacacatccagcattaatctatcytgttcttgacaattatttatacagggtctaattgaagcagactyggtgcacaagccttgtcaagacactaatccatgtcactctactcatattatgcaggtatgcagaaatagaaacaatattgtgtacgactatagaaatttatattctgaatgcaatgtgctacgtgagaaataagtaaaacttygtaatcagaaagaatacccagtatataacatgtaaagaaaaatgtagcgccaccagtctacagcagtgttagagcactttatatgtcaagaatttaagttaaaaacatgtaag

SEQ ID NO: 18483 - DNA, 600 bp, Chicken  19866894227395_3
tgtttgcactgatcctacagattgctgttaacaagcagtccatcacagatgtggcttctattaagttttattactttcaggatgttaattttggtacaggcttattttactgaatttgtgcacaaatgctatccatcatggtaaaaaaaaaacaacaaacaaacaggggtgggaaggagaaaataaaagtgagttaaaacaaccctgacagaacagtactgattwaggtatctacacatccagcattaatctatcytgttcttgacaattatttatacagggtctaattgaagcagactyggtgcacaagccttgtcaagacactaatccatgtcactctactcatattatgcaggtatgcagaaatagaaacaatattgtgtacgactatagaaatttatattctgaatgcaatgtgctacgtgagaaataagtaaaacttygtaatcagaaagaatacccagtatataacatgtaaagaaaaatgtagcgccaccagtctacagcagtgttagagcactttatatgtcaagaatttaagttaaaaacatgtaagtatgaaatttaaatgcaccatgattcaaaaagtgaaacactgaa

SEQ ID NO: 18484 - DNA, 600 bp, Chicken  19866894227395_4
aaaaaaaaacaacaaacaaacaggggtgggaaggagaaaataaaagtgagttaaaacaaccctgacagaacagtactgattwaggtatctacacatccagcattaatctatcytgttcttgacaattatttatacagggtctaattgaagcagactyggtgcacaagccttgtcaagacactaatccatgtcactctactcatattatgcaggtatgcagaaatagaaacaatattgtgtacgactatagaaatttatattctgaatgcaatgtgctacgtgagaaataagtaaaacttygtaatcagaaagaatacccagtatataacatgtaaagaaaaatgtagcgccaccagtctacagcagtgttagagcactttatatgtcaagaatttaagttaaaaacatgtaagtatgaaatttaaatgcaccatgattcaaaaagtgaaacactgaattcttaagaaatttcagaattttggttgtcattaaatatttattgtatttatgtattaaatagacacagtctgaccttaaatattgcataatgatttacaaataagcagggattttggtgtagcagcagggaatgtagcagca

SEQ ID NO: 18485 - DNA, 527 bp, Chicken  19866894227395_5
cactgaattcttaagaaatttcagaattttggttgtcattaaatatttattgtatttatgtattaaatagacacagtctgaccttaaatattgcataatgatttacaaataagcagggattttggtgtagcagcagggaatgtagcagcaagaaacttatcagcaggacataaacagcacaggagacaagaactagaaggtttaaagagaaagagcatttctttagtccaaacacataaacgctaccgcagagaatcagacgctatctttgtttctatcacagatcaactcacaaacccscacaattttggagccctttatttcaaggctgtctaatttgaaacatctgggaagtctgatttttcaaaaggagtgacctctaagctaaagttgcagcttcagtcagcagaagctgtgataaatatttaaatgctacataaattgtaatgtctgcaaggcaggtgatgagcctctcaagtttaccttattgagctttgtttctcgcttaaacatcccaaaaataaaag

SEQ ID NO: 18486 - DNA, 599 bp, Chicken  19866894227403_1
  misc_feature (1)..(168): n is any nucleotide
nnnnnnnnnnnnnnnnnnnnnnnnnnnnnnnnnnnnnnnnnnnnnnnnnnnnnnnnnnnnnnnnnnnnnnnnnnnnnnnnnnnnnnnnnnnnnnnnnnnnnnnnnnnnnnnnnnnnnnnnnnnnnnnnnnnnnnnnnnnnnnnnnnnnnnnnnnnnnnnnnnnnnnnncgacagtgcagcagaggccttgcagaggacagttttaactaaaaaagctgattttgtggaaaggagaaactctaatagcactcctatcaagacaaaggctcaaccccatttcctgctaagcaaagttcaccygcagtgaaagagatgtctcacactgaagcagaagcattttccattgcaatacactgcccacctatctgttttccatctcaaggctggtgaatacacgtggctgcacaggacaaggcagcaggttcagcgacatgccagccaaggctctgggagccaagagcccagggacatcttccagagaagtggcctcacctgtcataaccgcagggcacagcatacagcgggccgaggaagtccaagtgtcctcccactgtgctcggcctgcatgtgaacaccacggcatccactaggccctctga

SEQ ID NO: 18487 - DNA, 600 bp, Chicken  19866894227411_1
gctccaggccctttaccatctttgtgtccctctgctggactccttctaagagttccctgtcttttttgaactggggagcccagaactggacacagtattctaaatggggccttgtcagggcagagtagatgggaaggatcacctcccttaccccaggataactttggctttcttggccactgctggcttgtggccaaactgttgtccagcagaacacccagatccttttctgcagagctcctctccagtagtgtactgatgcatgcagttattcctccccatgtgcaagactctacactygctcttgttaaacctcatcaggttcctctctgcccattagcagtacagaagttaaaaaatttttggtgtgatctactctttgtttgaatgcttgttttatgaatgaaaaaatcaaactactgttaggaactgatggccaatttgcatttttggaagtatttaatgttttttctctgctctgccttgtgcttgggacagattaatggcaatggtataaatcctctgagaatgacgcctagtcgtagttgtacatctactctaaaattagtgtaaatatatgccagttgcagtaagagtggt

SEQ ID NO: 18488 - DNA, 600 bp, Chicken  19866894227413_1
aacttctgatgaaaaaaatgataagcaggagtacctctgaagggtgttaaaataggatgaagaactggaaatataaaagaaactctagtctacccatgcctttgaaaaattgattccagatagattaacagcctaacaaaaggaacataatattctcaaagatttttctaaaactgtttcttgtctctgatgaaaactgggtatttattttcttgatcactgagcctggaggtgtccttgtgacataggtatttaatagtttacctttgtaaagtgtctataaaatgctcccattctgawtttttttragataaattcaagattaaaaaatattgctatatgacattgtctaataagctgcataataaattaactgagatttgaaggcatttttaaatcattcytttaagtatttaaattatagttacaggctggatgactttctatgcatgtgaactctattattctgtcagactgaccagtggtcttgactgtgcagaggtcagtggtcacagttgtcctgaattaccagtccttttttcatgtggaccctctgctgtgttgcatgctgtaatcttcttaatggcttcattccaatat

SEQ ID NO: 18489 - DNA, 600 bp, Chicken  19866894227413_2
atgaaaaaaatgataagcaggagtacctctgaagggtgttaaaataggatgaagaactggaaatataaaagaaactctagtctacccatgcctttgaaaaattgattccagatagattaacagcctaacaaaaggaacataatattctcaaagatttttctaaaactgtttcttgtctctgatgaaaactgggtatttattttcttgatcactgagcctggaggtgtccttgtgacataggtatttaatagtttacctttgtaaagtgtctataaaatgctcccattctgawtttttttragataaattcaagattaaaaaatattgctatatgacattgtctaataagctgcataataaattaactgagatttgaaggcatttttaaatcattcytttaagtatttaaattatagttacaggctggatgactttctatgcatgtgaactctattattctgtcagactgaccagtggtcttgactgtgcagaggtcagtggtcacagttgtcctgaattaccagtccttttttcatgtggaccctctgctgtgttgcatgctgtaatcttcttaatggcttcattccaatattcacacat

SEQ ID NO: 18490 - DNA, 600 bp, Chicken  19866894227413_3
aaaaattgattccagatagattaacagcctaacaaaaggaacataatattctcaaagatttttctaaaactgtttcttgtctctgatgaaaactgggtatttattttcttgatcactgagcctggaggtgtccttgtgacataggtatttaatagtttacctttgtaaagtgtctataaaatgctcccattctgawtttttttragataaattcaagattaaaaaatattgctatatgacattgtctaataagctgcataataaattaactgagatttgaaggcatttttaaatcattcytttaagtatttaaattatagttacaggctggatgactttctatgcatgtgaactctattattctgtcagactgaccagtggtcttgactgtgcagaggtcagtggtcacagttgtcctgaattaccagtccttttttcatgtggaccctctgctgtgttgcatgctgtaatcttcttaatggcttcattccaatattcacacataatattttagatttattgactgttagaaatactaccatgccagtagcagttccgctactcctaaggtatttaaaattggaaaaataaatcagtgca

SEQ ID NO: 18491 - DNA, 599 bp, Chicken  19866894227414_1
  misc_feature (1)..(120): n is any nucleotide
nnnnnnnnnnnnnnnnnnnnnnnnnnnnnnnnnnnnnnnnnnnnnnnnnnnnnnnnnnnnnnnnnnnnnnnnnnnnnnnnnnnnnnnnnnnnnnnnnnnnnnnnnnnnnnnnnnnnnnnncttctttttcacatagagcttttgactttagcagagggagctgctgcctctggcgctgggatgaaaacagggcctgtggtgacggctgccagcggctgcggtggtgtcacacagcagctctgtggggttgggatgctgcaggtcctgcgcaccaccgtggcagtggctgtccccaggccrggccccacactttcaggctgagaggcaccaaagaccacgacctgcagccagaggctgccagcctgcagtgatgctgggcaggagggacygccgtcccctttgttctgctcctgatagtggtggaggagtgacagatggagtggggagcagtggggaaatgctgacggatgggcttgaggagctcttctgctctggtgcctctccctttcccctccgacacccatgtttttgcatagctctgtgcttaatcccaacagcaacacgaatccaccctgcaggacctcacgtatttggttttt

SEQ ID NO: 18492 - DNA, 599 bp, Chicken  19866894227414_2
  misc_feature (1)..(31): n is any nucleotide
nnnnnnnnnnnnnnnnnnnnnnnnnnnnnnncttctttttcacatagagcttttgactttagcagagggagctgctgcctctggcgctgggatgaaaacagggcctgtggtgacggctgccagcggctgcggtggtgtcacacagcagctctgtggggttgggatgctgcaggtcctgcgcaccaccgtggcagtggctgtccccaggccrggccccacactttcaggctgagaggcaccaaagaccacgacctgcagccagaggctgccagcctgcagtgatgctgggcaggagggacygccgtcccctttgttctgctcctgatagtggtggaggagtgacagatggagtggggagcagtggggaaatgctgacggatgggcttgaggagctcttctgctctggtgcctctccctttcccctccgacacccatgtttttgcatagctctgtgcttaatcccaacagcaacacgaatccaccctgcaggacctcacgtatttggtttttgctttctcttgtctctgtctgttgcactgctttgtgttctgaacctcaccagacagggacagccacgtgtcacatttggggacactgct

SEQ ID NO: 18493 - DNA, 600 bp, Chicken  19866894227424_1
aactcccctacagatgtgactctgccttcttaatgttcactgaagcagctgaagaaatgctttgtgctatagactgggactgctagctgatattgctacataggctgcagggaagtatgcaccgtattctggtatttaccaaatgtagtagaaaaagtatctacagcttcatgtacttataaacgatctcacgatcttagaaaaggcgtcggggagaagacttgataggaagaagagatttatggataactgcgtttcaccctagacaagaatttgcaagatgatgaggtagcagaaaaygcaattctgtggagagctgtttcccttcagcagagaccgtgcagtcaggaggcagagaaaaaacaggcggtgtggatgcagctctgatctggcctcacctgcacagcaggacaaccgccagtgttggaggctggcagatctcagcatccgccccatctctagtctggataaccaaggaatagaaagacagaaacaagctggagggtgttcacagagagcagagaaagtattacaggctgagaggaattgagttatagggcaagattataaggaaaatgaaatattgctctcggccagatc

SEQ ID NO: 18494 - DNA, 600 bp, Chicken  19866894227424_2
ttcagcagagaccgtgcagtcaggaggcagagaaaaaacaggcggtgtggatgcagctctgatctggcctcacctgcacagcaggacaaccgccagtgttggaggctggcagatctcagcatccgccccatctctagtctggataaccaaggaatagaaagacagaaacaagctggagggtgttcacagagagcagagaaagtattacaggctgagaggaattgagttatagggcaagattataaggaaaatgaaatattgctctcggccagatctgtgcctagagcaaagctttgcacrtgcagagttgtactgatttataytagagaagattctagcttctgacatccttgttcactttgcgcagaacatttcatttattggatttctatatggaagtcagaggaaatgagtgcttcttactaaaatcaaaagatgttaggagagcatcagcagaaggaggtccttttggtttctgtactacataaagctgtcggcagtagcagcgatttctgcagaaattaagaaggaaaaagccatgcaaagtgctctcaaacactgagaactgttgaaggcctcaaactcaggaatgttacgttg

SEQ ID NO: 18495 - DNA, 600 bp, Chicken  19866894227424_3
gaggcagagaaaaaacaggcggtgtggatgcagctctgatctggcctcacctgcacagcaggacaaccgccagtgttggaggctggcagatctcagcatccgccccatctctagtctggataaccaaggaatagaaagacagaaacaagctggagggtgttcacagagagcagagaaagtattacaggctgagaggaattgagttatagggcaagattataaggaaaatgaaatattgctctcggccagatctgtgcctagagcaaagctttgcacrtgcagagttgtactgatttataytagagaagattctagcttctgacatccttgttcactttgcgcagaacatttcatttattggatttctatatggaagtcagaggaaatgagtgcttcttactaaaatcaaaagatgttaggagagcatcagcagaaggaggtccttttggtttctgtactacataaagctgtcggcagtagcagcgatttctgcagaaattaagaaggaaaaagccatgcaaagtgctctcaaacactgagaactgttgaaggcctcaaactcaggaatgttacgttgtctaccaaaacactttccgtgac

SEQ ID NO: 18496 - DNA, 600 bp, Chicken  19866894227429_1
ctcatctccagcattttaaagaccacttctgcaggtgtatcctttgcagagactgtaagagactcaagtgaagttggtggcaatgtctaaagtaaaactttttaggaatcctaaggccaatctgcctggttgattactgcattttagaaaagaagattaaaagatgagagagaattttaagcttgctgatggtggaggtgtgctagggataattctacctcttctaccataggaagggtcagaaaatgattctctgaagagtaaataatggcccactaattaacaaagttaccagaaggkaatattggctctacacatgatcaccaaaaatcagaccatttgtctaagagttttgcccwgatgcttccagaattctggcaagctcggtgtcatgatcactgccctggggtgacaaacctcctgatagtaaacctgatcatcccccgtctcagcttcatgccattcaattgggttctatcattggtcagtagagagcagagctcagcactgcccctctgctccatgtgaggagctacagctgccatgaggcctcctttcaactcctctgctctgggctgagtaaaccaggtgacttcagct

SEQ ID NO: 18497 - DNA, 600 bp, Chicken  19866894227429_2
agactcaagtgaagttggtggcaatgtctaaagtaaaactttttaggaatcctaaggccaatctgcctggttgattactgcattttagaaaagaagattaaaagatgagagagaattttaagcttgctgatggtggaggtgtgctagggataattctacctcttctaccataggaagggtcagaaaatgattctctgaagagtaaataatggcccactaattaacaaagttaccagaaggkaatattggctctacacatgatcaccaaaaatcagaccatttgtctaagagttttgcccwgatgcttccagaattctggcaagctcggtgtcatgatcactgccctggggtgacaaacctcctgatagtaaacctgatcatcccccgtctcagcttcatgccattcaattgggttctatcattggtcagtagagagcagagctcagcactgcccctctgctccatgtgaggagctacagctgccatgaggcctcctttcaactcctctgctctgggctgagtaaaccaggtgacttcagctgctcttcatgtgttttcccctctagaagagataacaattgctgctgggacaggttttcc

SEQ ID NO: 18498 - DNA, 600 bp, Chicken  19866894227430_1
ctgacaaatgacaaagctctttcagttatagacaaagttgagtttacatgtcagggattgaattcatatcacaccaagcagagcaagcataaatggaatttataacagaaatagagtgaggacttaggtatgatgaatacattcactcaggaggctctgattatgtaatgaagaaggatgggactatctttgagaacactggtcttctggggtcatgctatggttctatgattctatgaagctgtcccagtacacagactctaaaggcagtcccaaacatactttgcaaagctctgctayttgtgtaccagagaaataccatataagcgtatttcatctcaagggcattttgtcatgtgtrataaatttgaagaagttttgtgaaaagatcttgggataatccttagactaacaggaaaatccttcacccaggctagatgctgcaagagagtctttcttaatgagtattatggacctgtggaccacttagaggtcaagaaacaaagaaggaagagctctgcccttgttgggacaaaaggtgagtacaagtacactctcttcaataacctcagttttcctacctatgaattaggaaaggaa

SEQ ID NO: 18499 - DNA, 600 bp, Chicken  19866894227430_2
attcatatcacaccaagcagagcaagcataaatggaatttataacagaaatagagtgaggacttaggtatgatgaatacattcactcaggaggctctgattatgtaatgaagaaggatgggactatctttgagaacactggtcttctggggtcatgctatggttctatgattctatgaagctgtcccagtacacagactctaaaggcagtcccaaacatactttgcaaagctctgctayttgtgtaccagagaaataccatataagcgtatttcatctcaagggcattttgtcatgtgtrataaatttgaagaagttttgtgaaaagatcttgggataatccttagactaacaggaaaatccttcacccaggctagatgctgcaagagagtctttcttaatgagtattatggacctgtggaccacttagaggtcaagaaacaaagaaggaagagctctgcccttgttgggacaaaaggtgagtacaagtacactctcttcaataacctcagttttcctacctatgaattaggaaaggaagtgtgctgtctatggatccagtgaactataataacaagtttgtaaatccacagctttattt

SEQ ID NO: 18500 - DNA, 553 bp, Chicken  19866894227434_1
tgagacagtgtgcttagatggagaaacaggcgatggactgacaaaaattgtcccttgtttctgtgcatcagtttactcactgcattaaaactgcctgtatttgacccaaactaacctgttctgccagctgaagctgctgcctggactcacttaattctcctttcagcatctctagttcattctttttttctagaaaaatagttggtgaaagacattttcaatctatgtagcaattgaacagatcaatacaatgggaaaggcgatacaacacagatgcgatgacagaaggaccagcacaayagaaaggtgctacaaaggaagggaagaaggttgctcacccatatcagaagactctaggtttgcagggaaagcttcaccaaggagggatctccagaaagagacctttccctagtggcagtcagcccttaaatgaggcctaagagaggtgcagtcaggctccaaccccttcctgtcacagaggtgaattgccttcacttgtgctcccaaggctgaccaggtctttccccaagtgctccaccaggttcaggctggg

SEQ ID NO: 18501 - DNA, 600 bp, Chicken  19866894227439_1
gtagatagtaaatggaactactggctgctgtgtagagctaggagacatcaggtgcaactagcaggttggctcgacatttaaaaggagattattcatctcactacatgagattgagcttcaaagctccatgccatagggtggtgtggatgctgaaagattatatgggttcaaaactagttgggtaaaggtcatggaaaaagaaatctgtttgggattaaatacaaagatctggcctctagttgaagccacagactggaagaagggaagctgttgcgtggtgatattgccacacacttgtcstcttttaagctcttccttaaacatctgacattaatccctgtcagaagcaaactaaggggctagaactgttcctggtagattcccctgcagctattcccatgtttgtatgccatgggcttttcaatgcgtatgaattttgtcctttttctgtagtgagttgagaagacaacatgtctaaagacaatgctgcaaataagtattctcttggtgcaacacagtaagtatcttttgcagctctaaytctctgtatcacctgctcctccatgtggcttctgccatcttttttctgtatagtctggt

SEQ ID NO: 18502 - DNA, 600 bp, Chicken  19866894227439_2
gaagccacagactggaagaagggaagctgttgcgtggtgatattgccacacacttgtcstcttttaagctcttccttaaacatctgacattaatccctgtcagaagcaaactaaggggctagaactgttcctggtagattcccctgcagctattcccatgtttgtatgccatgggcttttcaatgcgtatgaattttgtcctttttctgtagtgagttgagaagacaacatgtctaaagacaatgctgcaaataagtattctcttggtgcaacacagtaagtatcttttgcagctctaaytctctgtatcacctgctcctccatgtggcttctgccatcttttttctgtatagtctggtttatgcttacttcacatttttagtaaacctttccaaacagacatagggatggaaaggagcttataatacaacatgaattctgtagagagtggtggcggtattcagacttgcctagagaagcatttagcttccctggagtgagctggtaacagccttcacagactgttttattaacttaattggatgagaaagaagtgcaaaggtaagggtttttttttcctcaattgaaggatttcatttt

SEQ ID NO: 18503 - DNA, 600 bp, Chicken  19866894227440_1
cacaaaggcagccctgctgtacaattaatcagctgtgtgcttgcaatcaaaaaagcatggtacagcaaccaaacatatacaggcttgtccacaagaagactcagcaaggtcatgtgtcagagtgaatatcaggaatgaatggacatgttgaatggattttaaatgaattgctttctcttctctgacaagcttttcaccacatgtccagaaagaaaaagatttcagacttaatggttaaacagacataatggaaaacaaagatgttaatactggaatgcacagcacttagtacagtggggkttttttttgtaacagtctgaagattgcaagcccaaagcagatactgaattgatttacattatattagattctggtttcctgcatttaaaaataagagatgcttggattcaattacttctttaaagcatgcacacgcccacatctgcattcacagaaagaaaattacttatccatttttaggaaaaaatgctgcttaaaatgaataagcaatagaaagatgagcagaaaaagcacggttgttggtatccacaaatggacygggagcactccagcrtgccarcccagaccagggatgcaagt

SEQ ID NO: 18504 - DNA, 600 bp, Chicken  19866894227440_2
gatgttaatactggaatgcacagcacttagtacagtggggkttttttttgtaacagtctgaagattgcaagcccaaagcagatactgaattgatttacattatattagattctggtttcctgcatttaaaaataagagatgcttggattcaattacttctttaaagcatgcacacgcccacatctgcattcacagaaagaaaattacttatccatttttaggaaaaaatgctgcttaaaatgaataagcaatagaaagatgagcagaaaaagcacggttgttggtatccacaaatggacygggagcactccagcrtgccarcccagaccagggatgcaagtgcaagtacagtgccttgggggaccctctctgagataccctgcagtaagggaaggggattttgtcatctgctcctccatctctgctctgtgccagacatccttgtagaagcttgtcacaaggagggtcrtgctggcccttcaccatgcagcgcacgttgggaggggaaggaaaaatcatctctaccatctacgtttcagcacgcataatttgctcattctgtaaaagcctgcagtgagatttccatcctttaaaacgtta

SEQ ID NO: 18505 - DNA, 600 bp, Chicken  19866894227440_3
atgcacagcacttagtacagtggggkttttttttgtaacagtctgaagattgcaagcccaaagcagatactgaattgatttacattatattagattctggtttcctgcatttaaaaataagagatgcttggattcaattacttctttaaagcatgcacacgcccacatctgcattcacagaaagaaaattacttatccatttttaggaaaaaatgctgcttaaaatgaataagcaatagaaagatgagcagaaaaagcacggttgttggtatccacaaatggacygggagcactccagcrtgccarcccagaccagggatgcaagtgcaagtacagtgccttgggggaccctctctgagataccctgcagtaagggaaggggattttgtcatctgctcctccatctctgctctgtgccagacatccttgtagaagcttgtcacaaggagggtcrtgctggcccttcaccatgcagcgcacgttgggaggggaaggaaaaatcatctctaccatctacgtttcagcacgcataatttgctcattctgtaaaagcctgcagtgagatttccatcctttaaaacgttagtcagagaccacagc

SEQ ID NO: 18506 - DNA, 600 bp, Chicken  19866894227440_4
agcacttagtacagtggggkttttttttgtaacagtctgaagattgcaagcccaaagcagatactgaattgatttacattatattagattctggtttcctgcatttaaaaataagagatgcttggattcaattacttctttaaagcatgcacacgcccacatctgcattcacagaaagaaaattacttatccatttttaggaaaaaatgctgcttaaaatgaataagcaatagaaagatgagcagaaaaagcacggttgttggtatccacaaatggacygggagcactccagcrtgccarcccagaccagggatgcaagtgcaagtacagtgccttgggggaccctctctgagataccctgcagtaagggaaggggattttgtcatctgctcctccatctctgctctgtgccagacatccttgtagaagcttgtcacaaggagggtcrtgctggcccttcaccatgcagcgcacgttgggaggggaaggaaaaatcatctctaccatctacgtttcagcacgcataatttgctcattctgtaaaagcctgcagtgagatttccatcctttaaaacgttagtcagagaccacagctttctc

SEQ ID NO: 18507 - DNA, 520 bp, Chicken  19866894227440_5
gcacacgcccacatctgcattcacagaaagaaaattacttatccatttttaggaaaaaatgctgcttaaaatgaataagcaatagaaagatgagcagaaaaagcacggttgttggtatccacaaatggacygggagcactccagcrtgccarcccagaccagggatgcaagtgcaagtacagtgccttgggggaccctctctgagataccctgcagtaagggaaggggattttgtcatctgctcctccatctctgctctgtgccagacatccttgtagaagcttgtcacaaggagggtcrtgctggcccttcaccatgcagcgcacgttgggaggggaaggaaaaatcatctctaccatctacgtttcagcacgcataatttgctcattctgtaaaagcctgcagtgagatttccatcctttaaaacgttagtcagagaccacagctttctcttgtattcatggagacccatggctcacattcaaacctacattgtttcaatcaaactatcaacttcact

SEQ ID NO: 18508 - DNA, 599 bp, Chicken  19866894227442_1
  misc_feature (1)..(101): n is any nucleotide
nnnnnnnnnnnnnnnnnnnnnnnnnnnnnnnnnnnnnnnnnnnnnnnnnnnnnnnnnnnnnnnnnnnnnnnnnnnnnnnnnnnnnnnnnnnnnnnnnnnnnccctcccctcgctgtctctttggcctgggagaggcagaaaactccatttttgtggtcggagggaaagagctgaaggagggagagaagaccttggattcggtgctgtgctacgaccgcctgtaagtgtctgggtgcaggtgtggggcaggaggtggtcagcaggggaacatggggcagccgccgtgcaaagtgaatccarctccccagcaaatcaatggagcataatagtgacagggctygagctctgcacacagaccctgggactcaggctgtgctgtggggctctgagctgctctctccagcagcatcgcttgttgtaactgaagctcccaaggtggaaatcgaaatgggggtattaaattacaaaggagtgatctcgrcagatgctcacgtgggacctgttcagaggagaaaggggaggaaaagcttttccttctgctgctgcccgttggtttgaggtctcacggggagtgcctttggacaggaaagtttgttttg

SEQ ID NO: 18509 - DNA, 599 bp, Chicken  19866894227442_2
  misc_feature (1)..(61): n is any nucleotide
nnnnnnnnnnnnnnnnnnnnnnnnnnnnnnnnnnnnnnnnnnnnnnnnnnnnnnnnnnnnnccctcccctcgctgtctctttggcctgggagaggcagaaaactccatttttgtggtcggagggaaagagctgaaggagggagagaagaccttggattcggtgctgtgctacgaccgcctgtaagtgtctgggtgcaggtgtggggcaggaggtggtcagcaggggaacatggggcagccgccgtgcaaagtgaatccarctccccagcaaatcaatggagcataatagtgacagggctygagctctgcacacagaccctgggactcaggctgtgctgtggggctctgagctgctctctccagcagcatcgcttgttgtaactgaagctcccaaggtggaaatcgaaatgggggtattaaattacaaaggagtgatctcgrcagatgctcacgtgggacctgttcagaggagaaaggggaggaaaagcttttccttctgctgctgcccgttggtttgaggtctcacggggagtgcctttggacaggaaagtttgttttgaaagtattcagctgtggcactgaatggcccaccctgatgg
